United States Patent Application Publication US 2018/0126003 A1 - sequence listing, part 42

SEQ ID NO: 70310 - DNA, 3300 bp, Artificial Sequence
  derived and/or modified sequence
atgcagagcctgggcgtgagcggcaaccggaaggtgatgcagagcggcacctgcgagccctttcagagtcttagccaccagcgcaacgatgaggaggctgtggtagaccgcggaggcacacgatctatactgaagacccatttcgagaaagaggatctagagggtcaccgtacactgttcatcggggtgcatgtgccgctcggagggagaaagagccatcggcgtcatcgtcacagaggtcataagcaccgtaaacgcgatagggaacgagatagcggactggaagatgggcgggagtccccttcttttgatacgccatcccagcgtgtgcaatttattctcggcactgaagacgacgacgaagaacacattccacatgacctcttcaccgagcttgatgaaatttgttggcgcgagggggaagacgctgaatggagggagacagccaggtggctcaaatttgaggaagacgtggaagatggcggtgaacgctggagtaaaccatacgtggcaacactatctctgcattcgctgttcgaactcaggagctgtatccttaatggcactgtcctcctggatatgcatgcgaatacgcttgaggagatcgctgacatggtgcttgatcagcaggttagctcaggacagctgaatgaagacgtgcgtcaccgtgtgcatgaagccctgatgaagcaacaccatcatcagaatcagaaaaaactcactaatagaattcccattgttcgtagtttcgctgatatcggaaaaaagcagtccgagccgaatagcatggacaagaatgctggacaagtggtaagcccacagtctgcccccgcctgtgttgagaataagaatgacgtgtcgagggaaaacagtactgtggatttttcaaaagtagatttacatttcatgaaaaagattccccctggggccgaggcttccaacatccttgttggggagctggaattcctggataggacagtggtcgcctttgttcgactctctcccgctgtgttgctgcaggggctggccgaggtgccaatcccaactcgctttctgttcatcctcctgggcccgctgggcaaaggccagcagtatcacgaaattgggcgttccattgctactttaatgacggatgaggtttttcatgacgtggcttacaaggccaaggatcggaatgaccttgtcagtggtatcgacgaatttctcgatcaggtgaccgtcctccccccaggggaatgggaccccagcatcagaatagagccccccaaaaacgtgccatctcaggaaaaaaggaagatcccggccgtacccaacgggactgcggcgcacggggaagcagaaccacacggaggtcactcgggccctgagctccaacggaccggccggatcttcggtggtctgatcttagacattaaacgcaaggccccatatttctggtccgactttagggatgccttcagcctccagtgtcttgccagttttttattcctctattgtgcttgtatgtccccagtgatcacctttggcggtcttctcggcgaggccaccgaggggcggatttcggctattgagtcactttttggagctagcatgaccggcatcgcctattccctttttggtggtcaaccacttacaatcctaggcagcacggggcccgtgctcgtgttcgagaagatactgtttaaattctgtaaagaatacggccttagttacttaagcctccgagcaagtattggtctgtggacagctaccctgtgtattatccttgttgcaacagacgcaagtagtctggtgtgctacatcactcggttcacagaggaggcttttgctagtcttatttgcatcatattcatatacgaggctctagagaaactgttcgaactctctgaggcttacccgattaatatgcataacgatctcgagttgcttacacagtatagctgtaactgtgtagagccgcacaacccttctaacgggacactcaaagagtggagagagagtaatatcagcgcctctgatatcatttgggaaaatttgactgtatcagagtgtaaaagtctgcatggcgagtatgtgggtcgggcctgtgggcatgaccacccttacgttcccgatgtccttttttggtcagtcatcttgtttttctccaccgtgacattgtcagcaacccttaagcagtttaagacaagcaggtactttcccactaaggtcaggtccattgtgtcagactttgctgttttcctcacaatcctgtgtatggttctgatcgactacgcaattggaatcccctctcccaaactgcaggtgccctcagttttcaagcctactcgggatgacagagggtggttcgtgacccccctcggccccaacccatggtggacagtgattgcagctattatccccgcactcctttgtacaatcctcatctttatggatcagcagattaccgctgtcatcatcaatcgtaaggagcacaagcttaagaaagggtgtggatatcatctggatctgctcatggtggccgtgatgctgggagtttgttcaattatgggacttccttggttcgtggccgcaactgtgctgtccatcacacacgtaaacagtcttaagttggaatctgagtgctcagctccaggcgaacagccaaagttcttaggcatacgtgaacagagggtgactggactgatgatttttatattgatggggtctagtgtgtttatgacttcgatactgaagttcattccaatgcctgtgctctacggcgtattcctgtacatgggtgcctccagcctaaagggcattcagttctttgatcgcattaagcttttctggatgccggcaaaacatcaaccagactttatatatctgaggcacgtccccctgcgcaaggtgcatctctttacgatcatccagatgagttgtctgggccttctctggatcatcaaagtatccagagccgctatagtgtttccaatgatggtcctggccctcgtctttgttcgcaaactaatggacttattgttcaccaaaagagagctgagctggttggatgacctgatgccggaatctaaaaagaagaagctggaagacgctgaaaaggaggaggagcagtcaatgctggctatggaagatgaggggacagtgcaactgcctctagagggccactatcgagatgatccctcggttataaatatcagcgacgaaatgtctaagaccgcgctgtggaggaatctgctgatcactgccgacaattctaaggacaaagaaagctctttccctagcaaaagcagcccctcctag

SEQ ID NO: 70311 - DNA, 3300 bp, Artificial Sequence
  derived and/or modified sequence
atgcagagtctgggagtgtctggaaaccgtaaggtcatgcagagcggcacatgcgaaccctttcaatctctgagccaccagagaaatgatgaggaggcagtggttgacagaggaggaacgcgctcgattttaaaaacacatttcgagaaagaggacctggagggccatagaactttgttcattggagtgcacgtgcctcttgggggacgcaaatcgcaccgtcggcataggcatagagggcataagcacagaaaaagggaccgagagagggactccggcttagaagacggtagggaatcaccatctttcgacaccccctcccagcgcgttcagttcatcctagggacggaggacgacgatgaagagcacatcccgcacgacctgtttactgagctggatgagatatgctggagggaaggagaagatgctgaatggcgtgagacagcgagatggctcaagtttgaggaagacgtggaggatgggggagagaggtggtcaaagccctacgtggccaccttatcgttgcattcactgttcgagttgcgcagctgcatccttaacggaacggtgcttttagacatgcacgctaacacacttgaagagattgccgacatggtgctggaccagcaggtttcatccggacagcttaatgaggatgtcagacatcgggtgcacgaagcccttatgaaacagcatcaccatcaaaatcagaagaaactgactaacagaatcccaattgtccggagctttgccgatatcggaaagaagcaaagcgaacccaactccatggacaagaacgccggtcaagtggtgtctccgcagagtgcaccagcatgtgtcgagaataaaaatgatgtctctcgcgaaaatagcacagtggactttagcaaagttgacctccacttcatgaagaagatccccccaggtgccgaggcctcaaatattctcgtgggcgaacttgagttccttgatcgaactgtggttgctttcgtgagactatcccctgcagtgctgctgcagggactcgctgaagttcccattcccaccaggtttctctttatcctgttaggaccactgggcaagggacagcagtaccacgaaattggcaggagtatagccactctgatgaccgacgaagtctttcatgatgtggcttataaagccaaggaccgcaatgatctggtatctgggatcgatgagtttttagaccaggtgactgtgctccctcctggtgagtgggatcccagcatccgcatcgagccgccaaaaaatgtccccagccaggaaaaaagaaagattccagccgtgccgaacggcaccgccgctcacggtgaagctgagccacatggagggcacagcggacccgaactgcagcggacgggcagaattttcgggggattgattctcgacattaaaaggaaagcaccatatttttggagtgacttccgggacgccttctcgctgcagtgtttggccagctttctgtttctgtactgtgcctgtatgtctcctgtgatcactttcgggggactacttggggaagccacagaagggagaatcagcgcaattgaatcgttgtttggagcttccatgactggcattgcgtacagccttttcggcggacagccccttacaattctgggctctacaggcccagtgttggtctttgagaagatactgttcaaattctgcaaagaatatggcctgtcctacctctccttacgcgcatcaatcggcctgtggacggcaactctctgcattattctggtcgcaaccgacgcctcttcacttgtgtgttacattacccgcttcaccgaagaggctttcgcctctttgatctgcattatttttatttatgaggccctcgaaaagttgttcgaactcagcgaggcttatccaatcaacatgcacaatgacctcgagctgcttacccagtacagctgcaattgtgttgagccccacaacccaagcaatggcactctgaaggagtggagggagagcaatataagcgcttctgacatcatctgggaaaaccttaccgtgtccgagtgtaaatctctgcacggcgaatacgtgggtagggcctgtggccacgatcacccctacgtgcctgatgttcttttctggagcgttatcctctttttttctacagtgacactgtcggcgacgctcaaacagtttaaaacctctaggtacttccctacaaaggtacgctcaattgtgagcgattttgccgtattccttactatcctgtgtatggtgctgatcgattacgccattgggataccttctccgaaactccaggtaccatccgtgttcaaaccaactagggatgaccgcggttggttcgtcacacctctgggacccaacccttggtggaccgtgattgctgcgattataccagccctcctttgtaccattttgatcttcatggatcagcaaataactgcagtgatcatcaacagaaaggaacataaactgaagaaaggctgcggctaccatttagacctgcttatggtggctgtaatgctcggcgtatgttcgattatgggtcttccttggtttgtggccgcaacagtcctgtccattactcacgtgaatagtctgaagcttgagtcggaatgctccgcgccaggcgagcagccaaagttcttgggaataagagaacagagggtcactgggttgatgatatttattttgatgggatcttctgttttcatgacatccatcctgaagttcatccctatgcccgtactttacggagtcttcttgtacatgggagcatcatctctcaagggtatccaattttttgaccggattaagctgttctggatgccagcgaagcaccagccagatttcatctatctgcgacatgtccccctcaggaaggtgcatttgtttacaattatccaaatgagctgcctcggtttgctctggattatcaaggtcagccgtgccgcaatcgtgttcccaatgatggtcctcgcactggtgtttgtgagaaaacttatggatttactttttactaagcgggaattatcttggcttgatgatctcatgcctgaatctaagaaaaagaagctggaggatgcggagaaggaggaggaacaatccatgctggcgatggaggacgaagggacggttcagttgcctttggaggggcactatcgcgatgaccccagcgtgattaatatttccgacgaaatgagtaagacagcactgtggaggaacttgctgataacagctgataatagcaaggacaaggagtcgtcgttcccgtctaaaagcagcccttcctag

SEQ ID NO: 70312 - protein, 148 aa, Artificial Sequence
  derived and/or modified sequence
MERWGKGLHGLEERGDSVPIPKHRAGRRGGVGKRGVRGRELGGQGKYGAGCSECGTRRIAARGEAEFEKAAEEVRHLKTKPSDEEMLFIYGHYKQATVGDINTERPGMLDFTGKAKWDAWNELKGTSKEDAMKAYINKVEELKKKYGI

SEQ ID NO: 70313 - DNA, 447 bp, Artificial Sequence
  derived and/or modified sequence
atggagagatggggcaagggcctgcacggcctggaggagagaggcgacagcgtgcccatccccaagcacagagccggcagaagaggcggcgtgggcaagagaggcgtgagaggcagagagctgggcggccagggcaagtacggcgccggctgcagcgagtgcggcaccagaagaatcgccgccagaggcgaggccgagttcgagaaggccgccgaggaggtgagacacctgaagaccaagcccagcgacgaggagatgctgttcatctacggccactacaagcaggccaccgtgggcgacatcaacaccgagagacccggcatgctggacttcaccggcaaggccaagtgggacgcctggaacgagctgaagggcaccagcaaggaggacgccatgaaggcctacatcaacaaggtggaggagctgaagaagaagtacggcatctag

SEQ ID NO: 70314 - DNA, 753 bp, Artificial Sequence
  derived and/or modified sequence
tgcccaccccgcaactgccggaaagttgcccatggggtggacttcgctgtgtagcgggagaggggtgggagtcgagggtgcttgatggagagatgggggaaggggttgcacggattggaggagcgaggagactcagtccccatcccgaagcacagggcaggacgtcgcggcggagtggggaagcgaggagtccgtggccgagagcttggaggtcaggggaagtacggggccggctgctcagagtgcgggacgaggagaatcgcggcccggggagaggctgagtttgagaaagctgcagaggaggttaggcaccttaagaccaagccatcggatgaggagatgctgttcatctatggccactacaaacaagcaactgtgggcgacataaatacagaacggcccgggatgttggacttcacgggcaaggccaagtgggatgcctggaatgagctgaaagggacttccaaggaagatgccatgaaagcttacatcaacaaagtagaagagctaaagaaaaaatacgggatatgagagactggatttggttactgtgccatgtgtttatcctaaactgagacaatgccttgtttttttctaataccgtggatggtgggaattcgggaaaataaccagttaaaccagctactcaaggctgctcaccatacggctctaacagattaggggctaaaacgattactgactttccttgagtagtttttatctgaaatcaattaaaagtgtatttgttacttt

SEQ ID NO: 70315 - DNA, 447 bp, Artificial Sequence
  derived and/or modified sequence
atggagagatggggcaagggactgcacggcctcgaagagcgtggagatagtgtacctattccaaaacatcgcgcaggcaggagaggcggcgtcggcaagcggggagtgagggggcgagagctgggaggacaggggaagtacggagcaggttgttctgagtgcgggaccaggcgtattgccgcccggggcgaggcagagtttgagaaggccgcagaggaggtccggcatctgaaaactaaacccagtgatgaagagatgctatttatttacggacactataagcaggctacagtcggagacatcaacaccgaacgtccaggaatgctggacttcaccggcaaggcaaagtgggatgcctggaatgaactgaaaggaacatcaaaagaggatgcaatgaaagcgtatataaataaggtcgaggaactgaaaaaaaagtacggtatttag

SEQ ID NO: 70316 - DNA, 447 bp, Artificial Sequence
  derived and/or modified sequence
atggagcgctggggcaagggcctgcacggcctggaggagcggggggacagcgtgcccatccccaagcacagagctggaagaagaggaggagtgggcaagaggggcgtgcggggccgggagctgggcggccagggcaagtatggagctggctgcagtgaatgtggcaccaggagaattgctgcccggggggaggccgagtttgagaaggctgctgaggaggtgcgccacctgaagaccaagcccagtgatgaggagatgctgttcatctacggccactacaagcaggccaccgtgggggacatcaacacagagcggcccggcatgctggacttcaccgggaaggccaagtgggatgcctggaatgagctgaagggcaccagcaaagaagatgccatgaaggcctacatcaacaaggtggaggagctgaagaagaagtatggcatctag

SEQ ID NO: 70317 - DNA, 447 bp, Artificial Sequence
  derived and/or modified sequence
atggagcggtggggcaagggcctgcacggcctggaggagcggggcgacagcgtgcctatccctaaacatcgtgcaggaagaaggggaggggtgggaaagcgaggcgtgcgagggcgcgagctcggcggccaaggtaagtacggcgccggatgtagcgagtgcggcacaagaaggattgctgcaagaggggaggcagagtttgagaaagccgccgaagaggtgcgccacctgaaaaccaagccctctgatgaagagatgctgttcatctacggccactataaacaggccaccgttggtgatattaacaccgaaagaccaggcatgctggactttaccgggaaggccaagtgggatgcttggaacgagcttaaaggcacttcaaaagaagacgctatgaaggcctacatcaacaaagtcgaagagcttaagaaaaaatacggaatctag

SEQ ID NO: 70318 - DNA, 447 bp, Artificial Sequence
  derived and/or modified sequence
atggaaagatggggaaagggactgcatggcttggaggagcggggtgacagtgtgccaattcctaagcaccgggctggtcgacggggaggagtgggcaaacgaggcgtcagaggccgtgaactgggaggacaaggcaaatatggggctggttgtagtgaatgcggaacgcgtcgcatcgcggcaaggggggaggcggagttcgagaaagccgctgaagaggtgcgccacctaaagacaaaaccgtcagacgaagaaatgctatttatttacggacactacaagcaggcaaccgtcggcgacattaataccgagaggcccggaatgctggactttacaggcaaggccaaatgggacgcttggaatgagctgaaagggacctccaaggaggatgcaatgaaggcatatatcaataaggtggaggaactgaagaaaaaatatgggatttag

SEQ ID NO: 70319 - protein, 285 aa, Artificial Sequence
  derived and/or modified sequence
MALVASVRVPARVLLRAGARLPGAALGRTERAAGGGDGARRFGSQRVLVEPDAGAGVAVMKFKNPPVNSLSLEFLTELVISLEKLENDKSFRGVILTSDRPGVFSAGLDLTEMCGRSPAHYAGYWKAVQELWLRLYQSNLVLVSAINGACPAGGCLVALTCDYRILADNPRLKDTLENTIGHRAAERALQLGLLFPPAEALQVGIVDQVVPEEQVQSTALSAIAQWMAIPDHARQLTKAMMRKATASRLVTQRDADVQNFVSFISKDSIQKSLQMYLERLKEEKG

SEQ ID NO: 70320 - DNA, 858 bp, Artificial Sequence
  derived and/or modified sequence
atggccctggtggccagcgtgagagtgcccgccagagtgctgctgagagccggcgccagactgcccggcgccgccctgggcagaaccgagagagccgccggcggcggcgacggcgccagaagattcggcagccagagagtgctggtggagcccgacgccggcgccggcgtggccgtgatgaagttcaagaacccccccgtgaacagcctgagcctggagttcctgaccgagctggtgatcagcctggagaagctggagaacgacaagagcttcagaggcgtgatcctgaccagcgacagacccggcgtgttcagcgccggcctggacctgaccgagatgtgcggcagaagccccgcccactacgccggctactggaaggccgtgcaggagctgtggctgagactgtaccagagcaacctggtgctggtgagcgccatcaacggcgcctgccccgccggcggctgcctggtggccctgacctgcgactacagaatcctggccgacaaccccagactgaaggacaccctggagaacaccatcggccacagagccgccgagagagccctgcagctgggcctgctgttcccccccgccgaggccctgcaggtgggcatcgtggaccaggtggtgcccgaggagcaggtgcagagcaccgccctgagcgccatcgcccagtggatggccatccccgaccacgccagacagctgaccaaggccatgatgagaaaggccaccgccagcagactggtgacccagagagacgccgacgtgcagaacttcgtgagcttcatcagcaaggacagcatccagaagagcctgcagatgtacctggagagactgaaggaggagaagggctag

SEQ ID NO: 70321 - DNA, 948 bp, Artificial Sequence
  derived and/or modified sequence
gtcaagatggcgctggtggcttctgtgcgagtcccggcgcgcgttctgctccgcgcgggggcccggctcccgggcgcggccctcgggcggacggagcgggcggccggcggcggagacggcgcgcggcgcttcgggagccagcgggtgctggtggagccggacgcgggcgcaggggtcgctgtgatgaaattcaagaaccccccagtgaacagcctgagcctggagtttctgacggagctggtcatcagcctggagaagctggagaatgacaagagcttccgcggtgtcattctgacctcggaccgcccgggtgtcttctcggccggcctggacctgacggagatgtgtgggaggagccccgcccactacgctgggtactggaaggccgttcaggagctgtggctgcggttgtaccagtccaacctggtgctggtctccgccatcaacggagcctgccccgctggaggctgcctggtggccctgacctgtgactaccgcatcctggcggacaaccccaggttgaaagacaccctggagaacaccatcgggcaccgggcggcggagcgtgccctgcagctggggctgctcttcccgccggcggaggccctgcaggtgggcatagtggaccaggtggtcccggaggagcaggtgcagagcactgcgctgtcagcgatagcccagtggatggccattccagaccatgctcgacagctgaccaaggccatgatgcgaaaggccacggccagccgcctggtcacgcagcgcgatgcggacgtgcagaacttcgtcagcttcatctccaaagactccatccagaagtccctgcagatgtacttagagaggctcaaagaagaaaaaggctaacgattgggctgccacaggcttacggccacacgtgcccctgtgggtcccagggaggtcttaaacaaggtatttttcaacttaaaa

SEQ ID NO: 70322 - DNA, 858 bp, Artificial Sequence
  derived and/or modified sequence
atggctctcgtggccagcgtacgcgtcccagctcgtgtcttgctgcgtgcaggtgctcgtcttccaggagctgcacttggccggactgagcgcgccgctggtggcggcgatggcgctcggaggtttggctcccaaagagtgctggtcgagccggacgcaggcgctggcgttgcagtgatgaagttcaagaaccctccagtgaactcactctccctggaattcctaacggaacttgtgattagcttagaaaagttggaaaacgataaatcctttagaggcgtgattttgacctccgatagacctggcgtgtttagtgcagggcttgacctcacagagatgtgtggtagaagccctgcccactacgccggctactggaaagccgtccaggaactctggctgcgcctttaccagtccaatttggtgttagttagtgcgattaatggggcatgccccgctggaggatgtctcgtcgcactcacttgcgattatcggatcctggctgataacccacgattaaaggatacgctggagaatactatcggacaccgcgccgctgaacgtgccctccagctgggacttctcttcccgcccgccgaagctctacaggtgggtatagtggaccaggttgtcccggaagaacaggtgcaatccaccgccctctctgccatcgcccagtggatggctatccccgaccatgccaggcagctcacaaaggccatgatgcgcaaggcgactgctagccgcctcgtcactcagagggacgctgacgtacaaaactttgtatcgttcatcagtaaggatagtatccagaagtcactacaaatgtacctggagagattgaaagaagagaagggatag

SEQ ID NO: 70323 - DNA, 858 bp, Artificial Sequence
  derived and/or modified sequence
atggccctggtggcctctgtgcgggtgcctgcccgggtgctgctgcgggccggggcccggctgcccggggccgccctgggccgcacagaaagagctgctggaggaggagatggagcccggcgcttcggcagccagagggtgctggtggagccagatgctggagctggggtggccgtgatgaagttcaagaacccccctgtgaacagcctgagcctggagttcctgacagagctggtgatcagcctggagaagctggagaatgacaagagcttccggggcgtcatcctgaccagtgacaggcctggggtcttctctgctggcctggacctgacagagatgtgtggccgcagccctgcccactacgccggctactggaaggctgtgcaggagctgtggctgcggctgtaccagagcaacctggtgctggtgtctgccatcaatggagcctgcccagctgggggctgcctggtggccctgacctgtgactaccgcatcctggccgacaacccccggctgaaggacaccctggagaacaccatcggccacagagctgctgagcgggccctgcagctgggcctgctcttccccccagctgaggccctgcaggtgggcatcgtggaccaggtggtgcctgaggagcaggtgcagagcacagccctgagcgccatcgcccagtggatggccatcccagaccacgcccggcagctgaccaaggccatgatgaggaaggccacagccagccggctggtgacccagagagatgctgatgtgcagaactttgtgtccttcatcagcaaggacagcatccagaagagcctgcagatgtacctggagcggctgaaggaggagaagggctag

SEQ ID NO: 70324 - DNA, 858 bp, Artificial Sequence
  derived and/or modified sequence
atggccctggtggccagcgtgcgggtgcccgcccgggtgctgctgagggccggagcccggctgcctggtgcagctttgggtagaaccgagagagcggccggcggcggggatggcgctcgaagatttggatcacagcgggtccttgttgagccggacgctggcgccggcgtcgcagtgatgaaattcaagaaccccccagtgaattccctttctctcgagtttctcacagaattggtgattagtctagagaagctggagaacgataagagctttagaggcgtcatcttaacgagcgatcgccctggcgttttctcagcggggctggacctaaccgaaatgtgcggacggtcaccagcccactacgccggatactggaaggcggtgcaggagctgtggctcaggctgtaccagagtaatcttgtgctggtgtctgcaatcaatggtgcttgcccggcagggggttgtctcgtagccttgacctgcgattatcgaatcctcgcggacaaccccagattgaaagacacactggagaatacaattggccacagagccgcagagcgggcccttcaattgggactgttgttcccaccagcagaggcacttcaggtgggtatagtggaccaagtggtccctgaagaacaagtgcagagcaccgccctgagcgccatcgcccaatggatggctattcccgaccacgctaggcagttgaccaaggctatgatgcgcaaggccacagcctcccgtctcgtaacccagcgggacgcagacgtgcaaaacttcgtgtcgtttattagcaaagattcaattcagaagagccttcagatgtatttggagaggctcaaggaggagaaggggtag

SEQ ID NO: 70325 - DNA, 858 bp, Artificial Sequence
  derived and/or modified sequence
atggcattggtggcatcggttagggtgcccgctagagtcctactcagagcgggagcccgtctacctggggcagcactgggcaggaccgaaagagctgccggtggcggtgacggtgcccgacgcttcggatcccaaagagtgctcgtcgaaccggatgccggtgctggtgtagccgttatgaagttcaagaaccccccagttaatagcttgagtctagagttcctcaccgagctggtgatatccctggaaaagctggaaaacgataagtcctttcggggagtgatcctgacatccgatcggcctggagttttctcagcgggtttggatttgactgaaatgtgtgggaggtctcctgcccactatgcaggctactggaaggccgtccaggagctgtggctgagactgtaccagtctaatctggtgctggtttcagctatcaacggggcatgtcccgctggcggttgtctcgtggccctgacgtgcgattacaggattttggctgacaatcctcggctgaaggacaccctggagaacactatcggccatcgggctgccgaaagagccctccagctgggcctgctgttcccccctgcagaggcccttcaagtgggtatcgtggaccaggtggttcctgaagagcaggtacaatcaactgctctctctgccatcgctcagtggatggccatccccgatcatgccaggcagctcaccaaggccatgatgcgtaaggctacagccagtaggctggttacccagagggatgctgacgttcagaacttcgtgagcttcataagcaaggactcgatccagaagtctctgcagatgtatcttgaacgcttgaaggaagagaagggatag

SEQ ID NO: 70326 - protein, 673 aa, Artificial Sequence
  derived and/or modified sequence
MATGANATPLGKLGPPGLPPLPGPKGGFEPGPPPAPGPGAGLLAPGPPPPPPVGSMGALTAAFPFAALPPPPPPPPPPPPQQPPPPPPPPSPGASYPPPQPPPPPPLYQRVSPPQPPPPQPPRKDQQPGPAGGGGDFPSKKRKRSRWNQDTMEQKTVIPGMPTVIPPGLTREQERAYIVQLQIEDLTRKLRTGDLGIPPNPEDRSPSPEPIYNSEGKRLNTREFRTRKKLEEERHNLITEMVALNPDFKPPADYKPPATRVSDKVMIPQDEYPEINFVGLLIGPRGNTLKNIEKECNAKIMIRGKGSVKEGKVGRKDGQMLPGEDEPLHALVTANTMENVKKAVEQIRNILKQGIETPEDQNDLRKMQLRELARLNGTLREDDNRILRPWQSSETRSITNTTVCTKCGGAGHIASDCKFQRPGDPQSAQDKARMDKEYLSLMAELGEAPVPASVGSTSGPATTPLASAPRPAAPANNPPPPSLMSTTQSRPPWMNSGPSESRPYHGMHGGGPGGPGGGPHSFPHPLPSLTGGHGGHPMQHNPNGPPPPWMQPPPPPMNQGPHPPGHHGPPPMDQYLGSTPVGSGVYRLHQGKGMMPPPPMGMMPPPPPPPSGQPPPPPSGPLPPWQQQQQQPPPPPPPSSSMASSTPLPWQQRSLPAAAMARAMRVRTFRAHW

SEQ ID NO: 70327 - protein, 176 aa, Artificial Sequence
  derived and/or modified sequence
MADEQEIMCKLESIKEIRNKTLQMEKIKARLKAEFEALESEERHLKEYKQEMDLLLQEKMAHVEELRLIHADINVMENTIKQSENDLNKLLESTRRLHDEYKPLKEHVDALRMTLGLQRLPDLCEEEEKLSLEPACHVTSKFTGMHLYALFARPRVGPGTPKSRNGSRMNKEREST

SEQ ID NO: 70328 - DNA, 531 bp, Artificial Sequence
  derived and/or modified sequence
atggccgacgagcaggagatcatgtgcaagctggagagcatcaaggagatcagaaacaagaccctgcagatggagaagatcaaggccagactgaaggccgagttcgaggccctggagagcgaggagagacacctgaaggagtacaagcaggagatggacctgctgctgcaggagaagatggcccacgtggaggagctgagactgatccacgccgacatcaacgtgatggagaacaccatcaagcagagcgagaacgacctgaacaagctgctggagagcaccagaagactgcacgacgagtacaagcccctgaaggagcacgtggacgccctgagaatgaccctgggcctgcagagactgcccgacctgtgcgaggaggaggagaagctgagcctggagcccgcctgccacgtgaccagcaagttcaccggcatgcacctgtacgccctgttcgccagacccagagtgggccccggcacccccaagagcagaaacggcagcagaatgaacaaggagagagagagcacctag

SEQ ID NO: 70329 - DNA, 531 bp, Artificial Sequence
  derived and/or modified sequence
atggcagacgagcaggagattatgtgcaagctggaatccataaaggagatccggaacaaaaccctgcaaatggagaagatcaaagcccggctaaaagccgagttcgaagcgttagagagcgaagaaagacaccttaaggagtacaagcaggagatggatttgctcctgcaggagaaaatggcccacgtggaggaactgagactgattcacgctgatatcaacgtcatggagaacacaatcaagcagtctgaaaacgatctgaataagctgctagaatctacgaggagactgcacgatgaatacaagcccctgaaggagcacgtggacgcccttcggatgacgctgggactgcaacgtcttccagatctttgtgaggaagaggagaaactgtctctcgagcccgcctgccacgtcacatccaagttcaccggcatgcatctctatgccctgtttgcaaggccacgggtgggccctggaacccccaagtccaggaatgggagcaggatgaataaagagcgggaaagcacctag

SEQ ID NO: 70330 - DNA, 531 bp, Artificial Sequence
  derived and/or modified sequence
atggctgatgagcaggagatcatgtgcaagctggagagcatcaaggagatccggaacaagaccctgcagatggagaagatcaaggcccggctgaaggccgagtttgaggccctggagagcgaggagcggcacctgaaggagtacaagcaggagatggacctgctgctgcaggagaagatggcccacgtggaggagctgcggctcatccatgctgacatcaacgtgatggagaacaccatcaagcagagtgaaaatgacctgaacaagctgctggagagcacccggcggctgcatgatgagtacaagcccctgaaggagcacgtggatgccctgaggatgaccctgggcctgcagaggctgcctgacctgtgtgaggaggaggagaagctgagcctggagcccgcctgccacgtgaccagcaagttcaccggcatgcacctgtatgccctgtttgcccggccccgggtgggccctggcacccccaagagcagaaatggcagcaggatgaacaaggagcgggagagcacctag

SEQ ID NO: 70331 - DNA, 531 bp, Artificial Sequence
  derived and/or modified sequence
atggccgacgagcaggagatcatgtgcaagctggagagcatcaaggagatccgaaacaagaccttgcagatggaaaagataaaagcaagacttaaggcagaattcgaggccctggagagcgaggagcgccatctcaaagaatataagcaggaaatggacctgttactgcaggagaagatggctcacgtggaagagcttcggctgatacatgcagatatcaatgtcatggagaatacaataaagcagtccgagaacgacctcaacaagttgctggaatccacgaggagactgcacgatgagtataagcccttaaaagagcacgtagatgcacttcgaatgactttaggcctgcagagactgccggacctttgcgaggaggaggagaaactcagtcttgagccagcgtgccatgtgacctccaagtttacaggaatgcacctctacgcgctgttcgctcgtccccgcgtgggaccggggacacccaaatctcgaaacgggagcagaatgaataaggaacgggaatcaacctag

SEQ ID NO: 70332 - DNA, 531 bp, Artificial Sequence
  derived and/or modified sequence
atggccgatgagcaggagatcatgtgcaaactggaaagcatcaaggagatcagaaataagaccctgcagatggaaaaaataaaggccaggcttaaggctgagttcgaagccttggaaagcgaagagcgacatctgaaagagtacaagcaggaaatggacctactgctgcaggaaaaaatggcacacgttgaggagcttagacttattcacgccgacatcaatgtgatggagaacacaattaagcagtctgagaacgacctcaataagctgcttgaaagcactaggaggctgcatgacgaatataagcccctcaaggagcacgtggatgccctgagaatgaccctgggattgcagcgcttaccagacctgtgcgaggaagaggagaaattgtctttggaacctgcatgtcatgtcactagcaagtttacaggcatgcatctttatgcgcttttcgctagaccacgtgtgggcccaggcacacccaaaagccgaaatgggagcagaatgaacaaagagcgggaatccacatag

SEQ ID NO: 70333 - DNA, 2081 bp, Artificial Sequence
  derived and/or modified sequence
cctgaagctccggactacagctcccaggcctctccaagcccctaccgcacaggctcatagccccaagcccggaggaggtggctacattgtgtctattgtatcccttggctggtgtatttgtacatctctcgggacgtgaaattgacagtgaaaagtatggcagatgagcaagaaatcatgtgcaaattggaaagcattaaagagatcaggaacaagaccctgcagatggagaagatcaaggctcgtttgaaggctgagtttgaggcacttgagtcagaggaaaggcacctgaaggaatacaagcaggagatggaccttctgctacaggagaagatggcccatgtggaggaactccgactgatccacgctgacatcaatgtgatggaaaacactatcaaacaatctgagaatgacctaaacaagctgctagagtctacaaggaggctgcatgatgagtataagccactgaaagaacatgtggatgccctgcgcatgactctgggcctgcagaggctccctgacttgtgtgaagaagaggagaagctttccttggagcctgcttgtcatgtcaccagcaaattcaccggaatgcacctatatgccctctttgcaaggccaagagtcggtcccggaaccccaaaaagccgaaacggaagcaggatgaataaagaaagggagagcacatgaagctttgctaattataacccctcaccttgaccagagtcattgatgtcctgatgtgaaacaacccttgcccaaccccacgaagtctcctatttaatgtgatggaagcacaacccctctctcactttgctcctatttctttctgctcttgggatttctggtttaggaagagatgtggttcaggtgctaaacagtgtgtctgatgatcccttctctcccactcacatttcaacccctgcccttgtttggagctaagggaagggcaaaaggctcagatatgattctctatctcttgtgcctgaggcctggagcctaaggagctgtagggtctgaggggcaggggaggcccatatcttgtttcaggtaaaggacccagtatttcccctccttgtacttttgccttaggttctcaagggacaatagtcttcatgttggattctccaacaggctgggtgcatgtatccccctactcctaccctcatctcatccttaaggcccagaggtagcttggacaagccctccttttcataatcatttgggaggcatggctgtaattctttagctttctccacttctgtctcccacatatactaaaattcttaggtactaggctgtgtgtcttgggatcttaagatcaatgaacctttccccaatatctagtctttgcaaattctagtagaagatttccacagtgaaatcagtgagccagaccaactctacatctcctgcctaacctactgcctaagtcattagggctgagggctcggctgtaggggcttccttaggctgagagtgcccccaggctgacatctgtgttggcttttgttcagaaccattactctggcacatgctcaatggtatattgcagggaggagaggagtagatttagatttgagtaaatgccaatcactttacacatgaaggtgggtgggactttccttccattcatcccttgctctcttggatctgaactcttctggagcctcagctcaggatagctgctggccactcctgtcctgtggattgtgcaggtggcctttcctcccaaaagaaaaggcatcaggctccccaagccccacagctctcctttccaccaaagccaggtttcctggtaaggtcactcgaagataagggatggggatgggggctgactgacaaaaaattttagccccaggtctcagtacctggctggggagggggatatttttccttccttaagtagttttacattgccacagtgtgtatgtgttcactatataaaatgttcctctgctctttgaaagtaagagtgttgtgtctgtacaaatccttttaacatgcattcattggagtaaattctgagtatctactgtgtattggataatacaaaagatgtaatgtcatttacctttctgggt

SEQ ID NO: 70334 - protein, 800 aa, Artificial Sequence
  derived and/or modified sequence
MTAAKQEPQPTPGARASQAQPADQELGSNSPPQRNWKGIAIALLVILVVCSLITMSVILLTPDELTNSSETRLSLEDLFRKDFVLHDPEARWINDTDVVYKSENGHVIKLNIETNATTLLLENTTFVTFKASRHSVSPDLKYVLLAYDVKQIFHYSYTASYVIYNIHTREVWELNPPEVEDSVLQYAAWGVQGQQLIYIFENNIYYQPDIKSSSLRLTSSGKEEIIFNGIADWLYEEELLHSHIAHWWSPDGERLAFLMINDSLVPTMVIPRFTGALYPKGKQYPYPKAGQVNPTIKLYVVNLYGPTHTLELMPPDSFKSREYYITMVKWVSNTKTVVRWLNRAQNISILTVCETTTGACSKKYEMTSDTWLSQQNEEPVFSRDGSKFFMTVPVKQGGRGEFHHVAMFLIQSKSEQITVRHLTSGNWEVIKILAYDETTQKIYFLSTESSPRGRQLYSASTEGLLNRQCISCNFMKEQCTYFDASFSPMNQHFLLFCEGPRVPVVSLHSTDNPAKYFILESNSMLKEAILKKKIGKPEIKILHIDDYELPLQLSLPKDFMDRNQYALLLIMDEEPGGQLVTDKFHIDWDSVLIDMDNVIVARFDGRGSGFQGLKILQEIHRRLGSVEVKDQITAVKFLLKLPYIDSKRLSIFGKGYGGYIASMILKSDEKLFKCGSVVAPITDLKLYASAFSERYLGMPSKEESTYQAASVLHNVHGLKEENILIIHGTADTKVHFQHSAELIKHLIKAGVNYTMQVYPDEGHNVSEKSKYHLYSTILKFFSDCLKEEISVLPQEPEEDE

SEQ ID NO: 70335 - protein, 97 aa, Artificial Sequence
  derived and/or modified sequence
MSVILLTPDELTNSSETRLSLEDLFRKDFVLHDPEARWINDTDVVYKSENGHVIKLNIETNATTLLLENTTFVTFKASRHSVSPDLKYVLLAYDVKQ

SEQ ID NO: 70336 - protein, 600 aa, Artificial Sequence
  derived and/or modified sequence
LSILILTSNELTNSSETRLSLEDLFRKDFVLHDPEARWINDTDVVYKSENGHVIKLNIETNATTLLLENTTFVTFKASRHSVSPDLKYVLLAYDVKQIFHYSYTASYVIYNIHTREVWELNPPEVEDSVLQYAAWGVQGQQLIYIFENNIYYQPDIKSSSLRLTSSGKEEIIFNGIADWLYEEELLHSHIAHWWSPDGERLAFLMINDSLVPTMVIPRFTGALYPKGKQYPYPKAGQVNPTIKLYVVNLYGPTHTLELMPPDSFKSREYYITMVKWVSNTKTVVRWLNRAQNISILTVCETTTGACSKKYEMTSDTWLSQQNEEPVFSRDGSKFFMTVPVKQGGRGEFHHVAMFLIQSKSEQITVRHLTSGNWEVIKILAYDETTQKIYFLSTESSPRGRQLYSASTEGLLNRQCISCNFMKEQCTYFDASFSPMNQHFLLFCEGPRVPVVSLHSTDNPAKYFILESNSMLKEAILKKKIGKPEIKILHIDDYELPLQLSLPKDFMDRNQYALLLIMDEEPGGQLVTDKFHIDWDSVLIDMDNVIVARFDGRGSGFQGLKILQEIHRRLGSVEVKDQITAVKFLLKLPYIDSKRLSIFGK

SEQ ID NO: 70337 - protein, 746 aa, Artificial Sequence
  derived and/or modified sequence
MSVILLTPDELTNSSETRLSLEDLFRKDFVLHDPEARWINDTDVVYKSENGHVIKLNIETNATTLLLENTTFVTFKASRHSVSPDLKYVLLAYDVKQIFHYSYTASYVIYNIHTREVWELNPPEVEDSVLQYAAWGVQGQQLIYIFENNIYYQPDIKSSSLRLTSSGKEEIIFNGIADWLYEEELLHSHIAHWWSPDGERLAFLMINDSLVPTMVIPRFTGALYPKGKQYPYPKAGQVNPTIKLYVVNLYGPTHTLELMPPDSFKSREYYITMVKWVSNTKTVVRWLNRAQNISILTVCETTTGACSKKYEMTSDTWLSQQNEEPVFSRDGSKFFMTVPVKQGGRGEFHHVAMFLIQSKSEQITVRHLTSGNWEVIKILAYDETTQKIYFLSTESSPRGRQLYSASTEGLLNRQCISCNFMKEQCTYFDASFSPMNQHFLLFCEGPRVPVVSLHSTDNPAKYFILESNSMLKEAILKKKIGKPEIKILHIDDYELPLQLSLPKDFMDRNQYALLLIMDEEPGGQLVTDKFHIDWDSVLIDMDNVIVARFDGRGSGFQGLKILQEIHRRLGSVEVKDQITAVKFLLKLPYIDSKRLSIFGKGYGGYIASMILKSDEKLFKCGSVVAPITDLKLYASAFSERYLGMPSKEESTYQAASVLHNVHGLKEENILIIHGTADTKVHFQHSAELIKHLIKAGVNYTMQVYPDEGHNVSEKSKYHLYSTILKFFSDCLKEEISVLPQEPEEDE

SEQ ID NO: 70338 - DNA, 2403 bp, Artificial Sequence
  derived and/or modified sequence
atgaccgctgccaaacaggagccacagccaacacccggcgcccgtgcaagccaggcccagccggccgaccaggagctgggtagcaacagcccccctcagcggaattggaagggtatcgcgattgctctgcttgtcatactggtagtctgctccctgataaccatgtctgtgatcctgctaactcccgatgagttgaccaattctagcgaaacgcgcctctctcttgaagatctcttccggaaagactttgtccttcacgatcctgaggcccgctggattaacgatactgacgtcgtatataagtctgagaatggacatgtcatcaagttaaacattgaaacgaatgcaacaaccctactgctggagaatacaactttcgtcaccttcaaggcatcacgacactccgtctctccagatctgaaatacgtactcctggcctacgatgtgaaacaaatcttccactactcgtacactgcatcttacgtgatctacaacatacacacgcgggaagtgtgggaactcaatccccccgaagtcgaggacagtgtgctacagtatgcggcctggggggtccagggccagcagctgatctacatttttgagaacaacatatactaccaacccgatatcaaaagctcatccctccgcttaactagtagcggaaaggaagagatcatatttaatggcattgctgactggctttacgaggaagagctactgcactcccacattgcacattggtggtctccagatggtgagcggctggcattccttatgatcaatgacagtttagtgccaacaatggtgatccctaggtttactggagccctgtacccaaagggcaaacagtatccttacccaaaagctgggcaggtgaaccccaccataaagctgtatgttgtgaacttatacggtccaacacacactcttgaacttatgccgccagacagctttaagtctagggagtactacattacaatggtgaaatgggtatcaaacactaagacagtggtacggtggctcaatcgggctcagaatatctctatattaacagtttgcgagacaacgaccggtgcctgcagtaaaaaatacgagatgacatctgacacatggttgtcgcagcagaacgaggagcccgtctttagcagggatggctcaaaattcttcatgacggtgcctgttaaacaaggagggaggggcgaatttcaccatgtcgcaatgtttttgatccagtcaaagagtgagcagattacggtcaggcatttaactagcggtaactgggaggttatcaagatcctcgcatatgatgaaaccacccagaaaatatacttcctgtctactgaaagctccccgcgaggacggcaactgtactctgcctctacagaggggctcctgaacagacagtgtatttcctgtaacttcatgaaggagcagtgcacatactttgacgcaagcttttccccaatgaaccaacacttcctgctgttttgtgaaggtccccgcgttcccgtggtgagcctgcacagtactgacaaccccgccaaatattttattttggagtctaactcaatgcttaaagaagccatcctgaaaaaaaaaatcgggaagccagaaatcaaaatcctgcacattgacgattatgaactgccattgcaattgagtcttccaaaggatttcatggacaggaaccagtatgcacttctgctaatcatggacgaggagccaggcgggcagctcgtcacggataaatttcacatcgattgggacagcgtgctgattgatatggacaatgttatcgtggctagatttgatggcaggggatccgggttccagggattgaagattttacaggagatccatcgtcgcctgggtagtgtggaggtcaaggaccagataacagctgtcaaattcctcctgaaacttccgtacattgacagtaagaggctgtcaattttcggcaagggctacgggggatatatcgccagcatgattctcaagtctgatgaaaagcttttcaaatgcggttctgtggtggccccgattactgacctgaagttatacgcctcagcgttcagtgagaggtatctcggcatgccaagtaaagaggaaagcacttaccaggcggccagtgtgctgcataatgtgcatgggctcaaggaggagaatattttgatcatccacggcacagcggacaccaaggtgcattttcaacacagtgccgaactgattaagcatcttataaaggccggggtcaactatactatgcaggtgtacccagatgaaggtcacaacgtctccgagaagagtaaatatcatctgtattccacaatactcaagttctttagcgattgcttaaaagaggagatcagtgtgttaccgcaggaacccgaggaagacgaatag

SEQ ID NO: 70339 - DNA, 2403 bp, Artificial Sequence
  derived and/or modified sequence
atgacagctgccaagcaggagccccagcccacccctggggcccgggccagccaggcccagcctgctgaccaggagctgggcagcaacagccccccccagaggaactggaagggcatcgccatcgccctgctggtgatcctggtggtgtgcagcctcatcaccatgtctgtcatcctgctgaccccagatgagctgaccaacagcagcgagacccggctgagcctggaggacctcttcaggaaggactttgtgctgcatgaccctgaggcccgctggatcaatgacacagatgtggtgtacaagtcagaaaatggccacgtgatcaagctgaacatcgagaccaatgccaccaccctgctgctggagaacaccacctttgtgaccttcaaggccagccgccacagcgtgtccccagacctgaagtatgtgctgctggcctatgatgtgaagcagatcttccactacagctacacagccagctatgtgatctacaacatccacacccgggaggtgtgggagctgaaccccccagaggtggaggacagcgtgctgcagtatgctgcctggggcgtgcagggccagcagctgatctacatctttgagaacaacatctactaccagcctgacatcaagagcagcagcctgcggctgaccagcagcggcaaggaggagatcatcttcaacggcattgctgactggctgtatgaggaggagctgctgcacagccacatcgcccactggtggagcccagatggagagcggctggccttcctgatgatcaatgacagcctggtgcccaccatggtgatcccccgcttcaccggggccctgtaccccaagggcaagcagtacccctaccccaaggccggccaggtgaaccccaccatcaagctgtatgtggtgaacctgtatggccccacccacaccctggagctgatgcccccagacagcttcaagagccgggagtactacatcaccatggtgaagtgggtgagcaacaccaagacagtggtgcgctggctgaacagagcccagaacatcagcatcctgactgtgtgtgagaccaccactggagcctgcagcaagaagtatgagatgaccagtgacacctggctgagccagcagaatgaggagcctgtgttcagcagagatggcagcaagttcttcatgacagtgcctgtgaagcagggcggccgcggggagttccaccacgtggccatgttcctgatccagagcaagtctgagcagatcaccgtgcgccacctgaccagcggcaactgggaggtgatcaagatcctggcctatgatgagaccacccagaagatctacttcctgagcacagagagcagcccccggggccggcagctgtacagcgccagcacagagggcctgctgaaccggcagtgcatcagctgcaacttcatgaaggagcagtgcacctactttgatgccagcttcagccccatgaaccagcacttcctgctcttctgtgagggcccccgggtgcctgtggtgtccctgcacagcacagacaacccagccaagtacttcatcctggagagcaacagcatgctgaaggaggccatcctgaagaagaagattggcaagccagagatcaagatcctgcacattgatgattatgagctgcccctgcagctgagcctgcccaaggacttcatggacaggaaccagtatgccctgctgctgatcatggatgaggagcccggcggccagctggtgacagacaagttccacatcgactgggacagcgtgctgattgacatggacaacgtgattgtggccaggtttgatggccggggcagcggcttccagggcctgaagatcctgcaggagatccaccggcggctgggctctgtggaggtgaaggaccagatcacagctgtgaagttcctgctgaagctgccctacatcgacagcaagaggctgagcatctttgggaagggctacggcggctacatcgcctccatgatcctgaagagtgatgagaagctgttcaagtgtggctctgtggtggcccccatcacagacctgaagctgtatgccagcgccttcagcgagcgctacctgggcatgcccagcaaggaggagagcacctaccaggccgcctctgtgctgcacaacgtgcacggcctgaaggaggagaacatcctgatcatccatggaacagctgacaccaaggtgcacttccagcacagcgctgagctgatcaagcacctgatcaaggccggcgtgaactacaccatgcaggtgtacccagatgagggccacaacgtgtctgagaagagcaagtaccacctgtacagcaccatcctgaagttcttcagtgactgcctgaaggaggagatctctgtgctgccccaggagcctgaggaggatgaatag

SEQ ID NO: 70340 - DNA, 2403 bp, Artificial Sequence
  derived and/or modified sequence
atgaccgccgccaagcaggagccccagcccacccccggcgcccgggcctctcaggcacagccagctgaccaggaactgggcagcaattctccgccacagcgcaattggaagggaatcgccatcgccctcctggtcattctcgtggtttgcagcttgattaccatgtccgtcattctgttaacacccgatgagttaaccaactcttctgaaacccgcctgagcctcgaggacttgtttaggaaagattttgtcctgcacgacccagaagctagatggatcaacgataccgatgtggtgtacaagagcgaaaacgggcacgtgatcaaactgaatattgaaaccaacgcaaccacgctgctgctcgagaacaccacctttgtgacgttcaaggctagccggcactcggtgtctcctgacttaaagtacgtgctcctggcctatgacgtaaaacaaattttccattactcttacaccgccagctacgtgatatataatatacacactcgggaagtgtgggagcttaaccccccagaagtggaagacagcgtgctccagtacgctgcttggggggtgcagggacagcagctcatctacatcttcgagaacaatatatactatcagcctgacattaagagcagctcattgcgactgacatctagtgggaaagaggagatcatcttcaatgggattgccgattggctgtatgaggaggagctgctgcattcgcatattgctcactggtggagtccagacggggaaagattggcattcttaatgatcaatgacagcttggttcccaccatggtcatccctaggtttacaggtgccttgtaccctaaagggaagcagtacccctatccaaaagcggggcaggttaatcctacaataaagctatacgtggtcaatctttatggaccaacccataccctggaactaatgccccccgactcattcaaatcaagggagtactacattaccatggtaaagtgggtgagcaatactaaaaccgtcgtaagatggctgaaccgggcccagaatatctccattctgacagtgtgcgaaacgaccacaggcgcctgtagtaagaagtacgagatgaccagcgatacatggctctcccagcagaatgaggaacctgtcttttcacgggatggctctaagttcttcatgacagtacccgtgaagcagggcgggagaggcgagttccatcacgtagccatgtttcttatccaatctaagagcgaacagataaccgtgcggcatctgacatcaggaaactgggaggttattaaaattttagcctacgacgagaccacacaaaaaatatactttctttccaccgagagcagcccaagaggccgccagctttactctgcgtccaccgagggactcctgaaccgacagtgtatcagttgtaatttcatgaaggagcagtgtacatatttcgacgctagcttttctcctatgaaccaacactttctgctgttctgtgaaggcccaagggtgcccgtcgtgtccctgcacagtactgataatcccgccaagtattttatcttggagagtaactcgatgttaaaggaggccattcttaagaaaaagatcgggaagcctgaaattaagatactccatattgacgactatgagctgcccttgcagctgtctttacctaaggactttatggatcggaaccagtacgcactgttgctaattatggatgaggagccaggcgggcaacttgtgaccgacaagttccacatcgactgggattcggtgcttatcgatatggataacgtgatcgttgcacgcttcgatgggcgggggagtggatttcagggtctgaagatattacaggagatacaccggaggctaggaagcgtcgaagtgaaggatcagatcacagctgtgaagtttctgctgaaactaccttacattgatagtaagcggctgtctatttttgggaaaggatacggcggctacatagcgtccatgatcctgaagtctgatgaaaagctgtttaaatgcggttctgtggtggcacctatcactgacttgaagctctacgcctctgccttctctgagcggtacctaggcatgccatctaaagaagaatcaacttaccaggcggcctccgtgctccacaacgtacacgggttgaaggaagagaatattttgatcattcatggcaccgccgacactaaagttcacttccagcactctgctgaactcatcaaacacttgattaaggctggggttaactacacaatgcaggtgtacccagatgaaggccataatgtctcagagaagagtaagtaccacctttattcaacgatcctgaaatttttttcggactgcctcaaagaagagattagtgtgctccctcaggaacctgaagaggatgagtag

SEQ ID NO: 70341 - DNA, 2403 bp, Artificial Sequence
  derived and/or modified sequence
atgacagctgccaagcaagagccccagcctacacctggagccagggcaagccaggcccagcctgccgaccaagaattaggctccaattctcctccgcagaggaactggaaggggattgctatagccctattagtgatactggttgtttgcagcctcattaccatgagtgtcatcctccttacacctgacgagctgactaattccagtgaaacccggctatccctggaagacctgttcagaaaggacttcgtactgcacgacccagaagccaggtggattaacgatacagacgttgtgtataagtctgagaatgggcacgtcattaagctgaatattgaaacgaatgcaaccacgttattgcttgaaaacacaacattcgtcacgtttaaggcgtcaagacattctgtgagccccgacctcaagtacgtgctgttagcttacgacgttaaacagatcttccactattcctacactgcgagctatgtcatttacaatatccacacacgggaggtttgggagctgaaccctcctgaagtcgaagatagtgtcctgcagtatgccgcatggggagttcagggacagcagcttatctacatctttgagaataacatctactatcagccggacattaagtccagttcactgcgtctgacttccagcggcaaggaagaaataatttttaatggaatagccgattggctgtacgaagaggagctgctgcacagccatatcgcccattggtggtcgccagatggcgagcgactcgcattcctgatgattaacgacagcttagtgccaaccatggtgatcccacgcttcactggcgcactctatcctaagggaaagcagtacccttaccccaaggccggtcaagtgaatccaactatcaaactttacgtggttaacctgtacggcccaactcacacgctcgagctgatgccacctgattcatttaaatctcgggagtattatattacaatggtgaagtgggtgtctaacaccaaaaccgtggttcggtggctgaaccgcgcacagaacatctccatcctgacagtgtgtgagactactaccggcgcatgttcaaaaaagtacgagatgacctccgatacatggctcagccagcaaaacgaggaacctgtattcagccgcgatggcagcaagttttttatgacagtgccagttaaacaggggggacggggtgagttccaccacgtagccatgtttctaatacagagcaagagtgagcagataacagtgaggcacttaacttccggcaactgggaagtgattaaaatactcgcatatgacgaaaccacacaaaagatctatttcctgtccacggaaagctccccacggggtcggcaactgtactctgcctctacagaagggttattaaaccgtcaatgcatatcatgcaattttatgaaagaacagtgcacctatttcgatgctagcttctcccccatgaatcagcactttctcctgttttgcgaaggcccaagggtccccgtggtctctctccacagcacggacaatccagcgaagtattttatactggaatctaacagcatgctgaaagaggcaatcctgaagaagaaaattggtaaaccggagattaagattcttcacatagatgattatgagttgccgcttcagctgtcactcccaaaagattttatggacagaaatcagtacgcactgctcctgataatggacgaagagcctggcggacagttggtcaccgacaaattccatattgattgggacagcgttctcatagatatggataatgtcattgtcgccaggtttgacggaagagggtccggttttcaagggctaaagattttacaggaaatccataggcgactcgggtctgtggaagttaaagaccagatcacggccgtgaaattcctcttgaaactgccgtatatcgattccaagaggttgtcaatctttggcaagggttacggtggatatatagctagcatgattttgaagtcagacgaaaaactgtttaagtgcggttccgtcgtggccccaatcactgacctgaaactgtacgctagtgcattctcagagcgctatctgggaatgccgagtaaagaggaatctacttaccaggctgctagcgtcctgcataatgtacacggactcaaggaggaaaatatcctgatcatccacgggaccgccgatactaaggttcatttccaacattctgcggaacttattaaacacctcatcaaagccggagtaaactatactatgcaagtttatcccgacgagggccacaatgtctcagagaagagtaaatatcacctgtacagcactatcctaaagttcttttctgattgtctgaaggaagagatttccgtgctgccacaggagcccgaagaagacgaatag

SEQ ID NO: 70342 - DNA, 2403 bp, Artificial Sequence
  derived and/or modified sequence
atgaccgccgccaagcaggagccccagcccacccccggcgccagagccagccaggcccagcccgccgaccaggagctgggcagcaacagccccccccagagaaactggaagggcatcgccatcgccctgctggtgatcctggtggtgtgcagcctgatcaccatgagcgtgatcctgctgacccccgacgagctgaccaacagcagcgagaccagactgagcctggaggacctgttcagaaaggacttcgtgctgcacgaccccgaggccagatggatcaacgacaccgacgtggtgtacaagagcgagaacggccacgtgatcaagctgaacatcgagaccaacgccaccaccctgctgctggagaacaccaccttcgtgaccttcaaggccagcagacacagcgtgagccccgacctgaagtacgtgctgctggcctacgacgtgaagcagatcttccactacagctacaccgccagctacgtgatctacaacatccacaccagagaggtgtgggagctgaacccccccgaggtggaggacagcgtgctgcagtacgccgcctggggcgtgcagggccagcagctgatctacatcttcgagaacaacatctactaccagcccgacatcaagagcagcagcctgagactgaccagcagcggcaaggaggagatcatcttcaacggcatcgccgactggctgtacgaggaggagctgctgcacagccacatcgcccactggtggagccccgacggcgagagactggccttcctgatgatcaacgacagcctggtgcccaccatggtgatccccagattcaccggcgccctgtaccccaagggcaagcagtacccctaccccaaggccggccaggtgaaccccaccatcaagctgtacgtggtgaacctgtacggccccacccacaccctggagctgatgccccccgacagcttcaagagcagagagtactacatcaccatggtgaagtgggtgagcaacaccaagaccgtggtgagatggctgaacagagcccagaacatcagcatcctgaccgtgtgcgagaccaccaccggcgcctgcagcaagaagtacgagatgaccagcgacacctggctgagccagcagaacgaggagcccgtgttcagcagagacggcagcaagttcttcatgaccgtgcccgtgaagcagggcggcagaggcgagttccaccacgtggccatgttcctgatccagagcaagagcgagcagatcaccgtgagacacctgaccagcggcaactgggaggtgatcaagatcctggcctacgacgagaccacccagaagatctacttcctgagcaccgagagcagccccagaggcagacagctgtacagcgccagcaccgagggcctgctgaacagacagtgcatcagctgcaacttcatgaaggagcagtgcacctacttcgacgccagcttcagccccatgaaccagcacttcctgctgttctgcgagggccccagagtgcccgtggtgagcctgcacagcaccgacaaccccgccaagtacttcatcctggagagcaacagcatgctgaaggaggccatcctgaagaagaagatcggcaagcccgagatcaagatcctgcacatcgacgactacgagctgcccctgcagctgagcctgcccaaggacttcatggacagaaaccagtacgccctgctgctgatcatggacgaggagcccggcggccagctggtgaccgacaagttccacatcgactgggacagcgtgctgatcgacatggacaacgtgatcgtggccagattcgacggcagaggcagcggcttccagggcctgaagatcctgcaggagatccacagaagactgggcagcgtggaggtgaaggaccagatcaccgccgtgaagttcctgctgaagctgccctacatcgacagcaagagactgagcatcttcggcaagggctacggcggctacatcgccagcatgatcctgaagagcgacgagaagctgttcaagtgcggcagcgtggtggcccccatcaccgacctgaagctgtacgccagcgccttcagcgagagatacctgggcatgcccagcaaggaggagagcacctaccaggccgccagcgtgctgcacaacgtgcacggcctgaaggaggagaacatcctgatcatccacggcaccgccgacaccaaggtgcacttccagcacagcgccgagctgatcaagcacctgatcaaggccggcgtgaactacaccatgcaggtgtaccccgacgagggccacaacgtgagcgagaagagcaagtaccacctgtacagcaccatcctgaagttcttcagcgactgcctgaaggaggagatcagcgtgctgccccaggagcccgaggaggacgagtag

SEQ ID NO: 70343 - DNA, 2758 bp, Artificial Sequence
  derived and/or modified sequence
aagaaggcacgaggcgtcgccgcagctcggtcaggggccggggccccgccgctcgccgctgcactaacttgccgcttggtctcgcctcgccgccgcggctcgctgcgctttgggtggcggggggcggggagagcggggagtcagagggtctgcggtggccgagggagggaccctacgacggggagcccgcccggtgccgctcttcttcccctccccgcccctccgctccccccaccccgtcccttccgccgattccgggagcgacgggcgcccgtgacctgcgaacgctgccaagtgacggtccccgagtctgaagcgcccgcgaggaagcgagcgccagcgcgggccgccggcgatgacggccgcgaagcaggagccgcagcccaccccgggggccagggcgagccaggcgcagccggcggaccaggaactgggaagtaacagccctccacagagaaactggaagggaattgctattgctctgctggtgattttagttgtatgctcactcatcactatgtcagtcatcctcttaaccccagatgaactcacaaattcgtcagaaaccagattgtctttggaagacctctttaggaaagactttgtgcttcacgatccagaggctcggtggatcaatgatacagatgtggtgtataaaagcgagaatggacatgtcattaaactgaatatagaaacaaatgctaccacattattattggaaaacacaacttttgtaaccttcaaagcatcaagacattcagtttcaccagatttaaaatatgtccttctggcatatgatgtcaaacagatttttcattattcgtatactgcttcatatgtgatttacaacatacacactagggaagtttgggagttaaatcctccagaagtagaggactccgtcttgcagtacgcggcctggggtgtccaagggcagcagctgatttatatttttgaaaataatatctactatcaacctgatataaagagcagttcattgcgactgacatcttctggaaaagaagaaataatttttaatgggattgctgactggttatatgaagaggaactcctgcattctcacatcgcccactggtggtcaccagatggagaaagacttgccttcctgatgataaatgactctttggtacccaccatggttatccctcggtttactggagcgttgtatcccaaaggaaagcagtatccgtatcctaaggcaggtcaagtgaacccaacaataaaattatatgttgtaaacctgtatggaccaactcacactttggagctcatgccacctgacagctttaaatcaagagaatactatatcactatggttaaatgggtaagcaataccaagactgtggtaagatggttaaaccgagctcagaacatctccatcctcacagtctgtgagaccactacaggtgcttgtagtaaaaaatatgagatgacatcagatacgtggctctctcagcagaatgaggagcccgtgttttctagagacggcagcaaattctttatgacagtgcctgttaagcaagggggacgtggagaatttcaccacgtagctatgttcctcatccagagtaaaagtgagcaaattaccgtgcggcatctgacatcaggaaactgggaagtgataaagatcttggcatacgatgaaactactcaaaaaatttactttctgagcactgaatcttctcccagaggaaggcagctgtacagtgcttctactgaaggattattgaatcgccaatgcatttcatgtaatttcatgaaagaacaatgtacatattttgatgccagttttagtcccatgaatcaacatttcttattattctgtgaaggtccaagggtcccagtggtcagcctacatagtacggacaacccagcaaaatattttatattggaaagcaattctatgctgaaggaagctatcctgaagaagaagataggaaagccagaaattaaaatccttcatattgacgactatgaacttcctttacagttgtcccttcccaaagattttatggaccgaaaccagtatgctcttctgttaataatggatgaagaaccaggaggccagctggttacagataagttccatattgactgggattccgtactcattgacatggataatgtcattgtagcaagatttgatggcagaggaagtggattccagggtctgaaaattttgcaggagattcatcgaagattaggttcagtagaagtaaaggaccaaataacagctgtgaaatttttgctgaaactgccttacattgactccaaaagattaagcatttttggaaagggttatggtggctatattgcatcaatgatcttaaaatcagatgaaaagctttttaaatgtggatccgtggttgcacctatcacagacttgaaattgtatgcctcagctttctctgaaagataccttgggatgccatctaaggaagaaagcacttaccaggcagccagtgtgctacataatgttcatggcttgaaagaagaaaatatattaataattcatggaactgctgacacaaaagttcatttccaacactcagcagaattaatcaagcacctaataaaagctggagtgaattatactatgcaggtctacccagatgaaggtcataacgtatctgagaagagcaagtatcatctctacagcacaatcctcaaattcttcagtgattgtttgaaggaagaaatatctgtgctaccacaggaaccagaagaagatgaataa

SEQ ID NO: 70344 - DNA, 565 bp, Artificial Sequence
  derived and/or modified sequence
gtacaaaggattctcaggtcaatagctagattttactaaactggccctgaaaattttataattttgattctcaatagcagttttctgtactctagtctgtgagttactggggaacatttgaaggcaagaagaatagcagttaatacggcgtgccaccttctcaccatgcacactggattcgcaggaactgggaagtaacagccctccacagagaaactggaagggaattgctattgctctgctggtgattttagttgtatgctcactcatcactatgtcagtcatcctcttaaccccagatgaactcacaaattcgtcagaaaccagattgtctttggaagacctctttaggaaagactttgtgcttcacgatccagaggctcggtggatcaatgatacagatgtggtgtataaaagcgagaatggacatgtcattaaactgaatatagaaacaaatgctaccacattattattggaaaacacaacttttgtaaccttcaaagcatcaagacattcagtttcaccagatttaaaatatgtccttctggcatatgatgtcaaacag

SEQ ID NO: 70345 - protein, 808 aa, Artificial Sequence
  derived and/or modified sequence
MIWRNNWKSTTGRLNVKLQSDKLQHGCGPDYSSAWLPANESLWQATTVPSNHRNNHIRRHSIASDSGDTGIGTSCSDSVEDHSTSSGTLSFKPSQSLITLPTAHVMPSNSSASISKLRESLTPDGSKWSTSLMQTLGNHSRGEQDSSLDMKDFRPLRKWSSLSKLTAPDNCGQGGTVCREESRNGLEKIGKAKALTSQLRTIGPSCLHDSMEMLRLEDKEINKKRSSTLDCKYKFESCSKEDFRASSSTLRRQPVDMTYSALPESKPIMTSSEAFEPPKYLMLGQQAVGGVPIQPSVRTQMWLTEQLRTNPLEGRNTEDSYSLAPWQQQQIEDFRQGSETPMQVLTGSSRQSYSPGYQDFSKWESMLKIKEGLLRQKEIVIDRQKQQITHLHERIRDNELRAQHAMLGHYVNCEDSYVASLQPQYENTSLQTPFSEESVSHSQQGEFEQKLASTEKEVLQLNEFLKQRLSLFSEEKKKLEEKLKTRDRYISSLKKKCQKESEQNKEKQRRIETLEKYLADLPTLDDVQSQSLQLQILEEKNKNLQEALIDTEKKLEEIKKQCQDKETQLICQKKKEKELVTTVQSLQQKVERCLEDGIRLPMLDAKQLQNENDNLRQQNETASKIIDSQQDEIDRMILEIQSMQGKLSKEKLTTQKMMEELEKKERNVQRLTKALLENQRQTDETCSLLDQGQEPDQSRQQTVLSKRPLFDLTVIDQLFKEMSCCLFDLKALCSILNQRAQGKEPNLSLLLGIRSMNCSAEETENDHSTETLTKKLSDVCQLRRDIDELRTTISDRYAQDMGDNCITQ

SEQ ID NO: 70346 - DNA, 2427 bp, Artificial Sequence
  derived and/or modified sequence
atgatctggagaaacaactggaagagcaccaccggcagactgaacgtgaagctgcagagcgacaagctgcagcacggctgcggccccgactacagcagcgcctggctgcccgccaacgagagcctgtggcaggccaccaccgtgcccagcaaccacagaaacaaccacatcagaagacacagcatcgccagcgacagcggcgacaccggcatcggcaccagctgcagcgacagcgtggaggaccacagcaccagcagcggcaccctgagcttcaagcccagccagagcctgatcaccctgcccaccgcccacgtgatgcccagcaacagcagcgccagcatcagcaagctgagagagagcctgacccccgacggcagcaagtggagcaccagcctgatgcagaccctgggcaaccacagcagaggcgagcaggacagcagcctggacatgaaggacttcagacccctgagaaagtggagcagcctgagcaagctgaccgcccccgacaactgcggccagggcggcaccgtgtgcagagaggagagcagaaacggcctggagaagatcggcaaggccaaggccctgaccagccagctgagaaccatcggccccagctgcctgcacgacagcatggagatgctgagactggaggacaaggagatcaacaagaagagaagcagcaccctggactgcaagtacaagttcgagagctgcagcaaggaggacttcagagccagcagcagcaccctgagaagacagcccgtggacatgacctacagcgccctgcccgagagcaagcccatcatgaccagcagcgaggccttcgagccccccaagtacctgatgctgggccagcaggccgtgggcggcgtgcccatccagcccagcgtgagaacccagatgtggctgaccgagcagctgagaaccaaccccctggagggcagaaacaccgaggacagctacagcctggccccctggcagcagcagcagatcgaggacttcagacagggcagcgagacccccatgcaggtgctgaccggcagcagcagacagagctacagccccggctaccaggacttcagcaagtgggagagcatgctgaagatcaaggagggcctgctgagacagaaggagatcgtgatcgacagacagaagcagcagatcacccacctgcacgagagaatcagagacaacgagctgagagcccagcacgccatgctgggccactacgtgaactgcgaggacagctacgtggccagcctgcagccccagtacgagaacaccagcctgcagacccccttcagcgaggagagcgtgagccacagccagcagggcgagttcgagcagaagctggccagcaccgagaaggaggtgctgcagctgaacgagttcctgaagcagagactgagcctgttcagcgaggagaagaagaagctggaggagaagctgaagaccagagacagatacatcagcagcctgaagaagaagtgccagaaggagagcgagcagaacaaggagaagcagagaagaatcgagaccctggagaagtacctggccgacctgcccaccctggacgacgtgcagagccagagcctgcagctgcagatcctggaggagaagaacaagaacctgcaggaggccctgatcgacaccgagaagaagctggaggagatcaagaagcagtgccaggacaaggagacccagctgatctgccagaagaagaaggagaaggagctggtgaccaccgtgcagagcctgcagcagaaggtggagagatgcctggaggacggcatcagactgcccatgctggacgccaagcagctgcagaacgagaacgacaacctgagacagcagaacgagaccgccagcaagatcatcgacagccagcaggacgagatcgacagaatgatcctggagatccagagcatgcagggcaagctgagcaaggagaagctgaccacccagaagatgatggaggagctggagaagaaggagagaaacgtgcagagactgaccaaggccctgctggagaaccagagacagaccgacgagacctgcagcctgctggaccagggccaggagcccgaccagagcagacagcagaccgtgctgagcaagagacccctgttcgacctgaccgtgatcgaccagctgttcaaggagatgagctgctgcctgttcgacctgaaggccctgtgcagcatcctgaaccagagagcccagggcaaggagcccaacctgagcctgctgctgggcatcagaagcatgaactgcagcgccgaggagaccgagaacgaccacagcaccgagaccctgaccaagaagctgagcgacgtgtgccagctgagaagagacatcgacgagctgagaaccaccatcagcgacagatacgcccaggacatgggcgacaactgcatcacccagtag

SEQ ID NO: 70347 - DNA, 2427 bp, Artificial Sequence
  derived and/or modified sequence
atgatttggcggaacaactggaaaagcaccaccgggcggctcaatgtaaaactgcagagcgataaactgcaacacggctgtgggcccgattactccagcgcctggctccccgccaacgagagtctgtggcaagctactacagtgccgtccaatcaccggaataatcacatcagacgacactcaatcgcttcggatagcggagatacaggaatcggtacttcctgcagcgactctgtcgaggatcactcgacttcttctggaacgctgagctttaaacctagccaaagcctcattactctccctaccgctcatgtgatgccctccaattcttcggcttcaatcagtaaactgagagagtccttgaccccagatggtagtaagtggtccacatccttgatgcaaacactaggaaatcatagcagaggtgaacaggattcttccttggacatgaaggattttcgaccactcaggaagtggagttcattgagcaagctcactgcaccagataactgtggccaaggtgggactgtgtgcagggaagagtcgaggaatggtttagagaaaatcggcaaggcaaaggcgttgacatcacaactacggaccatcgggccctcatgcctgcatgactcgatggagatgctcaggttagaagataaggaaatcaacaaaaagcggagtagcacactggattgcaagtacaaattcgagagttgctccaaagaagatttcagagcatccagttctaccctgcggcgccaacccgtagacatgacttacagtgctctgcccgaatccaagccaataatgacttcttctgaggctttcgaacccccaaaatacctcatgctgggtcagcaggcagtgggcggggtccccattcaaccatcagtacgcactcagatgtggctcaccgagcaattaaggaccaatcctctcgagggccggaacacggaggactcatacagcctggccccttggcagcagcagcagatagaggacttcagacaaggcagtgagacacccatgcaggtgttaaccggaagctctcgtcagagctactcgcccggataccaggatttttctaagtgggagagcatgctaaaaatcaaggaagggttgttgcgtcagaaagaaattgtgattgatagacaaaagcagcagatcacgcatctgcacgaacgaatcagggataacgaactgcgagctcagcacgctatgttggggcactacgttaactgtgaagacagctatgtggcgagtttgcaaccacagtacgagaacactagtctgcagactccattcagcgaggaaagcgtctcacatagtcaacaaggcgaattcgagcagaaactggccagtaccgagaaagaggtgcttcaacttaatgagtttctgaagcagcggttatccctttttagcgaagagaaaaagaaactagaggagaagttgaagaccagagaccggtatatatccagcctgaagaaaaagtgccaaaaagagtccgaacagaacaaggagaagcaaagacggattgagacgctggagaagtatctggctgacctgcccacccttgacgatgtgcagagtcaatccctgcaattacagatccttgaggagaaaaacaagaatctccaggaagcccttattgatactgagaagaaattggaagaaattaagaagcagtgtcaagacaaagagacccagctcatttgtcaaaagaaaaaagagaaggagctcgttacaacagtgcagtccctgcagcagaaggtggaacgctgcctagaagatggcatcaggttgcccatgctggatgccaagcagctgcagaatgaaaacgataacttaaggcagcagaacgagaccgcatcaaagatcatagattcacaacaagacgagatcgatcgcatgatactggaaatccagtcgatgcagggtaagctcagtaaggaaaaacttaccactcagaaaatgatggaggagttggaaaaaaaggaacgcaatgttcagaggctaaccaaagcattactagaaaatcagcggcagaccgacgagacatgcagtctgctcgaccagggccaggagcccgaccagtcacggcaacagacagtcttgtctaagcgtccgttatttgacctgactgttattgaccaactgttcaaggaaatgtcctgctgtctctttgatcttaaagccctctgtagtattctgaatcagcgcgcacagggcaaggagcctaatcttagcctactgcttggaatccgctcaatgaactgctccgcagaggaaacagaaaacgaccactcaaccgagaccctgaccaagaagctgtctgatgtctgtcagctcaggagagatattgatgaactgcggacgaccataagcgatcgctacgctcaagacatgggcgacaactgcatcacacagtag

SEQ ID NO: 70348 - DNA, 7118 bp, Artificial Sequence
  derived and/or modified sequence
gcctatcatttgaagacgttccttgaggaggtttgaaaaaaaacagctgacccttggctaacattacatgatttggagaaataattggaagtctaccacagggagactaaatgtaaaactccaatcagataaattacaacacggatgtggcccagattattcatcagcatggctacctgctaatgaatcattgtggcaggccacaactgttccatctaaccatcgaaataaccatatcaggagacacagtatagcttctgacagtggagacactggcattggaacttcctgttctgatagcgtggaagatcattcaacttcaagtggcacattatcttttaagcctagtcaatcattgattactcttcctactgcccatgtgatgccgtctaattccagcgcttcaatttccaaacttagggaatcattgacaccagatggctcaaaatggagtacaagcctcatgcaaacattgggaaaccacagtaggggggagcaggactcttccctagacatgaaggacttccggccacttcggaaatggtcatctttatccaaactcactgccccggataactgtggccagggtggcactgtatgcagagaagagtcaaggaatggtttggagaagatagggaaggctaaggctttaacatcacaactgaggacaattgggcctagctgtttacatgatagtatggagatgcttaggttagaggacaaggaaataaataaaaaacggtcatcaactctggactgcaagtataaatttgagagctgtagcaaggaggactttagagcctcttcctctactcttaggagacagcctgtagacatgacatatagtgccttacctgaaagcaagcccattatgacaagctcagaggcttttgaacctccaaaatatttaatgcttggtcaacaggcagtaggtggagttcccattcagccttccgtaaggactcagatgtggcttacagagcagctgcggacaaatcctttggaaggtagaaatacagaggattcttacagtttagctccttggcaacagcagcaaattgaagactttcgacaaggaagtgaaacaccaatgcaggttttgactggatcatctcgtcaaagttattcacctggctatcaggatttcagtaagtgggaatcaatgttgaaaataaaagaaggacttctaaggcagaaagaaattgtaatcgatcggcagaagcaacaaattacccacctgcatgagaggataagggataatgaattacgggctcaacatgccatgttaggacattatgtaaattgtgaggattcttatgtggctagtttgcagccacaatatgagaacacttcactccagacaccattttcagaggaatcagtttcccattcccaacaaggggaatttgagcaaaagcttgcatctactgagaaagaagttttacagcttaatgagtttctcaaacaaagactaagcctatttagtgaagagaagaagaaactagaggaaaaacttaaaactagagatcgatacatcagtagtctgaaaaagaaatgccagaaggaatctgaacaaaacaaagaaaagcagagaagaattgagaccttggaaaagtatctggctgatcttccaactctagatgatgtacagagtcagagtctacagctgcagattctggaagaaaaaaataagaatttacaagaggctttgatagatacagaaaaaaaacttgaagagatcaaaaagcagtgtcaagataaagagacacagttaatatgccagaaaaagaaagaaaaggagttagtaactaccgttcagagtttgcaacaaaaagtagaaagatgccttgaagatggaatccgccttcccatgttagatgcaaaacagcttcagaatgaaaatgataatctcagacaacaaaatgagactgctagtaagataatagacagccaacaagatgagattgacagaatgattttagaaattcagtctatgcaaggaaagctttctaaagagaaactgaccactcaaaagatgatggaagagctggaaaagaaagaaagaaatgtacagagattaacaaaagcattgcttgaaaaccaaagacaaacagatgagacatgctctttattggatcagggccaggaacctgaccaatctaggcagcagacagttctttccaaacggccactatttgatttgactgtgattgatcagctgttcaaggaaatgtcctgttgtttgtttgacttgaaagcattgtgtagtattcttaatcagcgtgctcagggcaaggagcctaatctttcattattactgggaataagatcaatgaactgttcagctgaagagactgagaatgaccacagcacagaaacactcactaaaaagctgtcagatgtgtgccagttacgaagagacattgatgaattaaggactacaatatcagaccgctatgctcaggacatgggagacaactgcattactcagtgatcaagtgttagtcccacagcaataatgacctgttgtttaaatgctgctgtgttatggagccataatggaaggttgcaagtgacatgacttgcacttagggattttttttctgtggatttgttttgttgaaggggagaagggaagtgaagagattttgaaggggcttatctaatcaggcaaaaagaaaaaaaatcaaattacctttggaaaatatgataaaatctacaaggaaaaaaatgtctatattctcaaactactgattgtaggaccaagctgtgaagagtacccttcacatgaaggagtaggattccttttaatcctatagctttgtgtgtttgtgtgtgcatgtatgtgtgttgttgtgtgtgtgtgcacgtgctttattcacaaatttataagggtttctagggtcagagcagagcttctgagaaaggcacacgctgtttattcttatatttctttcatatagaagcttgtgttgtactttgggattttcagtggctggctgaacaagagttcaaacagcaggcaagtgttgtcatggtagtacaggaggcaaaaccatttatattttgaacacttactgcactgataggatgtttgtggttgagctgattttagtactgtagataggtcagctgtttttccagagtgattgtggatttcccaagaggtgtgaaattttgacgtgatgctctttttccttagcattgtaatgtatgtgttacaagaaaggttaacataacttgaactaattttaacatgttccttactatttacaattttttatttatatgttttatatatatacatatataaatgtaaacaaagccatatataattaataaaggcattggatcattattataaaaggaagattaacaaagttaccctggaacaatagcttacttatccaaatctcaacatttacattttaacagttttgtatgtttcaaagttgaaactactgtaagagaaagccaatactatttatatctgaatcaacagtagcataaacattttttaattgagattgtattttaatcccttttgttaaagtacattaacaacagtttttcacaggatatgaacttggcgaaattagttcttaatctgaattacagggtattactatgaaatgcagttgattttgcagtagacgtacagtcatttaaacttccaaatgagtgttgtccatgtttctgttggtattttggaaggattatacattttattgccttcagcattgattatgttcttttgaatatacttagttttggcgaaagccttgtcctttgtaagttggtttgatcttgtgatgcaaccaagtctcatttaggtcaagactaaataagagatggaggggtagagggtgtgactcaagcaggataatattgatttgataaagagcatatcacatgcctgttttcttgccagataaagggcatagcacatgcctgttttcttatatactagaataaaggctctcctaggaaagatttttcttaaatatttaaaagtgaaaatgtgagacaaggccttcaaggagactacccaggaagatacacagtttaaaatgttggctatacagctctcaatagattattttatagttatagttgaataatcagttataatacactgtaaagaaatcagattttccttctgtttggtgtctgagtccttcctgctcttcttacttctgagaatctgggcactaagaaatcagtaagtacattgtagtgctcctgcatcccagagtccttaacctaaggagggtcttagtcactggtaagaacttggctttctaattatattcacttggtttttaacattagtagcttgacgataatcagggtatagtaaatttccaccaaaaatgtgatgcgaagaattctgccttggtcctttatggtaaaacagataataacgtctaaaatagatcagccacaagtgcagcaaatatttttacactctctttgaatagaatcccaaccaccctcccccatgattttagaaataaaggcttcctaaaataatagaacaaattggcaaacaatcactaattggaccagtaggttcttacttaaatatctctcctagatttttagtgtatgttttgggattttatgggtttatttatttttttttttttaagcagacgttacagtttgttttaatctactatagatacgtttttgttttttggcttagttggggataaaataatttatttgtaagttagctttctaaaacttagagaaagtaatttaattcacgtatcttaaaaataaaattccaaagttaaaaaatttctgacttagtaggaagttaacaaaactactgctgatgcatttcagtttccaaaatctgtaccctccccccataaaaaagggagttaagatgtgctagtttaagtagttagctgaattatagattgatcctcttaaaatctggagtttgtaaaggggcctacataaacagtagatagacttggagggattttgtgggggaattgaaactaatagtattctatctagtttgtcagtatttactttttgatttttatttttcagaaaattttcctttcccaggacaccctcttgtattagaatatcctcttctgtatcacattaaaaacagattttactgttagaccaaataagatgggcaaatagcaacactagagcatctcacccagtttgaactaggatgttcgtggaagttatgacaccaatatattcctgaaatgaaaattaacctaaattttaaagtgaatctatttgaaaatttacttagataatgaaacctcgttttaattgtgctttttgtgaatccaacacttgtttgcttagaaagtatcttatccagtattaatattttgttcttttgggttttaaagttgagcttattcagcctcaatcacattacagcaagcataaagtaacagttgactcaatgaaagacccaaattgcctgtacagataaaattcactgaatcaaaggcacaatagctatcttttcacttgagctcagaaaagtaaaatggcttaatttgaactattaattttcagtggcctctaattaaacaaaaacaaaaaaccacaaatactggctaggtaagatattcctgaggtcattttaaaagaagtgtggcacctaggattcaatatttaatgctaacagtattatattttagtgaaatttattttggtggtgacagtttattaaacctaattagacttctttcaatagcttgttgtagagacaatctcaagggctggaaagtgttgctaaaatgaatgtcatacatttctgatatactaaggagcttataaagtaattctttcatagtgcaagaattattaatttcttagaggatgtttttaaaggagctacttaattgggaaaatgttctttaaatatcagtaatagttcattaagtaacatagtagctaagaacatggactatattttcacagcatagttcagcttaggcacacctttagtttggattattggcattctcttacgtaggaattatatcattgtagatatgtaattatggtaataagcaattttcataaccatgctcactcagactatatcatttgaaactgccatgtttccatttttgacaattcatgttcacaaaacaacaggaacaatttcctatttggtataaagagcaaaatttccaactttgccccaaaatgccatgggtggcatattgccatatgattatatcatatatttaatcatgtatgggaaagattttggattttttttcttatttaaaaaagtgctaaatataagaatatagttttaaatcagcaagtctaataacactattgcagctgtacacagagagaaccttttgtgcctttttgcctgcagtaagcatttatttctattttacatgagttctaagaatgttgatgattattgcaccttgttcttctgtatataaacttgattaaggaatttttttttttaaagcaaggagccgttttttgttactaggtggataccttagtaaacatgaggggaattatcagatagatgtctttggagcccagccttccctgtgtagtgagctggaaactcctttagattgtattcattggtgtgtatgtatatgtacatatatgtataaatagttaaatacataaacataaaacttaacatcgcattgttgtgatgacaagaagtagtaaggtgctaggtggttacattaaaaagcacagcacagtgtataatcagtcactatgactggtggttttgtaagctgggttcagtttttgaaccacccagaatacctcatgtgtaaatacagtgttcatgacttaattgaaatacagttattgtttaaaaaaaaaaaaaaagaatgtgaagccactggttggcttatgccttctgatctatcattcttgcctctttttttgtaaaggggttttcttcttgttgttctgttttttaatagggtttacagctagaattttgaatgccaaagttctatttattaaattaagaaaaaagttttcaatgttaatggctagtatttttccactggactattgtttgttgatgttggaatttgtatttacagagaaataaatttttt

SEQ ID NO: 70349 - DNA, 2427 bp, Artificial Sequence
  derived and/or modified sequence
atgatctggaggaacaactggaagagcaccaccggccgcctgaatgtgaagctgcagagcgacaagctgcagcacggctgcggccctgactacagcagcgcctggctgcctgccaatgaaagcctgtggcaggccaccaccgtgcccagcaaccacaggaacaaccacatccgccgccacagcatcgccagtgacagcggggacacaggaattggcaccagctgcagcgacagcgtggaggaccacagcaccagcagcggcaccctgtccttcaagcccagccagagcctcatcaccctgcccacagcccacgtgatgcccagcaacagcagcgccagcatcagcaagctgcgggagagcctgaccccagatggcagcaagtggagcaccagcctgatgcagaccctgggcaaccacagcagaggagagcaggacagcagcctggacatgaaggacttccggcccctgaggaagtggagcagcctgagcaagctgacagccccagacaactgtggccagggcggcaccgtgtgccgggaggagagcagaaatggcctggagaagattggcaaggccaaggccctgaccagccagctgcggaccatcggccccagctgcctgcatgacagcatggagatgctgcggctggaggacaaggagatcaacaagaagaggagcagcaccctggactgcaagtacaagtttgagagctgcagcaaagaagacttccgggccagcagcagcaccctgcggcggcagcctgtggacatgacctacagcgccctgcctgagagcaagcccatcatgaccagcagcgaggcctttgagccccccaagtacctgatgctgggccagcaggccgtgggcggcgtgcccatccagcccagcgtgaggacccagatgtggctgacagagcagctgcggaccaaccccctggagggcaggaacacagaggacagctacagcctggccccctggcagcagcagcagatcgaggacttccggcagggcagcgagacccccatgcaggtgctgaccggcagcagccggcagagctacagccctggctaccaggacttcagcaagtgggagagcatgctgaagatcaaggagggcctgctgcggcagaaggagatcgtgattgaccggcagaagcagcagatcacccacctgcacgagcgcatccgggacaatgagctgcgggcccagcacgccatgctgggccactacgtgaactgtgaggacagctatgtggccagcctgcagccccagtatgagaacaccagcctgcagacccccttcagcgaggagagcgtgagccacagccagcagggcgagtttgagcagaagctggccagcacagagaaggaggtgctgcagctgaatgagttcctgaagcagaggctgagcctcttcagcgaggagaagaagaagctggaggagaagctgaagacccgggaccgctacatcagcagcctgaagaagaagtgccagaaggagagcgagcagaacaaggagaagcagaggagaattgagaccctggagaagtacctggccgacctgcccaccctggatgatgtgcagagccagagcctgcagctgcagatcctggaggagaagaacaagaacctgcaggaggccctgattgacacagagaagaagctggaggagatcaagaagcagtgccaggacaaggagacccagctgatctgccagaagaagaaggagaaggagctggtgaccaccgtgcagagcctgcagcagaaggtggagcgctgcctggaggatggcatccggctgcccatgctggatgccaagcagctgcagaatgaaaatgacaacctgcggcagcagaatgaaacagccagcaagatcatcgacagccagcaggatgaaattgacaggatgatcctggagatccagagcatgcagggcaagctgagcaaggagaagctgaccacccagaagatgatggaggagctggagaagaaggagagaaatgtgcagaggctgaccaaggccctgctggagaaccagaggcagacagatgagacctgcagcctgctggaccagggccaggagccagaccagagccggcagcagacagtgctgagcaagaggcccctgtttgacctgactgtgattgaccagctgttcaaggagatgagctgctgcctgtttgacctgaaggccctgtgcagcatcctgaaccagagggcccagggcaaggagcccaacctgagcctgctgctgggcatccgctccatgaactgcagcgctgaggagacagaaaatgaccacagcacagagaccctgaccaagaagctgagtgatgtgtgccagctgcggcgggacattgatgagctgcggaccaccatcagtgacagatatgcccaggacatgggagacaactgcatcacccagtag

SEQ ID NO: 70350 - DNA, 2427 bp, Artificial Sequence
  derived and/or modified sequence
atgatctggcggaacaactggaagagcaccaccggccggctgaacgttaaacttcaaagcgataagctgcaacatggatgcgggcccgattactcttctgcatggctgcccgccaatgagagcctgtggcaggccacgaccgtacctagtaatcatcggaataatcacatccgaaggcatagcatcgccagcgatagtggggacacaggaatcgggacctcatgctctgactcggtggaggatcactcaacctctagcggcactctgtctttcaagccttcccaatctctcattactctgccaaccgcccatgtgatgccatctaactcttctgccagcattagcaagcttagagaatctttaactccagacggatccaaatggtcaacctccttgatgcagaccctggggaaccattcacggggggagcaggattcctcacttgatatgaaagatttccgcccactgcggaaatggtcttcattgtctaagctgaccgctccggataattgtggacagggcgggactgtgtgccgagaagagagccgaaacgggctcgaaaagattgggaaagcaaaggcactcacatctcaacttagaaccatcgggccctcctgcctccatgattctatggaaatgttaagattggaagacaaagaaataaataagaaaaggtcctctacacttgactgcaagtataagtttgagtcgtgttcgaaagaagatttccgagcttctagtagtaccctccgaaggcagcccgtggatatgacatacagcgcactcccggaatccaagcctatcatgacctcctctgaggcatttgagcccccaaagtatttaatgctgggccagcaggcagtcggaggcgtgcctatccagccctccgtgcggacacaaatgtggctcaccgaacagctacgtacaaatcccctcgaggggcgtaataccgaggacagctatagccttgccccctggcagcaacagcagattgaggactttcgccaaggatcggagaccccgatgcaggttctaaccggcagttcgcgccaatcatactcacctggataccaggatttttctaagtgggaatccatgctgaagataaaagaaggactgttgagacagaaagagattgtcattgacagacagaagcagcagatcactcatttgcatgagaggatcagggataacgaactacgggcgcagcatgccatgttagggcattatgtaaattgcgaggattcatacgtagcaagtctccagccccagtacgagaatacttctttacagactcctttctccgaggagtccgtctcccacagccagcagggggagttcgagcaaaaacttgcaagtaccgaaaaggaggtgctgcagttgaatgagtttctgaagcaacgacttagcctttttagcgaagagaagaaaaaactggaggaaaagctgaagactagggacagatatattagttctctcaagaaaaagtgtcagaaggaatcagaacagaataaagaaaagcagcggcgcatcgaaactttggagaaatacctggcagatctgcctacgctggacgacgtccagagccagagtttacagcttcagatcctcgaggagaagaataagaatctccaggaggccctaattgataccgaaaagaagctggaagaaatcaagaaacagtgtcaagataaagagacccagctgatttgtcagaaaaaaaaagaaaaggagctcgttaccactgtacagtcccttcaacagaaggtagagagatgtttagaggacgggatccggttgcccatgctggacgctaagcagttgcagaatgagaacgacaacttacgacaacaaaatgaaaccgcttccaagatcattgattctcagcaggacgagatagacagaatgattttagagatacaatctatgcagggcaaactgtcaaaggagaagctgactacccagaaaatgatggaggaactggagaaaaaggagcggaatgtgcagagactcactaaagcgctgttggagaatcagcgtcaaaccgatgagacatgttcactcttggaccagggacaggaacccgatcagagcagacagcagaccgtgctcagcaagcgccctctgttcgacctaacggtcattgatcagctgttcaaggaaatgtcgtgctgcctctttgatctcaaggctttatgtagcatactgaatcagcgcgctcagggtaaggaacccaatcttagcttactgctgggaatccgttccatgaactgttccgcagaggaaaccgagaatgaccattccacggagacactcactaagaaactgtcagacgtgtgccaactaagaagagatattgacgagctcaggaccacaattagtgataggtacgcccaggacatgggagataactgcatcacgcagtag

SEQ ID NO: 70351 - DNA, 2427 bp, Artificial Sequence
  derived and/or modified sequence
atgatctggcgaaacaattggaagtccactacaggcagattaaacgtgaaactacagtccgataaactgcagcacggctgtgggcctgactactcctccgcctggctgcctgcaaatgagagcctttggcaggcaaccacagttccttccaatcaccggaataatcatattcggaggcattcgatcgcctcagacagcggagatacggggattggcacatcatgcagtgactccgtggaggaccactcaacttccagcgggaccctttcctttaaacccagccaatctttgatcactctccctaccgcccacgtgatgccttcaaattcctccgctagcatctccaaactgcgggagtccctgaccccagatggtagcaaatggtcaaccagcttgatgcagacccttggcaatcactcaaggggggaacaagattccagtctggatatgaaagattttagacctctacggaagtggagttccctgtcaaaactgactgcccctgataattgcggccagggcggtacagtatgtcgagaagaatcacggaatggcctcgagaagatcggcaaagctaaggccctgacttctcagctgcgcacgatcggcccttcatgtcttcatgacagtatggagatgttgagacttgaagataaagagattaacaagaagcggagctcgaccctcgattgtaaatacaagtttgagagctgcagtaaggaagatttccgggctagctctagcacactcagacggcagccagtcgacatgacttattcagcattgcccgagtccaaacccattatgacaagctcggaggcgttcgagcctccaaagtacctcatgctcggacaacaggctgtgggcggtgtacctattcaaccttcagtgagaacacagatgtggctgacagagcaactgaggaccaaccccttggagggaaggaataccgaggactcctattcactcgcaccttggcagcaacaacagattgaggatttccggcagggctcagaaacacctatgcaggtactcaccggcagttctcgccagtcctactctccaggctaccaggattttagcaagtgggagagtatgctgaagatcaaggaaggcttgttgcgtcaaaaagagatcgtgatcgaccggcagaagcaacagatcacccatctgcatgagcggatcagggacaatgagctgcgcgctcagcacgcaatgttgggccattatgtgaactgcgaggactcctacgtggccagcctccagcctcagtacgagaatacaagtttgcagactcctttttcagaggaatccgtgtctcatagtcagcagggagagttcgaacagaagttagcaagcaccgagaaagaggttctccaactgaatgagttcctgaaacagagactgtctctgttttctgaggaaaaaaagaaacttgaagagaaactcaagacacgggaccgttacatctcttcactgaaaaagaagtgtcagaaagaaagcgaacaaaacaaagagaagcagcgtcgaatcgagaccctggagaagtatctggcagacctgcctaccctggatgacgttcagtctcagtctttgcagcttcagatactcgaggaaaagaataagaatctgcaagaggcactcatcgacaccgagaaaaaactggaagaaatcaagaaacaatgccaggacaaggaaacccagctgatctgtcagaagaaaaaggaaaaggagcttgttaccacagttcaaagcctccaacaaaaggtggaacggtgtctggaggacggtattagactgcccatgttggacgctaagcaactgcagaatgagaatgacaatttacgccagcagaatgaaactgccagtaaaatcatcgattcccagcaggatgagattgaccggatgatcctcgagatacaaagcatgcagggcaagctttccaaggaaaagcttaccacacagaagatgatggaagagctggagaaaaaagagaggaatgtgcagcgtcttacgaaggcactgttggagaaccagcggcagaccgacgagacatgttccctcctggaccaggggcaagagcccgatcagtccaggcagcagacggtgctgtccaaacgccctttgttcgacctaaccgtaattgatcaactcttcaaggagatgagctgttgcttgtttgatctcaaagcactctgctctatactgaaccagcgcgctcagggtaaggagcccaatcttagccttctgttaggcatcagaagcatgaactgcagcgcagaagaaacagagaacgaccactctaccgagacacttaccaaaaaactgtctgacgtctgtcagttaagacgcgatatcgacgaactaagaactacaatcagcgatagatacgcccaggacatgggagacaactgtatcactcagtag

SEQ ID NO: 70352 - DNA, 294 bp, Artificial Sequence
  derived and/or modified sequence
atgagtgtgattctactgactcctgatgagctgactaactcctcggagactcgcctctctctcgaagacttgtttcggaaagactttgtcctgcacgacccagaagcccgctggatcaacgacactgacgttgtctataaaagcgagaatggtcacgtgatcaagttgaacatcgagacaaatgccaccacacttcttttagagaatacgacattcgtgacttttaaagcgagtcgccattccgtcagtcctgatctcaagtatgttttgctcgcgtatgatgtcaaacagtag

SEQ ID NO: 70353 - DNA, 294 bp, Artificial Sequence
  derived and/or modified sequence
atgtctgtcatcctgctgaccccagatgagctgaccaacagcagcgagacccggctgagcctggaggacctcttcaggaaggactttgtgctgcatgaccctgaggcccgctggatcaatgacacagatgtggtgtacaagtcagaaaatggccacgtgatcaagctgaacatcgagaccaatgccaccaccctgctgctggagaacaccacctttgtgaccttcaaggccagccgccacagcgtgtccccagacctgaagtatgtgctgctggcctatgatgtgaagcagtag

SEQ ID NO: 70354 - DNA, 294 bp, Artificial Sequence
  derived and/or modified sequence
atgagcgtgatcctgctgacccccgacgagctgaccaacagcagcgaaacaaggctgagcctggaagacctgttccgtaaggacttcgtgctgcacgaccccgaggctagatggatcaacgacacggacgtggtgtacaaatctgagaatggtcacgtcataaaactcaatatcgagactaatgccacaacgttgttgttggagaacaccacctttgtcacctttaaagcctccagacacagcgttagtcctgatctcaaatatgttctccttgcttacgacgttaaacaatag

SEQ ID NO: 70355 - DNA, 294 bp, Artificial Sequence
  derived and/or modified sequence
atgtctgtcattctgctgacaccagacgagctgaccaacagctccgaaaccaggctgagtctagaagatctgttcaggaaggatttcgtcttgcatgatcccgaagctcgctggatcaatgataccgacgtggtttataagtctgagaatggccacgttatcaagctgaatatcgaaacgaacgcgaccacactgttgttagaaaataccacgttcgtcacctttaaagcctctcgtcattcagtgtcgccagacttgaagtatgtgctgctggcttatgacgttaagcaatag

SEQ ID NO: 70356 - DNA, 294 bp, Artificial Sequence
  derived and/or modified sequence
atgagcgtgatcctgctgacccccgacgagctgaccaacagcagcgagaccagactgagcctggaggacctgttcagaaaggacttcgtgctgcacgaccccgaggccagatggatcaacgacaccgacgtggtgtacaagagcgagaacggccacgtgatcaagctgaacatcgagaccaacgccaccaccctgctgctggagaacaccaccttcgtgaccttcaaggccagcagacacagcgtgagccccgacctgaagtacgtgctgctggcctacgacgtgaagcagtag

SEQ ID NO: 70357 - protein, 180 aa, Artificial Sequence
  derived and/or modified sequence
MEKHIEEDEVRSSADLRIRKSQHSVLSRKFVEVMTKYNEAQVDFRERSKGRIQRQLEITGKKTTDEELEEMLESGNPAIFTSGIIDSQISKQALSEIEGRHKDIVRLESSIKELHDMFMDIAMLVENQGSMIDRIENNMDQSVGFVERAVADTKKAVKYQSEARRKLISLQTGVATLVFR

SEQ ID NO: 70358 - protein, 277 aa, Artificial Sequence
  derived and/or modified sequence
MKDRLEQLKAKQLTQDDDTDAVEIAIDNTAFMDEFFSEIEETRLNIDKISEHVEEAKKLYSIILSAPIPEPKTKDDLEQLTTEIKKRANNVRNKLKSMEKHIEEDEVRSSADLRIRKSQHSVLSRKFVEVMTKYNEAQVDFRERSKGRIQRQLEITGKKTTDEELEEMLESGNPAIFTSGIIDSQISKQALSEIEGRHKDIVRLESSIKELHDMFMDIAMLVENQGEMLDNIELNVMHTVDHVEKARDETKKAVKYQSQARKKLISLQTGVATLVFR

SEQ ID NO: 70359 - DNA, 777 bp, Artificial Sequence
  derived and/or modified sequence
atggacgagttcttcagcgagatcgaggagaccagactgaacatcgacaagatcagcgagcacgtggaggaggccaagaagctgtacagcatcatcctgagcgcccccatccccgagcccaagaccaaggacgacctggagcagctgaccaccgagatcaagaagagagccaacaacgtgagaaacaagctgaagagcatggagaagcacatcgaggaggacgaggtgagaagcagcgccgacctgagaatcagaaagagccagcacagcgtgctgagcagaaagttcgtggaggtgatgaccaagtacaacgaggcccaggtggacttcagagagagaagcaagggcagaatccagagacagctggagatcaccggcaagaagaccaccgacgaggagctggaggagatgctggagagcggcaaccccgccatcttcaccagcggcatcatcgacagccagatcagcaagcaggccctgagcgagatcgagggcagacacaaggacatcgtgagactggagagcagcatcaaggagctgcacgacatgttcatggacatcgccatgctggtggagaaccagggcgagatgctggacaacatcgagctgaacgtgatgcacaccgtggaccacgtggagaaggccagagacgagaccaagaaggccgtgaagtaccagagccaggccagaaagaagctgatcatcatcatcgtgctggtggtggtgctgctgggcatcctggccctgatcatcggcctgagcgtgggcctgaactag

SEQ ID NO: 70360 - DNA, 870 bp, Artificial Sequence
  derived and/or modified sequence
atgaaggacagactggagcagctgaaggccaagcagctgacccaggacgacgacaccgacgccgtggagatcgccatcgacaacaccgccttcatggacgagttcttcagcgagatcgaggagaccagactgaacatcgacaagatcagcgagcacgtggaggaggccaagaagctgtacagcatcatcctgagcgcccccatccccgagcccaagaccaaggacgacctggagcagctgaccaccgagatcaagaagagagccaacaacgtgagaaacaagctgaagagcatggagaagcacatcgaggaggacgaggtgagaagcagcgccgacctgagaatcagaaagagccagcacagcgtgctgagcagaaagttcgtggaggtgatgaccaagtacaacgaggcccaggtggacttcagagagagaagcaagggcagaatccagagacagctggagatcaccggcaagaagaccaccgacgaggagctggaggagatgctggagagcggcaaccccgccatcttcaccagcggcatcatcgacagccagatcagcaagcaggccctgagcgagatcgagggcagacacaaggacatcgtgagactggagagcagcatcaaggagctgcacgacatgttcatggacatcgccatgctggtggagaaccagggcgagatgctggacaacatcgagctgaacgtgatgcacaccgtggaccacgtggagaaggccagagacgagaccaagaaggccgtgaagtaccagagccaggccagaaagaagctgatcatcatcatcgtgctggtggtggtgctgctgggcatcctggccctgatcatcggcctgagcgtgggcctgaactag

SEQ ID NO: 70361 - DNA, 543 bp, Artificial Sequence
  derived and/or modified sequence
atggagaagcacatcgaggaggacgaggtgagaagcagcgccgacctgagaatcagaaagagccagcacagcgtgctgagcagaaagttcgtggaggtgatgaccaagtacaacgaggcccaggtggacttcagagagagaagcaagggcagaatccagagacagctggagatcaccggcaagaagaccaccgacgaggagctggaggagatgctggagagcggcaaccccgccatcttcaccagcggcatcatcgacagccagatcagcaagcaggccctgagcgagatcgagggcagacacaaggacatcgtgagactggagagcagcatcaaggagctgcacgacatgttcatggacatcgccatgctggtggagaaccagggcagcatgatcgacagaatcgagaacaacatggaccagagcgtgggcttcgtggagagagccgtggccgacaccaagaaggccgtgaagtaccagagcgaggccagaagaaagctgatcagcctgcagaccggcgtggccaccctggtgttcagatag

SEQ ID NO: 70362 - DNA, 834 bp, Artificial Sequence
  derived and/or modified sequence
atgaaggacagactggagcagctgaaggccaagcagctgacccaggacgacgacaccgacgccgtggagatcgccatcgacaacaccgccttcatggacgagttcttcagcgagatcgaggagaccagactgaacatcgacaagatcagcgagcacgtggaggaggccaagaagctgtacagcatcatcctgagcgcccccatccccgagcccaagaccaaggacgacctggagcagctgaccaccgagatcaagaagagagccaacaacgtgagaaacaagctgaagagcatggagaagcacatcgaggaggacgaggtgagaagcagcgccgacctgagaatcagaaagagccagcacagcgtgctgagcagaaagttcgtggaggtgatgaccaagtacaacgaggcccaggtggacttcagagagagaagcaagggcagaatccagagacagctggagatcaccggcaagaagaccaccgacgaggagctggaggagatgctggagagcggcaaccccgccatcttcaccagcggcatcatcgacagccagatcagcaagcaggccctgagcgagatcgagggcagacacaaggacatcgtgagactggagagcagcatcaaggagctgcacgacatgttcatggacatcgccatgctggtggagaaccagggcgagatgctggacaacatcgagctgaacgtgatgcacaccgtggaccacgtggagaaggccagagacgagaccaagaaggccgtgaagtaccagagccaggccagaaagaagctgatcagcctgcagaccggcgtggccaccctggtgttcagatag

SEQ ID NO: 70363 - DNA, 777 bp, Artificial Sequence
  derived and/or modified sequence
atggatgagttcttttccgagatagaagaaactcggctcaacatagacaagatatctgagcacgtcgaggaagcgaagaagctctactctattatattgagtgcacccattcctgaacccaagactaaggacgatctcgaacagttgaccactgaaataaagaaacgggcaaataatgtgcgcaacaaactcaagagcatggagaagcatatagaggaggacgaggttcgctcaagtgccgacctgaggatcaggaagagccagcatagcgtgctgtcccggaaatttgtcgaagtaatgaccaaatacaatgaggcccaggttgactttagagaaaggtccaagggaaggatacagagacagctggagatcactggcaagaagacaactgatgaagagctggaggaaatgctagagagcggcaatcccgccattttcacatcaggtatcattgactcgcaaatctccaaacaagccctctctgagatagaaggcagacataaagacatcgtcagattagaaagcagcatcaaagagctgcatgacatgttcatggatatcgccatgctcgtggagaaccaaggcgaaatgttggataatatcgaattgaatgttatgcacacagtcgatcacgtggagaaggctcgagatgaaactaagaaagccgtaaaatatcaatcccaggccaggaagaagttgataataattatagtcttggtggtggttctcctcgggatacttgctttaataatcggcttaagcgttgggcttaactag

SEQ ID NO: 70364 - DNA, 870 bp, Artificial Sequence
  derived and/or modified sequence
atgaaggaccggctggagcaacttaaggccaaacagctaacccaggacgacgatactgacgccgtggaaatcgccatagacaacacagctttcatggatgagttttttagtgagattgaagagacccgactgaatattgacaagatttcagagcacgtcgaggaggctaaaaaactctactcaattatcctgagcgcaccaattccggagccgaagactaaagacgatttagagcagctgactactgagatcaagaaacgtgcaaataatgtccgcaataaactcaagtctatggaaaagcatattgaagaggacgaagtaagatcatctgccgatttgagaattagaaagtcacagcactctgttttgtcgaggaaattcgttgaggtcatgactaaatacaatgaggcccaggttgatttcagggaacgcagtaaagggcgaatccagcgccaacttgaaataacggggaagaaaaccaccgacgaagagctcgaagaaatgctcgagtctggaaacccagctatatttacctcagggattatcgacagccagatatccaagcaggccttatctgagatcgagggccgacacaaagatattgtccgtctggaatcgagtatcaaagagcttcacgatatgttcatggatatagccatgctcgtggagaatcagggcgaaatgctcgataacatcgagctcaacgtcatgcacaccgtcgatcatgtcgaaaaggcaagggacgaaaccaagaaagccgtgaagtatcagtcacaagcccggaaaaagctcattataatcatcgtgctggttgtggtcctgctggggatattagcgctgatcatcggtctgtccgtaggcctcaactag

SEQ ID NO: 70365 - DNA, 543 bp, Artificial Sequence
  derived and/or modified sequence
atggaaaagcatatagaggaggacgaagtaagatcctctgcggacctaagaatcaggaagtcccagcacagtgtcctctcccgtaaattcgtcgaggtgatgacaaaatataacgaggctcaagtggatttccgggagcgaagcaaaggccgcatccaaaggcagctggaaatcaccggaaagaagaccaccgatgaggagctagaagagatgctggaaagcggaaaccccgcaatctttaccagtggcattattgacagtcagatctccaaacaggccctgagtgaaatcgagggccgtcacaaagatatcgtgcgccttgaatcctccataaaggaactccacgacatgttcatggacattgctatgttggtggagaaccagggatcaatgatcgatcggatagagaacaacatggatcagagtgtcggattcgtggagagagccgtggctgatacgaagaaagcagttaaataccagtctgaggcacgcaggaagttgattagtcttcagacaggagtggcaacattagtgttcaggtag

SEQ ID NO: 70366 - DNA, 834 bp, Artificial Sequence
  derived and/or modified sequence
atgaaggatcgcctggaacagctcaaggcgaaacagctgactcaggatgacgatacagacgctgtcgagatcgcgattgataacacagcgtttatggatgagttttttagcgagattgaagagaccaggctcaatatcgacaagatcagtgagcatgtcgaggaagcaaaaaagctgtactccattatactgtctgcacccatcccagagccgaagacaaaggatgaccttgaacaacttaccactgaaataaaaaagagggctaacaatgtccggaataagcttaagtctatggagaagcatattgaggaggacgaggtgcggtctagcgccgacttaagaattagaaagagccagcatagcgtgctgagcaggaaattcgtcgaagtaatgacaaagtataatgaggcccaggtagactttagggaacggtccaaggggcggatccagaggcagttggagatcacagggaaaaaaactacagatgaggagctggaggaaatgctggagagtgggaacccagcaatctttacctccggcatcatcgattctcagatcagcaagcaggctctgtcggaaatcgagggccgtcacaaggatattgtcaggctagaatcttccatcaaggagcttcatgatatgttcatggacatcgccatgctggtcgaaaaccagggcgagatgctggataacattgagttgaatgtgatgcacacagtggaccacgtggaaaaagctagggatgagaccaagaaggcagtaaagtatcagtctcaggctagaaaaaaactaataagcctgcagacaggggtggcgactctcgtcttcaggtag

SEQ ID NO: 70367 - DNA, 777 bp, Artificial Sequence
  derived and/or modified sequence
atggatgagttcttcagcgagattgaggagacccggctgaacatcgacaagatcagcgagcacgtggaggaggccaagaagctgtacagcatcatcctgagcgcccccatccctgagcccaagaccaaggatgacctggagcagctgaccacagagatcaagaagagggccaacaacgtgaggaacaagctgaagtccatggagaagcacattgaagaagatgaggtgcgcagcagcgctgacctgcgcatcaggaagagccagcacagcgtgctgagcaggaagtttgtggaggtgatgaccaagtacaatgaggcccaggtggacttccgggagaggagcaagggccgcatccagaggcagctggagatcaccgggaagaagaccacagatgaggagctggaggagatgctggagagcggcaacccagccatcttcaccagcggcatcatcgacagccagatcagcaagcaggccctgtctgaaattgagggccgccacaaggacatcgtgcggctggagagcagcatcaaggagctgcatgacatgttcatggacatcgccatgctggtggagaaccagggcgagatgctggacaacatcgagctgaatgtgatgcacacagtggaccacgtggagaaggccagagatgagaccaagaaggctgtgaagtaccagagccaggccaggaagaagctgatcatcatcatcgtgctggtggtggtgctgctgggcatcctggccctgatcatcggcctgtctgtgggcctgaactag

SEQ ID NO: 70368 - DNA, 870 bp, Artificial Sequence
  derived and/or modified sequence
atgaaggaccggctggagcagctgaaggccaagcagctgacccaggatgatgacacagatgctgtggagatcgccatcgacaacacagccttcatggatgagttcttcagcgagattgaggagacccggctgaacatcgacaagatcagcgagcacgtggaggaggccaagaagctgtacagcatcatcctgagcgcccccatccctgagcccaagaccaaggatgacctggagcagctgaccacagagatcaagaagagggccaacaacgtgaggaacaagctgaagtccatggagaagcacatcgaggaggatgaggtgcgcagcagcgctgacctgcgcatcaggaagagccagcacagcgtgctgagcaggaagtttgtggaggtgatgaccaagtacaatgaggcccaggtggacttccgggagaggagcaagggccgcatccagaggcagctggagatcaccgggaagaagaccacagatgaggagctggaggagatgctggagagcggcaacccagccatcttcaccagcggcatcatcgacagccagatcagcaagcaggccctgtctgaaattgagggccgccacaaggacatcgtgcggctggagagcagcatcaaggagctgcatgacatgttcatggacatcgccatgctggtggagaaccagggcgagatgctggacaacatcgagctgaatgtgatgcacacagtggaccacgtggagaaggccagagatgagaccaagaaggctgtgaagtaccagagccaggccaggaagaagctgatcatcatcatcgtgctggtggtggtgctgctgggcatcctggccctgatcatcggcctgtctgtgggcctgaactag

SEQ ID NO: 70369 - DNA, 543 bp, Artificial Sequence
  derived and/or modified sequence
atggagaagcacattgaagaagatgaggtgcgcagcagcgctgacctgcgcatcaggaagagccagcacagcgtgctgagcaggaagtttgtggaggtgatgaccaagtacaatgaggcccaggtggacttccgggagaggagcaagggccgcatccagaggcagctggagatcaccgggaagaagaccacagatgaggagctggaggagatgctggagagcggcaacccagccatcttcaccagcggcatcatcgacagccagatcagcaagcaggccctgtctgaaattgagggccgccacaaggacatcgtgcggctggagagcagcatcaaggagctgcatgacatgttcatggacatcgccatgctggtggagaaccagggctccatgattgacagaattgagaacaacatggaccagagcgtgggctttgtggagagagctgtggccgacaccaagaaggctgtgaagtaccagagcgaggcccggaggaagctgatcagcctgcagacaggagtggccaccctggtgttcagatag

SEQ ID NO: 70370 - DNA, 834 bp, Artificial Sequence
  derived and/or modified sequence
atgaaggaccggctggagcagctgaaggccaagcagctgacccaggatgatgacacagatgctgtggagatcgccatcgacaacacagccttcatggatgagttcttcagcgagattgaggagacccggctgaacatcgacaagatcagcgagcacgtggaggaggccaagaagctgtacagcatcatcctgagcgcccccatccctgagcccaagaccaaggatgacctggagcagctgaccacagagatcaagaagagggccaacaacgtgaggaacaagctgaagtccatggagaagcacatcgaggaggatgaggtgcgcagcagcgctgacctgcgcatcaggaagagccagcacagcgtgctgagcaggaagtttgtggaggtgatgaccaagtacaatgaggcccaggtggacttccgggagaggagcaagggccgcatccagaggcagctggagatcaccgggaagaagaccacagatgaggagctggaggagatgctggagagcggcaacccagccatcttcaccagcggcatcatcgacagccagatcagcaagcaggccctgtctgaaattgagggccgccacaaggacatcgtgcggctggagagcagcatcaaggagctgcatgacatgttcatggacatcgccatgctggtggagaaccagggcgagatgctggacaacatcgagctgaatgtgatgcacacagtggaccacgtggagaaggccagagatgagaccaagaaggctgtgaagtaccagagccaggccaggaagaagctgatcagcctgcagacaggagtggccaccctggtgttcagatag

SEQ ID NO: 70371 - DNA, 777 bp, Artificial Sequence
  derived and/or modified sequence
atggacgagttcttcagcgagatcgaggagacccggctgaacatcgataaaatttcagagcatgtagaagaggccaaaaagctctattcaattatactgtcggctcctattcccgaacccaagactaaggacgatctggagcagctgactactgaaatcaagaaacgggctaacaatgtacgaaacaaacttaaaagcatggaaaaacatattgaagaagatgaggtgagatcaagcgctgatctcaggatccgcaagtcccaacactcggtactctcgcgtaaattcgtggaggtgatgaccaagtacaacgaggcccaagtggattttcgggagagaagtaaagggaggattcagagacaacttgaaattaccggcaagaagacgactgatgaggagctggaggagatgcttgagagcgggaatcccgccattttcaccagcgggattattgattcacagatctcaaaacaggctctttctgaaattgagggcaggcacaaggacatcgtgaggctcgagtcttccattaaagagcttcacgatatgtttatggatatcgctatgttggtggagaaccagggagaaatgttggacaatatcgaactgaacgtcatgcacactgtggatcacgtcgagaaggccagagatgagactaaaaaggcggtgaagtaccagtcacaagcaagaaagaagctgatcattatcattgtgctcgttgtggtactcttgggcatcctcgctttgataatcggtctcagtgttggcctgaattag

SEQ ID NO: 70372 - DNA, 870 bp, Artificial Sequence
  derived and/or modified sequence
atgaaggaccggctggagcagctgaaggccaagcagctgacccaggatgacgatacagacgcggtggaaatcgcaattgacaatacagcttttatggacgagttcttctcggagattgaagaaacacgattaaacatagataagatatctgagcacgtggaagaagctaagaagttatactccatcatcctgagtgcaccgatacctgagcccaagacaaaagacgaccttgagcagctgactaccgagattaaaaagcgagcgaataacgtacgcaataagctgaagtccatggaaaagcatattgaagaagacgaagtccggtcctcggcagacctgaggatcaggaaatctcagcactcagtcctgagtaggaagttcgtcgaagtcatgaccaaatataacgaggctcaggtggatttcagggagaggtcaaaaggtagaatccagaggcagctggaaattacagggaagaagaccaccgatgaagaacttgaagagatgttagagtccgggaatccagccatttttacctctggtattatcgacagccagattagtaagcaagccttgtccgagatcgagggtcggcataaggatattgtgcgccttgagagcagtataaaggaactgcacgatatgttcatggacatcgctatgctcgtggagaaccagggtgaaatgcttgacaacattgagctgaatgtgatgcacactgtcgaccacgtcgaaaaggctcgcgatgaaacgaaaaaagcagttaagtaccagagccaagctagaaagaaacttataataatcattgtgctggtggtggtgttgcttgggattcttgcactgattataggcctgtctgtgggcctcaattag

SEQ ID NO: 70373 - DNA, 543 bp, Artificial Sequence
  derived and/or modified sequence
atggagaagcacatcgaggaggacgaggtgcggagcagcgccgaccttaggattcgtaagagccagcacagtgttctgagcagaaagtttgtcgaggtcatgacgaagtacaacgaggcccaggttgactttagagaaagaagcaagggacgcattcaaagacaattggaaatcaccggtaagaagactacagacgaggagctcgaggagatgctggaaagcgggaaccccgccatctttacctccgggataattgacagccaaatcagtaagcaagctcttagcgaaattgaggggagacacaaagatattgtgaggttagaaagcagcattaaagagctgcacgacatgttcatggacattgccatgttggtcgagaaccagggatccatgattgaccggatcgaaaacaatatggaccagtctgtgggcttcgtggagcgggccgttgcagacactaaaaaggccgttaagtaccagtccgaagcacgacggaaactgatcagtctacagacaggggtggccacgctcgtatttcggtag

SEQ ID NO: 70374 - DNA, 834 bp, Artificial Sequence
  derived and/or modified sequence
atgaaggaccggctggagcagctgaaggccaagcagctgacccaggatgacgataccgacgctgtcgagatagctatcgataatacagcattcatggatgagttcttctctgaaatcgaggagactcggctgaatatcgataagatctccgaacacgttgaagaagctaagaaattgtattccattatcctgtcagcccccatccccgagcctaagacgaaggatgacctagaacagttgacaactgaaattaagaagagagcgaacaatgtgagaaataaactcaagtcaatggaaaagcatattgaagaggacgaagtgaggtcatcagcagatttgcgcatccgcaaatcacagcacagtgtgctgagtagaaaatttgtggaggtgatgaccaagtacaatgaggcccaggtggacttccgggaaaggtctaaaggcaggattcagcgacagttggagattaccgggaagaagacgactgacgaggagcttgaggagatgctcgaaagtggtaaccccgccatcttcacttccggaattattgatagtcagatcagcaagcaagcactttctgagatagagggccgtcacaaggacatagtacgcctcgagtccagtatcaaggagctccacgacatgtttatggatattgctatgctcgtggagaatcagggcgagatgctggacaatatcgagctgaacgttatgcataccgttgatcacgtcgagaaggcccgcgacgagaccaaaaaagccgtcaaatatcagtcgcaagcccggaaaaagctgatttctctccagacgggagttgccacactggtgtttcgttag

SEQ ID NO: 70375 - DNA, 777 bp, Artificial Sequence
  derived and/or modified sequence
atggatgaattcttctccgaaatagaggagacgcggttgaacattgataagatcagcgagcacgtcgaggaggctaagaaactttactccatcatactttccgcacctattccggagccaaagaccaaggatgaccttgagcagctgaccaccgaaattaaaaagcgcgcaaataatgtcagaaacaaactgaaatctatggagaagcacatagaggaggatgaggtccgcagctccgctgaccttcgtatcaggaagagccagcactctgtgctgtcgcggaagttcgtggaggttatgaccaaatataacgaagcacaggtcgattttagagagcggtctaaagggaggattcagcggcaacttgaaatcaccggtaaaaaaactacagatgaggaactcgaagaaatgcttgagagcgggaaccccgcaatatttacctccggaatcatcgattcccagatctccaagcaggccctaagcgaaatcgaaggacgtcacaaagacatcgtcagattggagtcatccatcaaggaactgcatgacatgttcatggatattgctatgctggtagagaaccaaggcgaaatgctggacaacattgaattaaacgtgatgcacactgtcgatcatgtggagaaggcccgagacgaaacaaaaaaggcagtcaagtatcaatcacaggcgaggaaaaagttgataatcattatagtgctcgttgtcgtgttgctcgggatcctggcactgatcatcggactgtcagtgggactgaactag

SEQ ID NO: 70376 - DNA, 870 bp, Artificial Sequence
  derived and/or modified sequence
atgaaagaccggttagagcagttaaaagcgaagcagctgacacaggacgacgacaccgatgccgtggagattgcaattgataatactgcctttatggatgagttcttctcggaaatcgaagaaacaagattgaatatcgataagatctctgagcacgtggaggaggctaaaaagttatactccattattctatctgctcccatccctgagcccaaaaccaaagatgatctagagcagttgacaacagagattaagaagcgagccaataatgtgcgcaacaagctcaagagcatggagaagcacatagaggaagacgaggtgcgaagcagcgcagatttgagaattcgcaagtcacaacattcagttctctccaggaagttcgtagaggtgatgacgaagtataacgaggcccaagtggacttccgtgagcgctctaagggaagaattcagcgacagctggagattaccggcaagaagaccacggacgaggaactcgaggagatgctggagagtggcaatcccgctattttcacgagcgggatcatcgattctcaaatctctaaacaggcactgtctgaaattgaggggaggcacaaggatatcgtgcgcctcgaaagctcaatcaaggagttgcatgatatgttcatggacattgcgatgctcgtggagaaccagggtgaaatgctcgataacatcgaactcaatgtgatgcataccgtcgaccacgttgagaaggctagggatgagacaaaaaaggctgtgaaataccagtcccaagccaggaaaaagctgattatcataatcgtgctggtggtggtgttattgggcatactggcactgatcatcggactgtcagtaggactaaactag

SEQ ID NO: 70377 - DNA, 543 bp, Artificial Sequence
  derived and/or modified sequence
atggagaaacacatagaagaagatgaggtgaggtcttccgctgacttacgaatacgaaaatcacagcatagcgtactaagccgcaagttcgtggaggtgatgactaagtacaatgaagcccaagtagacttccgcgagaggagtaaaggccgtattcaaagacaactagaaatcaccgggaagaagacaactgatgaggagctggaagagatgctggaaagcggcaacccggctatctttacgagcggcatcatcgactctcagatttccaagcaggctctctctgagatcgagggccgacacaaggacattgtgcgcctggaatctagcatcaaggagttgcacgacatgtttatggatatagcaatgttagtcgagaatcaggggtcaatgatagaccggattgagaataacatggatcagtccgtcgggtttgtggaaagagcagtggcggataccaaaaaagcggtgaaataccagagcgaagcacggagaaaactgatcagtttacagacaggggtcgccactctggtcttcagatag

SEQ ID NO: 70378 - DNA, 834 bp, Artificial Sequence
  derived and/or modified sequence
atgaaagacagactcgaacagttgaaggcgaaacagctcacacaagatgatgatacagatgcagtggagatcgctatcgacaatacggccttcatggacgaattcttttctgaaatagaagagactcgcctgaatattgataagatctcagagcacgtcgaggaggctaaaaagctctatagcatcattttaagcgcccctattcctgagcctaagaccaaagacgacttagaacagcttacaacagagattaaaaaacgtgccaacaacgtgcggaacaaattgaaaagtatggaaaagcatattgaggaggatgaagtgcgtagtagtgcagacctgcgaatccggaaaagccagcactctgtcttgagccgaaagtttgtagaggtgatgacgaagtacaacgaagcacaagtcgactttcgtgagaggtcaaagggcaggatccagcgccagctggagattaccggcaagaaaacgacagatgaagaattggaagagatgctggaaagcggaaatcccgctatttttacctccggcattatcgattctcagatttcaaagcaggcattgtctgaaatcgagggcaggcacaaagatatcgtgcgattggaatccagtataaaggagctgcatgacatgttcatggatatcgcgatgctggtggagaatcagggcgagatgctggacaacatcgagctcaacgttatgcataccgtggatcacgtcgagaaggctcgagatgagacgaaaaaggccgtcaaatatcaatcccaagcccgtaagaaactgatatcactgcagactggagtcgccaccctcgtgttccgttag

SEQ ID NO: 70379 - DNA, 3231 bp, Artificial Sequence
  derived and/or modified sequence
agggtgacagatcgctataaactggtcataagccatgactaccagcaggacacaatcagccccacccaagaagacaaagaaaaacatctgggtgccacatcccgtgatggaaacaggagttttgcccattgaaaggaggtttgccaaggccaatggggtgatggaagatgtatagaagatttctagaactgccagattagccaggaaaaagtacatgggggtgtggagggaatgattgatctgaacaatgactgcaattgtagcatttccaccgaggctggtcagatacatcatcaggaagaccacaaaaatcagcatctggacctcagggtcaggtctaatggaagaggaaaaccagaggggagtggtacacttccacttccacttcttttcaacagacctggtggtggcttcctttataattgtggccttgatgttgcaccaagaagccttgttggacacttcacctttgggcccacagtctggcaagatcccttcctccatattccaataagcagctgacacaggatgatgatactgatgcggttgagattgctatcgacaacacggcttttatggacgagttcttttctgagattgaggaaactcggcttaacattgacaagatctcagaacatgtagaggaggctaagaaactctacagtatcattctctctgcaccgattccagagccaaaaaccaaggatgacctagagcagctcacgactgagattaagaaaagggccaacaacgtccggaacaaactgaagagcatggagaagcatattgaagaagatgaggtcaggtcatcggcagaccttcggattcggaaatcccagcactctgtcctttctcggaagtttgtggaggtgatgaccaaatacaatgaagctcaagtggacttccgagaacgcagcaaagggcgaatccagcggcagctcgaaattactggcaaaaagacaaccgatgaggagctggaggagatgttggagagtggcaacccggccatcttcacttctgggatcattgactcacagatttccaagcaagccctcagtgagattgagggacgacacaaggacattgtgaggctggagagcagcatcaaggagcttcacgacatgtttatggacatcgccatgctggtggagaatcagggtgagatgttagataacatagagttgaatgtcatgcacacagtggaccacgtggagaaggcacgagatgaaacgaaaaaagctgtgaaataccagagtcaggcccggaagaaattgataattatcattgtgctagtagttgtgttgctgggcattttagcattgattattggactttccgttgggctgaattaagagtggcctaagaggctgctgcactgaaataaactgatttcactccagactggtgtggccacccttgtcttcagatgagaatggagtctgaatggccttcctgagagcgagtgcgacccgttcctttgtttccttgcaaccacccttggacctgactcagctaacaatctagccctgggggaatgtgatctacctgatgcgaccctgagttctccccagagcctcctcctgccccaccagctctcaagtaccttttctcctggactgtgtggacccacccagctttcttcctccctgttgtgtgtcagattatgccttgcacttgggaaagctcttgtgagactctcccaaggtgctgtatttttctacctcatggagtattctcccagaaactgcaatgtatttttttaggggagtatctttaacaaagcagaatgattcttctaagtttggcaacaagaaggcttggatctgagtcttctacctggcaggatgccaatcctgtttgttgtccgtatgtcctgaaaacatgagggactggcagatgtcattttggtctaaagagctgacttgtttgaaattcagccttaaattaagctcttagttgttcagcttggggggcaactttgatttttctctgtgttgtagtctctcatatttactcaaggagggaccaggatgatacagtcatctgaggttatgctttgcaaaaggctgacggtatggaatatgtttccatgtctgagtcttagaaactggctgctcattgttagaaagtgatgctttgtgagactattgtcttggggccaaaaataatcagggattttaaattgggcaagggacaaggtgctagaatcctaagctctggaaatatttcatgacactggtgtattcactcatgtgttccagatgtattctaattgtgtatgaaatgtatgtacacataagtgtgtgtgtctcaggaagtaggaaataaaaatggaagctattatgacctcaaaaaaaaaaagccaactttgagctaggataaaaattgggtaaaggacatttgcttacctgcaaatgaatcactgtggaaatgtgatcttcccatatcatcaagaaacttgttttctggatgaatactgggagaataaaatgagaactctggagtgagctaaattgatcccaattaagtttttctgcttagcagacagaaggtataattttttgacaccctttcccacctggtgcctatgctaggcttgtcctgagaacatccctcagtaacttgatattcacatgacctacaggatgtcccatctgcagggctgagtcagttggggaacaccagaggctacacagtagctcttcctgctactcggttaatgagcttggcaggttctttgtctcactgaattcttatcatggaaacagcagcagcagccgctaggaaatcttcaagtgtagtgtctgtgctaacccagtggtaaatcccttagatcccctgctggtctctggcagtctccttgattttgggtaccatgtatattttccgctttgactttaacgctttctaggatagggtaagcacccttaattcaggcactgtccattagcttcctttgcaaaggctacttatggccggtcacaatccagcactcagacagagccaaggcaatatcctcttgcccatggctatgatgtcagacagtggatgggctccagcaacaagagacaaaataactaaaggcctttgctctcctctgacattgaggcctggggcttacagtttggaatacaacatgtgaaggtttttgttgttgtttgtattttttagatgtaaacttgattattttattgctaatttaaaaataaaaatgactttgtattgattgtg

SEQ ID NO: 70380 - DNA, 3299 bp, Artificial Sequence
  derived and/or modified sequence
agcttgtccccgcctagcaaggagtcggctaagaactggatcctagcgaggagcccggcacagacagcgaatgaccgcagccagacagtcgctcttgctcttcctcggccctgcggcaggatccgccggtgcaggggcctctccccggactccacgcgtgtctggagggctctcgggttagggaagggggctttggagacgccccgggcggccgggcggtggcgggacgcgggccctttaagaaggagcgaggggcgcggccaggtaggggcgggtccagggcggatcagcgctgcgccggcgccggcccgggagccggatttggagcgcgaggcgccggtgggggcggagggggctgcgcggcggaggctcccgtggcctcggacgctcctcctagctagcggccgccgcccgccgccgcctgcgcctccagctccttcgccccggcgggcccggccgccgcttccggcagctcacctgggaagcgctcacctgggacgcgctcacctgggacgcgctacctgcctccgggcgcctgggcttcaggatgaaggaccgtctggagcagctgaaggccaagcagctgacacaggatgatgatactgatgcggttgagattgctatcgacaacacggcttttatggacgagttcttttctgagattgaggaaactcggcttaacattgacaagatctcagaacatgtagaggaggctaagaaactctacagtatcattctctctgcaccgattccagagccaaaaaccaaggatgacctagagcagctcacgactgagattaagaaaagggccaacaacgtccggaacaaactgaagagcatggagaagcatattgaagaagatgaggtcaggtcatcggcagaccttcggattcggaaatcccagcactctgtcctttctcggaagtttgtggaggtgatgaccaaatacaatgaagctcaagtggacttccgagaacgcagcaaagggcgaatccagcggcagctcgaaattactggcaaaaagacaaccgatgaggagctggaggagatgttggagagtggcaacccggccatcttcacttctgggatcattgactcacagatttccaagcaagccctcagtgagattgagggacgacacaaggacattgtgaggctggagagcagcatcaaggagcttcacgacatgtttatggacatcgccatgctggtggagaatcagggtgagatgttagataacatagagttgaatgtcatgcacacagtggaccacgtggagaaggcacgagatgaaacgaaaaaagctgtgaaataccagagtcaggcccggaagaaattgataattatcattgtgctagtagttgtgttgctgggcattttagcattgattattggactttccgttgggctgaattaagagtggcctaagaggctgctgcactgaaataaactgatttcactccagactggtgtggccacccttgtcttcagatgagaatggagtctgaatggccttcctgagagcgagtgcgacccgttcctttgtttccttgcaaccacccttggacctgactcagctaacaatctagccctgggggaatgtgatctacctgatgcgaccctgagttctccccagagcctcctcctgccccaccagctctcaagtaccttttctcctggactgtgtggacccacccagctttcttcctccctgttgtgtgtcagattatgccttgcacttgggaaagctcttgtgagactctcccaaggtgctgtatttttctacctcatggagtattctcccagaaactgcaatgtatttttttaggggagtatctttaacaaagcagaatgattcttctaagtttggcaacaagaaggcttggatctgagtcttctacctggcaggatgccaatcctgtttgttgtccgtatgtcctgaaaacatgagggactggcagatgtcattttggtctaaagagctgacttgtttgaaattcagccttaaattaagctcttagttgttcagcttggggggcaactttgatttttctctgtgttgtagtctctcatatttactcaaggagggaccaggatgatacagtcatctgaggttatgctttgcaaaaggctgacggtatggaatatgtttccatgtctgagtcttagaaactggctgctcattgttagaaagtgatgctttgtgagactattgtcttggggccaaaaataatcagggattttaaattgggcaagggacaaggtgctagaatcctaagctctggaaatatttcatgacactggtgtattcactcatgtgttccagatgtattctaattgtgtatgaaatgtatgtacacataagtgtgtgtgtctcaggaagtaggaaataaaaatggaagctattatgacctcaaaaaaaaaaagccaactttgagctaggataaaaattgggtaaaggacatttgcttacctgcaaatgaatcactgtggaaatgtgatcttcccatatcatcaagaaacttgttttctggatgaatactgggagaataaaatgagaactctggagtgagctaaattgatcccaattaagtttttctgcttagcagacagaaggtataattttttgacaccctttcccacctggtgcctatgctaggcttgtcctgagaacatccctcagtaacttgatattcacatgacctacaggatgtcccatctgcagggctgagtcagttggggaacaccagaggctacacagtagctcttcctgctactcggttaatgagcttggcaggttctttgtctcactgaattcttatcatggaaacagcagcagcagccgctaggaaatcttcaagtgtagtgtctgtgctaacccagtggtaaatcccttagatcccctgctggtctctggcagtctccttgattttgggtaccatgtatattttccgctttgactttaacgctttctaggatagggtaagcacccttaattcaggcactgtccattagcttcctttgcaaaggctacttatggccggtcacaatccagcactcagacagagccaaggcaatatcctcttgcccatggctatgatgtcagacagtggatgggctccagcaacaagagacaaaataactaaaggcctttgctctcctctgacattgaggcctggggcttacagtttggaatacaacatgtgaaggtttttgttgttgtttgtattttttagatgtaaacttgattattttattgctaatttaaaaataaaaatgactttgtattgattgtgaaa

SEQ ID NO: 70381 - DNA, 1024 bp, Artificial Sequence
  derived and/or modified sequence
ggatttggagcgcgaggcgccggtgggggcggagggggctgcgcggcggaggctcccgtggcctcggacgctcctcctagctagcggccgccgcccgccgccgcctgcgcctccagctccttcgccccggcgggcccggccgccgcttccggcagctcacctgggaagcgctcacctgggacgcgctcacctgggacgcgctacctgcctccgggcgcctgggcttcaggatgaaggaccgtctggagcagctgaaggccaagcagctgacacaggatgatgatactgatgcggttgagattgctatcgacaacacggcttttatggacgagttcttttctgagaaaccaaggatgacctagagcagctcacgactgagattaagaaaagggccaacaacgtccggaacaaactgaagagcatggagaagcatattgaagaagatgaggtcaggtcatcggcagaccttcggattcggaaatcccagcactctgtcctttctcggaagtttgtggaggtgatgaccaaatacaatgaagctcaagtggacttccgagaacgcagcaaagggcgaatccagcggcagctcgaaattactggcaaaaagacaaccgatgaggagctggaggagatgttggagagtggcaacccggccatcttcacttctgggatcattgactcacagatttccaagcaagccctcagtgagattgagggacgacacaaggacattgtgaggctggagagcagcatcaaggagcttcacgacatgtttatggacatcgccatgctggtggagaatcagggatccatgattgaccgtattgagaacaacatggaccagtcagtgggctttgtggagcgggccgtggcagataccaaaaaggctgtcaagtatcagagtgaagcccggaggaaactgatttcactccagactggtgtggccacccttgtcttcagatgagaatggagtctgaatggccttcctgagagcgagtgcgacccgttcctttgtttccttgca

SEQ ID NO: 70382 - DNA, 1571 bp, Artificial Sequence
  derived and/or modified sequence
ctagctagcggccgccgcccgccgccgcctgcgcctccagctccttcgccccggcgggcccggccgccgcttccggcagctcacctgggaagcgctcacctgggacgcgctcacctgggacgcgctacctgcctccgggcgcctgggcttcaggatgaaggaccgtctggagcagctgaaggccaagcagctgacacaggatgatgatactgatgcggttgagattgctatcgacaacacggcttttatggacgagttcttttctgagattgaggaaactcggcttaacattgacaagatctcagaacatgtagaggaggctaagaaactctacagtatcattctctctgcaccgattccagagccaaaaaccaaggatgacctagagcagctcacgactgagattaagaaaagggccaacaacgtccggaacaaactgaagagcatggagaagcatattgaagaagatgaggtcaggtcatcggcagaccttcggattcggaaatcccagcactctgtcctttctcggaagtttgtggaggtgatgaccaaatacaatgaagctcaagtggacttccgagaacgcagcaaagggcgaatccagcggcagctcgaaattactggcaaaaagacaaccgatgaggagctggaggagatgttggagagtggcaacccggccatcttcacttctgggatcattgactcacagatttccaagcaagccctcagtgagattgagggacgacacaaggacattgtgaggctggagagcagcatcaaggagcttcacgacatgtttatggacatcgccatgctggtggagaatcagggtgagatgttagataacatagagttgaatgtcatgcacacagtggaccacgtggagaaggcacgagatgaaacgaaaaaagctgtgaaataccagagtcaggcccggaagaaactgatttcactccagactggtgtggccacccttgtcttcagatgagaatggagtctgaatggccttcctgagagcgagtgcgacccgttcctttgtttccttgcaaccacccttggacctgactcagctaacaatctagccctgggggaatgtgatctacctgatgcgaccctgagttctccccagagcctcctcctgccccaccagctctcaagtaccttttctcctggactgtgtggacccacccagctttcttcctccctgttgtgtgtcagattatgccttgcacttgggaaagctcttgtgagactctcccaaggtgctgtatttttctacctcatggagtattctcccagaaactgcaatgtatttttttaggggagtatctttaacaaagcagaatgattcttctaagtttggcaacaagaaggcttggatctgagtcttctacctggcaggatgccaatcctgtttgttgtccgtatgtcctgaaaacatgagggactggcagatgtcattttggtctaaagagctgacttgtttgaaattcagccttaaattaagctcttagttgttcagcttggggggcaactttgatttttctctgtgttgtagtctctcatattta

SEQ ID NO: 70383 - DNA, 6363 bp, Artificial Sequence
  derived and/or modified sequence
agcttgtccccgcctagcaaggagtcggctaagaactggatcctagcgaggagcccggcacagacagcgaatgaccgcagccagacagtcgctcttgctcttcctcggccctgcggcaggatccgccggtgcaggggcctctccccggactccacgcgtgtctggagggctctcgggttagggaagggggctttggagacgccccgggcggccgggcggtggcgggacgcgggccctttaagaaggagcgaggggcgcggccaggtaggggcgggtccagggcggatcagcgctgcgccggcgccggcccgggagccggatttggagcgcgaggcgccggtgggggcggagggggctgcgcggcggaggctcccgtggcctcggacgctcctcctagctagcggccgccgcccgccgccgcctgcgcctccagctccttcgccccggcgggcccggccgccgcttccggcagctcacctgggaagcgctcacctgggacgcgctcacctgggacgcgctacctgcctccgggcgcctgggcttcaggatgaaggaccgtctggagcagctgaaggccaagcagctgacacaggatgatgatactgatgcggttgagattgctatcgacaacacggcttttatggacgagttcttttctgagattgaggaaactcggcttaacattgacaagatctcagaacatgtagaggaggctaagaaactctacagtatcattctctctgcaccgattccagagccaaaaaccaaggatgacctagagcagctcacgactgagattaagaaaagggccaacaacgtccggaacaaactgaagagcatggagaagcatattgaagaagatgaggtcaggtcatcggcagaccttcggattcggaaatcccagcactctgtcctttctcggaagtttgtggaggtgatgaccaaatacaatgaagctcaagtggacttccgagaacgcagcaaagggcgaatccagcggcagctcgaaattactggcaaaaagacaaccgatgaggagctggaggagatgttggagagtggcaacccggccatcttcacttctgggatcattgactcacagatttccaagcaagccctcagtgagattgagggacgacacaaggacattgtgaggctggagagcagcatcaaggagcttcacgacatgtttatggacatcgccatgctggtggagaatcagaaattgataattatcattgtgctagtagttgtgttgctgggcattttagcattgattattggactttccgttgggctgaattaagagtggcctaagaggctgctgcactgaaataaactgatttcactccagactggtgtggccacccttgtcttcagatgagaatggagtctgaatggccttcctgagagcgagtgcgacccgttcctttgtttccttgcaaccacccttggacctgactcagctaacaatctagccctgggggaatgtgatctacctgatgcgaccctgagttctccccagagcctcctcctgccccaccagctctcaagtaccttttctcctggactgtgtggacccacccagctttcttcctccctgttgtgtgtcagattatgccttgcacttgggaaagctcttgtgagactctcccaaggtgctgtatttttctacctcatggagtattctcccagaaactgcaatgtatttttttaggggagtatctttaacaaagcagaatgattcttctaagtttggcaacaagaaggcttggatctgagtcttctacctggcaggatgccaatcctgtttgttgtccgtatgtcctgaaaacatgagggactggcagatgtcattttggtctaaagagctgacttgtttgaaattcagccttaaattaagctcttagttgttcagcttggggggcaactttgatttttctctgtgttgtagtctctcatatttactcaaggagggaccaggatgatacagtcatctgaggttatgctttgcaaaaggctgacggtatggaatatgtttccatgtctgagtcttagaaactggctgctcattgttagaaagtgatgctttgtgagactattgtcttggggccaaaaataatcagggattttaaattgggcaagggacaaggtgctagaatcctaagctctggaaatatttcatgacactggtgtattcactcatgtgttccagatgtattctaattgtgtatgaaatgtatgtacacataagtgtgtgtgtctcaggaagtaggaaataaaaatggaagctattatgacctcaaaaaaaaaaagccaactttgagctaggataaaaattgggtaaaggacatttgcttacctgcaaatgaatcactgtggaaatgtgatcttcccatatcatcaagaaacttgttttctggatgaatactgggagaataaaatgagaactctggagtgagctaaattgatcccaattaagtttttctgcttagcagacagaaggtataattttttgacaccctttcccacctggtgcctatgctaggcttgtcctgagaacatccctcagtaacttgatattcacatgacctacaggatgtcccatctgcagggctgagtcagttggggaacaccagaggctacacagtagctcttcctgctactcggttaatgagcttggcaggttctttgtctcactgaattcttatcatggaaacagcagcagcagccgctaggaaatcttcaagtgtagtgtctgtgctaacccagtggtaaatcccttagatcccctgctggtctctggcagtctccttgattttgggtaccatgtatattttccgctttgactttaacgctttctaggatagggtaagcacccttaattcaggcactgtccattagcttcctttgcaaaggctacttatggccggtcacaatccagcactcagacagagccaaggcaatatcctcttgcccatggctatgatgtcagacagtggatgggctccagcaacaagagacaaaataactaaaggcctttgctctcctctgacattgaggcctggggcttacagtttggaatacaacatgtgaaggtttttgttgttgtttgtattttttagatgtaaacttgattattttattgctaatttaaaaataaaaatgactttgtattgattgtgaaacggttctggctctgtctcgatgcagaaacacaatgatctggtgccaccatgtggtgatttttattcaggttttagaatgcagttcacacctttttaagccatgtgctggatcagatggttcaaaagtgcaatttttgaacatggtttaactcccacagaatgcagtgtaactatgtttgtgtttcagatttgaggtgttccccccaaaagaatttggttcagtccttgggagtatctggctttaggaggaaatgggggagatctgtcacgatgttatctagaaggtggaatgaccataccaaacatccttttaatctaacttgaatgtctcaccaaaaataacatttctgttggcattctgggtcctagaagccagatccatctcctttttccttctgttgctctcttccttcacaccctcttccatgtccacatgcacttatctccctgcagaatactttttgcgatgatgtttctcatgtattctttctttccttgtctggatgagcagaagaagatcatgatcatgatctgctgtattatccttgcgatcatcttagcttccaccattgggagcatatttgcctgaaaaaggtgagccatctgtggggagggtcagaccttctttcactgacttgaaacctttgtgtcttgggggcactctaggtgccttaatctgggtgggattaggtgctaataatggttagagaaaactaaagaaagggatgtttcagagacagaaaagtgagtgaagaatgaactgttagtaggtagtctgtgggaggaggggggagacagaaggtggcaatctgtcctataacctggtgtggcagaatgctttgtacaggtgaaggatagtgattcctgctaaacagtttgagccttggtatctggaagtgacaaaaagaacaagaattagttcttgcattaggtgcatcttgaactttttggaagagggccggccacacagtaaattcaaattaaatttcttccctttcaaggttaatgaaagttaacacagccttgtatgtagtcctttaccccgggtaagagggatttggtgatcccagccacgaacaccatgctatataatctatgatttttttcctccatttttctgttatctcccacagccctcacagattgatcgactggcatttctaatcctccttccacttctgtggtaccatcacttctccacgcagactcctcatcagcttctcctctttccattatgaaacttcttaagaaacagggcaccaatcaactacttattaagaattatgcaaagaataaacgtatacagaattgggcggaggacagggacagggagtacagatacatagctgattaggcagatggtttaaaggaggactgcagggtagagaagcaagcagagtgggcgcctctttaggaagtgacacagcctgcatgtgcagtatggctgtgaaggggcagatatcatagcacacctaactcaacaggatcttacttgaactgctgtgagttggtcaagtcagggcacttctgctcttcaggctcctctaggtcacacctttgaccaccctacatctgtttcctctttcaggctccagtagtagtcttaaaagtgaagtttatctaaggataagcacatgcctatcttgctcactgctgtgtccccactttttagcacagcgcctgctgcttacaggtactcaaatatctgctgacttaattacttataattaagctcttatttcagtcatggacaaatccttgggtttgactcctaaactctttaaggtaccaatgagaacgtggtttgttactgtcagaggctgtgtaaagccgcttgggaatgggctgatctgcttatgcaaaaatgctaccaacctttcaaaccccattaccacaacatgaaaatttaaagtgctttttctatgggtggtgatggtggagttctagcaacagcctcttaatctgtggagaagatggctggctccaggactgtggttcaataacgaaatacaggcccacaaaataaaataggtttatagcatgactgaactcacacatcagtagaacactctgtgaaccataacaaagaacagataaaggtgtcaagtgagaaaggtgaaatgaggttatcactcacttcacctctcacctgatttgtgttgctagctgaaactgctggccagtaacgtatgtataagaaactgttataggccgggcacggtggctcatgcctgtaatcacagcactttgggaggccaaggcaggtggatcaccagactgaccaacatagtgaaaccccctctctacaaaaaatacaaaaattagccaggcatggtggcttgcacctgtattcccagctacttgggaggctgaggcaggagaattgcttgaatgcaagaggcggaagttgcagtgagccgagatcgcgccactgcactccagcctgggcaacaagagctaaattccatctaaaaaaaaaaaaaaaacaaaaaaaaaaaactgttcttaatacttaatactgtccccaattccattcaaggttcagttgtgttcagctttaaaaccagctatgtgaatgtgagttctagtgcagattatttagtgattatgtaactaaaattgatgaaaaaatcacactatacaactgtgaggagcacacaactgctaagtttgtacttttgaaagtaaattattctttgtttgataccttattttttaagaaagtgggattaaaaatattttggtcagtgctgttttctacccaccttcaaaagccaatggtttgatatttctattaatttgtgcttcctttagttttaataggggatagaagactgcagctggttgggtctggaaaacattaatctgggcaaacggagctggagctatgaggatctgagtcctagggggccctcattcactagcagtaagaatttaagtggtgcatggcacatagcactgtactagattctgcaggggcacaaacatagagccaaacactctccctcttggagaatttcagacccagaaaaggccacgcagttctaacttttgtcatcggttccttttgctaaaaggcaaagggtatgttccttgcctattgtccaacataccccttccaagattgtgagaagatgggtagctgggcatcaataaatattgaatcaattgacct

SEQ ID NO: 70384 - protein, 129 aa, Artificial Sequence
  derived and/or modified sequence
MSQHRAGRRGGVGKRGVRGRELGGQGKYGAGCSECGTRRIAARGEAEFEKAAEEVRHLKTKPSDEEMLFIYGHYKQATVGDINTERPGMLDFTGKAKWDAWNELKGTSKEDAMKAYINKVEELKKKYGI

SEQ ID NO: 70385 - DNA, 390 bp, Artificial Sequence
  derived and/or modified sequence
atgagccagcacagagccggcagaagaggcggcgtgggcaagagaggcgtgagaggcagagagctgggcggccagggcaagtacggcgccggctgcagcgagtgcggcaccagaagaatcgccgccagaggcgaggccgagttcgagaaggccgccgaggaggtgagacacctgaagaccaagcccagcgacgaggagatgctgttcatctacggccactacaagcaggccaccgtgggcgacatcaacaccgagagacccggcatgctggacttcaccggcaaggccaagtgggacgcctggaacgagctgaagggcaccagcaaggaggacgccatgaaggcctacatcaacaaggtggaggagctgaagaagaagtacggcatctag

SEQ ID NO: 70386 - DNA, 687 bp, Artificial Sequence
  derived and/or modified sequence
agtgcaatctgggcgatcgcttcctggtcctcgcctcctccgctgtctccctggagttcttgcaagtcggccaggatgtctcagcacagggcaggacgtcgcggcggagtggggaagcgaggagtccgtggccgagagcttggaggtcaggggaagtacggggccggctgctcagagtgcgggacgaggagaatcgcggcccggggagaggctgagtttgagaaagctgcagaggaggttaggcaccttaagaccaagccatcggatgaggagatgctgttcatctatggccactacaaacaagcaactgtgggcgacataaatacagaacggcccgggatgttggacttcacgggcaaggccaagtgggatgcctggaatgagctgaaagggacttccaaggaagatgccatgaaagcttacatcaacaaagtagaagagctaaagaaaaaatacgggatatgagagactggatttggttactgtgccatgtgtttatcctaaactgagacaatgccttgtttttttctaataccgtggatggtgggaattcgggaaaataaccagttaaaccagctactcaaggctgctcaccatacggctctaacagattaggggctaaaacgattactgactttccttgagtagtttttatctgaaatcaattaaaagtgtatttgttacttt

SEQ ID NO: 70387 - DNA, 390 bp, Artificial Sequence
  derived and/or modified sequence
atgtcccagcatcgggctgggcggagggggggggtgggcaagcgtggagtaagggggcgagagctcgggggccagggaaaatacggcgccggttgctcagagtgtggcacaagacgaattgccgcacgcggggaggcggagtttgaaaaggccgccgaagaggtgcggcacctcaaaaccaaaccctctgacgaagagatgctcttcatttacgggcactataagcaggctacagtgggtgacatcaacacggaacgtcccggcatgttagacttcaccgggaaagccaaatgggacgcttggaatgagctgaaagggacgagcaaggaggacgcaatgaaagcttacatcaacaaagtcgaggagttgaagaagaaatatgggatttag

SEQ ID NO: 70388 - DNA, 390 bp, Artificial Sequence
  derived and/or modified sequence
atgagccagcaccgggccggccggcggggcggcgtgggcaagaggggcgtgcggggccgggagctgggcggccagggcaagtacggggccggctgcagtgaatgtggcaccaggagaattgctgcccggggggaggccgagtttgagaaggctgctgaggaggtgcgccacctgaagaccaagcccagtgatgaggagatgctgttcatctacggccactacaagcaggccaccgtgggggacatcaacacagagaggcctggcatgctggacttcaccgggaaggccaagtgggatgcctggaatgagctgaagggcaccagcaaggaggatgccatgaaggcctacatcaacaaggtggaggagctgaagaagaagtatggcatctag

SEQ ID NO: 70389 - DNA, 390 bp, Artificial Sequence
  derived and/or modified sequence
atgagccagcaccgggccggccggcggggcggcgtgggcaagcggggcgtgcggggaagggaacttgggggccagggcaaatacggcgcagggtgcagcgagtgcggtacaagaagaattgcggcaagaggcgaagctgaattcgagaaggctgccgaggaagtcaggcatctcaagaccaaaccttccgatgaggaaatgcttttcatctacggccattataagcaggctacggtcggcgatattaacacagagaggcccgggatgctggacttcacaggtaaggctaaatgggacgcttggaatgaactcaagggtacgtcaaaagaagatgcaatgaaagcttacataaataaagtggaagagttaaagaagaagtacggaatctag

SEQ ID NO: 70390 - DNA, 390 bp, Artificial Sequence
  derived and/or modified sequence
atgagccagcatcgagctggcaggaggggcggtgttggtaaacgtggcgttcggggaagggagctgggcggacagggtaaatatggcgctgggtgctcagaatgcggcactcggaggattgccgctaggggagaggcggagttcgagaaagctgccgaggaagtgagacacctcaaaacaaagccatccgatgaagaaatgctgtttatctatggacattataaacaggcaactgtcggggatatcaacacagagcgtcccggaatgttggactttaccggcaaggccaaatgggacgcctggaatgagctgaaggggacatctaaagaggacgccatgaaagcgtacatcaataaggttgaggagcttaagaagaagtatggaatttag

SEQ ID NO: 70391 - protein, 55 aa, Artificial Sequence
  derived and/or modified sequence
KQATVGDINTERPGILDLKGKAKWDAWNGLKGTSKEDAMKAYINKVEELKKKYGI

SEQ ID NO: 70392 - protein, 668 aa, Artificial Sequence
  derived and/or modified sequence
MGGKQRDEDDEAYGKPVKYDPSFRGPIKNRSCTDVICCVLFLLFILGYIVVGIVAWLYGDPRQVLYPRNSTGAYCGMGENKDKPYLLYFNIFSCILSSNIISVAENGLQCPTPQTVITSLQQELCPSFLLPSAPALGRCFPWTNVTPPALPGITNDTTIQQGISGLIDSLNARDISVKIFEDFAQSWYWILVALGVALVLSLLFILLLRLVAGPLVLVLILGVLGVLAYGIYYCWEEYRVLRDKGASISQLGFTTNLSAYQSVQETWLAALIVLAVLEAILLLMLIFLRQRIRIAIALLKEASKAVGQMMSTMFYPLVTFVLLLICIAYWAMTALYLATSGQPQYVLWASNISSPGCEKVPINTSCNPTAHLVNSSCPGLMCVFQGYSSKGLIQRSVFNLQIYGVLGLFWTLNWVLALGQCVLAGAFASFYWAFHKPQDIPTFPLISAFIRTLRYHTGSLAFGALILTLVQIARVILEYIDHKLRGVQNPVARCIMCCFKCCLWCLEKFIKFLNRNAYIMIAIYGKNFCVSAKNAFMLLMRNIVRVVVLDKVTDLLLFFGKLLVVGGVGVLSFFFFSGRIPGLGKDFKSPHLNYYWLPIMTSILGAYVIASGFFSVFGMCVDTLFLCFLEDLERNNGSLDRPYYMSKSLLKILGKKNEAPPDNKKRKK

SEQ ID NO: 70393 - protein, 668 aa, Artificial Sequence [sequence omitted]

SEQ ID NO: 70394 - DNA, 2007 bp, Artificial Sequence
  derived and/or modified sequence
atgggcggcaagcagagagacgaggacgacgaggcctacggcaagcccgtgaagtacgaccccagcttcagaggccccatcaagaacagaagctgcaccgacgtgatctgctgcgtgctgttcctgctgttcatcctgggctacatcgtggtgggcatcgtggcctggctgtacggcgaccccagacaggtgctgtaccccagaaacagcaccggcgcctactgcggcatgggcgagaacaaggacaagccctacctgctgtacttcaacatcttcagctgcatcctgagcagcaacatcatcagcgtggccgagaacggcctgcagtgccccaccccccagaccgtgatcaccagcctgcagcaggagctgtgccccagcttcctgctgcccagcgcccccgccctgggcagatgcttcccctggaccaacgtgaccccccccgccctgcccggcatcaccaacgacaccaccatccagcagggcatcagcggcctgatcgacagcctgaacgccagagacatcagcgtgaagatcttcgaggacttcgcccagagctggtactggatcctggtggccctgggcgtggccctggtgctgagcctgctgttcatcctgctgctgagactggtggccggccccctggtgctggtgctgatcctgggcgtgctgggcgtgctggcctacggcatctactactgctgggaggagtacagagtgctgagagacaagggcgccagcatcagccagctgggcttcaccaccaacctgagcgcctaccagagcgtgcaggagacctggctggccgccctgatcgtgctggccgtgctggaggccatcctgctgctgatgctgatcttcctgagacagagaatcagaatcgccatcgccctgctgaaggaggccagcaaggccgtgggccagatgatgagcaccatgttctaccccctggtgaccttcgtgctgctgctgatctgcatcgcctactgggccatgaccgccctgtacctggccaccagcggccagccccagtacgtgctgtgggccagcaacatcagcagccccggctgcgagaaggtgcccatcaacaccagctgcaaccccaccgcccacctggtgaacagcagctgccccggcctgatgtgcgtgttccagggctacagcagcaagggcctgatccagagaagcgtgttcaacctgcagatctacggcgtgctgggcctgttctggaccctgaactgggtgctggccctgggccagtgcgtgctggccggcgccttcgccagcttctactgggccttccacaagccccaggacatccccaccttccccctgatcagcgccttcatcagaaccctgagataccacaccggcagcctggccttcggcgccctgatcctgaccctggtgcagatcgccagagtgatcctggagtacatcgaccacaagctgagaggcgtgcagaaccccgtggccagatgcatcatgtgctgcttcaagtgctgcctgtggtgcctggagaagttcatcaagttcctgaacagaaacgcctacatcatgatcgccatctacggcaagaacttctgcgtgagcgccaagaacgccttcatgctgctgatgagaaacatcgtgagagtggtggtgctggacaaggtgaccgacctgctgctgttcttcggcaagctgctggtggtgggcggcgtgggcgtgctgagcttcttcttcttcagcggcagaatccccggcctgggcaaggacttcaagagcccccacctgaactactactggctgcccatcatgaccagcatcctgggcgcctacgtgatcgccagcggcttcttcagcgtgttcggcatgtgcgtggacaccctgttcctgtgcttcctggaggacctggagagaaacaacggcagcctggacagaccctactacatgagcaagagcctgctgaagatcctgggcaagaagaacgaggccccccccgacaacaagaagagaaagaagtag

SEQ ID NO: 70395 - DNA, 2007 bp, Artificial Sequence
  derived and/or modified sequence
atgggcggcaagcagagagacgaggacgacgaggcctacggcaagcccgtgaagtacgaccccagcttcagaggccccatcaagaacagaagctgcaccgacgtgatctgctgcgtgctgttcctgctgttcatcctgggctacatcgtggtgggcatcgtggcctggctgtacggcgaccccagacaggtgctgtaccccagaaacagcaccggcgcctactgcggcatgggcgagaacaaggacaagccctacctgctgtacttcaacatcttcagctgcatcctgagcagcaacatcatcagcgtggccgagaacggcctgcagtgccccaccccccagaccgtgatcaccagcctgcagcaggagctgtgccccagcttcctgctgcccagcgcccccgccctgggcagatgcttcccctggaccaacatcaccccccccgccctgcccggcatcaccaacgacaccaccatccagcagggcatcagcggcctgatcgacagcctgaacgccagagacatcagcgtgaagatcttcgaggacttcgcccagagctggtactggatcctggtggccctgggcgtggccctggtgctgagcctgctgttcatcctgctgctgagactggtggccggccccctggtgctggtgctgatcctgggcgtgctgggcgtgctggcctacggcatctactactgctgggaggagtacagagtgctgagagacaagggcgccagcatcagccagctgggcttcaccaccaacctgagcgcctaccagagcgtgcaggagacctggctggccgccctgatcgtgctggccgtgctggaggccatcctgctgctggtgctgatcttcctgagacagagaatcagaatcgccatcgccctgctgaaggaggccagcaaggccgtgggccagatgatgagcaccatgttctaccccctggtgaccttcgtgctgctgctgatctgcatcgcctactgggccatgaccgccctgtacctggccaccagcggccagccccagtacgtgctgtgggccagcaacatcagcagccccggctgcgagaaggtgcccatcaacaccagctgcaaccccaccgcccacctggtgaacagcagctgccccggcctgatgtgcgtgttccagggctacagcagcaagggcctgatccagagaagcgtgttcaacctgcagatctacggcgtgctgggcctgttctggaccctgaactgggtgctggccctgggccagtgcgtgctggccggcgccttcgccagcttctactgggccttccacaagccccaggacatccccaccttccccctgatcagcgccttcatcagaaccctgagataccacaccggcagcctggccttcggcgccctgatcctgaccctggtgcagatcgccagagtgatcctggagtacatcgaccacaagctgagaggcgtgcagaaccccgtggccagatgcatcatgtgctgcttcaagtgctgcctgtggtgcctggagaagttcatcaagttcctgaacagaaacgcctacatcatgatcgccatctacggcaagaacttctgcgtgagcgccaagaacgccttcatgctgctgatgagaaacatcgtgagagtggtggtgctggacaaggtgaccgacctgctgctgttcttcggcaagctgctggtggtgggcggcgtgggcgtgctgagcttcttcttcttcagcggcagaatccccggcctgggcaaggacttcaagagcccccacctgaactactactggctgcccatcatgaccagcatcctgggcgcctacgtgatcgccagcggcttcttcagcgtgttcggcatgtgcgtggacaccctgttcctgtgcttcctggaggacctggagagaaacaacggcagcctggacagaccctactacatgagcaagagcctgctgaagatcctgggcaagaagaacgaggccccccccgacaacaagaagagaaagaagtag

SEQ ID NO: 70396 - DNA, 2007 bp, Artificial Sequence
  derived and/or modified sequence
atgggcggtaagcagcgggatgaggatgatgaagcttacggcaaaccagtgaagtacgatcctagttttcggggccctatcaagaaccggtcttgcacagatgtgatatgctgtgttcttttcctgttgttcatactaggctatattgtggtgggtatcgtcgcttggctgtatggcgaccctaggcaggtcctgtatccgagaaacagcactggtgcctactgtgggatgggagaaaataaagacaagccgtacctcttatattttaacatattctcgtgcatcctcagctctaatatcatatccgtggctgagaatgggcttcagtgtcccacccctcagacagtgattacttcgctgcagcaggagctctgtcctagtttcttgctcccttctgctccagctttggggcgctgttttccttggactaacgtcactccaccggctctcccgggcataaccaatgacacaactatccagcaaggaatctccggtcttatcgactcacttaatgcaagggatattagcgtcaaaatattcgaggatttcgcgcagagctggtactggatcctggtagctctgggagtagcgctggttctctctctgctattcatcctgctgctcaggctggtggccggaccactggttctggtcctgatcctcggcgtgttaggcgtattagcttatggaatctactattgctgggaagaatatagagttctgcgcgataaaggcgcctcaatctctcagctgggtttcaccaccaacctgtctgcgtatcagtctgtgcaagaaacctggttggcggctctgattgtcctcgcagtgctggaggctatactgctgctcatgctgatctttctccgccagaggatacggattgctatcgctcttctgaaggaggcaagcaaggccgtcggccagatgatgagcaccatgttttaccccctcgttacctttgtgctgctgctcatttgtatagcgtactgggctatgaccgctctatatctggccacatctggccagccccaatacgtcttgtgggccagcaatattagttcccccggctgtgagaaagtgccaattaacactagttgcaatcccacagcccatttagtaaacagctcttgcccaggcctgatgtgcgtttttcagggatacagttccaagggtcttatccagcgcagcgtgtttaatctgcaaatctacggggtgttgggcctgttctggacattgaactgggtccttgcgctcggacagtgtgtgttggctggagcattcgcgagcttctattgggccttccataagccacaagatatacccacattccctcttatcagtgcttttattcggaccttacggtaccacactgggtcgttagcatttggggcactcatattaacgctagtacagattgctcgagttatactcgaatatattgaccataagctgcgtggggtccagaacccagttgcccgttgcatcatgtgctgttttaagtgttgtctgtggtgcctcgaaaaattcattaaattcctgaaccgaaatgcatacattatgatcgccatttacggaaagaacttctgtgtgtcagccaaaaacgcattcatgctgctcatgaggaacatcgtgagggtggtggtccttgacaaggtaactgacttgctgctgttcttcggtaagctcctcgtggtgggtggggtgggagtactctcattcttttttttcagtggccggattcccggattaggcaaggacttcaagtctcctcaccttaactattactggctgcccatcatgacctctatcctcggtgcgtacgtgatagcctcggggttcttctccgtctttggcatgtgcgttgacaccttgtttctgtgttttctcgaagatctcgagcgcaataacggcagcctagacaggccctactacatgagcaaatcacttctcaaaatactcgggaaaaagaacgaagcccctcccgataataagaagagaaagaaatag

SEQ ID NO: 70397 - DNA, 2007 bp, Artificial Sequence
  derived and/or modified sequence
atgggagggaagcagcgggacgaggatgatgaggcatacggcaagccagtcaagtatgacccgagcttccgcggccccatcaaaaacagatcatgtaccgatgtaatatgttgcgttctcttcttacttttcatactgggatatatcgtggtggggatcgtggcctggctctacggggacccgaggcaggtgctgtaccctcgaaatagcacaggagcctattgcgggatgggggaaaacaaagacaaaccttacctgctatactttaacatcttttcttgcatcttgagcagtaacatcatcagcgtggccgagaatggtctccagtgtcctacaccccaaacagtgattacctccctccagcaagagctttgtccaagtttcttattacctagcgcgccagccctaggacgttgtttcccttggactaacatcacaccgcccgccttgcccggaatcacaaatgatactactatccaacaagggatttcaggattgattgattctctgaacgctcgggatattagcgtgaagatctttgaagacttcgcccagtcgtggtattggattctagtcgcgctgggcgttgccctggtgctgagcctcctcttcattcttttgctccggttggtagccggcccgttggttttagtgctgatactcggagtcctgggggtgctggcctatggaatttattactgttgggaggagtacagagttctccgcgataagggcgcctctatatctcaactcggattcaccacaaatttgtccgcctaccaatctgtgcaggagacctggctggccgccctgattgtgctggctgtgttagaagccattctcctgctggttctgatcttcctcagacagcgcatacgtatcgccattgccctgctgaaggaagcatcaaaggcggtcggccaaatgatgagtacaatgttttatcctctggtcaccttcgtgctcttgctgatatgtatagcctattgggcgatgaccgccctatacctggctacctccggtcagccccaatatgtattgtgggctagcaatatcagcagcccagggtgcgaaaaagtgcccatcaacacctcatgcaatcccactgctcacctcgtgaactcgagctgtccaggattaatgtgcgtttttcaagggtattcttccaaaggtctcattcaacggtccgtcttcaaccttcagatttacggtgtcctggggctattctggaccttgaactgggtgctcgctttggggcagtgtgtgctggcaggagcattcgcgagcttctactgggcttttcacaagccccaagacatcccaaccttccccctaattagcgcatttatccggaccctccgctaccacacaggatcactggcttttggagctctcattctcacactagttcagatcgctagggtcatcctggaatatatagatcacaagttaagaggggtgcagaatcccgtggctaggtgcataatgtgctgtttcaagtgctgtctttggtgtctagagaagtttatcaagtttcttaatcgaaacgcgtacatcatgattgccatatacggtaaaaacttctgtgtgtccgcaaaaaatgcttttatgttactgatgagaaacatagtgcgtgtggtggtgttggataaggtgaccgaccttctactgttcttcgggaaattgcttgtggtgggtggggttggggtcctctcctttttcttcttcagcggccggattcccggccttggtaaggacttcaagtcaccccatctcaattattattggctccctatcatgacatctatcctcggcgcttatgtgattgccagtggattcttcagcgtgtttggcatgtgtgtcgacactctttttctctgttttctggaagacctcgagaggaataacggcagcttggaccgtccgtattatatgagtaaatccctcttgaaaatattaggcaaaaagaacgaggctcctccggacaataagaaacgcaagaaatag

SEQ ID NO: 70398 - DNA, 2007 bp, Artificial Sequence
  derived and/or modified sequence
atgggaggaaagcagagagacgaggatgacgaggcctacgggaaacctgtgaagtatgaccctagcttccggggccctatcaagaatcgttcctgcactgacgtcatctgctgtgttcttttcctccttttcatattgggttatatcgtcgtgggaatagtagcctggctttatggggaccctcgtcaagtcctatatcctcgaaactcaactggcgcatattgcggcatgggagagaataaggacaagccatacttactatacttcaatattttctcctgcatcctttctagcaatattatatcagtcgcggaaaatggcctacagtgccccactccacaaaccgtgattacttctctccagcaggagctgtgccctagcttcctcctaccgtccgcccctgcattgggtcggtgcttcccgtggactaatgtgaccccgccggcactcccagggatcacgaacgatacgacaatccaacagggtatcagtggcctgattgacagcctcaacgctagggatatttctgtcaaaatctttgaggatttcgcccagtcgtggtactggatattggtcgccttaggggttgccctggtattgtcattgctcttcatactgctcttaagactggttgcagggccactggtgttagtgctgattctgggtgttctaggggtcctggcttatggaatttactattgctgggaggagtatagagtccttagagacaaaggtgcttccattagccaactcggctttactacgaacttgtcagcttatcagtcagtccaggaaacttggctcgctgccctcattgtgctggccgtacttgaagctatcctattgctcatgctgatattcctgcggcagcgaataaggatcgctattgcactgctgaaggaggcatctaaggcagtgggccagatgatgagcacaatgttctacccacttgtgacttttgtactgctgcttatctgcatagcttattgggctatgacagccttgtatctcgctaccagcgggcaaccacagtacgtactgtgggcctccaatatttcctctccaggatgcgagaaagtaccgatcaatacttcttgtaatcccactgcacatcttgtaaacagttcctgtccaggattgatgtgtgtatttcaagggtatagttcaaaaggcctcatacagagatccgtgttcaaccttcagatttacggcgttctggggctcttttggaccctgaactgggttctggctctgggacagtgcgtgctggctggagccttcgccagtttctactgggcatttcacaaaccacaagacataccaacttttcccctgatttctgcttttatacgcactttgagatatcacaccggctcactcgctttcggggctctgattctgactcttgtgcagatcgcccgtgtgattttggagtacatcgatcacaaactgaggggcgtgcagaatcccgtggcgagatgcataatgtgctgttttaaatgctgtttgtggtgtctggagaaattcataaaattcttgaaccgtaatgcatacatcatgattgcaatttatggaaaaaacttctgtgtaagcgcaaagaacgcattcatgctccttatgaggaatatcgtaagggtggtggtgttggataaggtcaccgatttgctgctctttttcgggaaactattggtggtcggaggggtgggagtgctgagttttttcttcttctcaggccgtattccaggtctggggaaggatttcaaaagccctcacctgaactattattggttgcctatcatgacaagcatcctgggcgcctatgtcattgcatcgggcttctttagcgtattcggtatgtgtgtggacactctgttcctgtgcttcctcgaagacctcgaacgtaataacggctctctagaccgcccctattacatgtcgaagtcacttttgaagattctcggaaaaaaaaatgaagcaccgcctgataacaaaaagcgcaaaaaatag

SEQ ID NO: 70399 - DNA, 2007 bp, Artificial Sequence
  derived and/or modified sequence
atgggcgggaaacagagagacgaggacgatgaagcctatggcaaacctgtaaagtatgatccttcgtttagggggcccatcaaaaatcggtcgtgcacggacgtcatctgttgcgtcctctttctgctctttattcttggctatattgtcgttggcatcgtggcttggctgtacggagacccccgccaagtgctatatccacggaacagcactggggcctattgcggtatgggggaaaataaggataaaccttacttactgtattttaacattttttcctgcatactgtcctcaaacatcattagtgtggctgagaatggtttgcagtgcccaaccccccagaccgtgattactagtctgcaacaagagctgtgtccgagcttcctgctgccctctgcccctgctctgggaaggtgtttcccatggacaaatgttaccccacccgccttacctggcataacaaatgacacaaccatccaacaaggcattagcggtctcatagattctttgaacgcacgcgatattagcgtcaagatttttgaggattttgcccagtcctggtattggatactggtcgcgctcggggttgccctggttctgagtctgctctttatcctgctgctgagactggttgccggcccactggtgctagttctcatcctcggggtgctaggtgtgctagcatatggtatatattattgctgggaggaataccgcgttttgagggacaagggggcgagtatctcccagctcgggttcactacgaacttgtctgcataccagagtgtgcaggaaacatggctagccgcactgatagtcctggcggttctggaggccattttgctgcttatgctcatctttctgaggcagaggatccgtatcgcgatcgcactccttaaagaggctagtaaagccgtcggccaaatgatgtcgacaatgttttatcccctggtcaccttcgtattgctacttatttgcattgcctattgggccatgaccgcactctatcttgcaacaagcggccagccacagtacgttttgtgggcgtccaatatctcaagcccagggtgtgagaaggtacccatcaacaccagctgtaatcctactgctcaccttgtcaacagctcttgccccgggctgatgtgcgtcttccaagggtacagcagtaaaggcctgatacagaggtctgtgttcaatcttcagatttacggtgtgctcggattgttctggacattgaactgggtgctggcactgggccaatgcgtgcttgccggcgcatttgccagcttttactgggcgttccataagccacaggatattccaacctttcccctgatcagtgctttcataagaacactgcgttaccataccggttccctggctttcggggctctgatcctgactctggttcaaatcgcccgggttatcctggagtacatcgaccacaagctgcggggggtgcagaaccccgtagccagatgcattatgtgctgttttaagtgctgtctttggtgcctggagaaattcataaagttccttaacagaaatgcctacataatgatagcaatctatggtaaaaacttttgtgtctcggccaaaaacgcctttatgctcctgatgagaaatattgtcagagtcgtcgtgctcgacaaggttaccgatctactcctcttttttggaaaactgttggttgtaggaggagtgggggttttatcatttttcttcttctcaggaaggatccctggtctcggaaaagatttcaagtcccctcacttgaactattattggttgcctatcatgacaagtattctgggcgcatatgtgattgctagtggtttcttctcggtcttcggaatgtgcgtggatacactgttcctgtgtttcctggaggatctagaacggaataatggcagccttgatcggccctactatatgtcaaagagcttattaaaaatccttggaaagaagaacgaagcaccccccgacaacaaaaaacggaagaaatag

SEQ ID NO: 70400 - DNA, 2007 bp, Artificial Sequence
  derived and/or modified sequence
atgggtggaaagcaacgtgatgaggacgatgaagcctacggcaaacccgtgaagtacgatccctccttccgagggcccattaaaaatcggtcctgcacagatgtcatctgctgtgtcctcttcttattgtttattctagggtacatcgtggtaggtatagttgcatggctgtacggtgacccacggcaggtgctttaccctagaaactccactggagcttattgcggcatgggcgagaataaggataagccttacctgttgtatttcaatatatttagctgtatcctgtctagcaacataatctccgtggcagaaaatggcttacagtgccccaccccacaaactgtcataactagcctgcagcaagagctctgcccctcctttctgctcccatccgctcccgcattggggcgttgcttcccttggactaatattacccctcccgctttgccggggattacaaacgataccaccatacagcaaggaatctccggacttattgattcacttaacgctcgcgatatctctgttaaaatatttgaggatttcgcccaatcttggtattggattttggttgcactgggcgtggctcttgtgctgtctttactctttatacttcttctgagattggtggcgggcccactggtgttggtcttaatactcggcgtccttggggtgttagcgtatggaatctactactgttgggaggaataccgagtgttgcgagataagggagcaagcatcagccagcttgggttcaccacaaatctatctgcctatcagtcagtccaggagacctggctggcagccctcatcgtgctggccgtcctcgaagctatacttctactggttctgatttttttgcgacagagaattaggatcgcaattgccctgctgaaagaggcttcaaaggcggtcggacagatgatgtccaccatgttttaccctcttgtgaccttcgtcttacttctgatctgcatcgcttattgggccatgacggctctctatctggcaacatctggtcagccccaatacgtcctttgggcctctaatatcagctcacccggatgtgagaaggtccccatcaatacttcctgcaaccccactgcccatctcgttaattcttcctgtcctggattaatgtgcgtcttccaagggtatagcagcaaggggctgatccaacgctctgttttcaacttacagatctacggtgtgcttggtcttttctggacactgaactgggtgctggcgctcggccagtgtgtgcttgcaggcgccttcgcttccttttactgggccttccacaagccacaggatatcccaaccttccctcttatctccgcattcattaggaccctccgatatcatacagggtccctggcatttggggctctgatacttacccttgtgcagatagcccgggtcattctggagtatatcgaccacaagctgaggggcgtgcagaacccagtggcccgttgcatcatgtgctgcttcaagtgttgcttgtggtgccttgagaagttcattaagtttctaaaccgtaatgcatatatcatgattgcaatctatggcaagaacttttgcgtgagcgccaagaacgcctttatgcttctgatgagaaatattgtcagagttgttgtgttagataaagttacagatctgctgctgttcttcgggaagcttcttgtggtgggcggtgtgggcgtcctgagcttcttttttttttccggccggattcccggattaggtaaggattttaaatctcctcaccttaattattactggcttccaatcatgacatcaatcctcggggcgtacgtgattgccagtggattttttagtgtctttggaatgtgtgtcgacaccttgttcctgtgcttcctggaagatttagaaagaaacaacggctcactggaccgaccatactatatgagtaagagtttgcttaagattctcggtaaaaagaatgaggccccacctgataacaaaaaaaggaagaaatag

SEQ ID NO: 70401 - DNA, 2007 bp, Artificial Sequence
  derived and/or modified sequence
atgggtggaaaacagagggacgaagacgacgaggcctacggtaagccagtgaaatacgatccctcttttcggggcccaattaagaatcgcagttgcacagatgttatctgctgtgtgttatttctcctcttcattcttggctatatcgtggtggggatcgttgcttggctttatggcgatccccggcaagttctgtatcctcgcaacagcactggggcttattgcggaatgggtgagaacaaagataagccttatttgctttatttcaacattttctcttgtatcctgtcctcaaacattattagtgtagctgagaacgggttgcaatgccctactccacagacagttatcacatccctgcaacaggaactgtgtccaagctttctcttacctagcgcgcctgccttaggccggtgctttccttggaccaatgtcacccctcctgcccttccagggattaccaatgacaccaccatccagcagggcatcagcggtctcatagattctctcaatgcaagagacatcagtgttaagatttttgaggacttcgcccaatcctggtactggatccttgtcgctctgggtgtagccctggtgctgtcactgctgtttatcctgctgctgagactggtagctggacctctcgttctcgttttaattctgggagtactcggagttctggcatatggaatttactactgttgggaagaatacagggtactgcgggacaaaggcgcatccataagccaattaggcttcactacaaatctctcagcttaccagagtgtgcaggaaacctggctggccgcactgatagtcctggccgtattagaggccattctcctgctaatgctgatctttctgcggcagaggattcgcatcgccatagccttattaaaggaggccagcaaagctgtcggccagatgatgagtactatgttttatccgctggttacattcgtcctcttactcatctgtattgcctattgggcaatgacagccctctatctcgccacgtctggccagcctcagtacgtgctgtgggctagcaatatctcaagcccaggatgtgaaaaagtgccgatcaacacttcatgtaaccctacagcccacctggtgaatagtagctgccctggtttgatgtgtgtgtttcagggctactcttccaagggcctcatccaacgttccgtttttaacctgcagatctatggggtcctgggtttattctggaccctcaactgggtgttggctctgggacagtgcgtattggccggggcattcgcatctttttattgggctttccataagccacaggacattccaacgttcccacttatttcagcctttataaggaccctgcgctaccataccgggtcattggcctttggggccctcatcttgacactcgtccagatcgccagagtgatacttgaatacatcgatcataaattacggggagtgcagaacccagtggcccgatgcattatgtgctgtttcaaatgctgcctctggtgccttgaaaagttcataaaattcctgaaccggaatgcctacattatgatagctatttatgggaagaacttctgcgtgtctgcaaagaatgctttcatgctgctcatgagaaatattgtgagagtagttgtacttgacaaggtgacagacttgctcctcttctttggaaagctgctcgtggttggcggagtgggtgttctgtctttcttctttttctcaggcaggattccagggctgggaaaagactttaaaagtccacacctcaattattactggttacctatcatgacctccatactgggcgcttacgttattgcttcaggtttcttctccgttttcggcatgtgtgttgatacccttttcctgtgctttctggaggatctggagagaaacaacggcagcttagatcggccctattatatgtccaagtctctcctcaaaatcctgggcaagaaaaatgaagccccaccagacaataaaaaaagaaaaaaatag

SEQ ID NO: 70402 - DNA, 2007 bp, Artificial Sequence
  derived and/or modified sequence
atggggggcaaacagagggatgaagacgacgaagcttacgggaagcctgtgaaatatgacccgtcttttcggggcccgataaaaaaccgatcctgcaccgacgttatctgttgcgtgctgttcctcctatttatcctgggctacattgtggtgggtatcgtggcttggctgtatggtgaccccaggcaggtgctgtacccacggaatagtacaggggcttactgtggcatgggggagaataaggacaagccctatcttctgtattttaatatattctcatgtatcctcagctcaaacatcattagtgtggccgagaatggcctgcagtgccccacccctcagaccgttatcacgtccttgcaacaggaactgtgccccagcttcttgttgccctcagccccggcgctgggccgatgttttccctggaccaacatcaccccacccgccctgcctggtatcacaaatgatacaacgattcaacagggaatcagtgggttaatcgacagtctcaatgccagagatatttcagttaaaatttttgaggatttcgcacagtcttggtattggatcctggtggctctgggcgtcgccttggtcctctcccttctgttcattctgttgcttcgactggtagccggccccctggttttggtgttaatcctgggagtcctgggcgtactcgcgtatggtatctattattgttgggaggaataccgggtgctccgcgacaagggagcaagtatcagccagctaggctttactactaacctatcggcctaccagagcgtgcaagaaacttggttagccgccctcattgtcttggccgtgctggaggccatcctcctgctagttcttattttcttgagacagaggattcggatcgcaattgccctcctgaaggaggccagtaaagctgtgggtcagatgatgtctaccatgttttatccactcgtaaccttcgtactgttgctgatttgcatagcctactgggccatgacagccctctatcttgcgacctcgggccagccccagtatgtcctttgggccagtaatatctctagtccagggtgcgaaaaagtgcccattaatacaagctgcaaccctacagcacatctggtgaattcctcatgccctgggctcatgtgcgtttttcagggatactcttctaagggcctgatccaacgctcggtgtttaacctgcaaatttacggcgtgttaggtctcttttggactcttaattgggttctggctttgggacagtgcgtactcgccggagcgtttgccagcttttactgggcttttcacaaacctcaagacatcccaactttcccgctgatcagtgcatttatccgtactttacgataccacaccggcagcctggcatttggagccctgatcctgacgctggtgcagatcgcccgagtcatcctcgagtatatcgatcacaagctacggggagttcaaaacccagtggccagatgtattatgtgttgtttcaaatgctgcctctggtgtctcgagaagtttataaagttcttgaacagaaatgcctacatcatgatcgccatctacggtaagaatttctgcgtcagcgctaaaaatgcttttatgttgctgatgaggaacattgtccgggtggtggttctcgacaaggttacagacttgcttcttttctttggaaaattacttgtagtcggcggcgttggcgtgctgtcattctttttctttagtggtaggattccaggcctgggaaaagattttaagagtccacaccttaattattactggctccccattatgacttctatactcggtgcttacgttattgcatcagggttcttctccgtgttcggaatgtgcgtcgataccctctttctctgcttcctggaagatttagaaaggaacaatggtagcctagataggccgtactacatgagcaaaagtctgttaaagatcctcggaaagaaaaacgaggctcctcctgataataaaaagaggaagaaatag

SEQ ID NO: 70403 - DNA, 2007 bp, Artificial Sequence
  derived and/or modified sequence
atgggcggcaagcagagagatgaagatgatgaggcctacggcaagcctgtgaagtatgaccccagcttccggggccccatcaagaacagaagctgcacagatgtgatctgctgcgtgctcttcctgctcttcatcctgggctacatcgtggtgggcatcgtggcctggctgtatggagacccccggcaggtgctgtaccccaggaacagcactggagcctactgcggcatgggagagaacaaggacaagccctacctgctgtacttcaacatcttcagctgcatcctgagcagcaacatcatctctgtggctgaaaatggcctgcagtgccccaccccccagaccgtcatcaccagcctgcagcaggagctgtgccccagcttcctgctgcccagcgccccagccctgggccgctgcttcccctggaccaacgtgaccccaccagccctgcccggcatcaccaatgacaccaccatccagcagggcatcagcggcctgattgacagcctgaatgcccgggacatctctgtgaagatctttgaagattttgcccagagctggtactggatcctggtggccctgggcgtggccctggtgctgagcctgctcttcatcctgctgctgcggctggtggccggccccctggtgctggtgctgatcctgggcgtgctgggcgtgctggcctacggcatctactactgctgggaggagtacagagtgctgcgggacaagggggccagcatcagccagctgggcttcaccaccaacctgagcgcctaccagagcgtgcaggagacctggctggccgccctgattgtgctggccgtgctggaggccatcctgctgctgatgctgatcttcctgcggcagaggatccgcatcgccatcgccctgctgaaggaggccagcaaggctgtgggccagatgatgagcaccatgttctaccccctggtgacctttgtgctgctgctgatctgcatcgcctactgggccatgacagccctgtacctggccaccagcggccagccccagtatgtgctgtgggccagcaacatcagcagccctggctgtgagaaggtgcccatcaacaccagctgcaaccccacagcccacctggtgaacagcagctgccccggcctgatgtgtgtgttccagggctacagcagcaagggcctcatccagaggagcgtcttcaacctgcagatctatggagtgctgggcctcttctggaccctgaactgggtgctggccctgggccagtgtgtgctggccggggcctttgccagcttctactgggccttccacaagccccaggacatccccaccttccccctcatcagcgccttcatccgcaccctgcgctaccacacaggcagcctggccttcggggccctgatcctgaccctggtgcagatcgcccgggtcatcctggagtacatcgaccacaagctgcggggcgtgcagaaccctgtggcccgctgcatcatgtgctgcttcaagtgctgcctgtggtgcctggagaagttcatcaagttcctgaacagaaatgcctacatcatgattgccatctacggcaagaacttctgtgtgtctgccaagaatgccttcatgctgctgatgagaaatattgtgcgggtggtggtgctggacaaggtgacagacctgctgctcttcttcggcaagctgctggtggtgggcggcgtgggcgtgctgtccttcttcttcttcagcggccgcatccctggcctgggcaaggacttcaagagcccccacctgaactactactggctgcccatcatgaccagcatcctgggcgcctacgtgattgccagcggcttcttctctgtgtttggcatgtgtgtggacaccctcttcctgtgcttcctggaggacctggagaggaacaacggcagcctggaccggccctactacatgagcaagagcctgctgaagatcctgggcaagaagaatgaggcccccccagacaacaagaagaggaagaagtag

SEQ ID NO: 70404 - DNA, 2007 bp, Artificial Sequence
  derived and/or modified sequence
atgggcggcaagcagagagatgaagatgatgaggcctacggcaagcctgtgaagtatgaccccagcttccggggccccatcaagaacagaagctgcacagatgtgatctgctgcgtgctcttcctgctcttcatcctgggctacatcgtggtgggcatcgtggcctggctgtatggagacccccggcaggtgctgtaccccaggaacagcactggagcctactgcggcatgggagagaacaaggacaagccctacctgctgtacttcaacatcttcagctgcatcctgagcagcaacatcatctctgtggctgaaaatggcctgcagtgccccaccccccagaccgtcatcaccagcctgcagcaggagctgtgccccagcttcctgctgcccagcgccccagccctgggccgctgcttcccctggaccaacatcaccccaccagccctgcccggcatcaccaatgacaccaccatccagcagggcatcagcggcctgattgacagcctgaatgcccgggacatctctgtgaagatctttgaagattttgcccagagctggtactggatcctggtggccctgggcgtggccctggtgctgagcctgctcttcatcctgctgctgcggctggtggccggccccctggtgctggtgctgatcctgggcgtgctgggcgtgctggcctacggcatctactactgctgggaggagtacagagtgctgcgggacaagggggccagcatcagccagctgggcttcaccaccaacctgagcgcctaccagagcgtgcaggagacctggctggccgccctgattgtgctggccgtgctggaggccatcctgctgctggtgctgatcttcctgcggcagaggatccgcatcgccatcgccctgctgaaggaggccagcaaggctgtgggccagatgatgagcaccatgttctaccccctggtgacctttgtgctgctgctgatctgcatcgcctactgggccatgacagccctgtacctggccaccagcggccagccccagtatgtgctgtgggccagcaacatcagcagccctggctgtgagaaggtgcccatcaacaccagctgcaaccccacagcccacctggtgaacagcagctgccccggcctgatgtgtgtgttccagggctacagcagcaagggcctcatccagaggagcgtcttcaacctgcagatctatggagtgctgggcctcttctggaccctgaactgggtgctggccctgggccagtgtgtgctggccggggcctttgccagcttctactgggccttccacaagccccaggacatccccaccttccccctcatcagcgccttcatccgcaccctgcgctaccacacaggcagcctggccttcggggccctgatcctgaccctggtgcagatcgcccgggtcatcctggagtacatcgaccacaagctgcggggcgtgcagaaccctgtggcccgctgcatcatgtgctgcttcaagtgctgcctgtggtgcctggagaagttcatcaagttcctgaacagaaatgcctacatcatgattgccatctacggcaagaacttctgtgtgtctgccaagaatgccttcatgctgctgatgagaaatattgtgcgggtggtggtgctggacaaggtgacagacctgctgctcttcttcggcaagctgctggtggtgggcggcgtgggcgtgctgtccttcttcttcttcagcggccgcatccctggcctgggcaaggacttcaagagcccccacctgaactactactggctgcccatcatgaccagcatcctgggcgcctacgtgattgccagcggcttcttctctgtgtttggcatgtgtgtggacaccctcttcctgtgcttcctggaggacctggagaggaacaacggcagcctggaccggccctactacatgagcaagagcctgctgaagatcctgggcaagaagaatgaggcccccccagacaacaagaagaggaagaagtag

SEQ ID NO: 70405 - DNA, 2007 bp, Artificial Sequence
  derived and/or modified sequence
atgggcggcaagcagcgggacgaggacgacgaggcctacggcaagcccgtgaaatacgaccccagctttaggggcccaatcaaaaaccgatcatgcactgacgtcatttgctgtgtgctcttcctattattcatcttaggttacatcgttgtgggcatagtggcatggctctacggggaccctagacaggttctgtatccgagaaatagtaccggagcttactgtggaatgggggaaaataaggataagccctatcttctgtattttaacatcttttcatgtatcctgagttctaacattatttccgtggccgagaacgggttgcagtgcccaaccccgcaaacagtgatcaccagtctgcaacaggagctctgcccgtctttcctgctgcctagcgcccctgcgttgggacgatgttttccatggaccaacgtgacccctccagcactaccgggcatcactaatgatacaaccatccagcaaggcatcagcggcctgatcgactctctgaacgccagagacataagtgtgaaaattttcgaggatttcgctcagtcatggtactggatacttgttgccctcggcgtggccctggttctctccctgctttttatactcctcctgaggctggtggcgggacctctcgtccttgtcctaatcttgggtgttcttggtgtcctggcttacggcatttattactgctgggaggagtatagggtgctgagggataaaggcgccagcatctctcagctgggattcacaacaaatttaagcgcgtatcagagcgtgcaggagacttggcttgccgccttgatcgtactggccgtgctcgaggccatcctgctgctgatgctaatctttctgaggcaacggatccggatcgctatcgcactgcttaaagaggccagcaaggccgttggacagatgatgagtaccatgttctacccactcgtcacattcgtacttctcttaatttgtatcgcttattgggctatgactgcactgtacctagcaacttcgggccaaccacagtatgtgctgtgggcaagcaatatctcctcacctggatgcgagaaggtgccaatcaacacatcctgcaatcccaccgcccatttagtaaactcaagttgtccaggcctcatgtgcgttttccaggggtacagctctaaaggtcttatacaacggtccgtgtttaacctacaaatctacggcgtcctcggactgttttggaccttaaactgggtgctcgccctcggtcagtgtgttctggccggtgccttcgcaagcttctactgggcctttcacaagccccaggacatcccaacgtttccccttatttctgcttttatccgaacactgcgttatcacaccggatccctggcctttggagccctgatcttgacccttgtccagatcgctcgcgtcatcttggaatatatagaccacaagctgcggggtgtgcagaacccggtggccaggtgtatcatgtgctgttttaagtgctgtctgtggtgcctggagaaatttatcaaattcctaaacagaaacgcttatatcatgattgccatttacggcaagaacttctgtgtgagcgctaagaacgccttcatgctgttgatgaggaacatagttcgggtggtcgtccttgacaaggtgaccgaccttctccttttcttcggaaaactcctggtggtcggcggcgttggagttcttagctttttttttttttccggaagaatccccggcttggggaaggatttcaaaagtccgcatttaaactactattggttaccgatcatgacctccattctcggcgcgtatgtgattgctagtggatttttttccgtattcgggatgtgcgtagatacgctttttctctgtttcctcgaggatctcgaacggaataacggatctctcgatcgaccttattacatgagtaaaagcttactgaagatcttgggcaaaaagaacgaagcgcctcccgacaacaaaaagcggaaaaagtag

SEQ ID NO: 70406 - DNA, 2007 bp, Artificial Sequence
  derived and/or modified sequence
atgggcggcaagcagcgggacgaggacgacgaggcctacggcaagccggtgaagtatgatcccagctttagggggccaattaaaaaccgctcatgtactgacgtcatctgttgtgtgctgtttctcctcttcatactgggatatatagtcgtgggaatcgtcgcctggctgtacggcgaccctcgccaggtcctgtatcccaggaattctaccggggcatactgcgggatgggcgagaacaaggacaaaccatacctactgtatttcaatattttctcttgcattctgtctagtaacattattagcgttgctgagaacgggttacagtgtcctactccacagactgtgattactagcttgcagcaggagctgtgtcctagttttctccttccttccgcgcccgccctgggtagatgttttccttggacaaacatcacccctcctgccctcccaggtatcacaaatgacaccacaatacagcaaggtatttccggtctgattgattccctaaacgcgagggacataagcgtgaagatttttgaagacttcgcacagtcgtggtactggatactggtcgcgctcggagtggcattagtgctgtctctactctttatcctcctgttgcgcctcgtggctggacccttagtgctggtactaatcttaggggtgctgggcgtgctcgcatatgggatttactattgttgggaggagtatcgagtccttagagataagggagcttctataagccagctcgggtttacgactaacttgagcgcatatcagtccgtgcaggaaacgtggctggcggcactgatcgtactagccgtgctggaagcaattctgctgctggtcctaatcttcctgcgccaacgcatcagaatcgctattgccctccttaaagaggcctccaaggcagtgggtcagatgatgtcgactatgttctatcctctggtcacattcgtgcttctgcttatctgcatcgcatactgggctatgacagctctgtatctagcaacatcagggcagcctcagtatgtactctgggctagcaatatcagcagcccaggatgcgaaaaagtgccaatcaacacttcctgcaatcccaccgctcacctggtgaactcatcatgcccagggctaatgtgcgttttccagggatactcaagcaaaggcctgatacagcgctccgtgtttaacttacagatctacggagtactcggattgttttggacgctaaactgggtactggctctaggccagtgtgtgctggcaggggcctttgcctccttttattgggcattccacaagcctcaggatatccccactttccccctaattagtgcattcattaggacactccgttaccacaccggctcacttgcgttcggagcacttattctgacgctggtgcagatagcaagagtcatactggagtacattgatcacaaactgagaggcgttcaaaatccggtggctaggtgtattatgtgttgcttcaagtgctgtctgtggtgcctcgaaaaatttattaagtttctcaaccgcaacgcctatatcatgatcgccatctatggtaaaaacttctgcgttagcgccaagaatgcctttatgctgctgatgagaaacatcgtgcgcgtcgtcgtgttggacaaagtcaccgatttgctcctcttctttgggaagctgctcgtagtgggaggcgttggcgtccttagcttcttttttttctccggacgaataccaggtctgggcaaggactttaagagtccccatttgaattactattggcttccgatcatgacatccatccttggcgcctacgtgatcgcctctggattcttctcagtcttcggcatgtgcgtggacaccctgtttctgtgcttcctggaggatctcgagcgaaataacggctctcttgaccgcccgtactacatgtccaaatcactgcttaaaatcctgggcaagaagaacgaagcgccacccgacaacaaaaagcgcaaaaagtag

SEQ ID NO: 70407 - DNA, 2007 bp, Artificial Sequence
  derived and/or modified sequence
atgggcggcaagcagcgggacgaggacgacgaggcctacggcaagcctgtgaaatatgaccccagcttccggggccccataaagaacagatcttgtacagacgtcatttgttgtgtgctgttcctgctctttattctgggctacatagtggtgggcattgttgcgtggctctatggagatcccaggcaggtactgtatccgaggaacagtaccggcgcttattgcggcatgggcgagaacaaagacaagccctacctgctctatttcaatatcttttcttgtattctctcctccaacatcatttccgtggccgagaatggtctgcagtgtcccaccccccaaaccgtgattacaagcctgcagcaggagttgtgcccttctttcctgttacccagcgcccccgctctggggagatgtttcccctggactaatgtgacaccccccgccctgccaggtatcactaatgataccaccatccagcagggaatctctggtctcatcgatagcctgaacgctagggatatttccgtaaagatcttcgaggactttgcacagtcctggtattggatcctggtggcactcggggtggccctggtgcttagcctcctgttcatactgcttctgcgtctcgtcgctggccccctagtgttggtacttatcctgggtgtactgggcgtgttagcctatggtatttattattgttgggaagaataccgcgtgcttcgggacaaaggagcatctattagccagctcggattcactacgaacctttcagcgtaccagagtgtgcaggagacctggcttgctgccctgatcgttctcgcggtgttggaggctatcctgctgttgatgttgatctttctgaggcaacgcattaggattgctatcgctcttcttaaagaggctagtaaagcagtgggacagatgatgtccacaatgttctatccactggtcacttttgtcctgctgttaatctgcatagcctactgggcaatgaccgctctttacctggccaccagtggccagcctcagtatgtgctctgggcatctaacattagttcccctggctgcgaaaaagtaccaatcaacacgtcctgcaatccaactgcccacctggtgaacagcagctgccctggcctaatgtgtgtgtttcagggttattcctctaagggtctgatccagcggagtgtgttcaatcttcagatatatggggtgctgggactgttctggacacttaactgggtgctcgcactcggccagtgtgtcctggccggagcctttgcaagcttctactgggccttccataaaccccaagacattccaacattcccactgatttccgctttcatccgcacactcagataccacactgggtcattggccttcggcgctctcatattgacacttgttcagatcgctagggttatcctggaatacatcgatcacaaactgagaggcgtacagaacccagtggcgagatgcataatgtgttgcttcaagtgttgtttgtggtgcttagagaaattcatcaagtttctcaacaggaacgcctatatcatgatcgccatttatggaaagaacttctgtgttagcgccaagaacgcctttatgttgctaatgagaaatatcgtaagagttgttgtattggacaaggtcacggacctgcttttgttcttcgggaaattgctcgtggtaggcggggtcggtgtcctctccttcttcttctttagtggcaggatcccaggcttagggaaagacttcaaaagtccacatcttaactactactggttgcctataatgacttcaatactgggcgcctacgtcattgcgtcgggcttcttctctgtatttggcatgtgcgttgacacactgttcctgtgttttctcgaggacctggaacgcaataacggttctcttgaccgcccttactacatgtcgaagagcctcctgaaaattctgggtaaaaaaaacgaggcacctcctgacaataagaagcggaaaaagtag

SEQ ID NO: 70408 - DNA, 2007 bp, Artificial Sequence
  derived and/or modified sequence
atgggcggcaagcagcgggacgaggacgacgaggcctacggcaagcccgttaagtacgaccctagcttccgcggcccgatcaaaaataggagttgcacagatgtcatctgctgcgtcctgttcctgctgtttatccttggttatattgtggtcggcattgtggcttggctctatggtgacccgcgacaggttctatacccccggaactccaccggggcctactgcggcatgggtgagaataaagacaaaccatatctgctgtatttcaacatcttttcgtgcattctctccagcaacattatcagcgtagccgagaacggattgcagtgtcccacccctcaaactgtgataacatccctgcaacaggagctgtgccccagttttttactcccatcagcacccgctttaggtaggtgtttcccatggactaatgtgactccgcctgcgctcccaggcataactaacgatactacaatccagcagggcatttcgggcctgattgactcactgaatgcacgcgacatatccgtcaagatcttcgaggactttgcccagagctggtactggatcttggtggccttgggtgtggctctcgtgctgagccttctgttcatcctgctgctgcgattagtcgctgggcctcttgtcttggtgctgatcctgggtgtattgggcgtgcttgcgtatgggatttactattgctgggaagaatatagagtcctgcgggacaagggtgcgtccatatctcagcttggttttactacaaacctgagcgcctaccagtccgtgcaggagacttggctggctgctctgatcgtcctggccgtacttgaggcaatccttctgctgatgctgatatttctaaggcaaagaataagaatcgccattgccctgctgaaggaggctagtaaagccgtcggacagatgatgtcaaccatgttctatcctctcgtcaccttcgtcctgctgctgatctgtatagcatattgggccatgacggccctttatctcgcaacttcaggtcagccccaatacgtgctctgggcctcgaatatctctagtcctggatgcgaaaaggtacctattaatacctcatgcaatccgacagctcacctggtcaattcaagttgccccggtcttatgtgcgtgttccagggttactcatccaaggggctgattcagagatctgtttttaacctccagatctatggcgtcctcggccttttctggacactgaattgggtcctggccctgggtcagtgcgtgctcgcaggggcttttgcttccttctactgggccttccacaaaccacaggacatccctacattccctctcatcagcgcttttatccgcactctcaggtaccacaccggatctttggcatttggtgccctgattctaaccctggtgcagattgctagagttatcctggaatacatagatcataagcttcggggcgtccagaatcccgtggcccggtgtatcatgtgttgctttaagtgttgcctatggtgtctggagaagttcatcaaattcctgaataggaatgcatacataatgattgctatctacggaaagaatttttgcgtatccgccaaaaatgcctttatgctgttaatgcgaaacattgtacgtgttgttgtactggacaaggtgaccgatctcctactgttcttcggtaagctccttgtagtgggcggagttggtgtgttgtcttttttcttttttagcgggagaatccctggccttggtaaggacttcaagagcccccatttaaactattactggctccctataatgacttctattctgggcgcttacgtgatcgccagcggatttttcagcgtttttggaatgtgtgtggacaccctgttcttgtgcttcctcgaggatctggagcgtaataacggaagcctggacaggccctattatatgtccaagtccttgctgaagatcttgggtaaaaaaaatgaggccccccccgataataagaagaggaagaaatag

SEQ ID NO: 70409 - DNA, 2007 bp, Artificial Sequence
  derived and/or modified sequence
atgggcggcaagcagcgggacgaggacgacgaggcctacggcaagccagtgaagtacgatccaagcttcagaggcccaattaagaaccggtcttgcactgatgtgatttgctgcgtcttgttcctcctgtttatactcggctatattgttgtcgggatcgtggcttggctgtatggggacccacgccaggttctgtacccccgcaactcaaccggggcctactgcggcatgggcgagaataaggacaaaccctacctgctttactttaacatctttagctgtattctctcttcaaacatcatctctgtagccgaaaacggacttcagtgccctacgccacagaccgtgattacttcactgcagcaggagctgtgccccagctttctccttcccagcgcacccgcccttggcaggtgcttcccttggaccaacatcacgccacctgcactaccaggtatcaccaacgatacaaccatccagcaaggcatctcggggctgatcgattcgttaaacgccagggacatctcggttaagatttttgaggacttcgcccagtcttggtactggatcctggtggccttgggtgtggccctggttttgtccttgttgtttatacttttgctgaggctggtggccggacccctggtactggtgctaattttaggggtgctgggagttctggcttatggtatttactattgctgggaggaataccgtgtcctgcgggataagggtgcatccatttcgcagctgggattcactacaaatctcagcgcttaccagtctgtgcaggagacgtggctggccgcgctgatcgttctcgccgtcctcgaggccatactcctgctggttctgatattcttgcgccagcgcatccgcatagccatcgcgctgctgaaagaggccagtaaagccgtcggccagatgatgagcacaatgttctaccctttagtaacttttgtgcttcttctgatttgcatagcctactgggctatgactgcattatatttagccacgtctggacagcctcagtacgtgttatgggccagcaacatctcatcaccagggtgcgaaaaggttcccatcaatacatcatgtaatccaaccgcccacttagtgaactcgtcgtgcccgggtctgatgtgcgtgtttcagggatatagctctaagggtttgatccagagatctgtgtttaacctgcagatttatggggttttgggcctgttctggacgttgaactgggtgctagctcttggacagtgcgttctggccggggctttcgcatcattctattgggcgttccacaaaccccaagacatcccaacctttcctctcatttccgcctttattcgtacacttcgctaccatactggcagcctggctttcggggcgctcattttgaccttggtccagatcgcccgggttatcctggagtacatcgatcacaaactgaggggtgtccagaatcccgtggccagatgtatcatgtgctgcttcaagtgctgtctgtggtgtttagagaagttcatcaaattccttaaccgtaatgcctacatcatgatagctatttacgggaagaatttttgcgtttccgcaaagaatgccttcatgctcctaatgaggaatatcgtgagggttgtggttctggacaaggtgaccgacttactcctgttttttgggaagctactcgtagtcggaggagtgggagtcctcagcttcttcttcttctcagggcgcattcctgggttagggaaggatttcaaatcaccccacctgaattactactggctgccaataatgacatccatattgggggcttacgtgatcgcctcaggcttcttctctgtattcggaatgtgtgtggacacactgtttctgtgcttcctcgaagatctggagaggaacaacggatcccttgataggccctactacatgtcaaagtccctcctaaaaatactgggaaagaagaatgaggccccacccgacaataaaaagaggaagaagtag

SEQ ID NO: 70410 - DNA, 2007 bp, Artificial Sequence
  derived and/or modified sequence
atgggcggcaagcagcgggacgaggacgacgaggcctacggcaagccggtgaagtatgatccatcctttcgcggacccataaagaacaggtcgtgcacggacgtcatttgctgtgtgttgttcttgctattcattttgggctatatcgtagtgggcattgttgcttggctgtacggcgatcctagacaggttctgtacccccgcaattcaaccggcgcttattgcggcatgggcgaaaacaaggataaaccctacctgctatacttcaacattttcagctgcattctgtctagtaatataatcagcgtggccgagaatggtctgcagtgtcctaccccgcaaaccgtcataacgtctctccagcaagaactgtgtccctccttcttgctcccaagtgcgccagcactggggcgttgcttcccgtggaccaacgtgaccccacccgcactgcctggaatcaccaatgacacaacgatccagcaagggatcagtggtctgattgatagtttgaatgcccgggatatctccgtgaaaatcttcgaggacttcgcgcaaagctggtattggattcttgtagcacttggagtggcactggttctgtccttgctcttcatcttgctgttgcggctggtggccggacccctcgtcctggtccttatacttggagtacttggcgtgctcgcctatgggatctattattgctgggaggaatatagagttctgcgcgacaaaggggcgagtatctcccagctgggctttacaactaacttgagcgcctaccagagcgttcaagagacctggctggccgcactgatcgtgttggccgtcctggaggcaatactgttgctcatgcttattttcttgcgacagcggatccgtattgccatcgccctacttaaggaagcttcaaaggccgtcggacagatgatgagcaccatgttctatccactggttaccttcgtactgctcctgatctgtatagcctactgggctatgacagccctctacctggcaacatccggccagcctcagtacgttttgtgggcctccaacatctcaagtcctggttgcgagaaagtcccgatcaatacatcctgcaatcctaccgcccatctggttaatagcagttgtccaggactgatgtgcgtcttccagggatactcctcgaaaggtctgatccaaagaagcgtcttcaacttgcaaatttacggcgtgctcggtctcttttggaccctaaactgggtgctcgctctggggcagtgtgtgcttgctggggccttcgccagtttctattgggctttccataagccacaggatatcccaacgtttcctctgatctcggcctttattagaaccctccgctatcacacaggaagccttgctttcggagctttgattctgacacttgtgcagatcgctcgcgtgatcctcgagtacatcgaccacaagctccgtggcgtgcagaatcccgtagctaggtgcattatgtgctgtttcaagtgttgcctgtggtgcctggagaagttcatcaagtttctgaatcggaatgcctacattatgatcgcaatttacgggaaaaacttttgcgtgagcgcaaagaacgcattcatgctgctgatgaggaacattgtcagggtggtcgtattggacaaggttacggaccttctgctgtttttcggcaagctcctggtggttgggggggttggcgtgcttagcttcttcttttttagcggtaggatccctgggctgggcaaggattttaaatccccccatctcaattactattggcttcccataatgacgtccattctcggggcgtatgtgattgcttctgggttcttctcagtatttggtatgtgcgtcgatactctgttcctgtgtttccttgaggatcttgagcgcaataatggcagcttggacaggccctactatatgtctaagtcattactcaaaatcctggggaaaaagaacgaggcccccccggataacaagaagcgcaaaaagtag

SEQ ID NO: 70411 - DNA, 2007 bp, Artificial Sequence
  derived and/or modified sequence
atgggcggcaagcagcgggacgaggacgacgaggcctacggcaagcctgttaagtatgaccccagctttcgaggccccattaagaatcgctcttgtacggacgtgatttgctgcgtgctgttcttgctgtttatcctgggctacatcgtagtgggcatcgtagcctggctctatggagaccctagacaagtgctgtacccaagaaactctaccggcgcgtattgcggcatgggggagaataaggataaaccatacctcctgtacttcaacattttttcctgtatcctgtcctctaacataatcagcgtggctgagaacggactccaatgtcccacaccccagaccgtaattacgtctctgcagcaggagctgtgtccatcctttctgctcccctccgctcctgcactgggccgctgtttcccttggacaaacattactccgcccgcactgcccgggatcacgaacgacaccacaatccagcagggtatatcagggttgatcgattccttaaacgcacgggatatttcggtgaagatctttgaagattttgctcagtcatggtactggatcttggtggctcttggcgtggcacttgtcctatcactcctcttcatcctattgctgagattggtagccggtccacttgttctggtgttgatactgggtgttctgggcgttctcgcctacgggatatactattgttgggaggagtaccgcgttctgagagacaagggggcctcgatatctcagctcggcttcactacaaatctttccgcttaccagtcagtccaagaaacctggctcgccgctttgatagtacttgctgtcctcgaggcaatactgctcctggtgttaatctttcttaggcaaagaatcaggatagctatcgccctgctcaaggaggcgagtaaagctgtgggtcaaatgatgagtaccatgttttaccctctggtgacttttgtgctgctgctgatttgcattgcctattgggcaatgactgccctgtacttagcaacaagtgggcagccacagtacgtcctctgggcatccaatatttctagccctggttgcgaaaaagtgccaatcaacacatcctgtaaccctacagcccatctggttaactcaagttgccccgggttgatgtgtgtgttccagggctacagttccaaaggtttgatccagagaagtgtattcaacttacaaatctatggcgttcttggactgttctggacactgaactgggtacttgcgctcggccagtgcgtgcttgccggagcctttgcgagtttctactgggcctttcataaacctcaggatattcccacgttccctcttatcagtgcctttatacggactctgagataccacacgggttcactggcttttggggccctgattctgactctagtccagattgcaagggtcatcctagaatacattgatcacaaactaagaggcgtgcaaaaccctgtcgcacggtgcatcatgtgttgcttcaaatgttgtttgtggtgccttgagaagttcatcaagttcctgaacaggaacgcgtatatcatgattgccatctatggcaaaaatttttgcgtgtccgccaagaacgcctttatgctcctgatgagaaacattgtcagagtagtcgtgctggataaggtgactgacttactgttgttttttggcaaattgctcgtggtcggtggggtgggcgttctgagcttttttttttttagcgggcgcattcccggattgggcaaggattttaagagtccgcacctgaactactattggctgccgatcatgacctctatcctgggggcttacgtgattgcatccggtttcttctccgtgttcggcatgtgcgtagacacactgtttctgtgcttcttggaagatctagagaggaacaatggctctctggacaggccatactatatgtctaagtcactcctaaagattctcggcaaaaagaacgaggccccccctgacaataagaagaggaaaaaatag

SEQ ID NO: 70412 - DNA, 2007 bp, Artificial Sequence
  derived and/or modified sequence
atggggggaaaacagcgagacgaggatgacgaggcctacggtaagcctgtcaagtacgacccatccttcagaggacctattaagaaccgtagctgcactgacgtgatttgctgcgtccttttcctgcttttcatcctgggttacattgtcgtaggcatcgtggcatggctgtacggcgatccacgtcaagtgctgtatcctaggaactccaccggggcatattgcggcatgggcgagaacaaagacaagccgtacctcctttactttaatatttttagttgcattctgtcatcaaatatcatctcagtcgcagaaaatggtctccagtgccccacgcctcagaccgtaattacctccttgcaacaggaactctgtcccagcttcctcctgccttctgccccagctctggggagatgttttccttggacgaatgtcactcctccagctctcccaggcatcaccaatgacacgactattcagcaggggattagtgggcttatcgatagtctgaatgcccgtgatatttccgtcaaaatcttcgaggacttcgcgcagtcgtggtactggatattggttgccttaggcgtagcccttgtcttgagcctgcttttcatactgttgctgagacttgtggccggaccattagtgctcgttctgatcttgggcgtactaggagtgctcgcatatggcatctattactgctgggaagaataccgcgtcctgcgggataaaggcgcttctatatcccaactgggattcactaccaatctgtctgcctaccaaagcgtgcaggaaacctggctcgctgcactgatagtgctggccgtcctggaggccatcctcctactgatgctcatattcctgagacaacgaattcggatcgccatcgcgctgctgaaggaggccagtaaggccgtaggccagatgatgagtactatgttttacccactggtgacgtttgtgctgcttctaatatgtatcgcatactgggcaatgaccgccctctacttggccacctctggtcagccacaatatgttctttgggcttctaatatttcctccccagggtgcgaaaaagtccccataaacacttcttgtaacccaactgctcatcttgtaaatagttcatgccccggtcttatgtgcgtgttccagggatactctagcaagggccttatacaacgtagtgtgttcaacctgcagatatatggtgtgttgggcctgttttggacactcaactgggtcctcgctcttgggcagtgcgtgctggctggcgctttcgcctccttctactgggcctttcataagccacaggatataccaacttttcccctgatttccgcttttatcagaacactgcgatatcatacaggatccctagctttcggagctcttatactgaccctcgtgcagattgccagagttatattagaatacattgatcataaattaaggggagtacaaaatcctgtggcccgttgcattatgtgctgtttcaagtgttgcctctggtgcttggagaaatttataaagtttctcaacagaaatgcatacatcatgatcgccatctacggtaaaaatttctgcgtcagcgccaaaaacgcctttatgctgctgatgaggaatattgtgcgtgtggtggtgcttgataaagtcactgaccttctgctgttttttggcaaactcctcgttgtcggcggagtaggggtgctgagcttctttttctttagcggtaggattcccggactgggtaaagacttcaaatctccccacttaaactactactggctgcccatcatgacctctatcctcggcgcatacgtaatcgcatctggtttcttttctgtgttcgggatgtgcgtggacactctttttctatgcttcctcgaggacttagaaagaaacaacggctctctggaccgcccttattacatgtccaaaagtctcttgaagatccttggcaaaaagaatgaggctccccctgacaacaagaaaaggaaaaagtag

SEQ ID NO: 70413 - DNA, 2007 bp, Artificial Sequence
  derived and/or modified sequence
atggggggtaagcagcgcgacgaggacgatgaggcatacgggaagccggtgaagtacgatccttcattccgaggccctattaaaaataggagttgtacagatgtcatctgttgcgttctcttcctgttgttcattctgggatacattgtggtgggtatagtcgcttggttgtatggcgaccctaggcaggtgctgtacccaaggaacagcaccggagcatactgtggcatgggggaaaacaaagataaaccatacttgttgtattttaacatattcagctgtattctgtcatcgaatatcatctcggtggccgagaatggacttcagtgccccacaccacaaaccgttatcactagcctacagcaggagctgtgcccttctttccttctgccttctgctcccgctctaggtcggtgtttcccttggaccaatatcacaccccctgcgctacccggtatcacaaatgatacaactattcagcagggaatcagtgggctgattgacagcctgaatgcacgggatatttccgtgaaaatttttgaggattttgctcagtcctggtattggatattagttgccttaggcgtggcacttgtcctatcgctgctttttatcctactcctgcgcctggtggcgggaccgctggttcttgtgctcatcctgggggtcctgggagtactggcgtatgggatctactattgctgggaagaatatagggttctaagggacaagggggcttcgatttcccagctgggcttcacaactaacctttccgcctaccagtcagtgcaggaaacctggctcgcagccctgatcgtgctggcagtgctggaagcaatccttctcctggttctcatttttcttcgccagaggatacgtattgcgattgccctgctgaaggaggcttccaaagcggtgggacaaatgatgagcacgatgttctacccactggtgacctttgttttgctacttatctgcatagcctactgggccatgacagcactatacctggcaaccagtggccaacctcagtatgtcctgtgggccagcaatattagcagccccggatgcgagaaggttcctatcaacaccagctgtaatccgaccgcacacttagtgaatagttcctgtcctggattgatgtgcgtcttccagggttactcatcaaaaggcctgatacaaagaagcgtttttaacctgcagatctacggtgtgctgggactattctggaccctgaattgggtgcttgctcttggccagtgcgtgctggccggagcgttcgctagtttttattgggcatttcacaaaccccaggacatccccacttttcccctgatcagtgcgttcatccgcacgctgcggtatcacacaggttcgctggcctttggtgcactcattttgacactcgttcagatagctcgggtcattcttgagtatatcgaccataagctgcgcggtgttcagaaccccgtggcacgctgcattatgtgctgtttcaaatgttgcctctggtgcctggagaagtttatcaagttccttaaccgaaacgcatatatcatgatagctatttacggaaaaaatttttgcgtgtcggctaaaaatgcgttcatgctgctgatgagaaatatcgtgcgcgtcgtggttctcgacaaagtaaccgacctgctcttgttctttggcaaacttctagtggtaggcggagtcggggttttgagtttctttttcttttcaggccgtattcctgggctgggcaaggatttcaagtccccacacctaaattactactggctgcctatcatgacgagtatactgggcgcatatgtcattgcatctggcttcttttctgtgttcgggatgtgcgtcgacaccctgtttctatgcttcctggaagatttggaacggaacaacggaagtctcgatcgaccctactacatgtccaagtccctgttgaagattctgggcaaaaaaaatgaggctcccccagacaacaaaaaacgtaagaaatag

SEQ ID NO: 70414 - DNA, 2007 bp, Artificial Sequence
  derived and/or modified sequence
atgggtggtaagcagcgagacgaagatgacgaagcatatggtaagccagttaaatacgatccctcattcaggggtcccattaaaaatcggtcctgcaccgacgtgatctgctgcgtgctttttctgctatttatactcgggtacatagtggtcggtattgtcgcttggctgtatggagatccacggcaggtactgtatccaaggaattcgactggggcttattgtggtatgggggaaaataaagataagccctacctgttatattttaatatctttagctgcatcctgagttccaatatcatttccgtggccgagaacggtttacaatgtcctacaccccagactgtgatcaccagtctgcagcaggaactctgtccttcgtttttgctgcccagcgcaccggctcttggacgatgttttccgtggaccaacgtgacccctccagcactccccggaattacaaacgacacgacaattcagcagggtattagcggtctgattgacagtctgaatgcaagagacatttcagtcaaaatctttgaagacttcgcacagtcctggtactggatccttgtcgccctaggggtagccctggtgctgtccctcctcttcatcttgcttctgagactcgttgccggacctctggtgcttgtcctaatcctcggggtcctgggggtgctggcatatggcatctattattgttgggaggagtacagagtactgagggacaagggcgcttcgatttcccagctcggattcaccacaaatctcagtgcttatcaatctgtgcaggaaacatggctggcagcgctaatcgtacttgctgttttggaggcaattctgcttctgatgctgatcttccttagacaaagaatcaggattgccatcgccctcctaaaggaggcttcgaaggcagtcggccagatgatgagcactatgttttatccactcgttaccttcgtcttactgttgatatgtattgcctattgggccatgacagctctgtatttagcgacctctggtcaaccccaatatgttctctgggctagcaacatctcctcacctggttgtgagaaggttcctattaataccagctgtaaccccaccgcccatcttgttaattcttcatgccccggactcatgtgcgtctttcaggggtacagtagtaaagggctcatccagaggtcagtgtttaacctgcagatttacggagtgctcggacttttttggaccctgaattgggtgttagccctggggcagtgtgtgctggctggcgcattcgcaagcttctattgggccttccataagccccaagatattcctactttccctctcatcagcgcatttatccgaaccctgagatatcacacgggcagtctggcattcggggcactcatcctaactctcgtgcagatcgccagagtgatcttggaatatatcgatcacaaactgaggggcgtgcagaaccccgtagcgaggtgtattatgtgctgtttcaaatgctgcctctggtgtctggaaaagttcatcaaattcctcaaccggaacgcgtacataatgattgccatctatggcaaaaacttctgtgtatctgctaagaacgcgttcatgttgttaatgaggaatatcgttcgcgttgtggtgttggataaggttactgacctgttactctttttcggcaaactactggtggttggtggagttggcgtactgagcttctttttctttagcggcaggatcccaggcctgggaaaggacttcaaaagtccgcaccttaattactactggcttccaatcatgacttccatcctgggagcgtatgtgatcgccagtggatttttttcggtgttcgggatgtgcgtggataccctgtttctgtgcttcctggaagatttggagcggaataacgggagccttgaccgaccttattatatgtccaagagcctgctcaagattctcggcaagaagaacgaagccccacctgataacaaaaagcgcaagaagtag

SEQ ID NO: 70415 - DNA, 2007 bp, Artificial Sequence
  derived and/or modified sequence
atgggcggaaagcaaagagacgaggatgacgaagcgtacggaaagcccgtaaagtacgaccccagctttcgcggtcctatcaaaaacaggtcttgtaccgacgtgatatgttgtgtgctgttcctgttgttcatcctgggctatatcgtcgtagggatcgtggcctggctgtacggggatcctagacaggtcctctaccccagaaactcaaccggcgcatactgcgggatgggggaaaacaaagataagccttatcttctttacttcaacattttttcgtgtatactgtctagtaacatcatttccgtggcggaaaatggacttcagtgccccacccctcagaccgtgatcaccagtttgcaacaagagttatgcccctcattcctgctgccttcagcgccagctctgggacgctgttttccatggacaaacgtcactccccctgctcttccagggattaccaatgataccacaatccagcaggggatcagtggactcattgatagtctcaacgcccgtgacatcagtgtaaaaatattcgaggattttgctcaaagttggtattggatactagttgcactaggcgtggcgctggtgttgtccctcctctttatcctgctgctacgactggtggccggacctctggtgctggtgctgatcctaggggtcctgggtgtacttgcctatggcatctattattgttgggaggaatatcgggtgctaagggacaagggggcaagcatctcgcagctcggatttacaacaaatcttagtgcctaccaatcagtgcaggagacatggctggctgcattgattgttctggcggtgttggaggcaatcctgctcttgatgctgatcttccttcgccagcgcatccgcattgctatcgcactgttgaaggaggcatctaaggcagtcgggcagatgatgtccaccatgttttaccccctcgtcacttttgttctgctgcttatttgtattgcctactgggcaatgacagctctgtatctagccacgtccggccagccgcagtacgtgctctgggcatctaacatttcctctcccggttgcgagaaggtgcctatcaacacctcttgcaaccccaccgcacacctggtcaacagctcttgtccaggccttatgtgtgtgttccaaggctattctagtaaaggtctcatccagagatccgtgttcaaccttcagatctacggggtcctcggactcttctggactctgaattgggtgctcgccctgggccaatgcgtgctcgccggtgcattcgcctccttttactgggcttttcataaaccccaggatattcctacattcccactgatctcagcatttatcagaactctgcgatatcatactgggtcacttgcattcggcgcactgattctgacactcgtccaaatcgccagagtgatcctcgagtacatagaccacaagcttaggggggtgcagaatccagtcgcccgatgtattatgtgctgctttaaatgctgtctgtggtgtctggagaaatttataaaattcctgaatagaaatgcctacataatgatcgcgatttacggtaagaacttttgtgtgtccgcgaagaatgctttcatgttactcatgcggaatatagtgagggttgtggtcctcgataaagttacagacctccttctgttttttggtaaactgctggtggtcggaggtgtgggtgtgttgtcctttttcttcttttcggggagaatcccaggattgggaaaagacttcaagtcaccacacctgaattactactggctccctatcatgacaagcattttgggagcgtacgtgattgcatcgggctttttctctgtctttggtatgtgcgtcgatacgctgttcttatgctttctcgaagacttggaacgaaataacggatccctggacaggccatattatatgagtaaatccctgctgaaaattctgggaaaaaaaaacgaggccccacctgataataaaaagcgaaagaagtag

SEQ ID NO: 70416 - DNA, 2007 bp, Artificial Sequence
  derived and/or modified sequence
atgggtgggaaacagcgagatgaagatgatgaggcctacggtaagcctgtgaagtacgatcccagtttccgcggacccatcaaaaacagaagttgtactgacgtaatctgttgcgttctctttcttttattcattttggggtacattgtcgttgggatcgtggcgtggctgtatggcgaccccagacaagtgctctatccaaggaattcaacaggagcttactgcggaatgggtgaaaataaggataagccttacctgctgtacttcaacatcttttcatgcatcctgtcttccaacataattagcgttgcagagaatggcctgcagtgccccactccccagacggtgataactagtttgcagcaggaactgtgccccagtttcttacttcctagcgccccagcgctgggtcggtgcttcccctggacaaacatcaccccccctgcgttaccaggtataacaaatgacaccacaatccagcagggtatctccggtctaatcgattccctgaacgcaagggacatcagcgtcaaaattttcgaagacttcgcacaaagttggtactggatcttagtggctctgggagtcgcactcgtgttatcactgctctttatccttctgctacggctggtcgccggtccactcgtgctggtattaatcttgggagtactgggcgtgctagcctatggcatatattactgctgggaggaatatagggttctccgcgataaaggagctagcatatctcaacttggttttacgaccaatttgagtgcctatcagagtgtccaggagacctggcttgccgctctcattgtcctcgccgttctggaggcaatcctcctgcttgtcctgatatttctgcgccaacgcattaggattgctattgcactgctgaaggaagcctccaaggccgtgggccaaatgatgtccaccatgttctatcctttggttacatttgtgcttctcctgatctgcattgcctactgggccatgacggccctgtacctggcgacctctgggcagcctcaatacgttctctgggcctcaaacatcagctcccccggatgtgaaaaggtgcccattaatacaagctgtaatcctaccgcccacttggttaactcttcatgccctggcttaatgtgtgtcttccaggggtactcgagcaaggggctgattcagaggagcgtttttaaccttcagatctacggggtgctgggcctgttctggaccttgaattgggtcctggcactgggccagtgtgttctagctggcgcattcgcatccttctactgggccttccataagcctcaggatatacctactttcccattgatttctgcattcatccgtaccctccggtatcataccgggtcactcgcgttcggggctctcattctcacactcgtgcagatcgctcgcgtgatcctggagtatattgaccacaagctgcgtggggtccagaaccctgtggccagatgcataatgtgctgtttcaagtgctgtctgtggtgcctggaaaaatttattaagtttctaaatcggaatgcttacatcatgatcgccatttatgggaaaaatttttgcgtgtctgccaaaaatgcttttatgctgctgatgcggaatatcgtgcgggtggtggttcttgataaggtcacagatctcttgctgttttttggaaagctcctggtggtggggggtgtgggcgtactgagcttcttctttttctccgggcgaatccctggtttggggaaggactttaaaagtcctcacttaaattattactggctcccaatcatgacatctatactgggcgcatatgtgatcgcgagcggattcttctccgtttttgggatgtgcgttgacaccctgttcctttgtttcctcgaggacctcgaacggaataacggaagcttagaccgcccatactacatgtcgaaatcactccttaagatactaggtaagaagaacgaagcacctcccgacaataagaagcgcaagaaatag

SEQ ID NO: 70417 - DNA, 2007 bp, Artificial Sequence
  derived and/or modified sequence
atgggcggtaagcaacgtgatgaagatgatgaagcatacggtaaaccagttaagtacgaccctagctttcggggtcccatcaaaaaccgatcttgcacagacgtcatttgctgcgtgcttttcttgttgtttatcttggggtatattgtggtcggcattgttgcgtggctgtatggggatccgaggcaggtgctgtaccccagaaattcaaccggtgcgtactgtggcatgggcgaaaataaggacaagccctatctcctgtattttaacattttctcctgtattctgagttccaacataatctcagttgccgaaaacggcttgcaatgtcccacccctcagactgttattactagcctgcaacaggaactgtgtccatcttttctgctgccttctgcgcctgctctgggcagatgcttcccatggacgaatgtgaccccacccgctctgccaggaattacaaatgatacaaccatccagcagggaatttccgggctgatcgattcattaaatgcccgtgacataagtgtgaaaatcttcgaggatttcgcccagtcatggtattggatactggtcgccctgggagtggccttggtcctctccctcttgtttatcctgttgctccggctagttgctgggccactcgtgttagtgttgatcttaggggtgctgggggtgctagcttatggcatttattactgttgggaagagtaccgggtgctgagggataaaggcgcatcaattagtcaactagggtttacgaccaacctctccgcataccagtctgtccaggaaacctggcttgcggcactgattgtcctcgctgtcctcgaagcaatacttcttttgatgctgattttcctcagacagcgcatcaggatcgccatcgctcttctgaaagaggcttctaaggccgtcggtcagatgatgagcacaatgttctatccgcttgttacctttgtgctgctgctgatttgcatcgcatactgggccatgaccgccctctatttggccacgagcgggcagccacaatatgtgttatgggccagcaatattagctcgcccggatgcgaaaaggtgcccatcaatacatcatgcaatcctactgcgcacctcgtcaactcttcctgccccggactcatgtgcgtgttccagggctacagcagcaagggcttgatccaacggagcgttttcaacctgcagatttacggcgtcctggggctgttctggaccttaaactgggtacttgcactcggccagtgtgttttagcaggcgcttttgcgtcattctactgggccttccataagccacaagacataccgacctttcccctcatatccgcatttatccgaacgctgcgctatcacaccggcagtctagcgtttggagcccttatccttaccctcgtccagattgcaagggtgattctcgagtatatcgaccacaagctgagaggagtacagaacccagtcgcaagatgtatcatgtgctgcttcaagtgctgtttatggtgcctggagaagtttatcaagtttctgaaccggaatgcgtacatcatgatcgcaatctatggaaaaaatttctgtgttagtgccaagaatgccttcatgttgctgatgcgtaatatagtccgtgtggtggtcctggataaggttactgacctcctgctcttctttggaaaattgctcgttgtggggggagtaggcgtgctgagtttcttcttttttagcggtagaattcccggtctgggcaaagactttaagtccccacacctcaactattactggctcccaattatgacctcgattcttggagcatatgtgattgcctccggcttcttctcggtttttggaatgtgcgtggataccctgttcctgtgctttttggaggatctggagaggaacaacggaagcctggaccggccttactatatgagcaagagtctcctgaagattctcggtaaaaagaatgaagcaccaccagataacaagaaaagaaagaagtag

SEQ ID NO: 70418 - DNA, 2007 bp, Artificial Sequence
  derived and/or modified sequence
atgggcggaaaacaaagagacgaggacgatgaagcttatgggaaaccagtgaaatacgacccaagctttagaggtcctatcaaaaatcgcagctgcactgacgtgatctgctgcgtgcttttcctgctctttattttggggtatatcgtcgtgggcatcgttgcctggttgtacggtgacccgcgtcaggtgctgtaccccagaaactccacgggagcatactgcggcatgggagagaacaaagacaagccatatctcttatatttcaacattttttcctgcatcctgtcctcaaatatcatctcagtggcggaaaacggactacaatgtccaacgcctcagacagttattaccagtctccaacaggaattatgcccaagtttcctcctcccttccgcacctgctctggggaggtgcttcccatggacaaatatcaccccccctgcactgcctggaatcacgaacgacaccacaatacaacagggaatctcaggtttaatcgactccctgaatgctagagacatatcagtgaaaattttcgaagacttcgcccagtcttggtactggattctggttgccctgggcgtggccctggtcctctctctactctttatcctgctgttgcgtttggtcgctgggcctttggtgttagtgcttattctgggggtgttgggggtgctggcctatggcatttattattgttgggaagaatacagagtcttaagggataagggggcatctatatctcagctgggatttaccacaaatctctccgcctaccaatccgtgcaggagacctggctcgctgccctgatcgtgttggcagtcctggaggccatactgctgctggtgctgatcttcctgagacagcgtatccgaatcgcaattgccttgctcaaagaagcctccaaagccgttgggcagatgatgagcaccatgttctacccccttgtgaccttcgtgctccttcttatttgcattgcctactgggcaatgaccgccctgtacctcgcaacctccggacaacctcagtacgtgttgtgggctagtaatatctcctcgccaggttgtgagaaagtgcccatcaatacgagctgcaaccctacggcacacttagtcaactcaagttgtcctggactgatgtgcgttttccaagggtactcttcaaagggcctgattcagagaagtgtgttcaacctgcaaatatatggcgtgctggggctattctggacactaaactgggtgctggctttgggacagtgcgtactcgccggagcttttgcctccttctattgggccttccataaaccgcaggacatccctaccttccccttgataagtgcattcatccggaccctgcggtatcacacaggctccctcgcttttggcgcattgatcctaacattggtgcagatcgcacgggtcatactagagtacatcgatcacaagcttcgcggtgtgcagaatccagtcgcacggtgtattatgtgttgcttcaaatgctgcctatggtgcctggagaagttcatcaaatttttaaatagaaacgcatatattatgatcgccatctatggcaagaacttttgcgtttcggcgaaaaacgcatttatgttgttgatgcggaacatcgtgcgagtggtggttttggataaggtgaccgatctgctgcttttctttgggaaacttctggtggtgggcggagtaggcgtgttatcctttttcttttttagcggccgtatcccaggcttagggaaagatttcaaatctccgcacctcaactactattggctgcctatcatgacaagtattctgggggcatacgtgattgccagcggctttttctccgtgtttggaatgtgtgtggacaccctcttcctgtgcttccttgaggatttagaaaggaacaatggcagcctggatcgaccttactatatgtctaagtctctgctgaagatcctcggaaagaagaatgaggcacctcctgacaataaaaagcgaaagaaatag

SEQ ID NO: 70419 - DNA, 2505 bp, Artificial Sequence
  derived and/or modified sequence
agggcggggcgggcagcaggtgagacgccaggtctccagggctccaatcactccggagactgagccatggggggaaagcagcgggacgaggatgacgaggcctacgggaagccagtcaaatacgacccctcctttcgaggccccatcaagaacagaagctgcacagatgtcatctgctgcgtcctcttcctgctcttcattctaggttacatcgtggtggggattgtggcctggttgtatggagacccccggcaagtcctctaccccaggaactctactggggcctactgtggcatgggggagaacaaagataagccgtatctcctgtacttcaacatcttcagctgcatcctgtccagcaacatcatctcagttgctgagaacggcctacagtgccccacaccccagacggtgatcacaagcctgcaacaggaactctgccccagtttcctcctcccctctgctccagctctggggcgctgctttccatggaccaacgttactccaccggcgctcccagggatcaccaatgacaccaccatacagcaggggatcagcggtcttattgacagcctcaatgcccgagacatcagtgttaagatctttgaagattttgcccagtcctggtattggattcttgttgccctgggggtggctctggtcttgagcctactgtttatcttgcttctgcgcctggtggctgggcccctggtgctggtgctgatcctgggagtgctgggcgtgctggcatacggcatctactactgctgggaggagtaccgagtgctgcgggacaagggcgcctccatctcccagctgggtttcaccaccaacctcagtgcctaccagagcgtgcaggagacctggctggccgccctgatcgtgttggcggtgcttgaagccatcctgctgctgatgctcatcttcctgcggcagcggattcgtattgccatcgccctcctgaaggaggccagcaaggctgtgggacagatgatgtctaccatgttctacccactggtcacctttgtcctcctcctcatctgcattgcctactgggccatgactgctctgtacctggctacatcggggcaaccccagtatgtgctctgggcatccaacatcagctcccccggctgtgagaaagtgccaataaatacatcatgcaaccccacggcccaccttgtgaactcctcgtgcccagggctgatgtgcgtcttccagggctactcatccaaaggcctaatccaacgttctgtcttcaatctgcaaatctatggggtcctggggctcttctggacccttaactgggtactggccctgggccaatgcgtcctcgctggagcctttgcctccttctactgggccttccacaagccccaggacatccctaccttccccttaatctctgccttcatccgcacactccgttaccacactgggtcattggcatttggagccctcatcctgacccttgtgcagatagcccgggtcatcttggagtatattgaccacaagctcagaggagtgcagaaccctgtagcccgctgcatcatgtgctgtttcaagtgctgcctctggtgtctggaaaaatttatcaagttcctaaaccgcaatgcatacatcatgatcgccatctacgggaagaatttctgtgtctcagccaaaaatgcgttcatgctactcatgcgaaacattgtcagggtggtcgtcctggacaaagtcacagacctgctgctgttctttgggaagctgctggtggtcggaggcgtgggggtcctgtccttcttttttttctccggtcgcatcccggggctgggtaaagactttaagagcccccacctcaactattactggctgcccatcatgacctccatcctgggggcctatgtcatcgccagcggcttcttcagcgttttcggcatgtgtgtggacacgctcttcctctgcttcctggaagacctggagcggaacaacggctccctggaccggccctactacatgtccaagagccttctaaagattctgggcaagaagaacgaggcgcccccggacaacaagaagaggaagaagtgacagctccggccctgatccaggactgcaccccacccccaccgtccagccatccaacctcacttcgccttacaggtctccattttgtggtaaaaaaaggttttaggccaggcgccgtggctcacgcctgtaatccaacactttgagaggctgaggcgggcggatcacctgagtcaggagttcgagaccagcctggccaacatggtgaaacctccgtctctattaaaaatacaaaaattagccgagagtggtggcatgcacctgtcatcccagctactcgggaggctgaggcaggagaatcgcttgaacccgggaggcagaggttgcagtgagccgagatcgcgccactgcactccaacctgggtgacagactctgtctccaaaacaaaacaaacaaacaaaaagattttattaaagatattttgttaactcagt

SEQ ID NO: 70420 - DNA, 2505 bp, Artificial Sequence
  derived and/or modified sequence
agggcggggcgggcagcaggtgagacgccaggtctccagggctccaatcactccggagactgagccatggggggaaagcagcgggacgaggatgacgaggcctacgggaagccagtcaaatacgacccctcctttcgaggccccatcaagaacagaagctgcacagatgtcatctgctgcgtcctcttcctgctcttcattctaggttacatcgtggtggggattgtggcctggttgtatggagacccccggcaagtcctctaccccaggaactctactggggcctactgtggcatgggggagaacaaagataagccgtatctcctgtacttcaacatcttcagctgcatcctgtccagcaacatcatctcagttgctgagaacggcctacagtgccccacaccccagacggtgatcacaagcctgcaacaggaactctgccccagtttcctcctcccctctgctccagctctgggacgctgctttccatggaccaacattactccaccggcgctcccagggatcaccaatgacaccaccatacagcaggggatcagcggtcttattgacagcctcaatgcccgagacatcagtgttaagatctttgaagattttgcccagtcctggtattggattcttgttgccctgggggtggctctggtcttgagcctactgtttatcttgcttctgcgcctggtggctgggcccctggtgctggtgctgatcctgggagtgctgggcgtgctggcatatggcatctactactgctgggaggagtaccgagtgctgcgggacaagggcgcctccatctcccagctgggtttcaccaccaacctcagtgcctaccagagcgtgcaggagacctggctggccgccctgatcgtgttggcggtgcttgaagccatcctgctgctggtgctcatcttcctgcggcagcggattcgtattgccatcgccctcctgaaggaggccagcaaggctgtgggacagatgatgtctaccatgttctacccactggtcacctttgtcctcctcctcatctgcattgcctactgggccatgactgctctgtacctggctacatcggggcaaccccagtatgtgctctgggcatccaacatcagctcccccggctgtgagaaagtgccaataaatacatcatgcaaccccacggcccaccttgtgaactcctcgtgcccagggctgatgtgcgtcttccagggctactcatccaaaggcctaatccaacgttctgtcttcaatctgcaaatctatggggtcctggggctcttctggacccttaactgggtactggccctgggccaatgcgtcctcgctggagcctttgcctccttctactgggccttccacaagccccaggacatccctaccttccccttaatctctgccttcatccgcacactccgttaccacactgggtcattggcatttggagccctcatcctgacccttgtgcagatagcccgggtcatcttggagtatattgaccacaagctcagaggagtgcagaaccctgtagcccgctgcatcatgtgctgtttcaagtgctgcctctggtgtctggaaaaatttatcaagttcctaaaccgcaatgcatacatcatgatcgccatctacgggaagaatttctgtgtctcagccaaaaatgcgttcatgctactcatgcgaaacattgtcagggtggtcgtcctggacaaagtcacagacctgctgctgttctttgggaagctgctggtggtcggaggcgtgggggtcctgtccttcttttttttctccggtcgcatcccggggctgggtaaagactttaagagcccccacctcaactattactggctgcccatcatgacctccatcctgggggcctatgtcatcgccagcggcttcttcagcgttttcggcatgtgtgtggacacgctcttcctctgcttcctggaagacctggagcggaacaacggctccctggaccggccctactacatgtccaagagccttctaaagattctgggcaagaagaacgaggcgcccccggacaacaagaagaggaagaagtgacagctccggccctgatccaggactgcaccccacccccaccgtccagccatccaacctcacttcgccttacaggtctccattttgtggtaaaaaaaggttttaggccaggcgccgtggctcacgcctgtaatccaacactttgagaggctgaggcgggcggatcacctgagtcaggagttcgagaccagcctggccaacatggtgaaacctccgtctctattaaaaatacaaaaattagccgagagtggtggcatgcacctgtcatcccagctactcgggaggctgaggcaggagaatcgcttgaacccgggaggcagaggttgcagtgagccgagatcgcgccactgcactccaacctgggtgacagactctgtctccaaaacaaaacaaacaaacaaaaagattttattaaagatattttgttaactcagt

SEQ ID NO: 70421 - protein, 634 aa, Artificial Sequence
  derived and/or modified sequence
MGENKDKPYLLYFNIFSCILSSNIISVAENGLQCPTPQVCVSSCPEDPWTVGKNEFSQTVGEVFYTKNRNFCLPGVPWNMTVITSLQQELCPSFLLPSAPALGRCFPWTNVTPPALPGITNDTTIQQGISGLIDSLNARDISVKIFEDFAQSWYWILVALGVALVLSLLFILLLRLVAGPLVLVLILGVLGVLAYGIYYCWEEYRVLRDKGASISQLGFTTNLSAYQSVQETWLAALIVLAVLEAILLLMLIFLRQRIRIAIALLKEASKAVGQMMSTMFYPLVTFVLLLICIAYWAMTALYLATSGQPQYVLWASNISSPGCEKVPINTSCNPTAHLVNSSCPGLMCVFQGYSSKGLIQRSVFNLQIYGVLGLFWTLNWVLALGQCVLAGAFASFYWAFHKPQDIPTFPLISAFIRTLRYHTGSLAFGALILTLVQIARVILEYIDHKLRGVQNPVARCIMCCFKCCLWCLEKFIKFLNRNAYIMIAIYGKNFCVSAKNAFMLLMRNIVRVVVLDKVTDLLLFFGKLLVVGGVGVLSFFFFSGRIPGLGKDFKSPHLNYYWLPIMTSILGAYVIASGFFSVFGMCVDTLFLCFLEDLERNNGSLDRPYYMSKSLLKILGKKNEAPPDNKKRKK

SEQ ID NO: 70422 - protein, 634 aa, Artificial Sequence
  derived and/or modified sequence
MGENKDKPYLLYFNIFSCILSSNIISVAENGLQCPTPQVCVSSCPEDPWTVGKNEFSQTVGEVFYTKNRNFCLPGVPWNMTVITSLQQELCPSFLLPSAPALGRCFPWTNITPPALPGITNDTTIQQGISGLIDSLNARDISVKIFEDFAQSWYWILVALGVALVLSLLFILLLRLVAGPLVLVLILGVLGVLAYGIYYCWEEYRVLRDKGASISQLGFTTNLSAYQSVQETWLAALIVLAVLEAILLLVLIFLRQRIRIAIALLKEASKAVGQMMSTMFYPLVTFVLLLICIAYWAMTALYLATSGQPQYVLWASNISSPGCEKVPINTSCNPTAHLVNSSCPGLMCVFQGYSSKGLIQRSVFNLQIYGVLGLFWTLNWVLALGQCVLAGAFASFYWAFHKPQDIPTFPLISAFIRTLRYHTGSLAFGALILTLVQIARVILEYIDHKLRGVQNPVARCIMCCFKCCLWCLEKFIKFLNRNAYIMIAIYGKNFCVSAKNAFMLLMRNIVRVVVLDKVTDLLLFFGKLLVVGGVGVLSFFFFSGRIPGLGKDFKSPHLNYYWLPIMTSILGAYVIASGFFSVFGMCVDTLFLCFLEDLERNNGSLDRPYYMSKSLLKILGKKNEAPPDNKKRKK

SEQ ID NO: 70423 - DNA, 109 bp, Artificial Sequence
  derived and/or modified sequence
tattttaccagattattcaagcaatatatagacagcttaaagcatacaagaagacatgtatagatttacatgcaaacactgcaccactttacataagggacttgagcac

SEQ ID NO: 70424 - DNA, 1905 bp, Artificial Sequence
  derived and/or modified sequence
atgggcgagaacaaggacaagccctacctgctgtacttcaacatcttcagctgcatcctgagcagcaacatcatcagcgtggccgagaacggcctgcagtgccccaccccccaggtgtgcgtgagcagctgccccgaggacccctggaccgtgggcaagaacgagttcagccagaccgtgggcgaggtgttctacaccaagaacagaaacttctgcctgcccggcgtgccctggaacatgaccgtgatcaccagcctgcagcaggagctgtgccccagcttcctgctgcccagcgcccccgccctgggcagatgcttcccctggaccaacgtgaccccccccgccctgcccggcatcaccaacgacaccaccatccagcagggcatcagcggcctgatcgacagcctgaacgccagagacatcagcgtgaagatcttcgaggacttcgcccagagctggtactggatcctggtggccctgggcgtggccctggtgctgagcctgctgttcatcctgctgctgagactggtggccggccccctggtgctggtgctgatcctgggcgtgctgggcgtgctggcctacggcatctactactgctgggaggagtacagagtgctgagagacaagggcgccagcatcagccagctgggcttcaccaccaacctgagcgcctaccagagcgtgcaggagacctggctggccgccctgatcgtgctggccgtgctggaggccatcctgctgctgatgctgatcttcctgagacagagaatcagaatcgccatcgccctgctgaaggaggccagcaaggccgtgggccagatgatgagcaccatgttctaccccctggtgaccttcgtgctgctgctgatctgcatcgcctactgggccatgaccgccctgtacctggccaccagcggccagccccagtacgtgctgtgggccagcaacatcagcagccccggctgcgagaaggtgcccatcaacaccagctgcaaccccaccgcccacctggtgaacagcagctgccccggcctgatgtgcgtgttccagggctacagcagcaagggcctgatccagagaagcgtgttcaacctgcagatctacggcgtgctgggcctgttctggaccctgaactgggtgctggccctgggccagtgcgtgctggccggcgccttcgccagcttctactgggccttccacaagccccaggacatccccaccttccccctgatcagcgccttcatcagaaccctgagataccacaccggcagcctggccttcggcgccctgatcctgaccctggtgcagatcgccagagtgatcctggagtacatcgaccacaagctgagaggcgtgcagaaccccgtggccagatgcatcatgtgctgcttcaagtgctgcctgtggtgcctggagaagttcatcaagttcctgaacagaaacgcctacatcatgatcgccatctacggcaagaacttctgcgtgagcgccaagaacgccttcatgctgctgatgagaaacatcgtgagagtggtggtgctggacaaggtgaccgacctgctgctgttcttcggcaagctgctggtggtgggcggcgtgggcgtgctgagcttcttcttcttcagcggcagaatccccggcctgggcaaggacttcaagagcccccacctgaactactactggctgcccatcatgaccagcatcctgggcgcctacgtgatcgccagcggcttcttcagcgtgttcggcatgtgcgtggacaccctgttcctgtgcttcctggaggacctggagagaaacaacggcagcctggacagaccctactacatgagcaagagcctgctgaagatcctgggcaagaagaacgaggccccccccgacaacaagaagagaaagaagtag

SEQ ID NO: 70425 - DNA, 1905 bp, Artificial Sequence
  derived and/or modified sequence
atgggcgagaacaaggacaagccctacctgctgtacttcaacatcttcagctgcatcctgagcagcaacatcatcagcgtggccgagaacggcctgcagtgccccaccccccaggtgtgcgtgagcagctgccccgaggacccctggaccgtgggcaagaacgagttcagccagaccgtgggcgaggtgttctacaccaagaacagaaacttctgcctgcccggcgtgccctggaacatgaccgtgatcaccagcctgcagcaggagctgtgccccagcttcctgctgcccagcgcccccgccctgggcagatgcttcccctggaccaacatcaccccccccgccctgcccggcatcaccaacgacaccaccatccagcagggcatcagcggcctgatcgacagcctgaacgccagagacatcagcgtgaagatcttcgaggacttcgcccagagctggtactggatcctggtggccctgggcgtggccctggtgctgagcctgctgttcatcctgctgctgagactggtggccggccccctggtgctggtgctgatcctgggcgtgctgggcgtgctggcctacggcatctactactgctgggaggagtacagagtgctgagagacaagggcgccagcatcagccagctgggcttcaccaccaacctgagcgcctaccagagcgtgcaggagacctggctggccgccctgatcgtgctggccgtgctggaggccatcctgctgctggtgctgatcttcctgagacagagaatcagaatcgccatcgccctgctgaaggaggccagcaaggccgtgggccagatgatgagcaccatgttctaccccctggtgaccttcgtgctgctgctgatctgcatcgcctactgggccatgaccgccctgtacctggccaccagcggccagccccagtacgtgctgtgggccagcaacatcagcagccccggctgcgagaaggtgcccatcaacaccagctgcaaccccaccgcccacctggtgaacagcagctgccccggcctgatgtgcgtgttccagggctacagcagcaagggcctgatccagagaagcgtgttcaacctgcagatctacggcgtgctgggcctgttctggaccctgaactgggtgctggccctgggccagtgcgtgctggccggcgccttcgccagcttctactgggccttccacaagccccaggacatccccaccttccccctgatcagcgccttcatcagaaccctgagataccacaccggcagcctggccttcggcgccctgatcctgaccctggtgcagatcgccagagtgatcctggagtacatcgaccacaagctgagaggcgtgcagaaccccgtggccagatgcatcatgtgctgcttcaagtgctgcctgtggtgcctggagaagttcatcaagttcctgaacagaaacgcctacatcatgatcgccatctacggcaagaacttctgcgtgagcgccaagaacgccttcatgctgctgatgagaaacatcgtgagagtggtggtgctggacaaggtgaccgacctgctgctgttcttcggcaagctgctggtggtgggcggcgtgggcgtgctgagcttcttcttcttcagcggcagaatccccggcctgggcaaggacttcaagagcccccacctgaactactactggctgcccatcatgaccagcatcctgggcgcctacgtgatcgccagcggcttcttcagcgtgttcggcatgtgcgtggacaccctgttcctgtgcttcctggaggacctggagagaaacaacggcagcctggacagaccctactacatgagcaagagcctgctgaagatcctgggcaagaagaacgaggccccccccgacaacaagaagagaaagaagtag

SEQ ID NO: 70426 - DNA, 1905 bp, Artificial Sequence
  derived and/or modified sequence
atgggtgagaacaaggacaagccttaccttctgtattttaatatctttagttgcatattatcatcaaatatcatttctgtagccgaaaatggactccagtgccccaccccacaggtgtgcgtctccagttgtcccgaagacccttggactgtggggaagaatgaattcagccagacagttggtgaagttttctacacaaagaatcgaaatttctgcctgcctggcgtgccatggaacatgacagtgattacatccctgcagcaggaactctgccctagcttcttgctgccgtctgctccagctctggggagatgctttccatggaccaacgtaactcctcccgcactgcctggcatcacaaacgatacgactattcagcagggcatctccggccttattgattccctaaatgccagggacattagcgtcaagatcttcgaggacttcgcgcagtcttggtactggattctggttgccctgggggtcgctttggttctgtctctgctctttatactgctgctgagactggtggctggtcccctggtactggtgttgatcctcggtgtgcttggagtgctcgcttatggcatctactattgctgggaagaatatcgggtactgcgtgacaagggggcttctatatcccagcttgggttcaccacaaacctgtcagcctaccagtccgttcaggagacttggttggcggcacttatagttttggccgttctggaagctattttgttactgatgcttatcttccttcggcagcggatacggattgccatcgctctacttaaggaagctagcaaagcagtaggtcagatgatgtcgacgatgttctatcccctggtgaccttcgttctgctgttgatctgtatagcctattgggctatgacggccctgtacctggctacaagcggacagcctcagtacgttctgtgggcctcaaatatttcttcacctggctgtgagaaggtgcctattaatacctcctgcaatccaaccgctcatctggtgaatagctcatgtccgggattgatgtgcgtgttccagggctacagctccaaagggttaattcagcggtcagtgttcaacttgcagatctatggcgtgctgggactcttctggacgttaaattgggttctcgcactgggtcagtgcgtgttggctggcgcctttgcttcattctactgggcatttcacaaaccgcaagatatccccacatttcccctgatcagcgcttttattcgcacactacgataccataccggatctcttgcatttggtgcactcatcttaactctggttcagatcgcaagagtaatcctggaatacattgatcataagctgaggggcgtgcaaaacccagtggcccgttgcattatgtgttgttttaagtgctgtctttggtgtctggagaaattcattaaattcctgaataggaacgcctatattatgattgcaatttatggcaaaaacttttgtgtttctgcgaaaaacgcttttatgctgctgatgcggaacatcgtccgggtcgtggtcctagacaaagtgaccgacctgctcctgttttttgggaagctgctcgtggtcgggggggttggagtcctctctttttttttcttctctggcaggattcctggtctgggtaaggacttcaaaagccctcacctgaactattactggctgcctattatgacaagtatcttaggtgcctacgtgatcgcatccggcttcttctcagtctttggaatgtgcgtggacactctgttcttgtgttttctggaggatctggaaaggaataacggaagccttgaccgtccatactatatgtccaaatctctgctgaaaatccttggcaaaaagaacgaggcgcctcccgacaacaagaagcgaaaaaagtag

SEQ ID NO: 70427 - DNA, 1905 bp, Artificial Sequence
  derived and/or modified sequence
atgggagaaaacaaagataaaccctatctcttgtattttaatatcttctcctgcatcctatcgtccaatatcatctccgtcgctgagaatggtcttcagtgcccaactccccaggtttgcgtatcctcctgtcctgaagacccttggacggtgggcaaaaacgaatttagccagacagtgggcgaggtcttttacacgaagaataggaacttctgcctgcctggggtcccatggaatatgacggtgatcacaagccttcagcaggagttgtgtcctagctttcttctcccaagcgcacccgccttagggagatgctttccatggactaacgtaaccccccctgcacttcctggcatcaccaacgatactaccatccagcaggggatatcaggattgatcgacagcctcaatgctcgcgatattagcgttaagattttcgaagattttgcccaatcttggtattggatactggtcgctctgggggttgctttggtgctttctctgctgttcattcttctcctgcggctggtagctggtcccctcgttctggtgctgattctcggggttctgggagttctggcttacggcatttactattgctgggaagagtaccgcgtgctgcgcgacaaaggagcatctatctctcagctcggatttaccactaatctgtctgcttatcagtccgttcaggaaacatggctagcagcccttatcgtgctcgctgtcctcgaagctatcctcttgctgatgctgattttcctgagacagcggatccgtatcgccattgcactgcttaaagaggcatcgaaagcagtgggtcagatgatgtctaccatgttttaccctcttgtgacatttgtgcttcttctcatttgcatagcttactgggcgatgactgccctgtacttggccacgtcgggacagcctcagtacgtgctctgggctagcaatatttcctccccaggatgcgaaaaagtgccaattaatacatcttgcaaccccactgcacacctggtgaactcaagctgccctggtctcatgtgcgtcttccagggatatagctcaaaggggctcatccagcgctctgtctttaatctgcagatctacggtgtacttggtttgttttggacattaaactgggtcctagccctggggcagtgcgtgctggccggggccttcgcaagcttctactgggcctttcataagccacaagatattccgactttcccactgatttccgcttttatccgaacactccggtaccataccgggagccttgcattcggggctctgattttgaccctcgttcagatcgctcgcgtaatcctggagtacattgatcataaactgcgaggcgtgcagaacccagtcgcccgctgtattatgtgctgctttaaatgttgcctttggtgtttagagaaattcattaaattcctgaaccgcaacgcctacatcatgatcgccatttacggcaaaaatttctgtgtcagtgccaagaatgccttcatgctgctaatgcgcaatatagtcagagtcgtagtcttagacaaagtgactgacctgctgctcttttttggaaaactcctcgtggttggcggcgttggtgtcctttccttctttttttttagcggtcggattcctggcttaggtaaggatttcaagtctccccatctgaactactactggctgcctattatgacctccatcctgggggcttatgtgatagccagcgggttttttagcgttttcggaatgtgtgtagacactctgtttctgtgcttccttgaagacctggaacggaacaacggttccttggatcgtccctactatatgtcaaagagcctgctgaaaatcctcgggaagaagaacgaagcacctccagacaacaagaagagaaagaagtag

SEQ ID NO: 70428 - DNA, 1905 bp, Artificial Sequence
  derived and/or modified sequence
atgggggagaataaagacaagccttaccttctgtacttcaacattttcagttgcattttgagtagcaatattatcagcgtcgctgagaatggactccagtgtccaaccccacaggtgtgcgtgtcttcgtgtcccgaagatccttggacagtggggaagaacgagttctcgcagactgtcggagaggtattctatacaaaaaatagaaacttctgcttgcccggtgtaccttggaacatgacggtcatcacgagcctgcagcaggagctgtgtccgagctttctcttgccctccgctcccgccctggggcggtgtttcccctggaccaacattacaccaccggctttgcctggcatcactaacgacactaccatacagcaaggcatttccggactcattgatagcctgaatgctagggacatctccgtaaagatctttgaggacttcgctcaaagttggtattggatcctggtagccctgggggtggctctagtgctgtccctactgtttattctgctgctcagacttgtagctggcccattggtgcttgtacttattctgggagtactcggcgtgctggcttacgggatctactattgttgggaggagtaccgggtgctgagggataagggggcgtctattagtcagctgggtttcaccacaaacctttctgcataccagagcgtgcaggagacatggctcgccgctttaatagtactagcagttttagaagctatcctactgctcgtgttaatttttctcagacagcgtatcagaattgccatcgccctgctaaaggaggcttctaaagcagtcggccaaatgatgtctaccatgttttatcctcttgtgactttcgtcctacttctcatctgtattgcctactgggctatgactgcattatatctggccacgagcggtcaacctcagtatgtgctgtgggcttcgaatatctcaagtccaggatgcgagaaagtgccaattaacaccagctgtaatcctactgcccaccttgtcaattcctcttgcccagggctgatgtgcgtctttcagggatattcaagcaaaggactgattcagagaagcgtttttaacctgcaaatatacggggtgctagggctgttttggaccctgaactgggtgctggccctgggtcagtgcgtgctggctggtgcctttgcctctttctactgggcatttcataagcctcaagatattcctacttttccccttatctccgctttcatacgaaccctgcggtaccacaccggctctctggcctttggtgcactgatactgacactagttcagatcgccagagtgatcctggaatacatcgaccacaagctgagaggggtgcaaaacccagtagctcgatgtattatgtgctgcttcaagtgctgcctgtggtgtcttgaaaagttcatcaagtttttaaatagaaacgcatacattatgattgcgatatacgggaagaacttctgtgtctccgctaagaacgcttttatgctgctgatgcgcaatatcgtacgcgtcgtggtgttggataaggttaccgacttgctgctgttcttcggtaaactgcttgtggtgggaggagtcggggtcctgtctttcttcttcttcagcggtaggatccccgggctaggaaaagactttaaatctccccatctaaattactactggctccccatcatgacttccatcctcggcgcgtacgtgatcgctagcggattcttttccgtgttcggcatgtgcgtcgacacactattcttatgttttctggaggatctcgaacgcaacaatggatctttagataggccctactacatgagcaagtccctgctgaagattctgggaaagaaaaacgaagcacctcccgacaataagaagcgcaaaaaatag

SEQ ID NO: 70429 - DNA, 1905 bp, Artificial Sequence
  derived and/or modified sequence
atgggggaaaacaaggataagccctatctgctctattttaatatcttctcttgtatcctgagtagcaatatcattagcgtggccgaaaatgggctgcaatgccctacacctcaagtctgtgtgagttcatgcccggaggacccttggaccgtaggcaaaaatgaattttcccagacggtcggcgaggtgttctacaccaagaaccgtaatttttgtctgcctggagttccttggaacatgacggtcatcactagtctgcagcaagagttgtgccctagcttcctgctccctagtgccccggctctcggccgatgttttccctggactaacgtgactccgcctgccttacccggcataaccaatgatacaacgatccagcaaggaatttccggcctaattgacagtttaaacgccagagacatcagcgtgaaaattttcgaggactttgcacagtcgtggtactggatcctggtggcgctgggagtcgctctggttctcagtttgctctttattctcctgctccggcttgtcgcaggtcccctggtgttggtcctgatactgggcgtgttaggagtgctcgcctatgggatctactattgttgggaggagtacagggtactgcgggacaaaggtgcgagtatctcccagctgggctttacaacaaacctcagcgcataccagtctgtgcaggaaacttggctggccgcactgattgttctcgccgttttagaagctattctgcttctcatgttgatttttttgcgtcaacgcatcagaattgccattgctctgcttaaagaagcttctaaggccgttggacaaatgatgagtactatgttttatcccctggtgacttttgtcctgctgctgatatgcatcgcctactgggccatgacggccctgtatctggctacaagcggccagcctcagtacgttctgtgggcctccaacatctcgtctcctggctgcgaaaaagttcctatcaatactagttgcaaccctactgctcatcttgtgaacagctcctgcccagggttgatgtgcgtgtttcaggggtactcatccaagggactgatacaacggtctgtattcaacctccaaatctacggagtgctcggtctcttttggaccctcaattgggtgcttgcgcttggacaatgcgtattagccggcgctttcgccagcttctattgggctttccacaaaccgcaggatataccaacctttccacttatctcggcatttatcagaacattaagataccacaccgggagcttggcttttggcgctctcatactgaccctcgtgcagattgccagggttattctagaatatatcgatcacaagctccgtggtgtgcaaaatcctgttgcaaggtgtatcatgtgttgcttcaaatgttgtctgtggtgccttgagaagttcattaaatttttgaatcgcaatgcatacatcatgatcgcgatttatggcaaaaacttctgcgtttctgccaaaaatgccttcatgctcctcatgcggaacattgtgagagtagtggtacttgataaagttaccgacttactgctgttctttggcaaactgctcgtggtggggggtgtcggggtgctctccttcttcttcttctctggccgtattcccggcctgggaaaagactttaaatcgccccatctgaattattactggctccccattatgaccagcatcttgggagcatatgtcatagcctccgggtttttctcggttttcggaatgtgcgtcgataccttgtttctctgtttcttagaagacttagagagaaataacggttctctcgaccgaccctactatatgtctaagtctctcctgaagatcctcggcaaaaaaaacgaagccccgccagataacaagaagaggaagaaatag

SEQ ID NO: 70430 - DNA, 1905 bp, Artificial Sequence
  derived and/or modified sequence
atgggagagaacaaagataagccatatcttctgtactttaatatcttctcttgtatcctgtctagcaatatcatttcagttgccgagaatggactccaatgccccacaccacaagtctgtgtctcttcatgccccgaagacccgtggacggttggcaaaaacgagttctcgcagaccgtgggtgaggtgttctacacgaagaacagaaacttctgtctacctggcgttccctggaacatgacggtgataacctcgcttcagcaggaactgtgcccctcctttctgctcccaagtgcacccgctcttgggagatgttttccttggacaaacgttacacctcccgcactcccaggcatcaccaacgacactacaatacagcagggaatatctggacttattgactcactcaacgccagggacatttcagtcaagatattcgaagatttcgctcagtcttggtactggatcctggtggctctaggcgtggctctggtcctttctttgctctttatactgttacttcggctagtcgcaggtccactggttctcgttctgatcctcggcgttctcggagttctggcgtacggtatctactattgttgggaagaatacagagtgctgcgcgacaagggtgcgtcaatcagccagctgggatttactactaatttaagcgcctaccagtccgtgcaggaaacatggcttgctgcgcttattgtgctggccgtcctggaggcaatactgttgctcatgcttatctttttaaggcagcgtatccgtattgcgatcgccctgctcaaagaagcaagcaaagccgtgggccagatgatgtccaccatgttctacccgcttgtcacattcgtgctgctgctcatctgtatcgcatactgggctatgaccgcactgtacctcgcgacgtctggtcagccccagtatgtcctgtgggcaagcaatattagctcacccgggtgtgaaaaggttccgatcaatacatcgtgcaatccgaccgctcatttggtcaattcttcctgccctggcttaatgtgcgtttttcaggggtattcttcaaaagggcttatccagaggagcgtgtttaacttacagatctatggagtgttaggcctgttctggacacttaattgggtactcgccttagggcagtgtgtgctcgccggggccttcgctagcttctattgggccttccacaagcctcaggacatcccaactttccccctcatcagcgcttttatcagaactctgaggtatcacacaggatcccttgctttcggcgccctcattcttacacttgtgcagatagcacgcgtgatcttggagtacatagaccataagttacgcggcgtgcagaatccggtggcccgctgcatcatgtgctgcttcaaatgctgtttatggtgcctggagaaatttatcaagtttctgaaccgtaatgcctatatcatgattgccatttatggtaagaacttttgtgtgtccgctaaaaatgctttcatgttgctcatgaggaatatcgtgagagtagtcgtcctggacaaggtcacagacttactcctgttcttcggaaaactgttggtggtcggcggggttggtgtactcagtttcttttttttttcaggccgtatccccgggctgggaaaagatttcaaatccccacatcttaattactattggctgcccattatgacgtccattctgggggcctacgtgatcgcctccggatttttttctgttttcggaatgtgtgtggacactttattcctgtgtttcttggaagacctagaacgcaacaatggttcccttgatcgcccctactatatgtctaagagcctactgaagattctggggaagaagaacgaggcgccccccgacaataagaagagaaagaagtag

SEQ ID NO: 70431 - DNA, 1905 bp, Artificial Sequence
  derived and/or modified sequence
atgggagagaataaggacaagccatacctactgtattttaacattttctcatgtatcctttcatcaaatatcatatccgtggctgagaatggcttgcagtgtccaacaccacaggtttgtgttagctcttgccccgaagacccatggaccgtgggcaaaaacgaattttcgcagaccgtaggcgaggtcttttacaccaagaatagaaacttctgcctgcctggggtgccttggaacatgactgtgatcacatcactccagcaggaactgtgtccttcatttctgctgcccagcgcaccagcattgggacgatgctttccttggaccaacattactcctccagcgctccctggcattacgaacgacacaacaatccaacagggtatttctggcctgattgattccttgaacgctcgcgatatttccgtgaagattttcgaagatttcgcccaatcttggtactggatactcgtcgctctgggggtggccctggttctgtcattgttgtttatactgttgttgcgcttagttgccggccctttggtgcttgtgttaatcctcggtgtgctgggtgtattagcttacgggatctactattgttgggaagagtaccgagttctgagggataagggcgcgtccatcagccagctcggtttcaccaccaatcttagtgcataccaatctgtccaggaaacctggctggctgcccttattgttctcgccgttcttgaggccatcctcctgctggtcctcatttttctgaggcagagaattagaattgcaattgccctcttgaaagaagcgagcaaagccgtcggccagatgatgagcaccatgttttatcccctggtgacatttgtcctcctattaatctgcattgcatactgggccatgaccgccctgtacctggcaacatccggacagccgcagtatgtgttgtgggcctccaatatttcatctcccggctgcgagaaggtaccgatcaacacaagctgtaatcctaccgcccacctggtcaacagtagttgccctggcttaatgtgtgtgtttcaggggtatagctccaaaggtctgattcaacgtagcgtttttaacctccagatttacggggtgctcggcttgttttggaccctgaattgggtgttagccctggggcaatgcgtgttagcgggagcgtttgctagtttctactgggccttccataagccacaggatattccaacatttcccctgatctcagccttcatcagaaccctgcgttatcacaccggcagcttagctttcggcgcactaatcctgactctggtgcagattgctcgcgtcatattggagtacatcgaccacaaactgcgcggtgtgcagaatcccgttgcccggtgtatcatgtgttgtttcaagtgctgcctgtggtgcctcgagaagtttatcaaatttctcaatagaaatgcatatattatgattgccatctacggcaagaacttctgcgtttccgcaaagaacgcattcatgcttctgatgaggaatatcgtgcgggtggtggtcctggataaagtgacagacctgctactgttttttgggaagctcctggttgtggggggggtgggggtgctttcctttttctttttttctggacgtatcccagggctgggaaaggattttaagtccccccaccttaactattactggctccctattatgactagtatcctcggtgcctatgtaatagcttcaggcttcttcagcgttttcggtatgtgtgtggatacgttatttctctgctttttagaggatctcgagaggaataatggctccctcgaccgaccatactatatgtccaaatctctgctgaagattctcgggaagaagaacgaagctcctccagacaacaaaaaacgtaaaaaatag

SEQ ID NO: 70432 - DNA, 1905 bp, Artificial Sequence
  derived and/or modified sequence
atgggtgagaataaggataagccttacttgctgtatttcaacatctttagttgtatactgtcttccaatattatttctgtggctgaaaatgggctccagtgtcccacccctcaggtctgtgtgagcagctgtcctgaagacccttggaccgtgggtaaaaatgagttcagccaaactgtgggagaggtcttctatactaagaacaggaatttctgcctgcccggtgtcccttggaacatgacggtaattacaagcctacagcaagagctgtgcccctccttcctattgcctagcgctccagctctcgggcgatgttttccttggaccaatatcacgccccccgccttgcccggaataactaatgatacaaccatccaacagggaattagtggactgattgacagcttgaatgccagggatatttccgtgaaaatctttgaagacttcgctcaaagctggtattggatcctggttgccctcggagtcgcactcgtcctgtctctcctgtttattctcctgttacgcctggtggctggccctctggtactggtgcttatcctgggagttctgggagtcctggcctacgggatttactactgttgggaagagtacagagtactgagagataagggggcttctatcagccagctgggctttacgaccaacctaagcgcgtatcagagcgtgcaggaaacttggctcgccgccctcattgtcctggccgtcctggaggctatcctccttctcgtcctgatattccttaggcaacgcatccgcatcgcgattgccttgctgaaggaagcatcaaaggcagtgggccagatgatgtccactatgttttacccactggttacattcgtcctgcttcttatttgcattgcatattgggcaatgacagccctgtatttggctactagcggtcaacctcagtacgtcctttgggccagcaacatctcaagtccaggatgtgagaaagttccaatcaatacatcgtgtaaccctactgcacacttggtcaatagctcgtgtccagggctgatgtgcgtctttcagggatactcatccaaaggcctgatccagcggtccgtgttcaatctacagatttatggcgtgctgggactcttctggaccttgaactgggtgctcgctctcggccaatgtgtactggctggggcgtttgcaagcttctactgggcattccacaagccccaggatatccctacctttcccctgatcagcgcttttatccggacgctaaggtaccacaccggtagcttagctttcggggccctgattttgaccctcgttcagatcgccagagttatcctcgagtatatcgaccataagctgagaggagtgcaaaaccctgtggctaggtgcattatgtgttgcttcaaatgctgcctctggtgcctggaaaaattcatcaaattcctgaatcgtaatgcgtacatcatgatcgctatctacggcaaaaacttttgtgtgtctgctaagaacgccttcatgctactgatgagaaatattgttagagtggtggtgctggataaggttacggatctcctcttattctttggcaaactactggtggttgggggtgtaggagttctgtcttttttcttcttcagcggtagaatccccggtctcgggaaagattttaaaagtccccacttgaattattattggctcccaatcatgacaagcattcttggagcctatgttatcgcttccggatttttcagcgtatttggtatgtgtgtggataccctgtttttatgttttcttgaagacctcgaaagaaacaatggctcactcgatcggccatattacatgtccaagagccttctgaaaatcttaggaaaaaaaaatgaggcccctcccgataataaaaaaaggaaaaaatag

SEQ ID NO: 70433 - DNA, 1905 bp, Artificial Sequence
  derived and/or modified sequence
atgggagagaacaaggacaagccctacctgctgtacttcaacatcttcagctgcatcctgagcagcaacatcatctctgtggctgaaaatggcctgcagtgccccaccccccaggtgtgtgtgagcagctgcccagaggacccctggacagtgggcaagaatgagttcagccagacagtgggggaggtgttctacaccaagaacagaaacttctgcctgcccggggtgccctggaacatgaccgtcatcaccagcctgcagcaggagctgtgccccagcttcctgctgcccagcgccccagccctgggccgctgcttcccctggaccaacgtgaccccaccagccctgcccggcatcaccaatgacaccaccatccagcagggcatcagcggcctgattgacagcctgaatgcccgggacatctctgtgaagatctttgaagattttgcccagagctggtactggatcctggtggccctgggcgtggccctggtgctgagcctgctcttcatcctgctgctgcggctggtggccggccccctggtgctggtgctgatcctgggcgtgctgggcgtgctggcctacggcatctactactgctgggaggagtacagagtgctgcgggacaagggggccagcatcagccagctgggcttcaccaccaacctgagcgcctaccagagcgtgcaggagacctggctggccgccctgattgtgctggccgtgctggaggccatcctgctgctgatgctgatcttcctgcggcagaggatccgcatcgccatcgccctgctgaaggaggccagcaaggctgtgggccagatgatgagcaccatgttctaccccctggtgacctttgtgctgctgctgatctgcatcgcctactgggccatgacagccctgtacctggccaccagcggccagccccagtatgtgctgtgggccagcaacatcagcagccctggctgtgagaaggtgcccatcaacaccagctgcaaccccacagcccacctggtgaacagcagctgccccggcctgatgtgtgtgttccagggctacagcagcaagggcctcatccagaggagcgtcttcaacctgcagatctatggagtgctgggcctcttctggaccctgaactgggtgctggccctgggccagtgtgtgctggccggggcctttgccagcttctactgggccttccacaagccccaggacatccccaccttccccctcatcagcgccttcatccgcaccctgcgctaccacacaggcagcctggccttcggggccctgatcctgaccctggtgcagatcgcccgggtcatcctggagtacatcgaccacaagctgcggggcgtgcagaaccctgtggcccgctgcatcatgtgctgcttcaagtgctgcctgtggtgcctggagaagttcatcaagttcctgaacagaaatgcctacatcatgattgccatctacggcaagaacttctgtgtgtctgccaagaatgccttcatgctgctgatgagaaatattgtgcgggtggtggtgctggacaaggtgacagacctgctgctcttcttcggcaagctgctggtggtgggcggcgtgggcgtgctgtccttcttcttcttcagcggccgcatccctggcctgggcaaggacttcaagagcccccacctgaactactactggctgcccatcatgaccagcatcctgggcgcctacgtgattgccagcggcttcttctctgtgtttggcatgtgtgtggacaccctcttcctgtgcttcctggaggacctggagaggaacaacggcagcctggaccggccctactacatgagcaagagcctgctgaagatcctgggcaagaagaatgaggcccccccagacaacaagaagaggaagaagtag

SEQ ID NO: 70434 - DNA, 1905 bp, Artificial Sequence
  derived and/or modified sequence
atgggagagaacaaggacaagccctacctgctgtacttcaacatcttcagctgcatcctgagcagcaacatcatctctgtggctgaaaatggcctgcagtgccccaccccccaggtgtgtgtgagcagctgcccagaggacccctggacagtgggcaagaatgagttcagccagacagtgggggaggtgttctacaccaagaacagaaacttctgcctgcccggggtgccctggaacatgaccgtcatcaccagcctgcagcaggagctgtgccccagcttcctgctgcccagcgccccagccctgggccgctgcttcccctggaccaacatcaccccaccagccctgcccggcatcaccaatgacaccaccatccagcagggcatcagcggcctgattgacagcctgaatgcccgggacatctctgtgaagatctttgaagattttgcccagagctggtactggatcctggtggccctgggcgtggccctggtgctgagcctgctcttcatcctgctgctgcggctggtggccggccccctggtgctggtgctgatcctgggcgtgctgggcgtgctggcctacggcatctactactgctgggaggagtacagagtgctgcgggacaagggggccagcatcagccagctgggcttcaccaccaacctgagcgcctaccagagcgtgcaggagacctggctggccgccctgattgtgctggccgtgctggaggccatcctgctgctggtgctgatcttcctgcggcagaggatccgcatcgccatcgccctgctgaaggaggccagcaaggctgtgggccagatgatgagcaccatgttctaccccctggtgacctttgtgctgctgctgatctgcatcgcctactgggccatgacagccctgtacctggccaccagcggccagccccagtatgtgctgtgggccagcaacatcagcagccctggctgtgagaaggtgcccatcaacaccagctgcaaccccacagcccacctggtgaacagcagctgccccggcctgatgtgtgtgttccagggctacagcagcaagggcctcatccagaggagcgtcttcaacctgcagatctatggagtgctgggcctcttctggaccctgaactgggtgctggccctgggccagtgtgtgctggccggggcctttgccagcttctactgggccttccacaagccccaggacatccccaccttccccctcatcagcgccttcatccgcaccctgcgctaccacacaggcagcctggccttcggggccctgatcctgaccctggtgcagatcgcccgggtcatcctggagtacatcgaccacaagctgcggggcgtgcagaaccctgtggcccgctgcatcatgtgctgcttcaagtgctgcctgtggtgcctggagaagttcatcaagttcctgaacagaaatgcctacatcatgattgccatctacggcaagaacttctgtgtgtctgccaagaatgccttcatgctgctgatgagaaatattgtgcgggtggtggtgctggacaaggtgacagacctgctgctcttcttcggcaagctgctggtggtgggcggcgtgggcgtgctgtccttcttcttcttcagcggccgcatccctggcctgggcaaggacttcaagagcccccacctgaactactactggctgcccatcatgaccagcatcctgggcgcctacgtgattgccagcggcttcttctctgtgtttggcatgtgtgtggacaccctcttcctgtgcttcctggaggacctggagaggaacaacggcagcctggaccggccctactacatgagcaagagcctgctgaagatcctgggcaagaagaatgaggcccccccagacaacaagaagaggaagaagtag

SEQ ID NO: 70435 - DNA, 1905 bp, Artificial Sequence
  derived and/or modified sequence
atgggcgagaacaaggacaagccctacctgctgtacttcaacatcttttcatgtatcctctcctcaaatatcatttccgtggcggagaatgggctgcagtgtcccacaccacaggtgtgcgtctcaagctgtcctgaggatccctggactgtggggaagaatgagtttagccagaccgttggcgaggtattctatacaaaaaatcggaacttctgtctgcccggcgtgccttggaacatgacggtaatcacctccctgcagcaggagctgtgccccagctttctgctgccttccgctcccgcactaggacgctgttttccctggactaacgtaacgccccccgctctcccgggcattacaaacgatacaaccatccagcagggaatctcaggcttgatcgacagtcttaacgcacgtgatatctccgttaaaatctttgaggattttgcacagagttggtattggatcctggtcgcgttgggggttgccttggttctttctctgctctttattctgctactgcgcctcgttgctggtcctctggtgctggtgctgatcctcggcgttcttggggtcctggcctacggtatctattattgttgggaagaatatcgagtcctcagggacaaaggtgcatctatcagtcagcttggattcaccactaatttgtccgcataccaaagcgtgcaggaaacttggctcgccgccctgatcgtgctcgcagtgctagaggctatcctgctgcttatgctcatttttctgaggcagcggattcgtatagccatcgcccttctgaaggaggcctctaaagccgtggggcaaatgatgtcaacgatgttttatccattggtgacttttgtcctcttgctgatttgcatagcctattgggcaatgaccgccctctacctcgctacttcaggccagcctcagtacgtcctgtgggcgtcaaatatttctagcccgggttgcgagaaggtacccatcaacacctcttgtaatcctactgctcatctggtgaattcatcatgtccaggattgatgtgcgtttttcagggctacagttcaaaggggctgatacagaggtctgttttcaatttgcagatctacggggtgctgggattgttttggacgctcaattgggtgctcgcccttggtcaatgtgtcttggccggcgcctttgcttcgttctactgggcctttcataagccacaagacataccaacattcccactgatctcagcgttcatcagaacgctgcgataccacactggatctctcgccttcggagcactaatactcaccctcgttcagatcgctagagtgattctcgagtacatcgaccataaacttcgtggcgtacaaaatcccgtcgcaagatgcattatgtgttgctttaagtgctgcctgtggtgcttggaaaaatttatcaaattcctcaaccgtaacgcctacattatgatcgccatctacggcaaaaatttctgcgttagcgcaaagaacgccttcatgctgctcatgaggaatattgtccgagtagtggtgctagataaagtaaccgatctgctgttattctttggcaaactcctggtcgttgggggggttggtgtgttaagtttctttttcttttcaggccgtatccccggtctcggcaaagatttcaagtctccccaccttaactactattggttaccaattatgacctccattctcggcgcatacgttatcgcatctgggttcttcagtgtcttcggaatgtgcgtggacacactgttcctttgtttcctggaagatttggaaagaaataacggcagcctcgatcgcccttactatatgtcgaagagtctcctgaagatcctgggaaagaaaaacgaggctccaccagacaataagaaaagaaagaagtag

SEQ ID NO: 70436 - DNA, 1905 bp, Artificial Sequence
  derived and/or modified sequence
atgggcgagaacaaggacaagccctacctgctgtacttcaacatcttctcctgtatcctgtctagcaacatcataagcgtggccgaaaacggccttcagtgtcccacccctcaggtctgcgtgtccagctgccctgaagacccttggactgttgggaaaaatgaattttctcaaactgtcggagaagtgttttacaccaaaaaccgcaatttttgcctacctggcgttccctggaacatgaccgtgattacatctttgcaacaggaactgtgccccagctttcttttgccgtccgcccctgccctggggaggtgcttcccttggaccaacgttacacctccagctctacccggcatcacgaacgacactacaattcagcaggggatcagtggactaatcgattccctaaacgcccgcgatatatctgtcaaaatctttgaggacttcgctcagtcctggtactggattcttgttgcgctgggggttgccctagtcctgagtctgctgtttatcctgctgctgcgacttgtcgccggcccgctcgtcctcgttctgattctgggagtgttaggcgttctggcctacggaatttactattgttgggaggagtaccgtgtcctgagagacaagggcgcttccattagccagctcgggttcactaccaatctatcggcgtatcagagcgtgcaggaaacctggctggctgccttgatcgtgctcgccgtcctggaagccatcctcctactgatgctgatcttcttgagacagaggatcaggatcgccatcgcactgctgaaggaggcaagtaaagccgttggtcagatgatgagcaccatgttctatccgctcgttaccttcgtcctgctgctcatttgtattgcctattgggcgatgactgctctgtaccttgcaaccagtgggcagccgcaatatgttctgtgggcaagcaatatcagcagtccgggttgtgagaaggtacccataaacacaagttgtaaccctaccgcgcacctggttaactcttcctgtcctggcctaatgtgtgtttttcagggttacagtagcaaaggactaatccagaggtctgtgttcaatctgcaaatctatggggttctcgggctgttttggacactgaactgggtcttggcactcgggcagtgcgtgctggccggcgcatttgccagtttttattgggccttccacaagccgcaggacattcccactttccctttaatctcagcgttcatccgcacactgcggtatcatactgggtctttggcattcggcgcactgattctcacacttgtgcaaattgcccgtgttatccttgaatacatcgaccataaactgcgcggagtgcaaaaccccgttgcccgatgcataatgtgttgcttcaagtgttgcctctggtgcctggagaagttcatcaagttcctcaatcggaacgcttacatcatgatcgccatttatggcaagaacttttgtgtgtccgccaagaatgcctttatgctactgatgagaaacatcgtgcgggttgtggttctcgataaagtgacagatctacttctttttttcggaaaactcctcgtcgttgggggagtcggggtgctatcctttttcttttttagcgggcggatccctgggctcggtaaagattttaagagcccccacttaaactactactggttacccatcatgacctcaattctgggagcctatgtcattgcatcgggcttcttttccgtgttcgggatgtgcgtcgatacactgttcttatgttttttggaggacctcgaaagaaacaatgggtcacttgatcggccatattatatgtctaaatcccttttgaaaatcttaggaaaaaaaaacgaggcccctcccgataacaaaaaaagaaagaagtag

SEQ ID NO: 70437 - DNA, 1905 bp, Artificial Sequence
  derived and/or modified sequence
atgggcgagaacaaggacaagccctacctgctgtacttcaacatcttctcgtgtattctttccagcaacatcatctcggtggccgagaacggcctccagtgtcctacccctcaggtttgtgtttcctcatgccctgaagacccctggacagtgggcaagaatgagttctcccagacagtgggcgaagtcttctacacaaagaatcgcaacttttgtctgccgggagtgccgtggaatatgacagtcatcactagcctgcagcaggagttgtgtccgagctttctgcttccttctgctcccgccctgggtaggtgtttcccgtggacgaatatcaccccacccgccctgccaggcatcacaaacgatacaactatccagcaggggattagtgggctgattgactccttgaatgcccgtgatatttccgttaaaatcttcgaggacttcgctcagtcttggtattggattctggtggccttgggcgtggctttagtgctttctctcttattcatcctattgttgagactcgttgcgggtcctctcgtgctggtgttgatccttggagtcctgggtgtgcttgcctacgggatttattactgctgggaggagtatcgagtgctgcgtgataagggggccagtatctcacagctgggctttacaactaatctgtccgcttaccagtccgtccaggagacatggctggctgctctcatcgtgcttgccgtcctggaggccatattgcttttagtcttgatttttctccggcagcgcatccgaatcgcaattgcactgctaaaggaggcgtccaaggcagtaggccagatgatgtccacgatgttctaccctcttgttacgttcgtgttgttgctcatttgcatcgcctactgggctatgaccgcactgtacctcgccaccagcggtcagccccaatacgtcctttgggcctccaacatctcgtctccgggttgcgaaaaagtccccatcaacacttcgtgcaatccgactgcccacctggttaatagttcctgccctggcctaatgtgcgtcttccaaggttatagttccaaaggacttattcagcggagtgtgtttaacttacagatctatggggtcctgggcctattctggactctgaactgggttctggctttgggccagtgcgtgttagcaggggcattcgcttctttttactgggcttttcataaacctcaagacatcccaaccttcccactcatttccgccttcatcaggaccttaaggtatcacacgggaagtctggccttcggggccctgatccttaccctggtccagattgctagggtgatcctggagtatatagaccacaagcttcgcggagtgcagaatcccgtcgctagatgtatcatgtgctgtttcaagtgttgcctgtggtgcctcgaaaagtttatcaagtttctcaacaggaatgcctatatcatgatcgctatctacggaaaaaatttttgtgtgtctgctaaaaatgcctttatgctactcatgaggaatatcgtgcgtgtcgtcgtacttgacaaggttacagacttgcttcttttttttggcaagctgctggttgttgggggcgtcggcgtcctaagtttttttttctttagtggaagaattccaggccttggcaaggattttaaaagtccgcacctgaactactattggctgccaataatgacgagtatcttaggagcttacgtcatcgcgtctggctttttcagcgtgttcggcatgtgtgtggacacactgttcttgtgttttttggaggatctggaacggaataacggctcgctcgatcgcccttattatatgtcaaagagcctgctaaaaatactcggtaagaagaacgaggccccaccagacaacaagaaaagaaaaaagtag

SEQ ID NO: 70438 - DNA, 1905 bp, Artificial Sequence
  derived and/or modified sequence
atgggcgagaacaaggacaagccctacctgctgtacttcaacatcttttcatgcatcctgtcgagcaacataatcagcgtggctgagaatggcctgcagtgtccaactccacaggtatgcgtttcctcctgtcctgaggacccctggacagtagggaagaacgagttcagccagactgtaggggaggtgttctatacaaagaaccggaatttctgcctgccaggggtcccttggaatatgacggtaatcaccagcctccaacaggagctgtgccctagctttctcctccctagcgcaccggctctgggaaggtgcttcccatggaccaatgtgacacctccggcgctgcctggaattacaaacgatactacaattcagcagggcatttctgggctgattgattcactcaacgcacgagacatctccgtgaaaatctttgaagactttgcacaatcttggtattggatcctggtggcacttggggtcgccctggtgctgagtctgctgttcatactcctgcttaggctggtagccggcccgctggtcctggtactcatcctcggcgtgctgggggtcctggcctatggaatctattactgctgggaggagtaccgggtgctgagggacaagggggcctcaatcagtcaactcggattcacaacaaatctgagtgcttaccagtccgttcaggaaacgtggctggccgcattaattgtgcttgcggtgctagaagctattctcctgttgatgttgatcttccttcggcagcgcattagaatagcaatcgcacttctcaaggaagcttctaaggccgtgggccagatgatgtcaacaatgttctacccactggtgacattcgtcttactccttatatgcatcgcatactgggctatgaccgcattatacctcgccacgagtggccagcctcagtacgttctgtgggcttcaaacatctcttctcctggctgtgaaaaagtgcccatcaatactagctgcaatccaacagcgcatctcgttaatagttcctgccctggactgatgtgcgttttccagggctactctagcaaaggcttgatccagagaagcgttttcaatctacagatatatggagtcctgggtctgttctggaccctgaattgggtgctggctctgggacagtgcgtacttgccggcgcctttgccagtttctactgggctttccacaagccccaggatattcctactttcccactgatctcagcattcatacgtacccttcgttatcacacaggatccttagccttcggggcacttatcctaacactcgttcagatcgcccgggttatcctggagtatattgaccataagctacggggtgtgcaaaacccagtggcccggtgcatcatgtgttgctttaagtgttgcctgtggtgcttagagaaattcatcaagttcctgaaccggaatgcatatatcatgattgccatctacgggaagaacttttgcgtgtctgccaagaacgcattcatgctcctcatgagaaatatcgtgagagtggtagtgctggacaaagtcaccgatttactgctatttttcggtaagctactcgtggtaggaggcgtaggagtactctctttctttttcttctcaggcaggatccctggactcggcaaggattttaagtctcctcacctcaattactactggctcccaataatgaccagcattcttggcgcctacgtgattgcgtcgggatttttctcagtgtttggaatgtgcgtcgacacactttttttgtgctttttagaagatcttgaacgcaacaacggcagcctggaccgcccatactacatgagcaaatccctgttgaagatcctaggcaagaagaacgaagctccacctgataacaagaaacgaaagaagtag

SEQ ID NO: 70439 - DNA, 1905 bp, Artificial Sequence
  derived and/or modified sequence
atgggcgagaacaaggacaagccctacctgctgtacttcaacatcttcagctgtattcttagcagtaatatcattagtgttgccgagaacggcctgcagtgtccgactcctcaggtgtgtgtgagctcctgccccgaggacccatggactgtgggaaagaacgagttcagccaaaccgtcggtgaagtgttttacactaaaaatcgaaacttttgcctccctggagtgccctggaacatgacagtcatcacatcattgcaacaggagctgtgccccagttttctgctcccaagcgcacccgccctggggaggtgttttccgtggacaaatgtgacaccaccggccctaccagggatcaccaacgatacaaccatccagcaaggaatcagcgggctgattgacagtctgaatgctagggacatttctgtgaagatcttcgaggattttgcacagtcctggtactggatcctggtcgctctcggcgtggctctcgtgctttccctcctcttcatacttctcctgaggctcgtcgctgggcctctggtcttggtgttaattctgggagtgcttggcgtgttggcctacgggatctactactgctgggaggagtacagagtcctacgggataaaggtgcgagcattagccagttgggttttaccaccaacctgagtgcataccagagcgtgcaggagacgtggcttgctgcattgattgtgttggctgttctagaggccatcctgctacttatgctcatcttcctgcgccagcgaatcagaatagccatagccctgctgaaggaggcgagtaaggcagtgggtcaaatgatgagcacaatgttctacccattggtcacattcgttctgctcttaatctgcatagcctactgggccatgacagctctgtatctcgctacctcaggccagcctcagtatgtgctgtgggcgtctaacatatcttcccccgggtgcgagaaagtgccaatcaatacaagttgtaatcccaccgcccatcttgtcaacagcagctgtcctggtctcatgtgcgttttccagggatactcaagcaagggtcttatccagagaagtgtgttcaacctgcagatttacggtgtcctggggcttttctggacactgaactgggtcctggccctaggccagtgcgttctggccggagctttcgcctctttctattgggctttccacaaaccacaggatatcccaaccttcccactcatttctgccttcataaggacactcagataccatacaggaagcctggccttcggagcgctcattctgaccctggtacagatcgctcgcgtgattctcgagtacatcgaccataagctcaggggcgttcaaaaccctgtggctcgttgtatcatgtgttgctttaagtgctgcttgtggtgtctggaaaagttcatcaaattcttaaaccggaacgcctatataatgatcgctatctacgggaaaaacttctgcgtgtccgctaaaaacgccttcatgctgctgatgcgaaacattgtgcgggtggtggtgcttgataaagtgacagacttactcctcttctttggtaagctcctggtagttggtggagttggcgttctgtcctttttcttcttttctggtcgtatccctggcctgggcaaggacttcaagtctccgcatttgaactactattggctgcccatcatgacgagtattcttggcgcatacgtcattgccagtgggtttttttctgtcttcggcatgtgcgtggacactctcttcctgtgttttctcgaagatctcgagcgcaataacggctcgttggacagaccatactatatgagcaaatctttgttaaaaattcttggtaaaaagaatgaagctccgcccgataacaagaagaggaagaaatag

SEQ ID NO: 70440 - DNA, 1905 bp, Artificial Sequence
  derived and/or modified sequence
atgggcgagaacaaggacaagccctacctgctgtacttcaacatctttagttgtatcctgtcatccaatataatctcggtggccgagaacggcctgcaatgccccactccccaggtgtgcgtgtcctcctgtccagaggacccttggactgtggggaaaaacgagttctcccaaaccgtcggagaagtattctacaccaaaaaccggaatttttgtctccctggtgtaccatggaacatgacagtgattacctctctgcagcaggagctgtgtccctctttcttattaccatcggccccagcccttggcaggtgctttccttggaccaatattactccgcccgcactgcctggaattaccaacgatactacgattcaacaaggaatctctggcctgattgattctctcaatgctagggatatctccgtaaagatctttgaggactttgcccaatcctggtactggatactggtggctttaggcgttgccctggtgctttctctgctctttatactgcttctgagactagtggccggccccttagtgcttgtgttgatccttggagtacttggagtgctggcctacggcatatattactgttgggaggagtatcgggtgctaagggacaagggcgctagcattagtcagctcggttttaccacaaatttgagcgcctatcagtcggtgcaagaaacgtggctggctgcacttatcgtcctcgcggtgctggaggccattttgctacttgtcctcatcttcttgaggcaaaggattcgaatcgcgattgcactgctgaaggaggcttctaaagcagtgggccaaatgatgtcaactatgttctatcctctagtgacattcgtactacttttaatctgcatcgcctactgggccatgacagccctctatttggccaccagcggccagccacaatacgtgctttgggcctctaacataagcagtcctgggtgcgagaaggtccctatcaatacctcttgtaaccccaccgcacacctggtcaactccagttgcccaggactgatgtgcgtgttccaaggatactcatctaagggcctcatccagcgttctgtctttaacttacaaatatacggtgtccttggactgttttggacgctcaattgggtgctcgctctagggcagtgcgtgttggccggcgccttcgcgtccttctattgggcattccataagccccaggacattcccacattccccctgatatctgcctttatacgtactctgagataccacacgggcagcctggcgtttggagctcttattcttactcttgtacagattgctcgagtcatcctggagtatatcgatcacaagcttcggggcgtgcagaacccagtggcacgctgtattatgtgttgctttaagtgctgtctctggtgtctagagaaatttatcaagtttttaaatcgcaatgcttatatcatgatagccatttatggaaagaatttctgcgtgtccgcaaaaaacgcatttatgctcctcatgcggaacattgtcagagtagtggttctcgacaaggtcacagatttgctgctgttctttgggaagttgttagtggtaggtggagtgggagtgctgtcattcttttttttctccggccgcattcccgggttgggaaaagactttaagtccccacacctcaactattattggcttcccattatgacatccatcctcggagcctacgtgatcgcctcaggattttttagtgtctttggaatgtgcgtcgatactttgttcctctgcttcctggaggatctagagcggaacaatgggagcttagaccggccatactatatgtcaaagtctctattgaaaattctcggcaagaagaatgaggcaccccctgacaacaagaaaagaaagaaatag

SEQ ID NO: 70441 - DNA, 1905 bp, Artificial Sequence
  derived and/or modified sequence
atgggcgagaacaaggacaagccctacctgctgtacttcaacatcttttcatgtattttgtcatccaatattatcagcgtggccgagaacggcctgcagtgtcccacccctcaggtatgcgtgagttcttgcccagaggacccctggacggtcggtaaaaacgagttttctcagacagtcggtgaggtattttataccaagaaccgtaatttctgtctgccgggcgtgccctggaatatgactgtgataacctctcttcagcaagagctctgccctagcttcttgctcccatccgcacccgcgttaggtagatgcttcccgtggacaaatatcactccaccagccctccccggcattacaaatgacacaacgattcaacaaggcatatctgggttaatcgactctctgaacgccagagatatcagcgtgaaaatcttcgaagatttcgcacaatcctggtactggatcttggttgcactcggtgttgccctggtgctttcactactctttatcctcctgctgcgcttagtcgctggacctctagtcctagtgctcatattaggagttctgggggtcctcgcctacgggatctactactgctgggaagagtaccgggtgcttagggataaaggagcctccatcagtcaattgggattcacaaccaacctctccgcctatcagtcagtgcaggagacgtggctagcagcccttatcgtattagcagtgttggaggcgatcttactgctggtgctcatattcctcagacagcggatccggattgctatcgctctgctgaaggaggcatccaaggccgtgggccagatgatgtccacgatgttctatcccctagtcacattcgtgctcttgctcatctgtatcgcttactgggctatgacagccctgtatctggccacttcgggtcagccgcagtacgtcctgtgggcttcaaacatcagtagcccagggtgtgaaaaggtgcctatcaacacatcgtgtaacccaactgctcatttggtgaactcttcctgtccaggactgatgtgcgtctttcagggatactcttctaaaggacttatccagaggagcgtatttaatcttcaaatatatggtgtgctgggtctcttctggactctcaattgggtgctggcacttggccaatgcgtgctggccggagcattcgcctccttctactgggccttccacaaacctcaggacataccaaccttcccgttgatcagcgccttcatcagaacattacgataccacacgggttcactggcctttggggcacttatacttacactcgtgcagatcgccagagtgattttggaatacattgaccataaacttagaggggtccagaacccagtggccaggtgcattatgtgctgtttcaagtgttgtctgtggtgcctggaaaagtttattaaattccttaaccggaatgcatacatcatgatagcaatctacggaaaaaacttttgcgtgtctgctaagaacgcctttatgctgctcatgagaaatatcgtgcgtgtcgtagtcttggacaaggtgacggatctcctcctcttttttggaaagttgctcgtggtgggcggggtcggagtgttgtctttttttttcttcagtggtaggatccccggactgggaaaggacttcaaaagcccccacctcaattactactggctcccaatcatgacctccattcttggggcttatgttatcgcaagtggattctttagcgtgttcggtatgtgtgtcgatacccttttcctttgcttcctggaggatctcgaacggaataatggctcgctggaccgcccctactacatgtctaaaagcctcctgaagattctgggcaagaagaatgaggcccctcctgacaacaaaaaaaggaagaaatag

SEQ ID NO: 70442 - DNA, 1905 bp, Artificial Sequence
  derived and/or modified sequence
atgggcgagaataaagataaaccctatctgttatactttaacattttctcctgtatactttcttcaaatattataagcgtggcggagaatgggctgcagtgtcccactccgcaagtctgtgtgtcatcatgccccgaagatccctggacggttggcaagaacgaattttcccaaactgtgggtgaagtgttctatactaagaatagaaacttttgtctgcctggggttccttggaatatgactgtgatcacttccctccagcaggagctgtgccctagcttcttgcttccgtctgcacccgctctgggcagatgcttcccttggaccaatgtaactcctccggctctgcctggtattacgaacgacacaactattcaacaaggcatttctggacttatcgatagcttgaacgcaagagacattagtgtgaagatcttcgaagactttgctcaatcctggtattggatcttggtcgcactgggcgtggccctcgttctgtctctgttgttcatcttactgctgcgccttgtcgctggccctctggtgctggtactgattctgggagtgctcggagttctcgcctacgggatctattattgctgggaggagtatcgagtcctgagggataaaggcgcatccattagccagttgggatttacaactaacctgagtgcatatcagtcggtccaggaaacctggctggccgcactgatcgttctggcagtcctggaggccatcctgcttctcatgctgatcttcttaaggcagcgcattcgcatcgccatcgcacttctcaaggaggcctccaaagctgtgggacagatgatgagtactatgttttaccccctagtgactttcgttctactgttgatctgtattgcttactgggccatgaccgccctttatctggccacaagcggacagccgcagtatgtattatgggccagcaacattagttctccaggatgcgaaaaagttcccattaatacctcctgtaaccctacagcccaccttgtcaactcatcctgccccggactgatgtgtgtgttccagggttatagttcaaagggactgatccagcggtccgtgtttaatctgcaaatatatggtgtcctggggctgttttggaccctgaactgggttctagcgctcggtcagtgtgtgctcgccggtgcatttgcctctttttactgggcgttccataagccacaagatatccccacattccccctgatttctgctttcatccgcaccctgcgctatcatacgggatcgctggctttcggagctttgatactgaccttggtgcagattgccagggtgattcttgaatatatagatcataagttgagaggggttcagaaccctgtggccagatgtattatgtgttgcttcaaatgctgcctctggtgcctggaaaaatttataaagtttttgaacagaaatgcttacataatgatcgctatctacgggaaaaatttttgcgtgtccgccaaaaatgctttcatgctgctcatgcgcaacatagttagggtcgtagttctggataaggtgaccgatcttctgctttttttcggcaagctcctcgtggttggcggagtcggagtgctcagcttttttttcttcagtgggaggatccccggactggggaaagactttaaatctcctcacttgaattattattggcttccaataatgactagcattcttggcgcatacgtcatcgcaagcgggtttttcagcgtgttcgggatgtgcgtggataccctgtttctgtgcttcttagaggacttggaaaggaacaatggctctctggaccgtccttactatatgagcaaatcactgctaaagattctaggaaagaaaaacgaagcccctcccgataataagaagagaaagaaatag

SEQ ID NO: 70443 - DNA, 1905 bp, Artificial Sequence
  derived and/or modified sequence
atgggcgagaacaaggacaaaccatacctgctgtatttcaatattttctcctgcatcttaagctccaatattatcagcgttgcagaaaatgggcttcagtgtcccacaccacaggtctgtgtatcaagttgccctgaggatccatggaccgtcggaaaaaatgagtttagccagactgtaggggaagtcttttacaccaaaaaccgcaacttctgcttgcccggtgttccatggaatatgacagtcattacatccttgcagcaggagctgtgcccctcattcttactgccttccgcaccagctttgggaagatgcttcccttggactaacgtgaccccaccagccctgcccggaattactaacgataccaccattcagcagggcatttccgggttgatcgacagcctcaatgcccgtgatatttccgtcaagatattcgaggacttcgcccagagctggtattggatacttgtcgccctgggtgtcgctctggtactgtccctgctattcattctgcttcttcgactcgtcgcaggccctttggttttggttctgatcctcggcgttctaggggtgctggcgtatgggatttattattgctgggaagagtatcgcgtgcttagggataaaggtgcttccatttctcagttaggctttacaacaaatctatccgcttatcagagcgttcaggaaacatggctagcagccttgatcgttctggcggtcctggaagccattctacttctgatgctgatcttcctccgccagcgcatcagaatagccatcgctctcctgaaggaagcaagcaaagctgtggggcaaatgatgagcaccatgttttatccgcttgtgacgttcgtgctccttctgatctgcattgcctattgggccatgactgccctatacctcgccacaagcgggcagcctcagtacgtcctgtgggcctctaatatctcgagcccgggatgcgaaaaagtcccaatcaacacctcttgtaaccccaccgcacacctagtcaactctagttgtccaggcctgatgtgtgtgttccagggctactcaagtaagggactgatccagcggagcgtgttcaatctccagatttacggtgtattgggcctattttggactctgaattgggtgctggcactggggcagtgtgtgttagcaggcgcttttgccagtttttactgggccttccataagccccaggacatcccgacattcccccttatttcggcttttatacggacccttcggtatcatacaggcagtctcgcatttggagccttgattcttactctggtgcagattgccagggtaattttggaatacatcgatcacaaactgcgcggagtgcaaaaccctgtagcacgctgcattatgtgctgtttcaaatgttgtctctggtgcctcgagaaatttataaagttcctgaaccgaaatgcctatataatgattgcgatatacgggaagaatttctgcgtctcagccaagaatgcttttatgctgttgatgaggaacattgtgcgcgttgttgtactcgataaggtcacagacctcctgcttttcttcgggaagctgctcgtggtcggcggagtgggagttctgtctttcttttttttctctggcagaatacccggactgggcaaggactttaagtcaccccatcttaattactattggttgcccatcatgactagcattttgggtgcctatgttatagccagtggtttctttagtgtcttcggtatgtgtgtcgacactctgtttttgtgctttctagaagacttagagcggaacaacggcagcctcgacaggccgtactatatgtccaagtctctgcttaagatcctcggaaagaagaacgaggcccctcccgacaacaagaaaagaaagaagtag

SEQ ID NO: 70444 - DNA, 1905 bp, Artificial Sequence
  derived and/or modified sequence
atgggcgagaacaaggacaaaccttatcttctttacttcaacatttttagttgtatccttagttccaatatcatttctgtcgcagagaatggtctgcaatgcccgaccccccaggtgtgcgtgagctcatgtcctgaggacccatggactgttggaaaaaacgagttttctcaaactgtcggcgaagtattctacacaaagaacagaaacttctgtctgcccggagttccatggaatatgactgtcattactagcctgcaacaagagctttgcccctcttttttactgccttcagccccagctctggggaggtgctttccatggaccaacatcacccccccagctttgcccggaatcaccaatgacacaactatccagcagggcattagcggcctgattgacagcctgaacgctagagacataagcgtcaagatcttcgaggacttcgctcaaagctggtattggatccttgtcgccttaggcgtcgcactggtgctgtccctcctattcattcttctcctgagattggtagctggacccctggtgttggtgctgattctgggcgtgctcggtgtcctggcctacgggatctattactgctgggaggagtacagggtcctgcgggataaaggggcaagcatttctcagttggggttcactacaaacctgagcgcctaccagagtgtgcaggagacgtggctcgctgccctcattgtcctggctgttctcgaggctatcctcctgctagtgcttatttttctgcgccagaggatccggattgctatcgcacttttaaaggaagcaagcaaggccgttgggcagatgatgagcaccatgttttatcctctggtcaccttcgtcctcctactaatctgtatcgcctattgggcgatgacagcgctgtacctggccacctccggacagcctcaatatgtgctgtgggctagcaatattagctctccaggctgtgaaaaagtgcccataaatacaagctgcaatcccacagctcatctagtcaactcctcctgcccgggtcttatgtgcgtcttccagggctactcctctaaaggtctgattcagaggtctgtcttcaacctgcagatatacggagtgctgggtttgttttggaccctgaattgggttttggcccttggccagtgcgtgctcgcaggcgcttttgccagtttctactgggcttttcataagcctcaagacatcccaacctttcccttaatctccgcctttattagaactctacggtatcacaccggttcccttgcctttggtgcccttattctcacattggtccaaatcgcccgtgtgattcttgagtacattgaccacaaacttcgtggtgtgcagaatcccgtggcaagatgcattatgtgttgctttaagtgttgcctgtggtgcctggagaaatttattaaattcctgaacaggaacgcctacattatgatcgcaatctacgggaaaaatttctgcgtatcagccaaaaatgccttcatgcttcttatgcggaatatcgtccgcgtcgtggtgttagataaggtgacagacttgctgttgtttttcggcaaactactagtggttggcggtgtcggagtgttgtctttttttttcttctcagggagaattcccggtcttggcaaggatttcaagtcaccacatctcaattactattggctgcctatcatgaccagcattctcggggcttacgtcatagcctccggattcttctcagtgtttggaatgtgcgttgacacgctgttcctgtgtttcctagaagacctggaacgcaacaatgggtcgctggacaggccttattatatgagcaagtcactcctcaagattttggggaaaaagaatgaggctcccccagataataagaagcgcaagaagtag

SEQ ID NO: 70445 - DNA, 1905 bp, Artificial Sequence
  derived and/or modified sequence
atgggcgagaataaggacaaaccttaccttctctactttaatatattctcctgtatcctaagttcgaacattatttcagttgccgaaaatggcttgcagtgtcctacacctcaggtttgtgtatcttcatgccccgaggatccctggacagttggaaagaatgaattcagccaaaccgtcggcgaggttttttatacgaagaatcgcaatttttgtttacccggtgtgccttggaacatgaccgtcatcactagcctgcaacaagagctgtgtccctcctttctactgccttctgctcccgctctaggccgatgcttcccttggacaaacgtgacacccccagccctgcctggaataacgaatgacaccacaattcagcaggggatctcaggactcatcgattccttaaatgcacgagatatcagcgttaagatttttgaggactttgcacagtcctggtattggatcctcgtggctttgggggtagcgttggtgctgtctctgctgttcattttgctcttaaggctcgttgcaggtcctctggtcctcgtgttgatcttgggagttctcggggttctggcctatggtatctactactgctgggaggaatatcgtgttttgcgagataaaggtgcctctatttcgcagttgggtttcacaactaatctaagtgcctatcagtccgtgcaagaaacctggctggcagctttgattgtgttggccgtcctggaggccatcttactgttaatgctcatttttctgagacagagaattcggatcgctattgctctactcaaggaggccagcaaagctgtgggccagatgatgtcaaccatgttctaccccctcgtaacttttgtcctgctcctgatttgcatagcatattgggctatgactgctctttacctcgccacatccgggcagcctcagtacgtcttatgggcctctaatatcagtagccccggatgcgaaaaggtgccgataaatacttcatgcaacccaacggcccatctagtcaacagttcctgcccaggcttaatgtgcgtgttccaagggtactcctccaagggactcattcaaaggtcggtatttaatctgcagatttatggcgttctgggtcttttctggacactcaattgggttctggccctcggccaatgcgtgctcgccggagctttcgctagcttttactgggccttccacaagccccaggatatcccaacattccctctcatatccgcattcattcgaaccctacgctatcataccggttctttggcctttggcgctctgatcctgacactggttcagatcgccagggtgattttggaatatatcgatcataagctgcgcggagtgcagaaccctgtcgcacgctgcatcatgtgctgctttaaatgctgcctatggtgtctggagaagttcattaaatttctgaatagaaatgcctacataatgatcgcaatttatggcaaaaacttctgtgtttccgcaaagaatgcgtttatgctcctcatgaggaacatcgtccgagtcgtagtgttggataaagtgacagatcttcttttgttttttgggaaactcctcgttgttggaggggttggtgtgctctcattcttcttcttttccggccgtatccccggactcggtaaggactttaagtctcctcatctgaactattattggttgccgataatgacttcaattctcggcgcttacgtgatcgcttcgggcttcttttcagtgttcggcatgtgtgttgacactctgttcttgtgtttcctggaagacctggaaagaaacaacggttctctggatagaccttactatatgagcaagtcactcctgaaaatactcggcaagaaaaatgaagctcccccagacaacaagaaacgaaaaaaatag

SEQ ID NO: 70446 - DNA, 1905 bp, Artificial Sequence
  derived and/or modified sequence
atgggtgagaataaggacaagccatacttgttgtacttcaatatctttagctgcattctgagcagcaatataatttctgtggccgagaacgggctgcagtgccccacgccccaggtgtgcgtgagcagttgtcctgaagatccttggactgtcgggaagaacgagttctcacagacggtcggggaggtcttctacactaagaatcgcaatttctgtctgcctggggtgccctggaatatgacagtcatcacttccttacagcaggaactctgcccatcttttttgcttccttctgcccctgccctggggcgatgctttccctggaccaacgttacgccgcctgcattgcctggcatcaccaatgacacaaccatccaacaaggcattagtggtctcatagattcactcaacgccagggacatttccgtgaaaatttttgaagattttgcccaaagctggtactggattctggtcgctctgggagtggctctcgtcctttctttgctcttcattcttctattgcggctggtggcgggacctctggtgttggtgctgatcctcggggttctcggggttctggcctacgggatttattattgttgggaagaatacagagtgctacgcgacaagggcgctagtatctcacagctcggcttcacaactaatctttccgcctaccagagcgtgcaggaaacctggctggcagctttgatcgtgcttgcagtactggaggcaatcctgctcctgatgttaattttcctgagacagcgtatccgaatcgctatcgccctgctcaaagaggctagtaaagcagtagggcagatgatgagtaccatgttttatcctttggtcacctttgtgttgctgctcatctgcattgcatactgggccatgactgctctgtacctggccacttctggtcagccccagtatgtgctttgggccagtaacatttcttctccgggatgcgagaaagtacccatcaatacatcctgcaaccctaccgcgcacttggtaaattcttcttgtccagggctgatgtgtgtgtttcagggctatagttccaaaggactgattcaaaggagcgtgttcaatctgcagatctatggagtgttgggactcttttggacactaaattgggtcttagcactgggacagtgcgtcctggctggagcattcgccagtttctattgggcctttcataagcctcaggatatacctacgttccctctcatctccgcatttatcaggacactccgctatcacacgggatcactagcttttggtgccctgatcctgacactggttcagatcgccagagttatactagagtacattgaccacaaattgcgcggtgtgcagaacccagtggcccgatgtattatgtgttgtttcaaatgttgcctatggtgtctggagaagttcattaaattcctgaatcgcaacgcctacattatgatagccatctacggtaaaaacttttgtgtttctgcaaaaaatgcatttatgcttctaatgagaaacatcgtgcgcgtcgtagtgctagacaaggtcacagacctgcttctcttcttcggcaagcttctggtggtgggcggagtcggggtgctcagttttttctttttcagcggcagaatcccaggtcttggcaaggatttcaaaagcccgcacctgaattattattggctgcctattatgacttctatacttggcgcttacgtgatcgcctctgggttcttctcagtgttcggcatgtgcgttgacactttgttcttatgcttcttagaagatctggagaggaacaacggttctctggacagaccttactatatgtctaagtcgttgctgaagatccttggcaagaagaacgaagcaccgcctgacaacaagaagaggaagaagtag

SEQ ID NO: 70447 - DNA, 1905 bp, Artificial Sequence
  derived and/or modified sequence
atgggagaaaataaagacaaaccatacctgttatattttaacatcttctcttgcattctaagcagcaatatcatctccgtggctgaaaatggacttcagtgtcccacacctcaggtttgcgtgagcagttgtcccgaggatccctggactgtgggcaagaacgagttttctcagacagtgggggaagtgttttatacaaaaaacaggaacttttgtctgcccggagtaccctggaacatgaccgttattacgtccctccagcaggaactgtgccccagttttctgttgccctccgctcccgctctaggcaggtgttttccgtggacgaacattacgccgcctgctctccccggaatcaccaacgacaccacaattcaacagggaatctctggcttgatcgacagcctcaacgccagagacatttctgtaaaaattttcgaggacttcgctcagtcctggtactggattctggttgcgttaggagtagctcttgtgttatccctgctgttcattctgcttttacggctcgtagcaggacctttggtgctcgtgctcattctcggggtactgggcgtgcttgcatacgggatctattattgctgggaagagtaccgcgttctgcgagacaagggcgctagcatttctcaacttggatttactactaatctctcggcctaccagagcgtacaggagacctggctggcagccctgatcgtactggctgtcttagaagccattctgttattggttttaatctttcttcgccagcggatacgaattgcgattgccctgctgaaagaagcaagtaaggctgtgggccaaatgatgagcaccatgttctacccgctagtcacattcgtcctgctcctgatctgtatcgcttactgggctatgacggccttgtacctggcaacatccgggcaaccccagtatgtgctgtgggcatctaacatctcttcccccggatgtgaaaaagtccccataaatacttcatgcaaccctactgcgcatttggtgaactcaagctgccctggcctcatgtgtgttttccagggatacagctctaaagggttgattcaacgctccgttttcaatctgcagatttatggagtgctaggattgttctggacactaaactgggttctagctcttggccagtgtgtcctggccggtgccttcgcgagcttctactgggcgtttcacaagccccaggacatcccaacattcccacttatcagcgcgtttatacggactctgcggtaccacactgggagcctggcatttggggctttaattcttaccctcgtacagattgcacgggtgattctggaatacatagatcacaagctgagaggggtccaaaatcccgtcgcccgatgtatcatgtgttgcttcaaatgctgcctttggtgcttggaaaaatttataaaatttctgaataggaacgcttatattatgatagcaatctatggcaaaaatttttgtgtcagcgcgaaaaacgccttcatgctgctgatgcgaaatattgtgagggtggtcgtgttggacaaagttactgacttgctcctcttctttgggaaacttctggtcgtcgggggtgttggggttctaagctttttttttttctccggcagaattccagggcttggtaaggattttaaaagtccccatctaaactactactggctcccgatcatgacatcgatcctaggggcttacgttatcgccagtggcttctttagcgtttttgggatgtgtgtcgacactctgttcctctgtttcctcgaggatctggagcgcaacaatgggagcctggatcgaccttactatatgtctaagagtttactcaagatcctgggcaaaaaaaatgaggccccaccggacaacaaaaagagaaaaaagtag

SEQ ID NO: 70448 - DNA, 1905 bp, Artificial Sequence
  derived and/or modified sequence
atgggtgagaataaagataaaccctatctattatactttaacatcttctcttgtatcctaagcagcaacatcatctctgtcgcggaaaacggtttgcagtgccccacccctcaagtttgtgttagcagctgcccagaagatccatggactgtaggaaagaacgaattctctcagacggtgggagaggttttctacacaaaaaatcgaaacttctgcttaccaggcgtgccatggaacatgaccgtgatcaccagtctgcaacaggagctctgcccgtcctttttattgccctctgctcccgctctgggaaggtgttttccatggacgaatataactccccctgccctaccagggattactaacgataccaccatccagcagggcatctctggtctgatcgactctcttaacgcaagggacattagtgtgaagatattcgaggacttcgcccagagttggtactggatcctggtggcactcggcgtggccttagtactgtccctcctcttcattcttctccttcggctagtcgctggtccacttgtccttgtgctgatcttgggagtcttgggtgtcttggcttacggaatctactattgctgggaggagtacagggtgctgcgagacaaaggggcttcaatttcccagttaggttttactacaaatctgtcagcttaccagtcggtacaggagacatggctggccgctctcatcgtgttagctgtcttggaggctatcctcctcctggtgctgatcttccttagacagagaattcgaatcgccatcgctcttctgaaggaggccagtaaagccgtagggcaaatgatgtccaccatgttctacccactggtgacatttgtgctactcttgatatgcattgcgtattgggcgatgacggccttgtatttagctactagtggacagccccagtacgtgttgtgggcttcgaatatcagcagtcctggatgcgagaaggtacctatcaataccagctgcaacccaactgcccacctcgtgaattcctcctgtcccggacttatgtgcgtctttcaaggctatagctcaaaaggtctgattcagaggtctgtattcaaccttcaaatttatggcgtgctggggctgttttggactctgaattgggtgctggccctcggacaatgtgtactcgcaggggcttttgcctcattctattgggccttccacaagccgcaagatattcctacctttccgttgatttcggccttcatcagaaccctgaggtatcatactggaagtcttgcctttggagcactgatattaactctagtgcaaatcgctcgagtgattctcgagtacattgaccacaaactgagaggcgtacagaatcctgttgctagatgcataatgtgttgtttcaagtgctgcctctggtgcttggaaaagtttatcaaattcctaaatcggaatgcctacatcatgatagctatctacggaaaaaacttttgcgtgagcgcaaagaatgctttcatgctgctgatgagaaatatagttagggtggtcgtgctcgacaaagtgaccgatttactcctcttctttggtaaacttttagtggtgggaggcgtgggcgtgctgtctttcttttttttttctggcaggattcctggcctaggaaaagactttaagagcccccatctaaactactattggctgccgattatgacatccattcttggagcctacgtgattgctagtgggttttttagcgtgttcgggatgtgcgtggacaccctgtttctctgttttctcgaggatcttgagcgaaacaatgggtccttggacaggccctattatatgtccaagagcttactcaagatcctaggcaaaaaaaatgaggcgccacccgacaacaaaaaacgaaagaagtag

SEQ ID NO: 70449 - protein, 103 aa, Artificial Sequence
  derived and/or modified sequence
MRIMLLFTAILAFSLAQSFGAVCKEPQEEVVPGGGRSKRDPDLYQLLQRLFKSHSSLEGLLKALSQASTDPKESTSPEKHSPTDVNQENVPSFGILKYPPRAE

SEQ ID NO: 70450 - DNA, 312 bp, Artificial Sequence
  derived and/or modified sequence
atgagaatcatgctgctgttcaccgccatcctggccttcagcctggcccagagcttcggcgccgtgtgcaaggagccccaggaggaggtggtgcccggcggcggcagaagcaagagagaccccgacctgtaccagctgctgcagagactgttcaagagccacagcagcctggagggcctgctgaaggccctgagccaggccagcaccgaccccaaggagagcaccagccccgagaagcacagccccaccgacgtgaaccaggagaacgtgcccagcttcggcatcctgaagtacccccccagagccgagtag

SEQ ID NO: 70451 - DNA, 312 bp, Artificial Sequence
  derived and/or modified sequence
atgaggataatgttgctgttcacagcaattttggcgttctccctcgcacagagcttcggtgcagtatgtaaggaaccacaagaggaagttgtgcctggggggggtaggtcaaaaagggatcctgacctgtatcagctgctgcagcggctttttaagagtcactcatctctagaggggttgctgaaggctttaagccaagcatccaccgaccccaaggagtctacatctcccgaaaaacacagccctactgatgtgaatcaagaaaacgtgccatcctttggaattctcaagtacccgcctagggcagaatag

SEQ ID NO: 70452 - DNA, 312 bp, Artificial Sequence
  derived and/or modified sequence
atgaggatcatgctgctcttcaccgccatcctggccttcagcctggcccagagctttggagctgtgtgcaaggagccccaggaggaggtggtgcctgggggcggccgcagcaagagggaccctgacctgtaccagctgctgcagaggctcttcaagagccacagcagcctggagggcctgctgaaggccctgagccaggccagcacagaccccaaggagagcaccagccctgagaagcacagccccacagatgtgaaccaggagaatgtgcccagctttggcatcctgaagtacccacccagggctgagtag

SEQ ID NO: 70453 - DNA, 312 bp, Artificial Sequence
  derived and/or modified sequence
atgcggatcatgctgctgttcaccgccatcctggccttcagcctggctcaatcctttggcgccgtttgcaaagaacctcaggaagaagtcgtccccggcggcggtagatccaaaagggaccccgatctgtaccagttgcttcagagactcttcaaatcccatagtagccttgagggactgctgaaagccctgagccaggcgagcaccgatccaaaagaatccactagtcctgaaaagcacagtcccaccgacgtgaatcaagagaatgttcctagtttcggtatcctgaagtatcccccccgagcggaatag

SEQ ID NO: 70454 - DNA, 312 bp, Artificial Sequence
  derived and/or modified sequence
atgcgtatcatgctgctatttacggccattctcgcattcagccttgcccagtctttcggtgccgtgtgcaaagagccccaagaggaggttgtgcctgggggtggaagatctaaaagagatcccgatttataccagctcctacagaggctattcaagtctcattccagccttgagggcttattaaaagcactgtctcaggcaagtacggatcctaaggaaagcaccagtccagagaagcacagtccaactgatgtcaaccaggagaacgtcccttcttttggaatactgaagtatccacccagagccgaatag

SEQ ID NO: 70455 - DNA, 312 bp, Artificial Sequence
  derived and/or modified sequence
atgcggatcatgctactattcacggccatcttggcattctcactggcacaatctttcggcgccgtgtgtaaagaacctcaagaggaggtggtacctggcggcggacgttccaagagagaccccgacctttatcagctcctacaaaggctctttaagtcccatagctcgctagaaggcctactcaaagcattgtcacaggcttctaccgaccctaaggaatcaacctctcccgagaagcattctccaaccgacgtcaatcaagaaaacgtgccctcgtttggaatattgaagtaccctccgagagctgaatag

SEQ ID NO: 70456 - DNA, 312 bp, Artificial Sequence
  derived and/or modified sequence
atgcggatcatgctactattcacggccatcttggcattctcactggcacaatctttcggcgccgtgtgtaaagaacctcaagaggaggtggtacctggcggcggacgttccaagagagaccccgacctttatcagctcctacaaaggctctttaagtcccatagctcgctagaaggcctactcaaagcattgtcacaggcttctaccgaccctaaggaatcaacctctcccgagaagcattctccaaccgacgtcaatcaagaaaacgtgccctcgtttggaatattgaagtaccctccgcgcgcggagtag

SEQ ID NO: 70457 - DNA, 731 bp, Artificial Sequence
  derived and/or modified sequence
agatcccctccactcggtttctctctttgcaggagcaccggcagcaccagtgtgtgaggggagcaggcagcggtcctagccagttccttgatcctgccagaccacccagcccccggcacagagctgctccacaggcaccatgaggatcatgctgctattcacagccatcctggccttcagcctagctcagagctttggggctgtctgtaaggagccacaggaggaggtggttcctggcgggggccgcagcaagagggatccagatctctaccagctgctccagagactcttcaaaagccactcatctctggagggattgctcaaagccctgagccaggctagcacagatcctaaggaatcaacatctcccgagaaacactctcctacggatgtgaatcaagagaacgtccccagctttggcatcctcaagtatcccccgagagcagaataggtactccacttccggactcctggactgcattaggaagacctctttccctgtcccaatccccaggtgcgcacgctcctgttaccctttctcttccctgttcttgtaacattcttgtgctttgactccttctccatcttttctacctgaccctggtgtggaaactgcatagtgaatatccccaaccccaatgggcattgactgtagaataccctagagttcctgtagtgtcctacattaaaaatataatgtctctctctattcctcaacaataaaggatttt

SEQ ID NO: 70458 - protein, 691 aa, Artificial Sequence
  derived and/or modified sequence
MGQGWATAGLPSLLFLLLCYGHPLLVPSQEASQQVTVTHGTSSQATTSSQTTTHQATAHQTSAQSPNLVTDEAEASKFVEEYDRTSQVVWNEYAEANWNYNTNITTETSKILLQKNMQIANHTLKYGTQARKFDVNQLQNTTIKRIIKKVQDLERAALPAQELEEYNKILLDMETTYSVATVCHPNGSCLQLEPDLTNVMATSRKYEDLLWAWEGWRDKAGRAILQFYPKYVELINQAARLNGYVDAGDSWRSMYETPSLEQDLERLFQELQPLYLNLHAYVRRALHRHYGAQHINLEGPIPAHLLGNMWAQTWSNIYDLVVPFPSAPSMDTTEAMLKQGWTPRRMFKEADDFFTSLGLLPVPPEFWNKSMLEKPTDGREVVCHASAWDFYNGKDFRIKQCTTVNLEDLVVAHHEMGHIQYFMQYKDLPVALREGANPGFHEAIGDVLALSVSTPKHLHSLNLLSSEGGSDEHDINFLMKMALDKIAFIPFSYLVDQWRWRVFDGSITKENYNQEWWSLRLKYQGLCPPVPRTQGDFDPGAKFHIPSSVPYIRTAMKLGFSRPWPEAMQLITGQPNMSASAMLSYFKPLLDWLRTENELHGEKLGWPQYNWTPNSARSEGPLPDSGRVSFLGLDLDAQQARVGQWLLLFLGIALLVATLGLSQRLFSIRHRSLHRHSHGPQFGSEVELRHS

SEQ ID NO: 70459 - protein, 511 aa, Artificial Sequence
  derived and/or modified sequence
MQIANHTLKYGTQARKFDVNQLQNTTIKRIIKKVQDLERAALPAQELEEYNKILLDMETTYSVATVCHPNGSCLQLEPDLTNVMATSRKYEDLLWAWEGWRDKAGRAILQFYPKYVELINQAARLNGNMWAQTWSNIYDLVVPFPSAPSMDTTEAMLKQGWTPRRMFKEADDFFTSLGLLPVPPEFWNKSMLEKPTDGREVVCHASAWDFYNGKDFRIKQCTTVNLEDLVVAHHEMGHIQYFMQYKDLPVALREGANPGFHEAIGDVLALSVSTPKHLHSLNLLSSEGGSDEHDINFLMKMALDKIAFIPFSYLVDQWRWRVFDGSITKENYNQEWWSLRLKYQGLCPPVPRTQGDFDPGAKFHIPSSVPYIRTAMKLGFSRPWPEAMQLITGQPNMSASAMLSYFKPLLDWLRTENELHGEKLGWPQYNWTPNSARSEGPLPDSGRVSFLGLDLDAQQARVGQWLLLFLGIALLVATLGLSQRLFSIRHRSLHRHSHGPQFGSEVELRHS

SEQ ID NO: 70460 - DNA, 2076 bp, Artificial Sequence
  derived and/or modified sequence
atgggacagggttgggctacagcaggtctaccttccctgctattcttgctgctttgctacgggcaccccttgctcgtcccaagccaggaagcctctcagcaagtcaccgtcacccatggaactagcagtcaggctacaacgtcctctcagaccaccacccaccaggccaccgctcatcagacatctgcacagagccctaacctcgtgactgatgaggcagaggcaagcaagttcgtggaagagtacgaccgaacatcccaggttgtgtggaacgagtacgccgaggctaactggaactacaacacaaatatcacgaccgaaacgtccaagattcttttgcaaaaaaatatgcagatcgcaaatcatacactaaaatacggtacacaggcgcggaagtttgatgtcaaccaactgcaaaatacaactatcaaaaggattatcaaaaaggtgcaagatttggaaagagcagcgctcccagctcaggaactggaggagtacaacaagatcttgcttgatatggaaaccacgtacagtgtggctactgtgtgtcatcccaatggcagttgtttgcagctcgaacctgacctgacgaacgttatggccacatcccgaaagtatgaggatctgctgtgggcatgggaagggtggagagataaagccggaagggctatacttcagttctacccaaaatatgtcgagctgatcaatcaggccgcacggctcaacggatatgtagatgcgggtgattcttggcgaagtatgtatgaaactccctcgctggaacaagatctcgagaggttgttccaggagctgcagcctctgtatctgaacctgcacgcgtatgtcaggagggccctccaccgccactatggcgcccagcatatcaacctcgaaggacccatccccgcgcacctgctgggcaacatgtgggcacagacctggtccaatatttacgacctggtggtgccattcccttcggcccctagcatggacacaacggaggccatgctaaaacagggctggaccccgagacggatgttcaaagaagctgatgatttcttcactagcctgggattacttccagtgcctcccgaattctggaacaagtctatgctggagaaaccaaccgatggtcgggaggtcgtctgccacgcaagtgcctgggacttttataatgggaaagacttcaggattaagcagtgtaccaccgttaatctggaggatctcgtggttgcccaccatgagatgggacatatccagtactttatgcagtataaagacttacccgtggcactccgagaaggggcaaatccaggctttcacgaggcaatcggagatgtcctggcactaagtgtctccactcctaagcacttgcacagcctgaacctgctgagtagcgaaggggggagcgatgagcacgatatcaactttctgatgaaaatggcgctggacaagattgcctttataccgttcagctacctggtagaccagtggaggtggcgcgttttcgacggttcgataaccaaggagaattataatcaggaatggtggagtctgcggttaaagtatcagggtctgtgtccaccagtgcctcgcacacagggtgacttcgaccctggcgcgaaattccacatccccagttctgtgccttatatacgcactgccatgaaactgggattttccagaccttggcctgaagcgatgcagcttattaccggccagccaaacatgtcagcgtcagcaatgctgagctattttaaacctttgctggattggctgaggaccgagaacgaattgcacggcgagaaattaggatggccccagtacaactggaccccaaacagcgctagaagtgaagggcccctaccagattccggccgcgtctctttcctcgggctggacctggatgctcaacaagcgagagttggacagtggttactgcttttcctgggcatcgcgctgttagtggccactcttggcctgtcacaaaggctgttcagcatacgtcaccggagccttcacagacactcacatggtccccagttcggatccgaagtggagcttaggcacagctag

SEQ ID NO: 70461 - DNA, 1536 bp, Artificial Sequence
  derived and/or modified sequence
atgcagattgcaaaccatacactgaaatatggtactcaggctcgcaaatttgatgtaaaccagttacagaacaccacaattaagcggattattaagaaagtgcaggacctggaacgggccgccctgccggcgcaggaactggaagagtataataagattctgctggatatggagaccacttacagtgtggcaacagtttgccaccccaatggtagttgtttgcagctggagccggacctcaccaacgtcatggctacgtcccgtaaatatgaagatctgctgtgggcttgggaaggctggagagataaggcggggagagccattttacagttttacccaaaatacgtggaactgattaatcaggccgctcggctgaacggaaatatgtgggcacagacttggtccaatatttatgatcttgtggttcccttcccttccgctccctcaatggacaccactgaagccatgctgaaacaggggtggacccctagaagaatgtttaaggaagccgatgacttctttacttccttggggctgctcccggtgcctcctgaattttggaacaagagtatgctggaaaagcccactgacggaagagaggtcgtgtgccatgctagcgcctgggacttttacaatgggaaggattttcggatcaagcagtgcaccacagtgaacttagaggatctggtggtggcccaccacgagatgggccacatacagtactttatgcagtacaaggacttaccagtcgcactgagagagggcgcaaatcccgggtttcatgaggctattggggatgtcctggcactctctgtgtccactcccaagcaccttcactccctcaacctcctgtcttccgagggcggctcagatgagcatgatatcaatttccttatgaagatggcgttagacaagatcgcattcattcccttctcctacctggtggaccagtggagatggcgcgtctttgatggcagcatcaccaaggagaactacaaccaggagtggtggtcactacgcctaaaataccaagggctgtgcccaccggtgccacgtacacaaggggacttcgatccaggggcgaagtttcacatccccagttcagtgccatacattaggacagcaatgaagttaggcttcagcaggccttggccggaagccatgcagctgatcacgggtcaaccaaatatgtcggcatccgcaatgctgtcttatttcaagcccctgcttgactggctcaggactgaaaatgaactccatggggagaagctggggtggccccagtataattggactcccaattcagctaggagtgaaggaccgctacccgatagtgggagagttagttttctcgggcttgacctggacgcacaacaggcaagggtggggcagtggctccttcttttcttaggcatcgctctgctcgtcgcaacactaggcctctctcagaggcttttttccattcgccaccgatccctgcaccggcacagccacgggcctcagtttgggtcagaggtggaactgcgccatagctag

SEQ ID NO: 70462 - DNA, 2076 bp, Artificial Sequence
  derived and/or modified sequence
atgggccagggctgggccacagctggcctgcccagcctgctcttcctgctgctgtgctacggccaccccctgctggtgcccagccaggaggccagccagcaggtgacagtgacccacggcaccagcagccaggccaccaccagcagccagaccaccacccaccaggccacagcccaccagaccagcgcccagagccccaacctggtgacagatgaagctgaggccagcaagtttgtggaggagtatgacaggaccagccaggtggtgtggaatgaatatgcagaggccaactggaactacaacaccaacatcaccacagagaccagcaagatcctgctgcagaagaacatgcagatcgccaaccacaccctgaagtatggcacccaggccaggaagtttgatgtgaaccagctgcagaacaccaccatcaagaggatcatcaagaaggtgcaggacctggagcgggccgccctgcctgcccaggagctggaggagtacaacaagatcctgctggacatggagaccacctacagcgtggccaccgtgtgccaccccaacggcagctgcctgcagctggagccagacctgaccaacgtgatggccaccagcaggaaatatgaggacctgctgtgggcctgggagggctggagggacaaggccggccgggccatcctgcagttctaccccaagtatgtggagctgatcaaccaggccgcccggctgaatggctacgtggatgctggggacagctggaggtccatgtatgagacccccagcctggagcaggacctggagcggctcttccaggagctgcagcccctgtacctgaacctgcacgcctacgtgagaagagccctgcaccgccactacggggcccagcacatcaacctggagggccccatcccagcccacctgctgggcaacatgtgggcccagacctggagcaacatctatgacctggtggtgcccttccccagcgcccccagcatggacaccacagaggccatgctgaagcagggctggacccccaggaggatgttcaaggaggctgatgacttcttcaccagcctgggcctgctgcctgtgcccccagagttctggaacaagtccatgctggagaagcccacagatggccgggaggtggtgtgccacgccagcgcctgggacttctacaacgggaaggacttccgcatcaagcagtgcaccaccgtgaacctggaggacctggtggtggcccaccacgagatgggccacatccagtacttcatgcagtacaaggacctgcctgtggccctgcgggagggcgccaaccctggcttccacgaggccatcggagatgtgctggccctgtctgtgtccacccccaagcacctgcacagcctgaacctgctgagcagcgagggcggcagtgatgaacatgacatcaacttcctgatgaagatggccctggacaagatcgccttcatccccttctcctacctggtggaccagtggcgctggagggtgtttgatggcagcatcaccaaggagaactacaaccaggagtggtggagcctgcggctgaagtaccagggcctgtgcccccctgtgcccaggacccagggcgactttgatcctggggccaagttccacatccccagctctgtgccctacatcagaacagccatgaagctgggcttcagccggccctggccagaggccatgcagctgatcaccggccagcccaacatgtctgccagcgccatgctgagctacttcaagcccctgctggactggctgaggacagaaaatgagctgcacggggagaagctgggctggccccagtacaactggacccccaacagcgcccggtctgagggccccctgcctgattctggccgggtgtccttcctgggcctggacctggatgcccagcaggcccgggtgggccagtggctgctgctcttcctgggcatcgccctgctggtggccaccctgggcctgagccagaggctcttcagcatccgccacaggagcctgcaccgccacagccacggcccccagtttggcagcgaggtggagctgcggcacagctag

SEQ ID NO: 70463 - DNA, 1536 bp, Artificial Sequence
  derived and/or modified sequence
atgcagatcgccaaccacaccctgaagtatggcacccaggccaggaagtttgatgtgaaccagctgcagaacaccaccatcaagaggatcatcaagaaggtgcaggacctggagcgggccgccctgcctgcccaggagctggaggagtacaacaagatcctgctggacatggagaccacctacagcgtggccaccgtgtgccaccccaacggcagctgcctgcagctggagccagacctgaccaacgtgatggccaccagcaggaaatatgaggacctgctgtgggcctgggagggctggagggacaaggccggccgggccatcctgcagttctaccccaagtatgtggagctgatcaaccaggccgcccggctgaatggaaacatgtgggcccagacctggagcaacatctatgacctggtggtgcccttccccagcgcccccagcatggacaccacagaggccatgctgaagcagggctggacccccaggaggatgttcaaggaggctgatgacttcttcaccagcctgggcctgctgcctgtgcccccagagttctggaacaagtccatgctggagaagcccacagatggccgggaggtggtgtgccacgccagcgcctgggacttctacaacgggaaggacttccgcatcaagcagtgcaccaccgtgaacctggaggacctggtggtggcccaccacgagatgggccacatccagtacttcatgcagtacaaggacctgcctgtggccctgcgggagggcgccaaccctggcttccacgaggccatcggagatgtgctggccctgtctgtgtccacccccaagcacctgcacagcctgaacctgctgagcagcgagggcggcagtgatgaacatgacatcaacttcctgatgaagatggccctggacaagatcgccttcatccccttctcctacctggtggaccagtggcgctggagggtgtttgatggcagcatcaccaaggagaactacaaccaggagtggtggagcctgcggctgaagtaccagggcctgtgcccccctgtgcccaggacccagggcgactttgatcctggggccaagttccacatccccagctctgtgccctacatcagaacagccatgaagctgggcttcagccggccctggccagaggccatgcagctgatcaccggccagcccaacatgtctgccagcgccatgctgagctacttcaagcccctgctggactggctgaggacagaaaatgagctgcacggggagaagctgggctggccccagtacaactggacccccaacagcgcccggtctgagggccccctgcctgattctggccgggtgtccttcctgggcctggacctggatgcccagcaggcccgggtgggccagtggctgctgctcttcctgggcatcgccctgctggtggccaccctgggcctgagccagaggctcttcagcatccgccacaggagcctgcaccgccacagccacggcccccagtttggcagcgaggtggagctgcggcacagctag

SEQ ID NO: 70464 - DNA, 2076 bp, Artificial Sequence
  derived and/or modified sequence
atgggccagggctgggccaccgccggcctgcccagcctgctgttcctcctgctctgctacggccaccctttgctggtgccctcccaagaagcttctcagcaggttaccgtgactcatgggactagtagccaggccactactagcagccagaccacgactcaccaggccacagcacatcaaacaagcgctcagtcacctaatttggtgacagacgaggcagaggctagtaaatttgtggaggaatacgacagaacaagtcaggtggtatggaatgagtatgccgaggcaaactggaattacaacacgaatatcaccaccgagaccagtaagattctgttacagaaaaacatgcagattgctaatcacaccttaaagtacggcacccaggctcgcaagttcgatgttaatcagcttcaaaatacgacgatcaaaagaatcattaagaaagttcaagacctcgagagggccgccctgccggcacaggagctggaggagtacaataaaattctgcttgacatggaaacaacttactccgtggcaacagtctgtcaccccaatggtagttgtttgcagctcgaacctgaccttacaaatgtcatggccactagcaggaaatacgaggatttgctctgggcctgggagggctggagggataaagcgggacgggccattctgcagttttacccaaaatacgtcgaactgataaaccaagctgctcggttaaatggatacgtggatgccggagacagctggcgatcaatgtacgagaccccttcacttgaacaagatctggaacgcctgttccaggaactacagcccctgtacctcaatttgcatgcgtacgtgcggagagcacttcatagacattacggggcccagcatatcaatctggaaggccctatacctgctcacctgttagggaatatgtgggctcagacgtggagcaatatctacgacttggtagtgccatttccatcagctccatccatggacactacagaggccatgctgaaacagggatggacaccccggagaatgtttaaagaagctgatgactttttcacctctctcggtctgctaccagtcccccccgagttttggaacaagtctatgctggagaagccgactgatggccgggaggttgtttgccacgcctcggcttgggatttttataacggcaaagatttcagaataaagcagtgcaccacagttaatctggaggacctagtggttgcgcaccacgagatgggacatatccagtactttatgcaatacaaggacctgcccgtggctttacgagagggagccaatcctgggttccacgaagcaatcggtgatgtgctcgccctgagcgtttcgacacccaagcacttacatagtttaaatctgttatcatccgagggcggctctgacgagcatgacatcaactttctgatgaagatggccctggataaaatcgcattcattcccttcagctatctggtcgaccagtggcgctggcgagtgttcgatggatccataactaaggaaaactataaccaggagtggtggagcctgagactcaaataccaggggttatgccctcctgtgcccagaacacagggcgactttgacccaggagctaagtttcatattccctcctcagtaccttacatacgcaccgccatgaagttgggcttttccaggccgtggcccgaggccatgcagctcataaccggacagccaaacatgagcgcctctgccatgctgagctactttaaaccactgctggactggctgcgaaccgagaacgagctgcacggcgagaaactcggctggccgcagtacaattggacacccaattcggcacggtccgagggccctctgcctgactctggccgagtgtctttcttgggcctggacctcgacgctcagcaagccagagtgggccagtggcttctgctgtttttaggcatagccctactggttgccacactaggcctctcccaacggctgtttagtatcagacaccgctcactccatcgccactcccacgggccgcagtttggatccgaggtggagttaaggcactcatag

SEQ ID NO: 70465 - DNA, 1536 bp, Artificial Sequence
  derived and/or modified sequence
atgcagatcgccaaccacaccctgaagtacggcacccaggcccggaaattcgatgttaatcagctgcagaataccactattaagaggatcattaagaaagtccaggatctggagcgggctgcccttcccgcccaggaattggaagagtacaataaaatcctcttggatatggaaaccacctattcggtagccactgtctgtcatccgaacggttcctgccttcagctcgagccggacttgacaaacgttatggctacctccagaaagtatgaagatcttttatgggcctgggagggttggagggataaagccggtcgcgccattctgcagttctacccaaaatatgttgagctgattaatcaggccgctcggttaaatggcaacatgtgggcacagacatggtctaatatttatgatctcgtcgtgccgtttccatctgcacctagcatggataccacggaagccatgctaaaacagggatggacccccagacggatgttcaaggaagctgacgatttctttactagcttagggttgcttccggtgcccccagagttttggaacaagtctatgctggagaagcccacagatggtagggaagtcgtgtgtcatgccagcgcgtgggatttctacaatggcaaagatttcaggataaagcagtgtacgacagtgaatctggaagatctggtggtagctcatcatgagatgggccatatacagtacttcatgcagtacaaggatttgcctgttgcccttagagagggcgcaaaccctggcttccacgaagctatcggagacgtgctggcactttccgtgtctactcctaagcacctccacagcctcaacctgctgagctcagaggggggttccgatgagcacgacataaatttcctgatgaagatggcacttgacaagattgctttcattccattcagttatctcgttgatcagtggaggtggagggtgttcgatggaagcattaccaaggagaactacaatcaggaatggtggtcactccgcttgaagtatcagggattgtgccctcccgtgccccgcacacagggcgactttgacccaggggctaagttccatattccctcgtccgtcccatatatcaggacggcaatgaagctgggcttttctcgtccatggcctgaggcaatgcagttaatcacaggccagccaaatatgagtgcttccgccatgctgagttattttaagcctctcctggattggctgagaaccgagaacgaactccacggcgagaagctcggctggcctcagtataactggacgccgaactccgcccggagcgagggaccactgccggattccgggcgggtctcattcctgggattagatctggacgctcagcaggcccgggtaggtcaatggctcctgcttttcctcgggatcgccttattggtggctacattgggtttgtcacaacggctgttctcgatccggcaccgtagccttcacaggcatagtcacggtcctcagttcgggagcgaggtagaactgcggcacagctag

SEQ ID NO: 70466 - DNA, 3141 bp, Artificial Sequence
  derived and/or modified sequence
gctcttattggccaggggacggtagctgcaggactctgctctcctgcggccatgggccagggttgggctactgcaggacttcccagcctcctcttcctgctgctctgctacgggcaccctctgctggtccccagccaggaggcatcccaacaggtgacagtcacccatgggacaagcagccaggcaacaaccagcagccagacaaccacccaccaggcgacggcccaccagacatcagcccagagcccaaacctggtgactgatgaggctgaggccagcaagtttgtggaggaatatgaccggacatcccaggtggtgtggaacgagtatgccgaggccaactggaactacaacaccaacatcaccacagagaccagcaagattctgctgcagaagaacatgcaaatagccaaccacaccctgaagtacggcacccaggccaggaagtttgatgtgaaccagttgcagaacaccactatcaagcggatcataaagaaggttcaggacctagaacgggcagcactgcctgcccaggagctggaggagtacaacaagatcctgttggatatggaaaccacctacagcgtggccactgtgtgccacccgaatggcagctgcctgcagctcgagccagatctgacgaatgtgatggccacgtcccggaaatatgaagacctgttatgggcatgggagggctggcgagacaaggcggggagagccatcctccagttttacccgaaatacgtggaactcatcaaccaggctgcccggctcaatggctatgtagatgcaggggactcgtggaggtctatgtacgagacaccatccctggagcaagacctggagcggctcttccaggagctgcagccactctacctcaacctgcatgcctacgtgcgccgggccctgcaccgtcactacggggcccagcacatcaacctggaggggcccattcctgctcacctgctggggaacatgtgggcgcagacctggtccaacatctatgacttggtggtgcccttcccttcagccccctcgatggacaccacagaggctatgctaaagcagggctggacgcccaggaggatgtttaaggaggctgatgatttcttcacctccctggggctgctgcccgtgcctcctgagttctggaacaagtcgatgctggagaagccaaccgacgggcgggaggtggtctgccacgcctcggcctgggacttctacaacggcaaggacttccggatcaagcagtgcaccaccgtgaacttggaggacctggtggtggcccaccacgaaatgggccacatccagtatttcatgcagtacaaagacttacctgtggccttgagggagggtgccaaccccggcttccatgaggccattggggacgtgctagccctctcagtgtctacgcccaagcacctgcacagtctcaacctgctgagcagtgagggtggcagcgacgagcatgacatcaactttctgatgaagatggcccttgacaagatcgcctttatccccttcagctacctcgtcgatcagtggcgctggagggtatttgatggaagcatcaccaaggagaactataaccaggagtggtggagcctcaggctgaagtaccagggcctctgccccccagtgcccaggactcaaggtgactttgacccaggggccaagttccacattccttctagcgtgccttacatcaggaccgccatgaagctgggcttcagtaggccgtggccggaagccatgcagctgatcacgggccagcccaacatgagcgcctcggccatgttgagctacttcaagccgctgctggactggctccgcacggagaacgagctgcatggggagaagctgggctggccgcagtacaactggacgccgaactccgctcgctcagaagggcccctcccagacagcggccgcgtcagcttcctgggcctggacctggatgcgcagcaggcccgcgtgggccagtggctgctgctcttcctgggcatcgccctgctggtagccaccctgggcctcagccagcggctcttcagcatccgccaccgcagcctccaccggcactcccacgggccccagttcggctccgaggtggagctgagacactcctgaggtgacccggctgggtcggccctgcccaagggcctcccaccagagactgggatgggaacactggtgggcagctgaggacacaccccacaccccagcccaccctgctcctcctgccctgtccctgtccccctcccctcccagtcctccagaccaccagccgccccagccccttctcccagcacacggctgcctgacactgagccccacctctccaagtctctctgtgaatacaattaaaggtcctgccctccccatctgagtctgtgtccctcacagggaagccagggacagggacaggctgctttcctgcctcctggcagtcaagtgggtcccgttactaggtttgttcctccatcctccttcaggagccggggaggatccccagagctctgccccagcacctcctggcgctggcgcctgtcttccctccagcccaggcagcccgccactgtcctgccaccgcaggcagcccctgtctggcccaagcactgacccacgcggactctgggaagcagacatcctgggctgctggcctcacatttccactggcagtggagcctttccctgctccacaaatggccaggtccccccaggggaaggcttccggctgttatcggctgcctcagggggcgagtaccttggagggcctgcttcaaggagggtgccccctggagggcacacaccagcctagtgcttaccttggctcctgcctgtaccagctccatgactctgctcgggtgaacagccttggctctcagacagccattctaacactgccagtgcagaggggcctcagacgctggagtgtagcagtggctgcacctgcacagggattagctgccagcagccaccctgctggcgtcccagcacacacctcctcactccctgcattggagggagtgtcattttaagggacatttttatgacttttatgtgtatgtttatgtagaaatttggaaaatacagaaaactgtaaagaaaataaaagccctttatatcaacgtcaagagataa

SEQ ID NO: 70467 - DNA, 2076 bp, Artificial Sequence
  derived and/or modified sequence
atggggcagggctgggctacagctggacttcccagcctgctgttcctgctgctctgctacggacatcccttgctcgtgcctagtcaggaagcttcacagcaagtgactgtgacccacggtacgtcaagccaagctactacttctagccaaacaaccactcaccaggccacagcccaccaaacaagtgcgcagtctcctaacctggtcactgacgaggctgaggctagtaagttcgtcgaagagtatgatagaacctcacaggtggtgtggaatgaatatgccgaagcaaactggaactacaataccaatattaccacggagaccagtaagatcctacttcagaaaaacatgcagatcgccaaccatactctcaagtacggcacacaagcccgaaagtttgacgtgaatcagctccagaacacaacgatcaagagaatcatcaagaaagtacaggacctggaaagggcagcactccccgctcaagaacttgaggaatataacaagatcttgcttgatatggagacaacctatagtgtcgctaccgtgtgccatccaaatggaagctgtctacagctagagccagatctgactaacgtgatggccacctcacgcaagtacgaagacctcctctgggcctgggaaggctggcgcgacaaggctgggagggcaatactccagttctaccccaagtacgttgagctcatcaatcaggcagctcgactgaatggatatgtggacgctggagatagctggcgttccatgtacgagaccccatctctcgagcaggatctcgaacgcctctttcaagaactgcaacccctgtatctcaatctgcatgcctacgttcgcagggccttacaccgccactacggtgcccagcatattaacttggagggtccaatcccggctcatcttctagggaatatgtgggcccaaacttggtccaacatctacgacctggtggtgccttttcccagcgccccatctatggatactacggaagcaatgctgaagcagggatggactcccaggaggatgttcaaggaggccgatgatttcttcactagtctgggactcctgccagtcccaccagaattttggaacaaatccatgctagagaagcctaccgacggaagagaagtggtctgccatgcatccgcctgggatttttataacggcaaagacttcaggattaaacagtgcaccactgtcaatctggaggatctggtcgtggctcaccatgaaatgggtcacatacagtactttatgcaatataaagatctgcccgtcgccttgcgcgaaggggctaatcccggtttccacgaggccattggcgacgtgctggctctgagtgtaagcacaccaaagcacctccattcactgaatctactgagcagcgagggaggaagcgacgaacacgacattaactttctgatgaagatggctttggataagatagcttttattcccttctcctacctagtggaccaatggaggtggcgcgtattcgatggcagtattaccaaagagaattacaaccaggaatggtggagcctgcgactaaaatatcagggactctgtccccctgtgcctaggacccaaggggatttcgaccccggagctaagtttcacattccgagtagcgttccatatattaggaccgcgatgaagcttgggttctcacgtccctggccagaggcaatgcagctgattaccgggcaacccaatatgagcgctagtgcaatgcttagttacttcaaacccctgctagactggctgagaacagaaaacgagcttcatggggagaaactcgggtggcctcagtacaattggactcccaatagcgctagatccgaggggccactgccagattcaggacgagtctctttccttggcttggacctcgatgctcagcaggccagggtggggcagtggctgttgttatttctgggtatagccctgctcgtagccactttgggactctcccagcgactatttagtatccggcaccgcagtcttcataggcacagccacggaccacagttcggcagcgaggtggagctcaggcactcatag

SEQ ID NO: 70468 - DNA, 1536 bp, Artificial Sequence
  derived and/or modified sequence
atgcagattgcgaaccacacgctgaagtacggtacacaggccaggaagtttgatgtgaatcagctccagaatacaaccattaagagaatcatcaaaaaggtccaggatctggagagagccgctctgcccgctcaggaacttgaggagtacaacaaaatactgctggatatggaaaccacgtattcagtggccaccgtttgccaccctaacggtagctgtctgcagctcgagcctgacctgactaacgttatggccacaagcagaaaatacgaagaccttctctgggcttgggaaggctggcgggacaaggcgggtcgtgcgatcctccagttttatccaaaatatgtcgagctgatcaaccaggcggcacgactgaacggaaatatgtgggctcaaacttggagcaacatttacgatctcgtggttccgttccccagcgctcccagtatggataccaccgaggctatgctcaaacaaggctggactcctcggagaatgtttaaagaggccgatgattttttcaccagtctcgggctcctcccagtaccgccagagttttggaacaaaagtatgctggaaaagccaaccgacgggagagaagttgtgtgccatgcttccgcatgggacttctacaatggcaaagatttcagaataaaacagtgtacaactgtcaacctggaggaccttgtagttgcacaccatgaaatgggacacatacagtacttcatgcaatataaggaccttccagtggccctgcgcgagggcgctaacccaggattccatgaggctatcggcgatgtcctcgcccttagtgtctccaccccaaagcaccttcattctcttaacctactctcaagcgaggggggtagtgacgagcatgatataaactttctgatgaaaatggcattggataagatagcttttattccatttagttacctggtggaccagtggcggtggagggtctttgacggcagtatcaccaaagaaaactataaccaggaatggtggagtttacgtcttaagtatcagggactctgccctcccgtccccaggactcaaggtgacttcgatcctggtgccaaatttcatattccatccagcgtaccatatatccgcactgccatgaagctcggcttctcccgcccttggccggaggccatgcagcttatcacgggccagcccaacatgtcggcgagtgcaatgctgagctactttaagccccttctggactggctccgcactgagaatgaactgcacggcgagaagctaggatggccccaatataattggaccccaaattctgccaggagcgaggggccacttcctgattctgggcgagtatccttcttgggcctagatctcgatgctcagcaggctcgcgttggtcaatggctgctcctattcctgggtatcgctctgctagtggcgactctcggcctgagccagagactgttcagtattagacacagatccctccaccgccactcccatggccctcagttcgggtccgaggtggagctgcgccacagttag

SEQ ID NO: 70469 - DNA, 2076 bp, Artificial Sequence
  derived and/or modified sequence
atgggccagggctgggccaccgccggcctgcccagcctgctgttcctgctgctgtgctacggccaccccctgctggtgcccagccaggaggccagccagcaggtgaccgtgacccacggcaccagcagccaggccaccaccagcagccagaccaccacccaccaggccaccgcccaccagaccagcgcccagagccccaacctggtgaccgacgaggccgaggccagcaagttcgtggaggagtacgacagaaccagccaggtggtgtggaacgagtacgccgaggccaactggaactacaacaccaacatcaccaccgagaccagcaagatcctgctgcagaagaacatgcagatcgccaaccacaccctgaagtacggcacccaggccagaaagttcgacgtgaaccagctgcagaacaccaccatcaagagaatcatcaagaaggtgcaggacctggagagagccgccctgcccgcccaggagctggaggagtacaacaagatcctgctggacatggagaccacctacagcgtggccaccgtgtgccaccccaacggcagctgcctgcagctggagcccgacctgaccaacgtgatggccaccagcagaaagtacgaggacctgctgtgggcctgggagggctggagagacaaggccggcagagccatcctgcagttctaccccaagtacgtggagctgatcaaccaggccgccagactgaacggctacgtggacgccggcgacagctggagaagcatgtacgagacccccagcctggagcaggacctggagagactgttccaggagctgcagcccctgtacctgaacctgcacgcctacgtgagaagagccctgcacagacactacggcgcccagcacatcaacctggagggccccatccccgcccacctgctgggcaacatgtgggcccagacctggagcaacatctacgacctggtggtgcccttccccagcgcccccagcatggacaccaccgaggccatgctgaagcagggctggacccccagaagaatgttcaaggaggccgacgacttcttcaccagcctgggcctgctgcccgtgccccccgagttctggaacaagagcatgctggagaagcccaccgacggcagagaggtggtgtgccacgccagcgcctgggacttctacaacggcaaggacttcagaatcaagcagtgcaccaccgtgaacctggaggacctggtggtggcccaccacgagatgggccacatccagtacttcatgcagtacaaggacctgcccgtggccctgagagagggcgccaaccccggcttccacgaggccatcggcgacgtgctggccctgagcgtgagcacccccaagcacctgcacagcctgaacctgctgagcagcgagggcggcagcgacgagcacgacatcaacttcctgatgaagatggccctggacaagatcgccttcatccccttcagctacctggtggaccagtggagatggagagtgttcgacggcagcatcaccaaggagaactacaaccaggagtggtggagcctgagactgaagtaccagggcctgtgcccccccgtgcccagaacccagggcgacttcgaccccggcgccaagttccacatccccagcagcgtgccctacatcagaaccgccatgaagctgggcttcagcagaccctggcccgaggccatgcagctgatcaccggccagcccaacatgagcgccagcgccatgctgagctacttcaagcccctgctggactggctgagaaccgagaacgagctgcacggcgagaagctgggctggccccagtacaactggacccccaacagcgccagaagcgagggccccctgcccgacagcggcagagtgagcttcctgggcctggacctggacgcccagcaggccagagtgggccagtggctgctgctgttcctgggcatcgccctgctggtggccaccctgggcctgagccagagactgttcagcatcagacacagaagcctgcacagacacagccacggcccccagttcggcagcgaggtggagctgagacacagctag

SEQ ID NO: 70470 - DNA, 1536 bp, Artificial Sequence
  derived and/or modified sequence
atgcagatcgccaaccacaccctgaagtacggcacccaggccagaaagttcgacgtgaaccagctgcagaacaccaccatcaagagaatcatcaagaaggtgcaggacctggagagagccgccctgcccgcccaggagctggaggagtacaacaagatcctgctggacatggagaccacctacagcgtggccaccgtgtgccaccccaacggcagctgcctgcagctggagcccgacctgaccaacgtgatggccaccagcagaaagtacgaggacctgctgtgggcctgggagggctggagagacaaggccggcagagccatcctgcagttctaccccaagtacgtggagctgatcaaccaggccgccagactgaacggcaacatgtgggcccagacctggagcaacatctacgacctggtggtgcccttccccagcgcccccagcatggacaccaccgaggccatgctgaagcagggctggacccccagaagaatgttcaaggaggccgacgacttcttcaccagcctgggcctgctgcccgtgccccccgagttctggaacaagagcatgctggagaagcccaccgacggcagagaggtggtgtgccacgccagcgcctgggacttctacaacggcaaggacttcagaatcaagcagtgcaccaccgtgaacctggaggacctggtggtggcccaccacgagatgggccacatccagtacttcatgcagtacaaggacctgcccgtggccctgagagagggcgccaaccccggcttccacgaggccatcggcgacgtgctggccctgagcgtgagcacccccaagcacctgcacagcctgaacctgctgagcagcgagggcggcagcgacgagcacgacatcaacttcctgatgaagatggccctggacaagatcgccttcatccccttcagctacctggtggaccagtggagatggagagtgttcgacggcagcatcaccaaggagaactacaaccaggagtggtggagcctgagactgaagtaccagggcctgtgcccccccgtgcccagaacccagggcgacttcgaccccggcgccaagttccacatccccagcagcgtgccctacatcagaaccgccatgaagctgggcttcagcagaccctggcccgaggccatgcagctgatcaccggccagcccaacatgagcgccagcgccatgctgagctacttcaagcccctgctggactggctgagaaccgagaacgagctgcacggcgagaagctgggctggccccagtacaactggacccccaacagcgccagaagcgagggccccctgcccgacagcggcagagtgagcttcctgggcctggacctggacgcccagcaggccagagtgggccagtggctgctgctgttcctgggcatcgccctgctggtggccaccctgggcctgagccagagactgttcagcatcagacacagaagcctgcacagacacagccacggcccccagttcggcagcgaggtggagctgagacacagctag

SEQ ID NO: 70471 - protein, 525 aa, Artificial Sequence
  derived and/or modified sequence
MVLFCLLFLYPAGHCPNPGISLGAVRTGFRFGHGDKVRYRCSSNLVLTGSSERECQGNGVWSGTEPICRQPYSYDFPEDVAPALGTSFSHMLGATNPTQKTKDHENGTGTNTYAALNSVYLMMNNQMRLLGMETMAWQEIRHAIILLTDGKSNMGGSPKTAVDHIREILNINQKRNDYLDIYAIGVGKLDVDWRELNELGSKKDGERHAFILQDTKALHQVFEHMLDVSKLTDTICGVGNMSANASDQERTPWHVTIKPKSQETCRGALISDQWVLTAAHCFRDGNDHSLWRVNVGDPKSQWGKEFLIEKAVISPGFDVFAKKNQGILEFYGDDIALLKLAQKVKMSTHARPICLPCTMEANLALRRPQGSTCRDHENELLNKQSVPAHFVALNGSKLNINLKMGVEWTSCAEVVSQEKTMFPNLTDVREVVTDQFLCSGTQEDESPCKGESGGAVFLERRFRFFQVGLVSWGLYNPCLGSADKNSRKRAPRSKVPPPRDFHINLFRMQPWLRQHLGDVLNFLPL

SEQ ID NO: 70472 - protein, 169 aa, Artificial Sequence
  derived and/or modified sequence
MRALCIRETCSSELGFSRNWSRRKAGHCPNPGISLGAVRTGFRFGHGDKVRYRCSSNLVLTGSSERECQGNGVWSGTEPICRQPYSYDFPEDVAPALGTSFSHMLGATNPTQKTKDHENGTGTNTYAALNSVYLMMNNQMRLLGMETMAWQEIRHAIILLTDGKSNMGG

SEQ ID NO: 70473 - protein, 145 aa, Artificial Sequence
  derived and/or modified sequence
  misc_feature (1)..(1): Xaa can be any naturally occurring amino acid
XGHCPNPGISLGAVRTGFRFGHGDKVRYRCSSNLVLTGSSERECQGNGVWSGTEPICRQPYSYDFPEDVAPALGTSFSHMLGATNPTQKTKDHENGTGTNTYAALNSVYLMMNNQMRLLGMETMAWQEIRHAIILLTDGKSNMGG

SEQ ID NO: 70474 - protein, 538 aa, Artificial Sequence
  derived and/or modified sequence
MRALCIRETCSSELGFSRNWSRRKAGHCPNPGISLGAVRTGFRFGHGDKVRYRCSSNLVLTGSSERECQGNGVWSGTEPICRQPYSYDFPEDVAPALGTSFSHMLGATNPTQKTKDHENGTGTNTYAALNSVYLMMNNQMRLLGMETMAWQEIRHAIILLTDGKSNMGGSPKTAVDHIREILNINQKRNDYLDIYAIGVGKLDVDWRELNELGSKKDGERHAFILQDTKALHQVFEHMLDVSKLTDTICGVGNMSANASDQERTPWHVTIKPKSQETCRGALISDQWVLTAAHCFRDGNDHSLWRVNVGDPKSQWGKEFLIEKAVISPGFDVFAKKNQGILEFYGDDIALLKLAQKVKMSTHARPICLPCTMEANLALRRPQGSTCRDHENELLNKQSVPAHFVALNGSKLNINLKMGVEWTSCAEVVSQEKTMFPNLTDVREVVTDQFLCSGTQEDESPCKGESGGAVFLERRFRFFQVGLVSWGLYNPCLGSADKNSRKRAPRSKVPPPRDFHINLFRMQPWLRQHLGDVLNFLPL

SEQ ID NO: 70475 - DNA, 1578 bp, Artificial Sequence
  derived and/or modified sequence
atggtgctattttgtctgctctttttgtaccccgccggccactgccctaatccaggtattagtctaggggccgttcgcacaggttttaggtttgggcatggggataaagtcagataccggtgctccagcaacctggttttgacaggtagctctgagcgcgaatgtcagggcaatggcgtttggtccgggaccgaacccatttgtcggcagccctactcgtacgacttccccgaggatgttgcccctgcactggggacctccttctcccatatgcttggagccaccaaccctacacaaaagacaaaagatcatgagaacgggactgggaccaatacttatgctgcgctcaactctgtatacttaatgatgaataaccagatgcggctactggggatggaaaccatggcctggcaggagattagacacgctattattctactgacagatgggaagagcaatatgggtggctcccctaagacggcagtggaccatattagggagatcttgaacatcaaccagaaaaggaacgactatctagacatttacgctattggcgtgggaaaactggatgtcgactggcgagagctcaacgaattagggtccaaaaaggatggagagcgtcacgcatttattctgcaagacacaaaggcgttacaccaggtattcgagcacatgctggacgtcagcaagcttacagatacgatctgtggggtcggaaatatgtcggcgaatgcctccgaccaggagaggacgccttggcacgtgacaattaagcccaagtcacaggagacttgcaggggcgcactgatatcagaccaatgggtgcttaccgcagcccattgcttccgagatggtaacgatcactctctgtggagagtgaatgtcggggacccaaaatcccagtgggggaaagaattcctgattgaaaaagccgtcatttctcctggattcgacgtgttcgccaagaagaaccagggtattcttgagttctatggtgacgatattgctctactcaagctggctcagaaggtgaaaatgtctacgcatgcccgacctatttgtttgccttgcacgatggaagccaaccttgctctgcgaagaccccaggggtctacatgccgcgaccatgagaacgaactcctgaacaagcagtccgtgcccgcccatttcgtggcgttaaacggcagcaagctcaacattaatctcaagatgggcgtggagtggactagctgtgcagaggtggtgtctcaggagaagacgatgttccccaacctgaccgacgtcagggaagtcgttacggatcagttcctctgctcaggtactcaagaggatgagagtccatgtaagggagagagcggcggcgccgtattccttgagcgccggttccgtttctttcaagttggcctcgtcagctgggggttatacaatccttgtctgggaagtgctgataagaactcacgcaaacgagccccccgaagtaaagtgcctcctccacgcgatttccacattaacctgttccggatgcaaccttggctgcggcaacacctgggagatgtcctgaattttcttcccctgtag

SEQ ID NO: 70476 - DNA, 1578 bp, Artificial Sequence
  derived and/or modified sequence
atggtgttattttgcttgctgtttttgtacccagcaggacattgccccaatccgggcatcagcctgggcgcagtcaggactgggttccgcttcggacatggcgacaaggtgaggtataggtgcagctcgaatctagtgctgacaggcagtagtgaaagagaatgccaaggaaatggcgtgtggtccggaaccgagcctatttgccgacaaccctacagttacgatttcccggaggacgtcgccccagctttgggcacctccttcagccacatgctcggtgccaccaaccctacccagaagaccaaagaccacgagaacggtaccggcactaatacctatgcggctctgaattcagtgtacctcatgatgaacaatcagatgcgcctccttgggatggaaactatggcctggcaggagattaggcatgccatcatcctgcttacggatggcaaaagcaatatgggaggttccccaaagacagccgttgaccatatcagagaaattctgaacattaaccagaagcggaacgactatctagacatctatgcgatcggtgtggggaagctggatgtggattggagagaactgaacgaactaggctctaagaaagacggtgagcggcacgcattcatcctgcaggataccaaagccctgcatcaagttttcgagcacatgttagacgtgtccaagctgacagatactatctgcggcgtaggaaatatgtcagctaatgcgtctgaccaggaaagaacaccatggcatgtgacaatcaaaccaaagagtcaggaaacatgtaggggtgccttgatctcggatcagtgggttctgaccgctgcccactgcttcagggacggaaacgaccacagcctatggagggtgaatgtgggagaccctaagtctcaatggggcaaagagtttctgatcgaaaaagccgttatcagccccggattcgacgtgtttgcaaagaaaaaccaaggtatcctggaattctatggggatgacatcgccctgttaaagctggcccagaaagttaaaatgagtacgcatgcccgcccgatttgtctgccctgtaccatggaggctaatctggctcttagaaggccacaggggagcacatgccgggaccacgaaaacgagctcctgaataaacagtctgtgcccgcccattttgtggcactgaatggatcgaaactgaacattaacctgaagatgggcgtggaatggacatcatgtgccgaagtcgtgagtcaagaaaagacaatgtttccaaacttaacagacgtgagagaagttgtgaccgaccagtttctgtgttccggcactcaggaggatgaatcgccatgtaagggcgaaagtggtggcgccgtgtttctcgaaagacggtttagattctttcaagtcggactcgtgtcatggggactgtacaacccttgcctgggatcagcagacaaaaacagtcgaaagcgcgccccacggagcaaggtgccccctcccagggatttccacattaacttgttcagaatgcagccatggctacgtcaacatctcggcgatgtgctaaacttcctgcctctgtag

SEQ ID NO: 70477 - DNA, 510 bp, Artificial Sequence
  derived and/or modified sequence
atgcgagcactttgtattcgagaaacatgctcatcggagctgggctttagccgcaattggtcacgtagaaaagctggacattgccccaatccagggattagcttgggtgcagtgcgaaccggtttcaggtttgggcatggtgataaggtacgttaccgttgcagtagtaatctcgtcctaacaggcagttctgaacgtgagtgtcaagggaatggggtgtggtcgggaacagagcctatatgtaggcagccatactcttatgattttcctgaggacgtggcacctgctctgggcactagtttcagtcacatgctcggtgctacaaatccgacccagaagaccaaagatcatgagaatggaaccggtacgaatacctatgccgctctgaatagcgtttatctgatgatgaacaatcagatgagattgctcggcatggagaccatggcatggcaggagatacgccacgccattattctcctgaccgacggaaagtcgaacatgggtggctag

SEQ ID NO: 70478 - DNA, 510 bp, Artificial Sequence
  derived and/or modified sequence
atgagagccctgtgtatcagagaaacctgctcttccgaactcggtttctcgcggaactggtcacgcagaaaggctgggcactgccccaatccagggataagcctgggtgctgtacgaactggattcaggttcgggcacggcgacaaagtgcggtacagatgctcctctaatcttgtgctcacaggtagctccgagagggaatgccaaggcaatggagtgtggagcggcactgagcccatctgtcggcaaccgtactcatatgattttcccgaagacgttgcccctgcccttggcacctcctttagccacatgttgggcgcgacaaatccaacccagaagacaaaagaccacgaaaatggcactggcacaaatacgtatgctgccctgaattcggtctacctgatgatgaacaatcagatgcggcttttagggatggaaacaatggcatggcaggagatcagacatgccatcatattgctgacggatggaaagtccaacatgggaggttag

SEQ ID NO: 70479 - DNA, 510 bp, Artificial Sequence
  derived and/or modified sequence
atgcgcgcactctgcatacgggaaacctgttccagtgagttgggcttcagtagaaattggtcaagaagaaaggccggccattgtccgaatccaggaatcagcctgggtgcagtgcggaccggttttcggtttggacatggggacaaggtgcggtacaggtgcagtagcaatctcgtcttaacaggctcctctgaacgggaatgtcagggcaacggtgtgtggagtggcacagaacccatatgccgtcaaccttactcttacgattttccagaagacgtcgctcccgcccttggaacatccttctcccacatgctcggggctaccaatccgacacagaagactaaggaccacgagaatggcactgggaccaatacatatgccgctttaaactccgtctatcttatgatgaacaaccagatgcgccttttaggaatggagactatggcctggcaggaaatccgccatgctatcatactcctaaccgacgggaaaagtaacatgggaggctag

SEQ ID NO: 70480 - DNA, 1578 bp, Artificial Sequence
  derived and/or modified sequence
atggtattgttttgtctgcttttcctgtatcccgccggacattgccccaacccaggcatcagtcttggcgccgttagaactggttttagatttggccacggcgacaaggttagatatcgatgttcctccaatctggtgttgactggcagttctgaaagggaatgccaaggcaacggagtatggtctggcactgagcctatttgtcgtcagccatactcctacgactttcccgaggacgtcgctccagctctcgggacatccttttcccacatgctgggcgcaacaaatcccactcagaagaccaaagaccacgaaaatggcacgggaactaacacctacgctgccctgaactccgtgtacctgatgatgaacaatcagatgaggttactgggcatggagacgatggcctggcaggaaatcaggcatgccataatactgttgactgacgggaagtcaaatatgggaggaagcccaaagacagcggtggaccatatccgtgagattctgaacattaaccagaagcgcaacgactatctcgacatctacgctatcggtgtggggaagctcgatgtcgactggagagagcttaacgaacttgggtctaagaaagatggtgagcgccatgcttttatcctccaggacactaaagctttgcatcaggtgtttgagcacatgctcgatgtgtcaaaactgaccgacacgatttgtggggttggcaacatgtctgcaaacgccagcgatcaagagaggactccctggcacgttacaattaagccaaagtcccaagagacatgtaggggcgcattaatcagcgaccagtgggtgttgaccgcagcccactgcttccgcgacggtaatgaccactcactgtggcgagtgaatgtgggggaccctaagtctcaatggggcaaggaatttctgattgaaaaggctgtgataagccctggatttgatgtttttgcaaagaagaaccaaggaattttggagttttacggtgatgatatagcactgctgaaattggcccagaaagtgaagatgtccacgcacgcacggcctatttgtcttccgtgtaccatggaggccaatctcgctctgcggcgaccccagggaagcacatgccgggaccatgaaaatgaattgctgaacaaacaatccgtgccagctcactttgttgcactcaacggcagtaagctgaacatcaacctgaagatgggggttgagtggacatcctgcgccgaagttgtgtcccaggagaaaactatgttccctaatctgaccgatgtgagagaggtggtcaccgaccagtttctatgctcgggaactcaggaggatgaaagtccctgcaaaggcgagagtggcggagctgttttcctggagcgacggtttaggttctttcaggttggtctggtgtcatggggactttacaacccatgtttaggctctgctgacaagaatagccgaaagcgggctccccgcagcaaggttcctcctccgagagactttcacataaacctattccgcatgcagccatggctgagacagcatttgggcgatgtgctcaactttctgcccttgtag

SEQ ID NO: 70481 - DNA, 1578 bp, Artificial Sequence
  derived and/or modified sequence
atggtgctgttttgtctgctcttcctgtacccagccggtcactgtcctaatccaggcatatcgttgggagcagtgcgaacaggattcagattcggtcacggcgacaaagttcgctatagatgctccagcaacctggtgcttacgggatcaagtgagcgggaatgtcagggcaatggagtctggtctgggaccgagcctatctgccggcaaccttacagctatgatttccctgaggacgtggcccccgcattgggtacctcctttagccacatgttaggcgctactaacccaacacagaagacaaaggatcacgaaaacggaacagggactaacacttatgcagctctcaacagcgtatatttaatgatgaataaccaaatgcgccttctcgggatggagaccatggcatggcaggagatccgccatgctatcattctgctgacagatgggaagtccaatatgggcggaagtcctaagacagcagtcgaccatattcgcgagattctcaacatcaaccagaaacgcaatgactacttagacatctacgcaatcggtgtggggaagttggacgttgactggcgggagctgaatgagctgggctctaagaaagacggggagcggcacgcattcatcctgcaggatacgaaggctctacaccaagtctttgagcacatgctcgatgtgtctaagctcaccgacaccatctgcggcgtcggtaacatgtctgccaacgcctccgatcaggagcgaacgccctggcacgttacgatcaagccaaagtcccaggaaacttgtaggggagccctcatttccgatcagtgggtccttaccgcggcccattgctttcgggatggcaacgatcatagcctgtggagggttaatgtgggtgacccgaagtcccagtggggcaaagaattcctgatcgagaaagcagtcatatccccaggattcgatgttttcgctaagaagaaccagggcatcctggagttctacggcgatgatatcgcccttctcaaacttgcacagaaagtgaagatgtccactcatgccaggcctatatgtctgccatgtactatggaggctaatctggcattacgtaggccgcagggcagcacatgcagagaccacgagaacgagttgctcaataagcagtcagtgccggcgcactttgtcgcactgaacggatcgaaactcaacattaatttaaagatgggcgttgaatggacctcatgtgctgaagtggtgtctcaggagaaaaccatgttcccaaatctcacagatgtgcgggaagtagtcactgaccagttcctgtgttctggaactcaggaggacgaatccccctgcaagggggagagcgggggggcagtgtttctggaaagacgattcagatttttccaggtcgggttggtgtcgtggggactgtataacccatgcctaggatccgctgacaaaaacagtagaaaaagggctcccaggtcaaaggtccctcctcctcgggattttcacattaatttattccggatgcagccctggttgcggcagcacttgggcgacgttttgaacttcctccccctatag

SEQ ID NO: 70482 - DNA, 1578 bp, Artificial Sequence
  derived and/or modified sequence
atggtcttattttgtctgctgttcctttaccctgctggccattgccccaacccaggtattagtctcggggcggtgcgaacaggatttagattcggacatggcgacaaggtgagatatcggtgctcaagcaacctggtgcttaccggctcctcggaaagagagtgtcagggaaatggcgtgtggagcggcaccgaaccaatttgccgacagccatacagttatgacttccccgaggatgtcgcacctgccttgggaacctccttctcccacatgctgggcgctacgaatcccacacaaaagacaaaggaccacgaaaatggaactgggacaaacacatatgctgccttgaactcggtgtacttaatgatgaacaatcagatgaggctgctgggaatggaaacgatggcctggcaggaaatccggcacgctattattctcctgaccgatggaaaatcgaatatgggtggaagtcccaaaactgccgtcgaccacatccgggagatactgaacataaaccagaaacgtaacgactatctggacatttatgccatcggcgttggcaaactggacgttgactggagagagctcaacgaactaggctcaaagaaagatggcgaaagacacgcttttatacttcaggacaccaaggcccttcatcaagtctttgaacacatgctggatgtgtctaaactaacagacacgatctgtggggtgggcaacatgtcggcaaacgcctccgatcaggagcggactccctggcacgtgaccattaaacccaaaagccaggaaacttgccgtggtgctctcatcagcgatcagtgggtgctcaccgctgctcactgctttagagacgggaatgatcatagcctctggcgtgtgaacgtgggagacccgaaaagtcagtggggcaaggagtttttaatagagaaagcagttatatcgcccgggtttgacgtgttcgctaagaaaaaccaggggatactggaattctacggagatgacatcgccttactgaaactagcccagaaggttaaaatgagtactcacgccagaccaatatgtttgccatgcaccatggaggccaacctcgccctaaggagacctcagggatctacatgtcgggaccacgaaaacgaactgctcaacaagcagtcagtgcccgcccatttcgtagccctcaacggaagcaagcttaatatcaacctgaagatgggcgtcgaatggacatcgtgtgcagaggtggtctcacaggagaagacaatgttcccaaatctgactgatgtccgagaagtcgtgactgaccagttcttgtgttcaggtacccaggaggatgagtctccatgtaagggcgaaagtggtggggccgtattccttgagagaaggtttagattcttccaagtgggactggtttcgtggggcctgtacaacccctgtctgggtagcgcagacaagaactcacgaaaaagagctccacgatccaaggttcccccgcccagggacttccatataaacttgtttagaatgcagccgtggctgaggcaacatttaggggatgtccttaacttcctgcccttatag

SEQ ID NO: 70483 - DNA, 438 bp, Artificial Sequence
  derived and/or modified sequence
tagggtcattgtccaaaccctggtattagtctcggggcagtccgtaccggattccgttttggccatggggataaggtccgatatcggtgcagttccaatctggtgcttaccggttcctccgagagagagtgtcaggggaacggcgtgtggagtgggacggagcctatctgtcggcaaccttatagttacgattttcccgaagacgtcgcacctgccttggggacaagcttctcacacatgctgggggccacgaatcctacccagaaaactaaggatcacgagaatggaaccggaaccaatacgtatgccgcactgaatagcgtctacctgatgatgaataatcagatgagactcttggggatggagacaatggcatggcaggaaattcggcatgctatcattctgttaaccgacggtaaatccaatatgggcgggtag

SEQ ID NO: 70484 - DNA, 510 bp, Artificial Sequence
  derived and/or modified sequence
atgcgtgccctgtgtatcagagagacctgctctagcgagctgggtttttcccgcaactggtcgcgtaggaaggccggccactgccccaaccccgggataagcctgggggcagtgcggactgggttcagattcggacatggggacaaggtgcggtaccgttgctcatctaatttagtgcttacagggtccagtgaacgtgagtgccagggcaacggggtgtggtccggtacagagcctatctgtagacaaccctatagttatgactttcctgaagatgtggcccccgcactgggaacttcattctctcatatgctcggagccacaaacccaacacagaaaaccaaagatcacgagaacggcactgggactaacacttacgcagcacttaatagtgtgtatctcatgatgaacaatcagatgagactgctgggaatggagaccatggcctggcaggagatccgtcatgccatcattctcctgaccgatggcaaaagtaacatgggcggttag

SEQ ID NO: 70485 - DNA, 1578 bp, Artificial Sequence
  derived and/or modified sequence
atggtacttttttgtctgttattcttgtatccagccgggcactgccctaacccagggattagcctcggcgccgttaggaccggttttcggttcggccacggggacaaagtccggtaccgctgttcctcaaaccttgtgctgacaggttcttcagagagagagtgccaaggcaatggggtctggagcggaaccgagcctatctgccgtcagccctattcttacgactttcctgaagatgtggctcccgcattggggactagcttttcgcacatgctgggtgcaactaatccaacacaaaagacgaaggatcacgagaatggcaccggaacaaatacttatgcggccctgaacagcgtgtatttgatgatgaataatcagatgcgcctgctgggcatggagactatggcttggcaggagatccggcacgccatcattctgctgactgacggaaagtcaaacatgggtggaagcccaaaaactgctgtggatcacatccgagagatcctcaatattaatcagaagagaaatgattacctggacatttacgcgataggcgtagggaagctggacgtggactggagagagcttaacgagctgggttctaaaaaagatggcgagcggcatgcttttatcctccaggataccaaggccctccatcaggtgttcgagcacatgctggacgtaagcaagctcacagacacgatttgcggagtagggaacatgtccgccaacgcttccgatcaggagcgcacaccttggcacgtaacaatcaaaccaaagtctcaagagacatgccggggtgccttgatttcagatcaatgggtgctgacagccgctcactgcttccgggatggcaatgatcattcactttggagggtgaacgtgggggaccctaaatcgcagtggggcaaagaatttttaattgagaaggccgtgatctctccaggcttcgacgttttcgcaaaaaagaaccagggtattctcgaattctatggggacgatatcgccttgctcaaactggcccaaaaggttaagatgagcacccacgcgcgcccaatctgcctcccatgtacaatggaggccaatcttgcactgcgtaggcctcaggggtcgacttgtagggaccatgagaacgagctgctcaataagcaatctgtgccagcacattttgtggctttaaacggatccaaactcaacatcaacctgaaaatgggcgtggaatggacgagttgtgcagaggtcgttagccaggaaaagacaatgtttcccaacctgacagatgtcagggaagtggtgacagaccagtttctgtgttccggtacgcaggaagacgaaagcccatgtaaaggtgaatcgggcggcgccgtattcctggagcgcaggttccggttctttcaggtgggcttggtttcatgggggttgtataatccttgtctgggttctgccgataagaacagtcggaaaagggcacctagatcaaaagtgccacctcccagagactttcacatcaatttgttcagaatgcagccctggctgcgccagcatctgggcgatgttcttaactttctaccgctgtag

SEQ ID NO: 70486 - DNA, 438 bp, Artificial Sequence
  derived and/or modified sequence
tgagggcactgccctaaccctggcatttctctaggagcagtccgcacaggcttcaggtttggtcatggcgacaaggtccgatataggtgcagcagcaacttggttctcacgggtagtagcgaacgagaatgtcaaggcaatggcgtgtggtccggaaccgaaccaatatgtcgacagccttacagctacgacttccctgaggatgtagccccggctctgggaacgtctttttcccatatgttaggggcaacaaatccaacacagaaaactaaggaccacgagaacggcacagggactaacacctacgctgcgctcaactctgtctatctcatgatgaacaaccaaatgcggttattgggtatggaaaccatggcctggcaggagattagacacgcaatcatcttattgacagatggcaagagtaatatgggcgggtag

SEQ ID NO: 70487 - DNA, 1617 bp, Artificial Sequence
  derived and/or modified sequence
atgagggccctgtgtataagagagacatgttcttctgagctgggcttttccaggaactggagtaggagaaaagccggccactgcccgaaccccggaataagtttgggtgcggtacgaactggatttcggtttggtcatggcgataaagttagatacagatgtagcagcaacctagtgctgactggatctagcgaacgcgaatgtcagggaaacggagtgtggtccggcaccgagcctatctgtaggcagccctactcatacgacttccctgaggatgtggcccccgctctggggacgagtttctctcatatgctgggagcaacgaacccaactcaaaagaccaaagatcatgaaaatggcaccgggacaaacacttacgccgcgctgaactccgtttatcttatgatgaacaatcagatgcgcctgttgggcatggagacaatggcctggcaggagatcaggcatgcaatcatcctcctgaccgatgggaagtctaatatgggtggatcacctaagactgccgtggaccacatccgcgagatattgaatataaatcaaaaacgcaacgattatttggatatctatgcaattggcgtcggtaagcttgatgtggattggagagagctgaacgagctgggcagcaagaaagatggcgaacggcacgcctttatcctccaggatacgaaggcgttacaccaggtttttgagcacatgctggatgtcagcaaactgactgataccatctgcggggtgggtaacatgtccgcgaatgcgtctgaccaggaaaggaccccttggcacgtgaccattaagccaaagtctcaggaaacttgccgaggcgcattaattagcgaccaatgggtgctgactgcggctcactgctttcgcgatggcaacgatcatagcctctggcgggtgaatgtaggagacccaaaatctcaatggggcaaagagtttctgatcgaaaaagcagtcatatcccctggcttcgatgttttcgcaaaaaaaaaccaagggatacttgaattctatggcgacgatattgcactccttaagttagcccagaaagttaagatgagcactcacgcccggcctatttgtctgccgtgtactatggaagcgaacctggcactgaggagacctcaagggtctacgtgccgggatcacgaaaacgaactcttaaataagcagtcagttccggcgcattttgttgccctaaatggcagtaagcttaatattaacctgaaaatgggcgttgagtggacctcttgcgcagaagtggtctctcaggaaaagacaatgtttccaaatcttaccgacgtgcgtgaggtagtcacggaccagtttctgtgtagcggaacccaagaggacgagtctccctgtaagggggagtcaggaggcgccgtgtttctggagaggcgctttcggttttttcaggttggcctggtgtcttggggattgtacaacccatgtctcggcagcgccgataagaactcccggaaaagagcgcctcgctccaaagtgccaccgcccagggactttcacataaatcttttcaggatgcaaccgtggctcagacaacacctcggcgatgtgctcaattttctcccactttag

SEQ ID NO: 70488 - DNA, 1617 bp, Artificial Sequence
  derived and/or modified sequence
atgcgtgctttgtgtatccgggaaacttgcagcagcgagctcggcttcagcagaaactggagtcggcgaaaagccgggcactgtccaaatccagggatctctctgggcgctgttcgtaccggttttcgctttggacatggagataaggtgagatataggtgctcctctaacctcgtgcttaccgggtcgtcagagcgggagtgtcagggaaacggtgtgtggagcggcaccgaaccaatttgccgacaaccgtactcatacgattttccagaggacgttgcccccgcgctgggcacctcattctctcacatgctgggggctacgaatccgacacagaaaaccaaagatcacgaaaatggaaccgggaccaacacatacgccgctctaaactccgtctacctaatgatgaacaaccaaatgcggttactgggtatggaaactatggcttggcaagaaataagacatgctattatcttgcttaccgacggcaaaagtaatatgggggggtcccccaaaaccgcggtggatcacatcagagagatcctgaacatcaatcagaagaggaatgattatctggatatttacgccattggtgtcggcaagctcgacgtggactggagggagctcaacgagctcggttctaagaaagatggcgagaggcatgccttcattcttcaggacaccaaagctctgcaccaagttttcgagcacatgctggatgtgagcaaactgactgacacaatatgcggtgtcggaaacatgagcgctaacgcctctgatcaggagcgaacaccgtggcatgtgaccatcaaaccgaagtcacaggaaacttgtcggggcgcgctaatctccgaccaatgggtactgaccgcggcgcactgcttcagagacggcaacgatcactcactctggagggtgaatgtcggggatccaaaatcacaatggggcaaagagtttttaatcgaaaaagcagtgattagcccagggttcgacgtgttcgcgaaaaagaatcagggaatccttgaattttacggtgatgacattgccctcctcaagctcgctcaaaaggtcaaaatgtcaacccacgcccgtcccatttgtctgccatgcactatggaagctaaccttgccctgaggcggccccaaggatccacctgtagggatcacgaaaatgaattgctcaataagcagtcagtccccgcccacttcgtagctctgaatgggagcaaactgaatatcaacctgaagatgggcgttgaatggactagttgtgctgaggtcgtcagccaggaaaagacgatgtttcctaatctgacagatgttcgcgaggttgtcaccgatcagtttctctgctctggcacgcaggaggacgagtcaccctgtaagggggagtctgggggagcggtcttcttggagcgccggtttcggttcttccaggtggggctggtgtcatggggtctatataacccatgtctgggcagtgctgacaaaaacagccgcaaaagagccccacgctctaaggtccctccaccccgggacttccacatcaatctgttccgcatgcaaccctggctcagacaacacctgggagatgtgcttaattttttgccgttgtag

SEQ ID NO: 70489 - DNA, 1617 bp, Artificial Sequence
  derived and/or modified sequence
atgagagccctgtgtatccgtgagacttgttcttcggagttggggttttcccggaattggtcccggcgaaaggcgggccattgtccaaaccctggcatctcccttggagcggtacgtacgggatttagattcggccacggcgacaaggtgcgctacagatgttccagtaacctagttctcactggatccagtgagcgcgagtgccagggcaacggcgtctggtcagggaccgaaccgatttgccgccagccatattcgtacgacttcccggaagatgtagcaccggctctaggcacgagtttcagtcacatgttgggagcaacaaatcccacccagaaaaccaaggaccatgagaacgggactggcactaatacctatgccgcattaaacagcgtgtacctcatgatgaataatcagatgcgattactgggaatggagaccatggcttggcaggaaattaggcatgcaatcattctgttgactgatggaaagagcaacatgggcgggtcccctaaaaccgcagtggatcacattcgtgagatcttgaatattaatcagaaaaggaatgactatctggacatatacgctattggcgtgggaaagctcgacgtggattggcgcgagctcaatgagttaggatccaaaaaagacggggagcgacatgcattcatcctgcaggatacgaaagcgctccatcaggtcttcgagcatatgctggacgtcagcaagctcaccgataccatttgtggcgtcggcaatatgtccgcaaatgccagtgaccaggagcggacaccttggcatgtgacgattaagccaaagtcgcaggagacctgtagaggagcccttatctccgaccagtgggtgctcactgctgctcactgtttcagagatggtaacgaccattccctgtggagagtcaatgttggcgatcctaaaagccagtgggggaaagagttcttaattgagaaggctgtgatctcaccaggctttgacgtcttcgccaagaagaatcagggcatattggaattttatggagatgacattgccctactgaagttggctcagaaagtcaagatgtccacgcatgctagacctatttgtttaccctgtacgatggaagcgaaccttgccctcaggcggcctcagggaagcacctgcagggaccatgagaacgagcttctcaataaacagagcgtgcctgcgcacttcgtggctctgaacgggtctaagctgaatataaatttaaagatgggcgtggaatggacgagctgcgccgaagtcgtaagccaggaaaaaacaatgtttcccaatttaacggatgtcagggaagtcgtgactgaccagtttctttgctcaggaacacaggaagatgaatccccatgcaaaggtgagtctggcggggccgtgtttctcgagcgaagatttcgattctttcaagtggggctggtgtcttggggattatacaacccctgcctgggctcggctgataaaaatagtcggaagcgagccccgagaagcaaagtccccccaccccgggactttcacattaatctcttccgaatgcagccgtggctccggcagcacttgggtgacgttctcaactttctacctctgtag

SEQ ID NO: 70490 - DNA, 1617 bp, Artificial Sequence
  derived and/or modified sequence
atgagagctctatgcatccgggagacctgctcatccgaactgggtttctctaggaactggtcacggcggaaggctggacactgtcccaacccgggcattagcctgggggcagtccggacaggtttccgattcgggcatggcgacaaggtccgttacaggtgctcgagcaacctggtgctgactggctcttcggagagggagtgccaaggaaacggtgtgtggtctgggactgaaccgatttgcagacaaccgtactcttacgacttcccagaagatgtcgcaccggctcttgggacttcattttcccacatgctgggggcaaccaatccaacccagaagactaaggaccacgagaatggaaccggcaccaatacatatgccgccctcaatagtgtttacttaatgatgaacaaccagatgcggctgctcggcatggagacgatggcatggcaagaaataagacacgctatcattctactaactgacgggaagtcaaacatggggggcagtcccaaaaccgcggtggaccacataagggaaatcttgaatataaatcaaaagaggaatgactatctcgatatctatgctataggagttggaaagctggacgtcgactggagggagctcaacgagttgggatcaaagaaggacggagaaaggcatgcattcatccttcaagacacaaaggcattgcatcaggtctttgaacatatgctggacgtgagcaagctgactgacacgatttgtggcgtgggaaatatgagcgccaatgcgtctgatcaggagcgaactccttggcacgttacaatcaaacctaagtcgcaagaaacatgtcgcggagcactgatatcagaccagtgggtgctgactgcggcccactgcttccgcgatggcaatgaccactccctctggagagttaacgtgggtgacccaaagtcacagtggggcaaagagttcctcatcgaaaaggcagtcataagtcccggctttgatgtgttcgccaagaagaaccaagggatcctggagttttacggagacgacatcgcactcctgaagttggcccagaaggtcaaaatgtcaacgcatgcacggccaatatgtttgccttgcaccatggaggccaaccttgcacttcgtcgcccacagggatccacttgccgggatcacgagaatgagctactgaacaagcaaagcgtgcctgcacatttcgtggccttgaatggctctaagctcaatataaatttgaaaatgggagtggagtggacatcttgtgcagaggtggtaagtcaggaaaaaacgatgtttcccaatcttacagacgtgagggaggtggtgaccgatcaattcctgtgctcagggacgcaggaggatgaaagcccatgtaaaggggaatcaggcggtgcagttttcttggagaggaggttccggttcttccaggttggattagtctcctggggtctctacaacccgtgccttggctcggccgacaaaaattcacgcaagcgggcccctagatcaaaagtgcctccacctagagatttccacataaacctgttccggatgcagccttggctccggcagcatctgggagacgttttgaactttttaccgttgtag

SEQ ID NO: 70491 - DNA, 1617 bp, Artificial Sequence
  derived and/or modified sequence
atgagagccctttgcatcagagagacttgctcaagcgagctcggtttttctaggaattggtctcgtcgcaaagctggccactgccctaatccagggatctcattaggcgcagtgcggactggttttaggttcgggcatggagacaaggttaggtataggtgcagttccaacctcgtgctaacaggaagtagcgagagagagtgccagggcaatggagtctggtcaggaactgagcctatctgcaggcagccatattcctatgatttccctgaggacgtggcgcccgccctggggacttcattctctcatatgctaggggctacgaatcccacacaaaagactaaagatcatgagaatggcaccggaacaaatacatacgctgcactgaactcagtgtacctgatgatgaacaatcagatgaggttgctcggcatggaaacaatggcttggcaggaaatccgccacgcgatcatacttctgacggacggtaaatccaatatggggggctcccctaagacggctgtggaccacatccgcgaaatccttaatatcaatcagaagaggaacgattaccttgacatctacgccatcggggttggtaagcttgacgtggattggcgagaactgaatgaattggggtctaagaaggacggagagcgacacgcttttatactacaagatactaaggcacttcatcaagtatttgagcatatgctcgacgtttccaaattgaccgataccatttgcggagttggcaatatgagcgcaaatgcctcagaccaggagcgtacaccatggcatgtgacgattaaacccaagagtcaagagacgtgccgcggcgccctgatctcggatcagtgggtcctaactgcggctcattgcttcagagatggcaatgaccactcattatggcgggttaatgtgggggatcccaagagccagtgggggaaggagtttcttatagagaaagccgttatctcaccaggctttgatgtgttcgccaaaaaaaaccagggaattttagaattttacggagatgatattgccctactgaaactggcacagaaagttaagatgagcacgcacgcgagaccaatctgcttaccatgtaccatggaagccaatctcgctctccggcggcctcagggatccacatgtagagatcatgagaatgaactcttgaacaagcagagtgttccggcccatttcgtggcactaaacgggtccaaactgaacatcaacctgaagatgggagtagagtggacctcctgcgcagaagttgtatcgcaggaaaaaacgatgtttccaaacctgactgatgtgcgagaggttgtgactgatcagtttctctgttcaggcacacaggaggatgagagcccttgcaagggcgagagcggaggcgccgtgtttctagagaggcgctttcgctttttccaggttggcctggtcagttggggactgtacaatccttgtctcggctctgctgataagaatagcaggaaaagggcccctcgctccaaagtgcctcccccaagggattttcacattaatctgttccggatgcagccatggctccgacaacatctgggcgacgtgctgaacttcctgcctttatag

SEQ ID NO: 70492 - DNA, 1578 bp, Artificial Sequence
  derived and/or modified sequence
atggtgctcttctgcctgctcttcctgtacccagctggccactgccccaaccctggcatcagcctgggcgctgtgaggacaggcttccgctttggacatggagacaaggtgcgctaccgctgcagcagcaacctggtgctgaccggcagcagcgagcgggagtgccagggcaatggagtgtggagcggcacagagcccatctgccggcagccctacagctatgacttcccagaagatgtggccccagccctgggcaccagcttcagccacatgctgggcgccaccaaccccacccagaagaccaaggaccatgaaaatggcaccggcaccaacacctacgccgccctgaacagcgtgtacctgatgatgaacaaccagatgaggctgctgggcatggagaccatggcctggcaggagatcagacatgccatcatcctgctgacagatggcaagagcaacatgggcggcagccccaagacagctgtggaccacatccgggagatcctgaacatcaaccagaagagaaatgactacctggacatctatgccatcggcgtgggcaagctggatgtggactggagggagctgaatgagctgggcagcaagaaggatggagagagacatgccttcatcctgcaggacaccaaggccctgcaccaggtgtttgagcacatgctggatgtgtccaagctgacagacaccatctgtggggtgggcaacatgtctgccaatgccagtgaccaggagaggaccccctggcacgtgaccatcaagcccaagagccaggagacctgccgcggggccctgatcagtgaccagtgggtgctgacagctgcccactgcttcagagatggaaatgaccacagcctgtggagggtgaatgtgggggaccccaagagccagtggggcaaggagttcctgattgagaaggctgtgatcagccctggctttgatgtgtttgccaagaagaaccagggcatcctggagttctatggagatgacatcgccctgctgaagctggcccagaaggtgaagatgagcacccacgcccggcccatctgcctgccctgcaccatggaggccaacctggccctgcggcggccccagggcagcacctgccgggaccatgaaaatgagctgctgaacaagcagagcgtgcctgcccactttgtggccctgaatggcagcaagctgaacatcaacctgaagatgggcgtggagtggaccagctgtgccgaggtggtgtcccaggagaagaccatgttccccaacctgacagatgtgcgggaggtggtgacagaccagttcctgtgcagcggcacccaggaggatgagagcccctgcaagggggagagcggcggcgctgtgttcctggagcggcgcttccgcttcttccaggtgggcctggtgtcctggggcctgtacaacccctgcctgggcagcgctgacaagaacagcaggaagagggcccccaggagcaaggtgcccccaccccgggacttccacatcaacctcttcaggatgcagccctggctgcggcagcacctgggagatgtgctgaacttcctgcccctgtag

SEQ ID NO: 70493 - DNA, 510 bp, Artificial Sequence
  derived and/or modified sequence
atgagggccctgtgcatccgggagacctgcagcagcgagctgggcttcagcaggaactggagcaggaggaaggccggccactgccccaaccctggcatcagcctgggcgctgtgaggacaggcttccgcttcggccacggggacaaggtgcgctaccgctgcagcagcaacctggtgctgaccggcagcagcgagcgggagtgccagggcaatggagtgtggagcggcacagagcccatctgccggcagccctacagctatgacttcccagaagatgtggccccagccctgggcaccagcttcagccacatgctgggcgccaccaaccccacccagaagaccaaggaccatgaaaatggaacaggcaccaacacctatgctgccctgaacagcgtgtacctgatgatgaacaaccagatgaggctgctgggcatggagaccatggcctggcaggagatcagacatgccatcatcctgctgacagatggcaagagcaacatgggcggctag

SEQ ID NO: 70494 - DNA, 438 bp, Artificial Sequence
  derived and/or modified sequence
tgaggccactgccccaaccctggcatcagcctgggcgctgtgaggacaggcttccgcttcggccacggggacaaggtgcgctaccgctgcagcagcaacctggtgctgaccggcagcagcgagcgggagtgccagggcaatggagtgtggagcggcacagagcccatctgccggcagccctacagctatgacttcccagaagatgtggccccagccctgggcaccagcttcagccacatgctgggcgccaccaaccccacccagaagaccaaggaccatgaaaatggaacaggcaccaacacctatgctgccctgaacagcgtgtacctgatgatgaacaaccagatgaggctgctgggcatggagaccatggcctggcaggagatcagacatgccatcatcctgctgacagatggcaagagcaacatgggcggctag

SEQ ID NO: 70495 - DNA, 1617 bp, Artificial Sequence
  derived and/or modified sequence
atgagggccctgtgcatccgggagacctgcagcagcgagctgggcttcagcaggaactggagcaggaggaaggccggccactgccccaaccctggcatcagcctgggcgctgtgaggacaggcttccgcttcggccacggggacaaggtgcgctaccgctgcagcagcaacctggtgctgaccggcagcagcgagcgggagtgccagggcaatggagtgtggagcggcacagagcccatctgccggcagccctacagctatgacttcccagaagatgtggccccagccctgggcaccagcttcagccacatgctgggcgccaccaaccccacccagaagaccaaggaccatgaaaatggaacaggcaccaacacctatgctgccctgaacagcgtgtacctgatgatgaacaaccagatgaggctgctgggcatggagaccatggcctggcaggagatcagacatgccatcatcctgctgacagatggcaagagcaacatgggcggcagccccaagacagctgtggaccacatccgggagatcctgaacatcaaccagaagagaaatgactacctggacatctatgccatcggcgtgggcaagctggatgtggactggagggagctgaatgagctgggcagcaagaaggatggagagagacatgccttcatcctgcaggacaccaaggccctgcaccaggtgtttgagcacatgctggatgtgtccaagctgacagacaccatctgtggggtgggcaacatgtctgccaatgccagtgaccaggagaggaccccctggcacgtgaccatcaagcccaagagccaggagacctgccgcggggccctgatcagtgaccagtgggtgctgacagctgcccactgcttcagagatggaaatgaccacagcctgtggagggtgaatgtgggggaccccaagagccagtggggcaaggagttcctgattgagaaggccgtcatcagccctggctttgatgtgtttgccaagaagaaccagggcatcctggagttctatggagatgacatcgccctgctgaagctggcccagaaggtgaagatgagcacccacgcccggcccatctgcctgccctgcaccatggaggccaacctggccctgcggcggccccagggcagcacctgccgggaccatgaaaatgagctgctgaacaagcagagcgtgcctgcccactttgtggccctgaatggcagcaagctgaacatcaacctgaagatgggcgtggagtggaccagctgtgccgaggtggtgtcccaggagaagaccatgttccccaacctgacagatgtgcgggaggtggtgacagaccagttcctgtgcagcggcacccaggaggatgagagcccctgcaagggggagagcggcggcgctgtgttcctggagcggcgcttccgcttcttccaggtgggcctggtgtcctggggcctgtacaacccctgcctgggcagcgctgacaagaacagcaggaagagggcccccaggagcaaggtgcccccaccccgggacttccacatcaacctcttcaggatgcagccctggctgcggcagcacctgggagatgtgctgaacttcctgcccctgtag

SEQ ID NO: 70496 - DNA, 1578 bp, Artificial Sequence
  derived and/or modified sequence
atggtgctgttctgcctgctgttcctgtaccccgccggccactgcccaaaccccggcataagtctaggcgccgtgcggaccggtttcaggtttggtcatggggacaaggttcggtaccgctgctccagtaatctggtgttgactggctcgagcgaaagggagtgtcaaggaaacggtgtgtggtctggaaccgaacctatttgtaggcaaccttactcctatgacttccctgaggacgtggcccctgcactgggtaccagcttctctcatatgctgggtgctacaaacccaacacagaagaccaaggatcacgagaatgggactggcaccaacacttacgcagcacttaattccgtctatctgatgatgaacaaccaaatgcggttactggggatggaaacaatggcttggcaggagataagacatgccattattctgctcaccgacggaaaatccaacatgggcggttcccccaaaacggcagtggaccacattcgcgagatcttgaacatcaaccagaagcgcaacgactatctagacatttacgcaattggcgtggggaagttggacgtggattggcgggaattgaatgagttgggcagcaaaaaggacggcgagagacatgccttcattctacaggacaccaaagcacttcaccaggtgtttgagcacatgctcgatgtatccaagcttaccgatactatttgcggggtcggaaatatgagcgctaatgcttcagaccaggaacggacaccatggcatgtcaccattaagcccaaaagccaggagacctgtaggggcgctctgattagcgatcagtgggttctgacagccgcacattgcttccgggacggcaatgatcactccctttggagagtaaacgttggggacccgaagtcccagtggggaaaggagtttcttattgaaaaagctgtgatcagcccaggattcgacgtgtttgcaaagaagaaccaaggcatcctcgagttttacggcgacgatatagccctcctcaagctggctcagaaagtaaagatgtcaacccacgctcgccccatctgccttccttgcacaatggaggccaatctggcactgaggagaccccagggcagcacttgtagagaccacgagaatgagctgctgaacaagcagagtgttcccgcacactttgtcgccctgaacggaagcaagcttaatatcaacttaaaaatgggcgtggagtggacatcgtgcgctgaagtggtgtcccaggaaaaaaccatgtttcccaatctgacggatgtcagagaggtggtcaccgatcagtttctgtgttccggtacccaagaagatgagtctccttgcaagggtgagagtggcggggccgtgtttctggaacgccgatttcgttttttccaggttggactggtgtcctggggactttacaacccatgcttggggagcgctgacaagaattccagaaaaagggcaccccgctccaaagtgccccccccaagagacttccacattaacctgtttagaatgcagccatggctgagacagcatctgggcgacgtgctcaacttcctccctctatag

SEQ ID NO: 70497 - DNA, 1578 bp, Artificial Sequence
  derived and/or modified sequence
atggtgctgttctgcctgctgttcctgtaccccgccggccactgccctaacccggggatctctctaggcgcagtgaggactggctttcggttcggacacggcgacaaggtgcgttatagatgcagttcaaatctggtactgactggctcctccgagcgagagtgccagggcaacggagtctggtcggggactgagccaatttgcaggcagccatattcatacgacttcccggaggatgtagctccagccctgggcacctcattctcccatatgctgggcgccacaaacccaacccagaaaaccaaggaccacgaaaacggcaccgggacaaatacttatgctgcactcaattcggtgtacctcatgatgaacaatcaaatgagactgttagggatggagactatggcctggcaggaaatccggcatgcaattattctgttgacagacggaaagagcaacatggggggatcccccaaaacagcggtggaccacatcagagaaatactgaacatcaatcagaagagaaacgactatctggatatttacgccatcggcgtgggaaagctagacgtcgactggagagaactgaacgaattagggtcaaagaaggatggagagagacacgctttcatactgcaggacactaaggctcttcaccaggtgtttgagcatatgctggatgtgtccaagcttacagatactatttgtggggtcggtaatatgagcgccaacgcatcagaccaggaaagaaccccctggcacgtaaccatcaaaccaaaaagtcaggaaacatgtcggggagcactgatctccgatcagtgggttctgactgccgcccactgcttcagggacggcaacgaccattctctatggagggtcaacgttggagatcccaaaagccagtggggtaaggagttcttgattgagaaggccgtgatctcgcctgggtttgatgtctttgccaagaagaatcagggaatcctcgagttctacggcgatgatattgccctcctcaaactggctcagaaggttaagatgtccacgcacgccagacctatttgtctcccctgcaccatggaggcaaacctagcattacgcaggcctcagggcagtacgtgcagagaccatgagaacgaattgttgaataagcagtccgtgcctgctcatttcgtagcgcttaacggcagcaaactcaacattaatcttaagatgggggtagagtggacctcttgcgcagaggtggtgagtcaggaaaaaacaatgtttcctaatttgactgatgtgcgggaggttgtaacagaccagtttctgtgctcgggcacacaggaagacgagagcccttgcaaaggggagtcaggtggggccgtgtttctggagcgaaggttccggttcttccaggttggcctcgtcagctggggtttatacaatccgtgtctgggcagtgctgacaaaaactctcgaaaacgagccccccgctccaaggtgcctccaccaagagatttccacatcaacttattcagaatgcagccctggctgagacagcacctgggagatgtgttgaacttcctgcctttgtag

SEQ ID NO: 70498 - DNA, 510 bp, Artificial Sequence
  derived and/or modified sequence
atgcgggccctgtgcatccgggagacctgcagcagcgagctgggcttcagtcgtaattggtcccggagaaaggccggccactgtcccaatcccggcatttcactaggggccgtgaggaccggctttcgctttggccatggggacaaagtgcgatatcgctgctcaagcaaccttgtgctcacaggaagcagcgagcgtgagtgccaggggaacggcgtttggtctggaaccgaacctatctgccggcagccttactcctatgactttccagaggatgtcgctcccgccctagggacatcattcagccacatgctgggcgcaaccaaccctacccagaaaacaaaagatcacgagaatggcacgggtactaacacatatgcggcactgaatagtgtctatctgatgatgaataaccagatgcgcttgttaggcatggaaacaatggcttggcaggagattagacacgccataatcttacttacagacggcaagagcaatatgggtggctag

SEQ ID NO: 70499 - DNA, 510 bp, Artificial Sequence
  derived and/or modified sequence
atgcgggccctgtgcatccgggagacctgcagcagcgagctgggcttctcacggaactggtccaggcgcaaggcgggtcattgtcctaacccgggaatctcgctgggcgcagtccgcaccgggtttcggtttgggcacggcgacaaggtgcgatatcgatgttcctctaatttggtactgactggatcttctgagcgggagtgtcagggaaacggggtatggtccggtaccgagcccatatgccggcaaccatatagctacgattttcctgaagatgttgccccagcccttggaaccagcttcagccatatgctcggcgccacaaacccaacccagaagacaaaggatcatgagaacgggaccggaaccaatacctatgccgcacttaactctgtttacttgatgatgaataaccagatgagattgcttgggatggagacgatggcctggcaggagatccgacacgctatcatcctgctcacagatggcaagtctaatatgggcggctag

SEQ ID NO: 70500 - DNA, 510 bp, Artificial Sequence
  derived and/or modified sequence
atgcgggccctgtgcatccgggagacctgcagcagcgagctgggctttagtcgaaattggtctagacgcaaggccggacattgtcctaacccgggcatttctcttggagctgtgagaactggcttcagatttgggcacggtgacaaagtgcggtatcggtgctcctctaacctggtgttgaccggctccagtgagcgagagtgtcagggaaacggcgtgtggagcggcaccgaaccaatctgccggcagccgtatagctatgacttccccgaggatgtggcccccgcactgggtacctccttttcacatatgttaggcgccacaaaccctacccaaaagaccaaagatcatgaaaacgggaccggcactaacacatacgccgccctgaatagcgtttacctaatgatgaacaatcagatgcggctcctgggaatggagaccatggcgtggcaggaaatacggcacgctattatattactgacggacggcaagtctaacatgggaggttag

SEQ ID NO: 70501 - DNA, 1578 bp, Artificial Sequence
  derived and/or modified sequence
atggtgctgttctgcctgctgttcctgtaccccgccggccactgccccaaccccggtattagcctgggagctgtgaggactggatttaggtttggccatggagataaggtgcgataccggtgtagttcgaatctggtgctgaccgggagctcggaaagagagtgccaaggcaatggagtgtggtctgggaccgagcctatttgtcggcagccgtattcttacgacttccccgaggacgtggccccagcccttggcacctctttctcccacatgctgggcgccacaaacccaactcaaaagacgaaggaccacgagaatggaacaggcaccaacacctacgctgctttgaattctgtgtacttgatgatgaacaatcaaatgagactgctggggatggaaactatggcttggcaggagattcgccacgccatcatattgctcaccgacggtaaatcaaacatgggaggtagccctaagacagctgttgaccacatcagggaaatattgaatattaaccaaaagaggaacgattatcttgatatatatgcaattggggtcggtaagctcgatgttgattggcgtgagctcaacgagttagggagcaagaaggatggcgaaagacatgcttttatccttcaggatacgaaggcactgcatcaggtatttgaacacatgctggacgttagcaagctaaccgatacaatctgtggggtgggaaatatgagcgcaaatgctagcgatcaggaaagaacaccttggcatgttactatcaaacccaagagccaagagacttgtagaggggccttaatttcagaccaatgggttctgacagctgcacattgtttccgggatgggaacgatcacagtctgtggagagtgaacgtgggggatcctaagtcacagtggggaaaggagtttctcattgaaaaagcagtcatctcacctggtttcgatgtgtttgctaagaaaaaccaaggcattctggagttctatggggacgatattgccttgttaaagcttgctcagaaggttaagatgagcacacacgcacgaccaatttgtttgccttgtaccatggaggccaatctcgcgctgaggcgcccacaggggagcacttgtagggaccacgaaaatgaacttctgaataaacagagcgtgccagcccattttgtggctttgaatggttccaagctgaacatcaacctcaagatgggagtggaatggacctcttgtgccgaggttgtgagccaggaaaagactatgttccccaatctgacggacgttcgtgaagtggtcacggatcagtttttatgtagtggaactcaggaggatgagtctccatgcaagggcgagagcggcggagccgtttttttggaacgaagattcagattctttcaggtcggcctggtgagttggggcctgtataacccgtgtctgggctccgctgacaaaaattcaagaaagagagccccgcggtctaaggttccacccccacgggatttccatattaacctgttcaggatgcagccttggcttcgccagcatttgggagacgtcctgaactttttacccctgtag

SEQ ID NO: 70502 - DNA, 1578 bp, Artificial Sequence
  derived and/or modified sequence
atggtgctgttctgcctgctgttcctgtaccccgccggccactgccccaacccaggcatcagtctgggggcagtacgaaccggatttagatttggccatggtgataaagtccggtacagatgttcctctaatctagtgctcacgggatccagcgagagggagtgccagggcaatggagtatggtctggaacagaacccatttgcaggcagccctactcatacgatttcccagaagatgtagcccccgctttaggaacatcattttcgcacatgctgggagccactaaccccacacagaaaaccaaggatcacgaaaatggtacaggaactaatacatacgcagctctgaactccgtctatctaatgatgaataatcagatgcgactgctcggaatggaaacaatggcctggcaggaaatccggcatgcaatcatactgcttactgatgggaagtctaacatgggcggctctcccaaaacagccgtagaccatattcgtgagattttaaatattaaccagaaacggaacgattacctggacatatatgcaataggcgtgggcaagctggatgtggattggagagagttgaatgagctgggctctaagaaggacggcgagcgccacgcttttatcctacaagatacgaaggccctgcaccaagtcttcgaacatatgctagacgtgtcaaaacttactgacaccatctgtggcgtgggcaacatgagtgccaatgcttcagaccaagagagaaccccatggcatgtgacaatcaaacccaagtcccaggaaacgtgtaggggcgcgctgatttcagatcaatgggttttgaccgctgctcactgcttcagagacggaaacgatcacagcctatggcgcgtgaatgtcggcgatcctaagagtcaatgggggaaggaattcctgattgagaaggcagtaatctctcccggcttcgacgtcttcgccaagaaaaaccaggggatcctggagttctatggcgacgatattgcgctgttaaagctggctcagaaagtaaagatgagcacgcacgctcggcccatctgcctaccctgtacaatggaggccaatcttgcgctgcgccggccgcaggggagcacctgccgcgatcatgaaaacgaattgcttaacaaacagagcgttccagcccattttgtcgccctgaatggcagcaagctgaacattaacctgaaaatgggagttgagtggacgagctgtgctgaagtagtatcgcaggagaaaacgatgttccctaacctcaccgacgtcagggaggtggttaccgaccagtttctgtgttctggaactcaggaagacgagtccccctgtaagggcgaaagcggaggagctgtgtttctcgaaagaagatttaggtttttccaggtgggattggttagttggggactctataacccctgtctggggtctgcagacaagaatagccgtaaacgcgcaccccgttcgaaagtccctccaccaagagacttccacataaatttgttcagaatgcaaccatggctgcggcaacacttaggcgatgtcctgaattttctacctttgtag

SEQ ID NO: 70503 - DNA, 1578 bp, Artificial Sequence
  derived and/or modified sequence
atggtgctgttctgcctgctgttcctgtaccccgccggccactgccccaatcccgggatctcactgggtgctgtgcggaccgggttcaggttcgggcacggcgataaagtacggtacagatgtagctcaaaccttgtattgaccggctcttccgaaagggagtgccaggggaacggagtgtggtctggcacagaacccatctgccgccagccctattcttatgatttcccggaagacgtggctcccgccctgggtacatccttttcccatatgctgggagctacgaacccgacgcagaaaactaaagaccacgaaaacggcaccggaaccaatacctacgcagccctgaactcagtgtacctgatgatgaataaccaaatgcgtttgctgggaatggagacgatggcctggcaggagattcggcacgcaatcattttacttaccgatgggaagagcaatatggggggtagtccaaaaacagcggtcgaccacatcagagagatcctgaatatcaatcagaagaggaacgattacctggatatttacgcaattggtgttggcaaattagatgtcgattggagggagctgaatgagctgggctcaaaaaaggacggtgagcggcacgctttcattctgcaagacacaaaggccctccatcaggtgttcgagcacatgctcgacgtgtccaagttgacagataccatttgcggggtgggaaacatgtctgccaatgcgagtgaccaggagcgcaccccttggcacgttaccataaaacctaaatcccaggaaacctgccgtggagccttaatctcagatcagtgggtgctgacagccgctcactgttttcgggatggaaacgaccactctctgtggcgagtcaatgttggggatcccaagagccagtggggaaaggagtttctgattgaaaaagcggtgattagtcctggattcgacgtgtttgccaaaaagaatcaaggcattttggagttctacggagatgacattgctctgctgaagttggcacagaaggtcaagatgtcgactcatgcccgccccatttgtcttccctgtactatggaggccaatctagcattgcgacggcctcagggctccacctgccgcgaccacgaaaatgagctactgaataagcagtcagtgcccgcccacttcgttgcccttaacgggtctaagcttaacatcaacctcaagatgggcgtggagtggaccagttgtgctgaagtggtgtcccaagagaagactatgtttcctaatttgactgatgtgagggaagttgtgacagaccagttcctttgttctggcacgcaagaggacgagtctccctgtaagggagaaagtgggggtgctgtgtttctagagcgacggtttcgatttttccaagtcggacttgtctcttggggactgtacaacccctgcctcggttctgccgataaaaatagccggaaaagggcccctcggagcaaggtgcccccacctcgtgatttccacataaatcttttcagaatgcagccatggttgcgccagcaccttggcgatgtgctgaacttcctcccactctag

SEQ ID NO: 70504 - DNA, 438 bp, Artificial Sequence
  derived and/or modified sequence
tgaggccactgccccaaccccggcatcagcctgggcgccgtgcggacggggtttagatttggtcatggcgataaggtacgctatcgatgtagctcaaatcttgtgctgacaggatcctcagagagagagtgccagggcaacggcgtctggagcggcaccgagccaatctgtagacagccctatagttacgattttccagaggacgtcgcccctgcgttaggtacatcattctcccatatgctaggtgcaacgaaccctactcaaaaaacaaaagaccatgagaacggcacagggaccaatacttacgctgcactcaattctgtctatctgatgatgaataaccagatgcggttgctgggaatggagactatggcctggcaggagattcgccacgcaattatcttgctgacggatggcaagtctaacatgggtggctag

SEQ ID NO: 70505 - DNA, 510 bp, Artificial Sequence
  derived and/or modified sequence
atgcgggccctgtgcatccgggagacctgcagcagcgagctgggctttagccggaattggtcccgtcggaaagcaggccattgtcctaatcccggcattagtctgggcgctgtccgtaccggttttcgatttggccatggtgacaaggtgagatatagatgttcatcaaatttggtcctcactgggagtagtgagcgtgagtgccagggaaatggtgtttggtccgggacagagcctatttgtcgccagccatactcctacgacttccccgaggatgtggcgcctgccctggggacctccttttcacatatgctcggcgctacgaaccccactcaaaagacaaaagatcacgagaatggaaccggaacaaatacctatgcagccctgaactccgtatacctcatgatgaacaaccaaatgcggttgcttggcatggaaacaatggcttggcaggagatcaggcacgctattattctgttaacagacgggaaaagcaacatggggggctag

SEQ ID NO: 70506 - DNA, 1578 bp, Artificial Sequence
  derived and/or modified sequence
atggtgctgttctgcctgctgttcctgtaccccgccggccactgcccgaacccaggcatctccctcggtgctgtgcgcactggattcagattcggccacggagataaggtgcgatacagatgctcaagcaatcttgtgctgaccggcagtagcgagcgggaatgccagggaaacggcgtgtggagtggaactgaacccatatgccggcagccttactcctatgatttccccgaggacgtggcccccgctcttggcacctcattttcccatatgctgggtgccacaaaccctacccaaaagaccaaggatcacgagaacgggaccggcacaaatacatacgctgcactaaattctgtgtatctgatgatgaataatcagatgcggctactgggaatggagactatggcatggcaggagattaggcatgccatcatcctgcttacagacggaaaatcaaacatggggggtagcccaaagacagctgtcgaccatattagggagattctgaacatcaaccagaagcggaatgattacctggacatatatgccatcggggtggggaagttggatgtcgattggagggagctcaatgaattgggatctaagaaggacggggaaagacacgccttcattctccaggataccaaggcactgcaccaagtcttcgagcatatgctagacgtgtcaaagctgacagacacaatttgtggcgtgggcaacatgtccgcaaatgctagtgatcaggaaagaaccccatggcacgtgacaatcaagccaaagtcccaggaaacttgtcgcggagctctgatttctgatcaatgggtgctgactgcagctcactgctttcgggacggcaacgatcactccctgtggcgtgtgaatgtgggcgatccgaaaagtcagtggggaaaggagtttttaatcgaaaaagctgtcatcagtcctggcttcgacgtgttcgctaaaaagaatcaggggatcctggagttttacggcgatgatattgcattgcttaagctggcacaaaaagtgaagatgagtactcacgcgcgccctatctgtctgccatgtactatggaggccaaccttgcactgcgtaggccacaggggtctacgtgtcgcgatcacgagaatgaacttttgaataaacagagcgtccccgcgcactttgtggccctcaatgggtctaaactgaacattaatctgaaaatgggggtagagtggacttcctgtgccgaagtcgtaagtcaagagaagactatgttcccgaatcttacagatgtgcgagaggttgtcacagatcagtttctgtgctcgggcacccaggaggatgagtcgccctgcaagggagaatctgggggagcagtgtttctggagcgccggttcagattcttccaggtcggcctggtctcctggggattgtataatccttgcttgggatccgccgacaaaaactccagaaaaagggctcccaggagcaaagttccccccccaagagatttccatatcaatctcttcagaatgcagccttggctgcgtcagcacttgggggacgtgctcaactttctccccctgtag

SEQ ID NO: 70507 - DNA, 438 bp, Artificial Sequence
  derived and/or modified sequence
tgaggccactgccccaaccccggcatcagcctgggcgccgtgcggaccggatttcgcttcggacatggcgataaggtgcgctaccggtgctctagcaacctggtcctgacagggagttctgagcgagaatgccagggaaacggagtgtggtcgggaactgaaccaatctgcagacaaccctattcatatgattttcccgaagacgtcgctccagccctggggacctctttctcacatatgctgggcgcaaccaatcctacgcaaaaaacgaaggaccacgagaacggcactggaactaatacgtacgccgccctgaattccgtgtacctcatgatgaacaatcagatgagactgttaggaatggagactatggcgtggcaggagataaggcatgctattattctcctgaccgacgggaagagcaatatggggggttag

SEQ ID NO: 70508 - DNA, 1617 bp, Artificial Sequence
  derived and/or modified sequence
atgcgggccctgtgcatccgggagacctgcagcagcgagctgggcttttctcgcaattggtcaagacgcaaggcaggccactgccccaatcccgggatttccctgggcgctgttcggaccggctttagattcggccatggagataaagtgcgttatcgatgcagctcaaacttggttctcactggaagcagcgagcgcgaatgtcagggaaatggcgtgtggagcggcacagagccaatctgtcggcaaccatactcctacgacttcccagaggatgttgctcccgccttgggcacctctttcagccacatgctcggagcgacaaaccctactcagaaaacaaaggaccatgagaacggcacaggcaccaatacatatgcggctctcaacagcgtctatctgatgatgaacaaccaaatgcggctcctcggcatggaaaccatggcatggcaggaaatcaggcatgctatcatcctcctcaccgacgggaaatccaatatgggaggcagcccaaaaacagcggttgatcatattcgggagatcctgaacattaaccagaaaaggaatgattacctggacatttatgcaatcggcgtggggaagctggacgtagactggagagagcttaacgagctgggcagcaagaaggacggagaacgtcacgcctttattttgcaggacaccaaagcccttcatcaggtattcgaacacatgctagatgttagtaagcttaccgatacaatatgtggagtagggaatatgtccgccaacgcaagtgaccaggagaggacaccttggcatgtgacgattaagcccaaaagccaggagacctgtcggggggcattgatctctgatcagtgggtcctgacagctgctcattgtttcagagacgggaatgaccacagcctgtggcgcgtaaatgtcggcgaccctaaaagtcagtgggggaaggaatttctaattgagaaggccgtgattagccccggttttgacgtatttgctaaaaagaatcaaggaatcttggagttttatggagatgacattgccttgctaaaacttgctcaaaaggtgaagatgagtacccatgcccggccaatttgcctgccttgcacaatggaagccaacctcgccctccggcgcccacagggttcaacttgcagggaccacgaaaacgaattactgaataaacagtccgttcctgcacattttgtggcactaaacggctcgaagctgaatattaacctcaagatgggtgtggagtggacttcatgtgcagaagtggtgtctcaggagaagacgatgttcccaaatcttaccgacgtgcgggaggtggtgacggaccagtttctctgtagcggtacacaggaagatgagtcaccgtgtaaaggtgagagcgggggagccgtcttcctggaaagacgcttcagattctttcaggtggggcttgtttcctggggcctctacaacccctgcctgggaagtgccgacaagaacagcaggaaaagagcccccaggagtaaagtgcctccaccaagggatttccatattaatctgttcagaatgcagccatggctgcggcaacacctcggcgatgttctgaattttctgcccctgtag

SEQ ID NO: 70509 - DNA, 1617 bp, Artificial Sequence
  derived and/or modified sequence
atgcgggccctgtgcatccgggagacctgcagcagcgagctgggcttttctcggaactggagccgcaggaaggccgggcactgtcctaatcccggcatttctctgggtgccgtgcgcacgggtttccgattcggacacggtgacaaagtccgataccgctgtagctctaacctggttcttacgggctccagcgagagagagtgccaaggcaacggggtgtggagcggcactgagccaatttgtcggcagccttatagttatgatttcccagaagatgtcgcacccgcactgggcacgtctttcagccacatgctgggcgccaccaatcccacccagaaaactaaagaccacgagaatgggacagggactaatacgtacgcagcgcttaacagtgtttacctaatgatgaacaaccagatgcggctgttaggaatggaaaccatggcgtggcaggaaatacgtcatgctatcattttactgactgacgggaaaagcaacatgggtgggagtcctaagaccgctgtggaccatatccgggagatcctgaacatcaaccagaagcgaaacgactatctggatatttatgccatcggagtagggaaactggacgtagattggagagaactgaacgaactagggtctaaaaaggacggcgaaagacatgcttttatattgcaggacactaaagcattgcaccaggttttcgagcacatgctggatgtgagtaaactgacagacaccatctgtggtgtcgggaatatgtctgccaatgctagcgaccaggaacgcactccatggcacgtgaccatcaagcctaaatcacaggaaacttgcaggggagctcttatctccgatcagtgggtactcacagcggctcattgtttccgagacgggaatgatcacagcttgtggcgtgtcaacgtcggcgaccctaaatcccagtgggggaaggaatttctgatcgaaaaagcggtgatctcaccagggtttgatgtgtttgctaagaagaatcaaggaattctggaattctacggcgacgatattgccctcttgaaacttgcccagaaggtcaagatgagtacacacgcgagaccaatctgcctgccatgtacaatggaagccaacctcgccctgcgacggccacagggtagtacctgccgtgaccatgagaatgagttgctgaacaagcagtccgtccctgcccactttgtggccctgaatggctctaagctgaatataaatctgaaaatgggcgttgagtggacgagttgtgctgaagtggtctcacaggagaagacgatgtttcctaacctcacagacgtgcgagaggttgtgaccgatcaattcctttgcagcggcacccaggaagatgagtctccttgtaagggggagtccggaggggccgtctttctcgaacgcagatttaggtttttccaggtcgggctagtctcctggggcctgtataacccttgtctggggtccgcagacaagaactcacgaaagagggccccccgcagtaaagttccccccccacgcgactttcatataaacctgttccgcatgcagccctggctgagacagcatctgggggatgtcctgaattttctacctctctag

SEQ ID NO: 70510 - DNA, 1617 bp, Artificial Sequence
  derived and/or modified sequence
atgcgggccctgtgcatccgggagacctgcagcagcgagctgggcttttcacgcaattggagccgccgcaaagccggccactgcccaaaccctgggatttctcttggcgctgtcaggacagggttccgctttggccatggggataaggtaagatatcgatgcagttcaaatctcgtactgacagggtcaagcgaacgcgaatgccagggaaatggtgtgtggagcgggacagaaccgatctgcaggcagccgtattcctacgatttccccgaggatgtggccccagctctgggtacttcctttagccatatgcttggcgcaacgaacccaacgcagaagaccaaggaccacgagaatggaacggggacgaatacgtacgccgctttaaattctgtctacctcatgatgaacaaccagatgcgattactcggaatggagaccatggcctggcaagaaattcgccacgctattatactcctgaccgacggcaaatccaatatgggtggatctccaaagacggcggttgatcatattagggagattctgaatatcaaccagaaacgcaatgactatttagatatttacgcaatcggggtcggcaagctagatgtcgactggagagagctgaatgagctcggttccaaaaaggatggtgagcgccacgccttcatactgcaggacaccaaggctttacaccaggtcttcgaacatatgttagatgtgtctaagcttaccgacaccatctgtggagtgggaaacatgtccgccaacgccagtgatcaggaaagaacaccatggcacgtaactatcaagccgaaatcacaagaaacttgtcggggtgcactgatttcagatcagtgggtacttacggccgcgcactgttttcgggatggcaacgaccattcactttggcgagtcaacgtgggtgacccaaagagtcagtgggggaaggagtttttgattgagaaggccgttatctcgccaggttttgatgtgttcgctaagaagaaccagggaattctcgaattttatggcgacgacatagcactgctcaaacttgcccagaaagtcaagatgtccacccacgccaggccgatatgcctgccctgcacgatggaagccaacctcgccttgaggcgcccacagggatctacatgcagagatcacgaaaacgaattgcttaataaacaaagtgtgcccgcgcactttgtcgctctgaacggctcaaaacttaacatcaaccttaaaatgggcgtggaatggacatcatgcgccgaagtggtatcacaagagaaaaccatgtttccaaatctgacagatgttagagaagtcgttacagaccagtttctctgcagcggcacgcaggaggatgaaagtccatgtaagggagagtctgggggggcagttttcctggagcggaggtttaggttttttcaggtgggcctggtgagctggggactgtataatccctgtttaggctccgccgataagaatagcaggaagagggcgccacgtagcaaagttccccccccccgggactttcatattaatctgtttcgcatgcagccctggctgagacagcatctcggggacgtgcttaattttttacccttgtag

SEQ ID NO: 70511 - DNA, 1617 bp, Artificial Sequence
  derived and/or modified sequence
atgcgggccctgtgcatccgggagacctgcagcagcgagctgggctttagcagaaattggtcacgacgaaaagcaggtcactgccctaatcccggcatcagtctcggcgctgtgagaactggcttcaggttcgggcacggtgataaagtcagataccggtgcagtagcaatttggtactaaccgggagctcagaacgcgagtgccagggcaatggcgtatggtccggcacagagcccatttgtaggcagccctacagctatgatttcccagaagacgttgccccggccctcggcacttcatttagccacatgctcggagccaccaacccaacccaaaagactaaggatcatgagaatggtacaggcactaatacatacgcagccctcaattcagtgtatctgatgatgaacaatcagatgagactactaggcatggaaaccatggcctggcaggagattagacatgcgatcatcctactgactgatggcaagagcaacatggggggaagtccaaagactgcagtagatcacatcagagagatcctgaacattaaccagaagcgtaacgattatctggacatctacgccatcggcgtgggaaagcttgatgtggactggcgagaattgaatgagctaggctctaaaaaagatggtgaacgccatgcatttattcttcaggatacgaaagccctccaccaggtgttcgagcacatgcttgatgtgtcaaagctgacggataccatttgtggagtcggcaatatgagtgccaatgctagcgaccaggaacggacgccctggcatgtgacaataaagcctaagtctcaggagacttgtcgaggagccctcatctcagaccagtgggttctaaccgccgcacattgttttcgggatggcaacgatcacagtctttggcgggtaaatgtgggcgaccctaaaagtcaatgggggaaagaatttttgatagaaaaggcagtgatttctcccgggttcgatgtatttgccaagaaaaaccagggcatactagagttttacggagacgacattgccctgctgaaactagcccaaaaggtcaagatgtccacccacgcacgccctatctgtcttccatgcacgatggaggccaatctcgcattacgccggccccaaggcagtacttgcagggatcacgagaatgaacttctgaataagcagtctgtgcctgcacactttgtggcccttaatggctccaagttaaacatcaatcttaagatgggtgtggaatggaccagttgcgcagaagtggtcagccaggaaaagactatgtttccaaatttaacagacgtgcgcgaagtggtgactgatcagtttctgtgctccgggacgcaggaagatgagagcccatgcaaaggagagtcaggtggcgctgtgttcctggagcggcgcttccgtttctttcaggtcggactcgtgtcctgggggctgtataacccctgtctgggcagtgccgacaaaaatagcaggaagagggccccgcgatccaaagtgcccccccccagagactttcacattaatctgttcaggatgcaaccgtggttacggcaacacctcggggacgttctgaattttctgcccctgtag

SEQ ID NO: 70512 - DNA, 1617 bp, Artificial Sequence
  derived and/or modified sequence
atgcgggccctgtgcatccgggagacctgcagcagcgagctgggcttctctcgcaattggtcccgtcgaaaagctggacattgcccaaacccaggcatcagtctcggggctgtgcgtaccggcttcaggttcggtcacggagacaaagtgaggtaccggtgttcatctaacctggtcttaacaggctcctctgaacgcgaatgccaaggaaatggggtttggagcggaaccgaacccatctgcaggcagccatactcctatgacttccctgaggatgtggcacctgccttggggacttcgtttagccacatgcttggggctacaaacccaactcaaaagacaaaggatcacgagaacggtactggaacaaatacgtatgccgccctaaatagcgtctacctaatgatgaataaccagatgcggctcctagggatggagacgatggcctggcaggagattcgccacgccatcattctgcttaccgatggaaaatccaatatgggaggtagccctaagacggcagtggatcacattcgggaaatcctgaacatcaaccagaagagaaacgactacctggatatttacgctataggggttggcaaactggacgttgattggcgcgaactaaacgaactgggctcgaagaaggatggagagcgccatgcattcatactccaggacacaaaggccctgcaccaggtcttcgagcacatgttggacgtgtctaaactgaccgataccatttgtggggtaggtaacatgtctgccaacgcatcggaccaggagcgcaccccttggcatgtgactattaagccgaaatcccaggaaacatgccgaggggccctgatttccgaccaatgggttctcaccgccgctcattgcttccgagacggcaacgaccattccttatggagagtgaacgtcggtgatccaaagtctcagtggggcaaggagttcttaattgaaaaagctgtaatctcgccaggattcgacgtttttgccaagaagaaccagggcattctggagttttatggagatgatattgccctgcttaagctcgcccagaaagttaaaatgtcgacccacgcaaggccgatctgcttaccatgtaccatggaggcaaacttggctttgcggcgccctcaggggtcaacttgtagagatcacgaaaacgagttattaaacaaacaatcggtgcccgcccacttcgtggctctcaatggatccaagctgaacatcaacctgaaaatgggagtggagtggactagctgcgctgaagttgtgtctcaggaaaaaactatgttcccgaaccttacagacgtcagagaggtcgtgactgaccagttcctgtgcagtggcacacaggaggatgagtctccttgtaagggcgagagcgggggcgccgtgtttctggaaagacgcttccggttttttcaagtcggccttgtgagctggggtctttataatccctgtctgggttcagccgacaagaattctcgtaagcgcgcgccccgctctaaagtgcctcctcctcgtgacttccacattaacttgtttagaatgcagccgtggcttaggcaacacctgggcgacgtgctgaactttttgcctttgtag

SEQ ID NO: 70513 - DNA, 1578 bp, Artificial Sequence
  derived and/or modified sequence
atggttttattctgccttttgttcctctaccccgcagggcattgtcccaacccaggaatttccctgggagccgtgcgaacagggttccgttttggccacggcgacaaagtgcggtatcgatgtagctcaaatctggtgctgaccgggtcctcagaacgtgagtgtcagggcaacggagtgtggagtggtaccgagccaatttgcagacagccatacagctacgacttccccgaggacgtggccccagcacttggtacttccttctctcacatgttgggcgcaaccaaccctactcagaagactaaagaccacgaaaacggaacgggaaccaacacctacgcagccctcaattccgtgtacctaatgatgaacaatcaaatgagactcctcgggatggagaccatggcctggcaggagatcagacacgcaattattttactcacagacggtaagagcaacatgggtgggagcccaaagaccgccgtcgatcatatcagagaaatactgaatatcaatcagaagcgcaatgactatctggacatctacgcgatcggtgtgggcaagctcgatgttgattggcgcgaactaaatgagcttggctccaaaaaggacggggaaagacacgccttcatactgcaggacacaaaggccctacatcaggtgttcgagcatatgctggatgtatctaagttgacagacaccatttgcggagttgggaacatgagcgctaatgcatccgatcaagaacggaccccttggcacgtgactattaagcctaagagtcaagagacctgtagaggcgctctcatcagtgatcaatgggtgcttacagctgcccactgttttcgcgatggtaatgaccatagtttgtggcgagttaatgtaggtgatccaaaatctcagtggggcaaagaatttctgattgagaaggctgttatcagccccggatttgatgtttttgcaaagaagaaccaggggattctagagttctatggggacgatattgctttgctgaaactggcacagaaagtaaagatgtcgactcatgccagacccatctgtcttccttgcacaatggaagcgaaccttgccctgcgtagaccacagggctctacttgtcgagaccacgagaacgagcttctgaacaaacagagcgtaccggctcacttcgtggctttgaacggtagcaaactcaatatcaatttgaagatgggcgtagaatggaccagttgtgccgaggtagttagtcaagaaaaaactatgtttccaaacttgaccgatgtgcgggaggtcgttaccgaccagtttctttgcagcggcactcaggaggacgagtccccctgcaaaggtgagtccgggggagctgtttttctcgagagaagatttagattcttccaggtgggactggtttcatggggtctgtataacccctgcctgggatcagctgataagaattctaggaagagagcgcctcgatctaaagtgcctccaccgagagacttccacatcaatctgtttcgtatgcagccctggcttagacagcatctgggtgacgtgttgaacttcttgcctctctag

SEQ ID NO: 70514 - DNA, 1578 bp, Artificial Sequence
  derived and/or modified sequence
atggtgctgttctgtcttttgtttctgtacccggctggccactgcccgaatccaggaatctcgctgggagcagtccgcacggggttccgatttggtcatggggacaaggttcgttacagatgcagtagtaatttagtgctaacgggaagtagcgagcgagaatgccaggggaacggggtgtggagcggaacagaaccgatttgcaggcaaccttactcgtacgatttcccagaggatgtggccccagcattagggacgtcattcagccacatgctgggggctaccaatcccacccagaagactaaagaccatgaaaacggcaccgggactaatacctatgcagcattaaatagcgtttatttgatgatgaataatcagatgcgcctgttggggatggagacaatggcctggcaggagattaggcacgctatcatcctcttaacagacggaaagtccaacatgggcggtagtccgaaaaccgcagtggatcacattagggagattctaaatatcaatcagaagagaaacgattaccttgatatatatgccattggcgttgggaagctggacgtcgattggagagaactcaacgagttggggtcaaagaaggacggtgagcgccacgcttttatactgcaggacacaaaggcattacaccaggtatttgaacacatgctggatgtctccaagctgaccgacaccatctgtggcgtggggaacatgtctgctaatgcatctgatcaggagaggactccatggcacgtgaccattaaaccaaaatcgcaggagacctgtcgtggtgcgttgattagcgaccaatgggtgctgacagcagcccactgtttcagggatggcaacgaccactctctatggagggtgaatgtaggcgacccaaaaagtcagtgggggaaagaatttttgatagaaaaggctgtgatcagccctggcttcgatgtcttcgccaagaagaaccagggcatccttgagttctacggtgatgatatcgcgctgttgaagttagctcagaaggtgaagatgagcactcacgcaaggccaatctgcctgccttgcacaatggaggcaaatctcgccttgaggcgccctcagggcagcacctgccgggaccatgaaaacgagctactgaacaaacaaagtgtgcctgcccattttgtggctttaaatggctctaaactgaatattaacctcaagatgggcgtcgaatggacttcatgcgcagaggtggtttcccaagagaagacaatgttcccaaatctgaccgacgtgcgcgaggtcgtcactgaccagttcctgtgtagcggaacacaagaggatgagagcccctgcaaaggagaatcaggcggtgcagtgtttctagagcggaggttccgtttttttcaggtcggactggtgagctgggggctgtacaatccttgcttaggctccgccgataagaactcccgaaaaagagcacctaggagcaaagtgccgcctccaagagacttccatatcaatctgtttcgcatgcagccctggctgcgacagcacctaggcgacgttcttaacttcctgcccctttag

SEQ ID NO: 70515 - DNA, 510 bp, Artificial Sequence
  derived and/or modified sequence
atgcgggcactttgcataagggagacgtgctccagtgagctgggattctcgcgtaactggtcccgccgaaaagctggccattgcccgaaccccggaatctcgctgggggcagtgcggacggggtttagattcggccatggcgacaaggttagataccgctgttccagcaacctggtgctgacaggatcatccgaacgtgagtgtcagggcaacggggtgtggagcggtactgagcctatttgtcggcagccctacagctatgatttcccagaggatgtagcccctgctcttggcacaagtttcagccatatgcttggtgctacgaaccccactcagaaaacaaaagaccacgagaacggaactggtactaatacttatgcagctctgaactccgtttatctgatgatgaataatcagatgaggcttctggggatggaaaccatggcttggcaggagatcagacatgccattatacttctcacagatgggaaaagtaatatgggaggatag

SEQ ID NO: 70516 - DNA, 510 bp, Artificial Sequence
  derived and/or modified sequence
atgagggcactttgcattcgcgaaacttgtagcagcgagctgggcttcagtcggaactggtcacgccgtaaagccggtcattgccccaatccaggcatttcattgggggctgtcaggacgggttttcgatttggccacggagataaagtgagatacagatgtagctctaacctcgttctgactggaagctcagagcgtgagtgtcagggaaacggcgtgtggtctggtacggagcccatttgtcggcaaccctatagttacgactttccagaagacgtggccccagccctgggtactagtttctcacatatgctcggcgctacaaaccctacccagaagaccaaagaccacgagaatggaactggaactaatacatacgcagcactgaacagcgtgtacctgatgatgaataaccaaatgcgacttctgggaatggaaacaatggcttggcaagagatacgccacgctatcatcttgctgactgacggaaaaagtaacatggggggttag

SEQ ID NO: 70517 - DNA, 510 bp, Artificial Sequence
  derived and/or modified sequence
atgagagccctctgtattagggaaacctgtagctccgagcttggcttctctcgcaactggtctcggagaaaggcagggcactgcccgaatcctgggatcagcctgggtgccgtgcgtaccggatttcgtttcgggcatggagacaaagttcggtataggtgttcgagcaatctggtactgactggctccagcgagcgggagtgtcaaggaaatggagtttggtctggcacagaaccaatctgccggcagccctattcctacgattttcccgaggacgtcgcgcctgccctggggaccagcttcagccacatgctcggcgcaactaatcccacccagaagactaaagaccacgagaacgggaccggtaccaatacatatgccgctctgaattccgtgtacttaatgatgaacaaccagatgcgactgctgggaatggagacgatggcctggcaagagatcaggcacgcaatcatattgctcacagatggaaagtcaaatatgggcggttag

SEQ ID NO: 70518 - DNA, 1578 bp, Artificial Sequence
  derived and/or modified sequence
atggttctgttttgtttactttttttgtaccctgcaggccactgccctaaccctggcatctctttgggtgccgttcggaccggttttagatttggacacggtgataaagtgcgctaccgctgcagtagtaacctcgtgctgaccggttccagtgagcgagagtgtcagggcaatggtgtatggagcggaactgaaccaatttgccgacagccatattcctatgactttcccgaggatgtcgcccctgccttaggaacaagctttagccatatgctaggggcaacaaatcctacccagaagacaaaagaccacgaaaacggtaccggcacaaatacttatgccgcactgaacagcgtgtatctgatgatgaacaatcagatgcggttgctcgggatggaaactatggcatggcaggaaattcgccatgccattattctccttactgatggcaaatctaacatgggaggaagccccaagacggccgtcgatcatattcgagaaatcctgaatatcaaccagaagcgaaatgattatctggacatctacgcaattggggtgggaaagctggatgtggattggagggaactgaatgagctgggatcaaaaaaagatggcgaacggcacgcattcatactgcaggatactaaggccctccaccaggtctttgagcatatgctagacgtcagtaagttaacggacaccatctgtggtgtcggaaatatgtcagctaacgctagtgatcaagaacgaactccgtggcatgtgacaataaagccaaaaagtcaggagacctgtcgaggagcattaatttcggaccagtgggttttgaccgcggctcattgcttccgtgatggaaatgaccactcactttggagggtgaacgttggtgatcccaaatcccagtggggcaaagaattcttgatagagaaggccgtgattagccccggttttgatgttttcgctaaaaagaatcaagggattcttgaattttatggcgatgatattgcccttttaaagctcgcccaaaaggtgaagatgagtactcatgcccgtccgatatgcctgccctgtaccatggaggccaacctggctttaaggcggcctcagggatcaacttgtcgtgatcatgaaaacgaactcctgaataagcagagcgttcccgcacatttcgtggcactaaacggcagcaaactgaatattaacctcaaaatgggcgttgaatggacatcctgtgccgaggtcgtgtcacaggagaaaacaatgttccccaacctcacagacgtaagagaggtagtcacagatcagttcctgtgttctgggacacaggaggatgagtcgccatgcaagggcgagtccggcggagcggtgttcctcgagcgcaggtttaggttcttccaagttggactcgtgagctggggcctatataacccatgtctcggttcagccgataagaactctcgcaagcgcgctccgcgatctaaggtcccaccaccccgagattttcacataaacctgttcaggatgcagccttggctgaggcaacatcttggcgatgtgctgaatttcctgcccttatag

SEQ ID NO: 70519 - DNA, 1578 bp, Artificial Sequence
  derived and/or modified sequence
atggtactcttctgcctcctgttcttgtatccagcgggacactgccccaaccctggaatctccctgggcgcagtcagaaccggatttcgcttcggtcacggcgataaagtgcggtatcgatgtagctctaacctggttctaactggcagttctgagcgagagtgtcaggggaacggcgtatggtctggtaccgagccaatatgccgacaaccatatagctacgatttccctgaggacgtggccccagctcttggaacatcgttcagccacatgctgggcgctacaaaccctacacagaagacaaaagaccatgagaacggaaccggaaccaatacttatgccgctcttaattcggtgtatctaatgatgaataaccagatgcgcctcttgggaatggagaccatggcatggcaggagatccgccatgccataatcctgctgaccgacgggaagagcaatatgggaggatcccccaagactgccgtcgatcacattcgagagatccttaatatcaaccagaaaaggaacgattacctggatatctacgccattggtgtgggaaaactggacgtggattggcgggagctaaacgaactcggcagcaagaaagatggagaacggcatgcctttattctccaggacactaaggctctgcatcaggtgtttgaacatatgttggacgtgagcaagctcacagacacaatctgcggagtgggtaacatgtcagctaacgcttcagaccaggaacggactccatggcatgttaccatcaagcccaaatcgcaggagacatgccgcggtgctctgatcagtgaccagtgggtgctgactgcggctcattgttttcgagatggaaacgaccattcactgtggagggtcaatgtaggagacccgaagagtcagtggggaaaagaattcctgattgagaaagctgtgatctcccccggtttcgacgtgtttgcaaagaagaaccaggggattctcgaattttacggagatgatatcgcccttctgaagctggcccagaaagtgaagatgtctacacatgcacgcccaatctgtctcccctgcacaatggaagcaaacttggccttaaggcggccacagggcagtacctgccgagaccacgagaacgagttactaaataaacaatctgtcccagctcacttcgtggcactgaacggaagcaagctgaacatcaatctgaaaatgggagttgagtggacgagctgcgccgaggttgtgagccaggaaaaaaccatgttccccaatctcacagatgtgcgagaggtcgtcacagaccagttcctctgcagcggcacacaagaagacgaatccccatgtaagggagagtcaggtggtgccgtattccttgagaggcgttttagattttttcaggtgggccttgtgtcttgggggctgtataatccttgtctcggcagtgccgacaagaatagtcggaaacgggcaccaagaagcaaagtgccccctcctcgtgactttcacataaacctgttcagaatgcagccttggttgcgccagcatttgggagatgtcctgaattttctgcctttatag

SEQ ID NO: 70520 - DNA, 1578 bp, Artificial Sequence
  derived and/or modified sequence
atggtcctattctgcctgctgttcctgtaccccgcaggccactgtcccaaccccggaatcagcctcggcgcagtgcggaccggttttcgctttggacacggagacaaggttcgttataggtgctcatccaacctcgtgttaacgggatcttccgaacgggagtgtcaaggtaacggggtgtggtccggcactgagccaatctgtagacaaccgtattcttatgattttccagaggacgtggcgcctgcgctggggacttctttttcccacatgttgggtgcaacaaaccctacgcaaaaaaccaaggaccatgagaacgggaccggaacgaacacttacgcggcactaaattctgtatacctaatgatgaataaccagatgcgcctgttgggtatggaaaccatggcgtggcaagagattagacatgccataatcctgctcaccgatgggaaatccaacatgggcggatcacccaagacggcagtggaccatatccgtgagatcctgaacataaaccagaaacggaatgattacttggatatctatgcaattggagtaggaaagctggacgtcgattggcgagaactcaatgaactcgggagcaaaaaggacggagagcggcacgcttttattttgcaggatacaaaggctctccaccaggtgtttgagcacatgctggatgtgtctaagctgaccgatacaatctgcggagtgggtaatatgtccgccaatgcctctgaccaggagagaaccccctggcacgtcacaatcaagcctaaatcccaagaaacctgtcggggagccctgatatctgaccaatgggtgctgacagcagctcactgctttagggacggaaacgaccacagcctgtggcgggtgaatgtgggtgaccccaaatctcagtggggaaaggagttcttgatcgaaaaggcggttatttcaccgggatttgacgtctttgccaaaaaaaaccagggaatcctggaattctacggtgacgacattgccctactcaaactagcgcagaaggtcaaaatgtccactcacgcgaggcctatctgcctgccgtgcactatggaagcgaacttagctctgagaaggccccagggaagcacttgccgggaccacgagaacgaattgctaaacaagcagtctgtcccagctcatttcgtggctttgaacggaagcaagttgaacattaatctaaagatgggggtggagtggacctcctgcgccgaagtggtatcccaagagaagaccatgttccccaacctcaccgacgtgcgggaggtcgtaacagaccagttcctgtgctcaggcactcaagaagatgaatcaccttgtaagggggagagcgggggagctgttttcttggaacgcagatttcgcttctttcaggtgggcctggtgtcttggggtttgtataacccttgtctggggtccgctgacaaaaactctcgcaagcgggctcccaggagcaaggttcccccaccacgcgatttccacattaatctgttcagaatgcagccgtggctcagacagcacttaggtgatgtgctaaacttcctgcccctctag

SEQ ID NO: 70521 - DNA, 438 bp, Artificial Sequence
  derived and/or modified sequence
tgaggacattgccctaatccgggaatttcacttggcgctgtgcggactggctttagattcggccacggagacaaggtacgatacagatgctctagcaatttggttctgacaggctccagcgagagagagtgtcaaggaaacggagtttggtccggaactgagcctatctgtaggcagccttactcctatgatttccctgaggacgtggcacctgccctgggcacatcctttagtcacatgttgggtgccacaaaccccacacaaaagacaaaagatcacgagaatggcaccggcactaacacttacgcagccctgaactctgtttacctgatgatgaataaccagatgcgccttctgggaatggagacaatggcttggcaggagatacgccacgcgattattttacttacggatgggaagtcaaacatgggaggttag

SEQ ID NO: 70522 - DNA, 510 bp, Artificial Sequence
  derived and/or modified sequence
atgcgggcattgtgtattcgcgagacctgctctagcgaactgggcttttctcgcaactggagtcgtagaaaagccggacattgtcctaatcctggaatatccctgggggcagtgcgtacaggcttccgtttcggacatggagataaagtacggtaccgctgctcaagcaacttggtgctgacgggaagctccgagcgggaatgtcaggggaacggagtgtggagcgggacggaacctatttgcagacagccatactcctatgacttccccgaagatgtcgctcctgccctcgggactagcttttctcacatgctgggtgcgactaatcccactcaaaaaacaaaggaccacgaaaacggcactggtactaacacctatgccgcactgaacagcgtctacctcatgatgaacaaccagatgcgccttctcggtatggaaactatggcctggcaggagatccggcacgcaattatcctgctgacagatggcaaaagtaatatgggcggttag

SEQ ID NO: 70523 - DNA, 1578 bp, Artificial Sequence
  derived and/or modified sequence
atggtcctcttttgcttgctgttcctgtacccggctggccactgccctaaccccggtatttcgctgggggcagtcaggactggcttccgctttggacacggggacaaagtgaggtaccgctgctctagtaacttggttttaaccggttcctctgagcgggaatgccaggggaatggcgtgtggagtggcaccgagcctatctgtcgccaaccctacagctatgattttcccgaagatgtcgccccagctctgggcacatctttctcccacatgctgggtgcgacaaacccaacacagaagaccaaggaccatgagaacggtaccggcacaaacacctacgccgctcttaactctgtttacctgatgatgaacaatcagatgaggcttcttggaatggagactatggcctggcaggagattaggcatgccataatccttctgaccgacggaaagagcaatatggggggatcccctaagacagctgtagaccacattcgggaaattctgaacataaaccagaagcggaacgactatcttgatatctacgccattggcgtgggtaagctcgatgtggattggcgggagctaaacgagctcggcagcaagaaggacggggagaggcatgcgttcatacttcaggatacaaaagccctccaccaggtcttcgagcacatgctcgacgtgtccaaactcaccgatacaatttgcggagtaggcaatatgtccgcaaacgcctcagatcaggagagaactccctggcacgtcacaattaaacctaagagtcaggagacgtgtaggggtgccctgatctccgatcaatgggtgctcaccgcagctcattgtttccgcgacggaaacgatcattcattgtggcgcgtgaacgtcggggaccctaaatctcagtgggggaaggaattcctgattgaaaaggcggtcatctctccgggttttgatgtgtttgctaagaagaatcaaggaatcttggagttttacggagatgatattgctctgttaaaactagcccaaaaggtgaaaatgtccacccacgctaggccgatttgtctgccctgtacgatggaagcaaatctggccctccggagaccgcagggttccacatgtcgcgaccacgaaaatgagctgctgaacaaacagtccgttcccgcacatttcgttgccttgaacggatcaaaattgaatatcaatctgaagatgggcgtcgaatggaccagttgcgcagaggtggtctcacaggaaaaaaccatgtttccaaatttgactgatgttcgagaagtcgtcacagatcaattcctatgctctggtactcaggaggacgagtcgccttgtaaaggcgagtctggcggagccgtcttcttagaaagacgattcaggttctttcaggtcggactagtatcatggggcttgtataacccctgcctaggctccgccgacaagaactcaaggaaacgagccccaaggagcaaagtgccaccacctagggattttcacattaatctatttaggatgcagccctggttacggcagcatttgggtgacgtcctaaactttctgcctctgtag

SEQ ID NO: 70524 - DNA, 438 bp, Artificial Sequence
  derived and/or modified sequence
taagggcactgtccaaaccccggtatcagtctgggcgcagtccggacgggcttccgcttcgggcacggcgacaaggtcagatatagatgttccagtaacctggtactgacaggatcctccgaaagagagtgtcaagggaacggagtgtggagtggcaccgagccaatctgtaggcaaccttacagctacgacttcccagaagacgtggctccagctctgggcacctcttttagccacatgctcggcgctactaaccctacacagaaaactaaggatcatgagaacggaacaggaaccaacacctacgcggctcttaacagtgtctacctgatgatgaataatcagatgaggctgctcggcatggaaaccatggcctggcaggagattcgacatgccatcatcctcctaactgacgggaagtcaaacatggggggatag

SEQ ID NO: 70525 - DNA, 1617 bp, Artificial Sequence
  derived and/or modified sequence
atgcgggcactttgcatcagagagacgtgctcctccgaactggggttttctcgcaactggtcgcgccgtaaggccggacattgcccaaacccgggaatctctctcggtgcggttcgaaccggattccggttcggccacggagataaagttcgttatcgctgcagctcaaacctagtgctcacagggagcagcgaacgcgagtgccagggtaatggtgtctggtccggaactgaaccaatatgcagacaaccctattcatatgacttccctgaagacgttgcacctgccttaggcacgtcgttttcgcacatgctgggggctaccaaccctacacaaaagaccaaagaccatgaaaatgggactggaactaatacgtatgcagccctaaactccgtgtacctaatgatgaacaaccagatgagactgctgggtatggaaacaatggcttggcaagagattcggcacgccataatcctactgacagacggcaagagcaatatgggcggaagtcctaagactgcagttgatcatatcagggaaatcctcaacataaaccagaagcgaaacgattatctcgacatctacgcaattggcgtgggcaagctggacgttgattggcgcgaactgaacgagcttgggtctaaaaaggatggggaacgccatgccttcatcctgcaagatacgaaagcattacaccaggtcttcgagcatatgctcgacgtctctaagcttacagacactatctgcggagtcggcaatatgtctgcaaacgcttcagaccaggaacgaacaccatggcacgtgacaattaagcccaagtcgcaggagacctgtagaggcgctctgattagcgatcagtgggtcctgactgccgcacactgctttcgagatgggaacgatcactcattatggagagttaatgtcggtgacccaaaaagtcagtggggaaaagagtttcttatcgagaaagctgtgatttccccaggatttgatgtctttgcaaagaaaaaccagggcattctcgagttctacggcgatgacattgccttgttgaaactggctcagaaggtgaaaatgtctacccatgccaggccaatctgcctgccctgcacaatggaggccaatctcgccctgcggaggccccaggggagcacttgtcgtgatcatgagaatgaattgctgaataagcagtccgtgcctgcacactttgtcgcccttaacggctccaagttgaacatcaatttgaagatgggtgtcgagtggacttcatgcgctgaggtggtcagtcaagaaaaaacaatgtttcctaacctgacagatgtcagagaagtggtgacagaccagtttctgtgctcaggaacgcaggaggatgagtccccttgtaagggcgagtctggaggagcggtgtttctggagaggcggtttcggttctttcaggttggtcttgtctcctggggcctctataacccatgcctaggaagcgccgacaagaatagccgcaagcgagctcctcgctccaaggttcccccacctcgggactttcatatcaatttgttccgcatgcagccatggctacggcagcacctcggtgatgtcctgaatttcctgcccctgtag

SEQ ID NO: 70526 - DNA, 1617 bp, Artificial Sequence
  derived and/or modified sequence
atgagggcactctgtattcgggagacatgcagttcggagttgggtttctcaagaaattggagccgtcgcaaagccggtcattgccctaatccagggatttcactgggtgccgtgcggacagggttccgattcggccatggcgataaagtgcggtatcggtgtagttctaatttggtgctcacgggttctagtgagcgcgagtgccaaggtaatggcgtgtggagtggaaccgaacccatctgtaggcagccttatagctacgatttcccagaggatgtcgcgccagcactgggcacttccttctcacatatgcttggcgctacaaatccaactcaaaagacgaaagatcatgaaaatgggaccggtactaatacctatgccgcattgaacagcgtttatctgatgatgaataatcaaatgcgcctcttgggcatggagaccatggcgtggcaagaaataaggcatgctattatcctccttactgatggtaagtcaaacatggggggatcaccaaaaacagccgtagatcatattcgagaaatcctgaatataaaccagaaaaggaacgattatctggacatttacgccataggggtggggaaactggacgtggactggcgcgagctcaacgaactggggagtaagaaggatggagaacggcacgcatttatactgcaggacacgaaagcactccatcaagtgttcgagcacatgttggatgtgagcaagctgactgatactatctgtggggtgggaaacatgagtgccaacgcctccgaccaggagaggaccccctggcacgttaccatcaaacccaaaagccaggaaacgtgtagaggtgctctgattagcgaccaatgggtgctcaccgctgctcactgtttccgggacggcaacgaccatagcttgtggcgcgtcaacgtgggcgaccccaaaagccagtgggggaaagagttcctaatagaaaaggcagtcatctctccaggctttgatgttttcgcaaagaagaaccagggaattttggaattctacggtgatgacatcgccttacttaaactggcacaaaaggttaagatgagcacccatgctcgcccaatctgcctgccctgtacaatggaagctaatctggctctaagaagaccccagggctccacgtgtcgcgaccacgagaatgaactgctcaataaacagagtgtgccggctcacttcgtggcgctgaatggatcaaaacttaacatcaatctgaagatgggcgtggagtggacaagctgcgccgaggtcgtgtcccaggaaaagaccatgtttcccaacctgaccgacgtacgggaggtcgtgaccgatcagttcttgtgcagtggtacccaagaggacgaaagcccctgcaagggagagagtggaggtgcggtcttcttggaaaggcgctttcggttcttccaggttgggttggtcagctggggactgtacaacccgtgtctcggttcggctgataagaacagtagaaagcgggctccacgttccaaagtaccgcctccccgagacttccatatcaatctgtttcgtatgcaaccgtggctgcgccagcacctcggggacgttctgaatttccttccgctatag

SEQ ID NO: 70527 - DNA, 1617 bp, Artificial Sequence
  derived and/or modified sequence
atgagggccctctgtattcgggaaacatgttcttctgaacttgggttctctcggaactggtctcgtcgtaaagcaggtcactgtcccaatccaggcatcagcttgggcgctgtgcgcaccgggttcaggttcggccacggggataaggtgcggtaccgctgcagctccaatctcgtcctgacagggagcagtgagagagaatgccaaggcaatggggtgtggtcaggaaccgaacctatctgccgacagccctatagctacgatttcccggaagacgtcgctcccgctttaggtactagcttcagtcatatgttaggcgctaccaaccctacacagaaaaccaaggaccatgagaacggcactggcaccaatacgtatgccgcactgaatagcgtatatctaatgatgaacaatcagatgcggctcctggggatggaaactatggcttggcaggagatccgtcatgccattattctccttaccgacgggaagagtaatatgggaggaagcccaaaaaccgccgtagatcatattcgcgagattctcaatatcaatcaaaagcgaaacgattatctcgacatttatgctatcggtgtgggcaaattagacgttgattggcgagagctaaacgaactaggcagtaagaaagatggggagagacacgccttcatcctgcaggatactaaagctctccaccaggtgttcgagcatatgctggatgtgtctaaactaacggatacaatatgtggcgttggaaatatgtcagccaacgctagtgaccaggaaaggaccccttggcacgttactatcaagcccaagtcacaagaaacttgtagaggggctctaatcagcgaccagtgggttctcactgctgcccactgcttcagagacggtaatgaccactccttgtggagagtcaacgtgggggaccccaagagtcagtggggcaaggaattccttatcgagaaggctgtgatcagcccaggcttcgacgtcttcgcaaagaagaatcaggggatcctcgagttttacggggacgatattgctttgctcaaattggctcaaaaggtgaaaatgtctacccacgcgcgtcccatttgcctgccctgtacaatggaagccaatttagctctgcggagacctcagggttctacctgccgggaccacgaaaacgagttactcaataaacaatctgtacctgcccattttgtggccctcaacggctccaaactcaacattaacctgaaaatgggcgtcgagtggactagctgtgccgaggttgtgtctcaagaaaagactatgtttcccaatttgactgacgtgcgagaagtggtgaccgatcagtttttatgttccgggacccaggaggatgaaagtccctgcaagggcgaatccgggggtgcagtcttcttggagagaaggttcagatttttccaagtgggtctggtatcatggggattgtacaatccctgcctcggctccgctgataagaactcaagaaagcgggcaccccgtagtaaggtgcctccccctcgggattttcacataaacctgttccggatgcagccctggttacgccagcacctcggcgacgtgttaaattttttgcctctctag

SEQ ID NO: 70528 - DNA, 1617 bp, Artificial Sequence
  derived and/or modified sequence
atgagggccctctgtatcagggagacctgtagctcggagctgggattttcaagaaattggtcacgccgtaaagcagggcattgcccgaatccgggtataagtctgggtgcggtcagaaccggttttcggtttggacacggggacaaagtgcgctaccgttgttcctccaaccttgtcctgaccggatcaagcgaaagggaatgccaggggaatggcgtctggtctgggactgaacccatctgtcgtcagccttattcgtatgactttcctgaggatgtcgcacctgcactggggactagctttagccacatgctgggggcaacaaatcctacccagaagaccaaggaccatgaaaatgggacagggaccaacacatatgccgctcttaacagtgtctacttgatgatgaacaaccagatgcggctgctgggaatggaaacaatggcctggcaggagattagacatgccattatactgctgacagacggcaaatcaaatatggggggttccccaaaaacagctgttgatcatatccgcgaaatcttgaacatcaaccagaagcgcaacgattacctggacatatacgctattggggtcggcaagctagatgttgactggcgggaactaaacgagctgggcagtaagaaggatggcgaaaggcacgcatttatattacaagataccaaagccctgcaccaggttttcgagcacatgttggacgtgagcaagcttaccgataccatttgtggagtgggcaatatgtccgcaaacgcaagcgaccaggagcgcaccccatggcacgtcaccatcaagcccaagtcacaggagacctgtcgcggagctctgatttccgatcagtgggttttgacagctgcacattgcttccgagatggaaatgatcactctctgtggagggtgaatgtgggagatccaaagtctcagtggggcaaggaatttctgattgaaaaggcagtgatctcgccaggctttgatgtgtttgctaaaaagaaccaggggatcctcgagttttacggggacgacatcgcccttctaaagctcgcccagaaagtgaagatgtctacacacgcccgtcctatttgtctgccctgtactatggaggccaatttggctctccgcaggccacagggctctacctgccgtgaccacgagaacgagcttctcaacaagcagagtgtgcctgcgcactttgtcgctctgaatgggagcaaacttaatattaacttaaagatgggagtggaatggacatcatgcgcagaagttgtgtcacaggagaaaaccatgtttccaaacctgactgatgtgagagaggtcgtaacagaccaatttctgtgtagtggcacacaagaggacgaatcaccttgtaagggggagtcagggggagctgttttcctagaaaggcggttccggtttttccaggtagggctagtctcctggggcctgtacaatccctgcctgggctccgctgacaagaatagcaggaagcgggcacccaggtccaaggtaccgcctccaagggactttcacattaatctgtttaggatgcagccttggttgcgccaacacttgggggacgttttgaattttcttccactctag

SEQ ID NO: 70529 - DNA, 1617 bp, Artificial Sequence
  derived and/or modified sequence
atgcgggctctatgtatccgggagacatgcagctctgaattgggttttagtagaaattggtccagacgtaaggctggccactgccctaacccaggtataagtctcggagccgtgaggactggtttccgattcggtcatggggataaggtgagatatcgttgtagctccaatctcgtcttaacaggatcttctgagcgggagtgccagggaaacggggtgtggagcggcactgagcccatctgtaggcagccgtactcatatgatttccccgaggatgtcgcccctgcactaggcacctcgttctcacacatgttaggcgcaacgaatccgacccagaagaccaaggaccatgagaatggaaccgggacaaacacatacgcagctctcaactccgtgtatctgatgatgaataaccagatgcgcctcttgggcatggagactatggcttggcaggagatacgccatgctataatactcctcaccgatggtaaatctaatatgggcggatctccaaagaccgcggtggaccacatccgggaaatactgaacattaaccagaagaggaacgattacctagatatatacgcaataggtgtgggaaagctagacgtggattggcgggagctgaacgagctaggttccaagaaggatggcgagcgtcacgccttcatcctgcaggatactaaggccctgcaccaggtgtttgagcatatgctggatgtgagcaaactgacagacacaatttgcggcgtgggcaacatgtcagccaacgcctcagaccaggaacgcactccctggcatgtgactatcaagcccaagtcccaggagacatgtcggggtgctctaatttcagaccaatgggtgctcacagccgcacactgcttccgcgatggaaacgatcattccctttggcgggtgaatgtgggcgatcccaagagccagtggggcaaggaattcttgattgaaaaggctgtgatctctccaggattcgacgtttttgccaagaagaatcagggaatcctcgagttctacggagacgatatagcacttctcaagctggcccaaaaggttaagatgtctactcacgcacgccctatatgcctgccttgtaccatggaagccaacctcgcgttacgaagaccgcagggatcaacttgcagggaccacgagaatgaactattgaacaaacagagtgtgcctgctcactttgtggccctcaacggctccaaactgaacatcaacctgaaaatgggcgttgaatggacctcatgtgccgaggttgtgtcacaggaaaaaaccatgtttcctaacttgacagatgtgcgcgaggtggtcacagaccaattcctgtgctctggtacccaggaggacgagagcccatgtaagggcgagtccgggggtgccgtgtttctagaacgacggttccgcttctttcaggtcggcttggtgtcttggggactgtataatccttgcctgggctctgctgacaaaaacagccggaaacgggctccaaggagcaaagtccctcccccaagggacttccacatcaacctgtttaggatgcagccgtggttacgccagcatctgggcgatgttctgaatttcctgccgctttag

SEQ ID NO: 70530 - DNA, 1895 bp, Artificial Sequence
  derived and/or modified sequence
tgatggttcttttttgcctgctgttcctgtacccagctggccactgccccaacccaggcatttcactgggcgcagtgcggacaggcttccgctttggtcatggggacaaggtccgctatcgctgctcctcgaatcttgtgctcacggggtcttcggagcgggagtgccagggcaacggggtctggagtggaacggagcccatctgccgccaaccctactcttatgacttccctgaggacgtggcccctgccctgggcacttccttctcccacatgcttggggccaccaatcccacccagaagacaaaggatcatgaaaatggaactgggactaacacctatgcagccttaaacagtgtctatctcatgatgaacaaccaaatgcgactcctcggcatggaaacgatggcctggcaggaaatccgacatgccatcatccttctgacagatggaaagtccaatatgggtggctctcccaagacagctgttgaccatatcagagagatcctgaacatcaaccagaagaggaatgactatctggacatctatgccatcggggtgggcaagctggatgtggactggagagaactgaatgagctagggtccaagaaggatggtgagaggcatgccttcattctgcaggacacaaaggctctgcaccaggtctttgaacatatgctggatgtctccaagctcacagacaccatctgcggggtggggaacatgtcagcaaacgcctctgaccaggagaggacaccctggcatgtcactattaagcccaagagccaagagacctgccggggggccctcatctccgaccaatgggtcctgacagcagctcattgcttccgcgatggcaacgaccactccctgtggagggtcaatgtgggagaccccaaatcccagtggggcaaagaattccttattgagaaggcggtgatctccccagggtttgatgtctttgccaaaaagaaccagggaatcctggagttctatggtgatgacatagctctgctgaagctggcccagaaagtaaagatgtccacccatgccaggcccatctgccttccctgcacgatggaggccaatctggctctgcggagacctcaaggcagcacctgtagggaccatgagaatgaactgctgaacaaacagagtgttcctgctcattttgtcgccttgaatgggagcaaactgaacattaaccttaagatgggagtggagtggacaagctgtgccgaggttgtctcccaagaaaaaaccatgttccccaacttgacagatgtcagggaggtggtgacagaccagttcctatgcagtgggacccaggaggatgagagtccctgcaagggagaatctgggggagcagttttccttgagcggagattcaggttttttcaggtgggtctggtgagctggggtctttacaacccctgccttggctctgctgacaaaaactcccgcaaaagggcccctcgtagcaaggtcccgccgccacgagactttcacatcaatctcttccgcatgcagccctggctgaggcagcacctgggggatgtcctgaattttttacccctctagccatggccactgagccctctgctgccctgccagaatctgccgcccctccatcttctacctctgaatggccacccttagaccctgtgatccatcctctctcctagctgagtaaatccgggtctctaggatgccagaggcagcgcacacaagctgggaaatcctcagggctcctaccagcaggactgcctcgctgccccacctcccgctccttggcctgtccccagattccttccctggttgacttgactcatgcttgtttcactttcacatggaatttcccagttatgaaattaataaaaatcaatggtttccaca

SEQ ID NO: 70531 - DNA, 1895 bp, Artificial Sequence
  derived and/or modified sequence
tgatggttcttttttgcctgctgttcctgtacccagctggccactgccccaacccaggcatttcactgggcgcagtgcggacaggcttccgctttggtcatggggacaaggtccgctatcgctgctcctcgaatcttgtgctcacggggtcttcggagcgggagtgccagggcaacggggtctggagtggaacggagcccatctgccgccaaccctactcttatgacttccctgaggacgtggcccctgccctgggcacttccttctcccacatgcttggggccaccaatcccacccagaagacaaaggatcatgaaaatggaactgggactaacacctatgcggccttaaacagtgtctatctcatgatgaacaaccaaatgcgactcctcggcatggaaacgatggcctggcaggaaatccgacatgccatcatccttctgacagatggaaagtccaatatgggtggctctcccaagacagctgttgaccatatcagagagatcctgaacatcaaccagaagaggaatgactatctggacatctatgccatcggggtgggcaagctggatgtggactggagagaactgaatgagctagggtccaagaaggatggtgagaggcatgccttcattctgcaggacacaaaggctctgcaccaggtctttgaacatatgctggatgtctccaagctcacagacaccatctgcggggtggggaacatgtcagcaaacgcctctgaccaggagaggacaccctggcatgtcactattaagcccaagagccaagagacctgccggggggccctcatctccgaccaatgggtcctgacagcagctcattgcttccgcgatggcaacgaccactccctgtggagggtcaatgtgggagaccccaaatcccagtggggcaaagaattccttattgagaaggcggtgatctccccagggtttgatgtctttgccaaaaagaaccagggaatcctggagttctatggtgatgacatagctctgctgaagctggcccagaaagtaaagatgtccacccatgccaggcccatctgccttccctgcacgatggaggccaatctggctctgcggagacctcaaggcagcacctgtagggaccatgagaatgaactgctgaacaaacagagtgttcctgctcattttgtcgccttgaatgggagcaaactgaacattaaccttaagatgggagtggagtggacaagctgtgccgaggttgtctcccaagaaaaaaccatgttccccaacttgacagatgtcagggaggtggtgacagaccagttcctatgcagtgggacccaggaggatgagagtccctgcaagggagaatctgggggagcagttttccttgagcggagattcaggttttttcaggtgggtctggtgagctggggtctttacaacccctgccttggctctgctgacaaaaactcccgcaaaagggcccctcgtagcaaggtcccgccgccacgagactttcacatcaatctcttccgcatgcagccctggctgaggcagcacctgggggatgtcctgaattttttacccctctagccatggccactgagccctctgctgccctgccagaatctgccgcccctccatcttctacctctgaatggccacccttagaccctgtgatccatcctctctcctagctgagtaaatccgggtctctaggatgccagaggcagcgcacacaagctgggaaatcctcagggctcctaccagcaggactgcctcgctgccccacctcccgctccttggcctgtccccagattccttccctggttgacttgactcatgcttgtttcactttcacatggaatttcccagttatgaaattaataaaaatcaatggtttccaca

SEQ ID NO: 70532 - DNA, 576 bp, Artificial Sequence
  derived and/or modified sequence
agttgacgatgtccctaacagcgaattccaaggcgcccgtgtagcaggagaggagcaagtcggccacgatgcgtgcactgtgcatcagggagacctgcagctccgagctggggttcagcaggaactggtcccgcaggaaggctggccactgccccaacccaggcatttcactgggcgcagtgcggacaggcttccgctttggtcatggggacaaggtccgctatcgctgctcctcgaatcttgtgctcacggggtcttcggagcgggagtgccagggcaacggggtctggagtggaacggagcccatctgccgccaaccctactcttatgacttccctgaggacgtggcccctgccctgggcacttccttctcccacatgcttggggccaccaatcccacccagaagacaaaggatcatgaaaatggaactgggactaacacctatgcggccttaaacagtgtctatctcatgatgaacaaccaaatgcgactcctcggcatggaaacgatggcctggcaggaaatccgacatgccatcatccttctgacagatggaaagtccaatatgggtggct

SEQ ID NO: 70533 - DNA, 435 bp, Artificial Sequence
  derived and/or modified sequence
ctggccactgccccaacccaggcatttcactgggcgcagtgcggacaggcttccgctttggtcatggggacaaggtccgctatcgctgctcctcgaatcttgtgctcacggggtcttcggagcgggagtgccagggcaacggggtctggagtggaacggagcccatctgccgccaaccctactcttatgacttccctgaggacgtggcccctgccctgggcacttccttctcccacatgcttggggccaccaatcccacccagaagacaaaggatcatgaaaatggaactgggactaacacctatgcggccttaaacagtgtctatctcatgatgaacaaccaaatgcgactcctcggcatggaaacgatggcctggcaggaaatccgacatgccatcatccttctgacagatggaaagtccaatatgggtggct

SEQ ID NO: 70534 - DNA, 435 bp, Artificial Sequence
  derived and/or modified sequence
ctggccactgccccaacccaggcatttcactgggcgcagtgcggacaggcttccgctttggtcatggggacaaggtccgctatcgctgctcctcgaatcttgtgctcacggggtcttcggagcgggagtgccagggcaacggggtctggagtggaacggagcccatctgccgccaaccctactcttatgacttccctgaggacgtggcccctgccctgggcacttccttctcccacatgcttggggccaccaatcccacccagaagacaaaggatcatgaaaatggaactgggactaacacctatgcagccttaaacagtgtctatctcatgatgaacaaccaaatgcgactcctcggcatggaaacgatggcctggcaggaaatccgacatgccatcatccttctgacagatggaaagtccaatatgggtggct

SEQ ID NO: 70535 - DNA, 1999 bp, Artificial Sequence
  derived and/or modified sequence
agttgacgatgtccctaacagcgaattccaaggcgcccgtgtagcaggagaggagcaagtcggccacgatgcgtgcactgtgcatcagggagacctgcagctccgagctggggttcagcaggaactggtcccgcaggaaggctggccactgccccaacccaggcatttcactgggcgcagtgcggacaggcttccgctttggtcatggggacaaggtccgctatcgctgctcctcgaatcttgtgctcacggggtcttcggagcgggagtgccagggcaacggggtctggagtggaacggagcccatctgccgccaaccctactcttatgacttccctgaggacgtggcccctgccctgggcacttccttctcccacatgcttggggccaccaatcccacccagaagacaaaggatcatgaaaatggaactgggactaacacctatgcggccttaaacagtgtctatctcatgatgaacaaccaaatgcgactcctcggcatggaaacgatggcctggcaggaaatccgacatgccatcatccttctgacagatggaaagtccaatatgggtggctctcccaagacagctgttgaccatatcagagagatcctgaacatcaaccagaagaggaatgactatctggacatctatgccatcggggtgggcaagctggatgtggactggagagaactgaatgagctagggtccaagaaggatggtgagaggcatgccttcattctgcaggacacaaaggctctgcaccaggtctttgaacatatgctggatgtctccaagctcacagacaccatctgcggggtggggaacatgtcagcaaacgcctctgaccaggagaggacaccctggcatgtcactattaagcccaagagccaagagacctgccggggggccctcatctccgaccaatgggtcctgacagcagctcattgcttccgcgatggcaacgaccactccctgtggagggtcaatgtgggagaccccaaatcccagtggggcaaagaattccttattgagaaggcggtgatctccccagggtttgatgtctttgccaaaaagaaccagggaatcctggagttctatggtgatgacatagctctgctgaagctggcccagaaagtaaagatgtccacccatgccaggcccatctgccttccctgcacgatggaggccaatctggctctgcggagacctcaaggcagcacctgtagggaccatgagaatgaactgctgaacaaacagagtgttcctgctcattttgtcgccttgaatgggagcaaactgaacattaaccttaagatgggagtggagtggacaagctgtgccgaggttgtctcccaagaaaaaaccatgttccccaacttgacagatgtcagggaggtggtgacagaccagttcctatgcagtgggacccaggaggatgagagtccctgcaagggagaatctgggggagcagttttccttgagcggagattcaggttttttcaggtgggtctggtgagctggggtctttacaacccctgccttggctctgctgacaaaaactcccgcaaaagggcccctcgtagcaaggtcccgccgccacgagactttcacatcaatctcttccgcatgcagccctggctgaggcagcacctgggggatgtcctgaattttttacccctctagccatggccactgagccctctgctgccctgccagaatctgccgcccctccatcttctacctctgaatggccacccttagaccctgtgatccatcctctctcctagctgagtaaatccgggtctctaggatgccagaggcagcgcacacaagctgggaaatcctcagggctcctaccagcaggactgcctcgctgccccacctcccgctccttggcctgtccccagattccttccctggttgacttgactcatgcttgtttcactttcacatggaatttcccagttatgaaattaataaaaatcaatggtttccac

SEQ ID NO: 70536 - DNA, 1578 bp, Artificial Sequence
  derived and/or modified sequence
atggtgctgttctgcctgctgttcctgtaccccgccggccactgccccaaccccggcatcagcctgggcgccgtgagaaccggcttcagattcggccacggcgacaaggtgagatacagatgcagcagcaacctggtgctgaccggcagcagcgagagagagtgccagggcaacggcgtgtggagcggcaccgagcccatctgcagacagccctacagctacgacttccccgaggacgtggcccccgccctgggcaccagcttcagccacatgctgggcgccaccaaccccacccagaagaccaaggaccacgagaacggcaccggcaccaacacctacgccgccctgaacagcgtgtacctgatgatgaacaaccagatgagactgctgggcatggagaccatggcctggcaggagatcagacacgccatcatcctgctgaccgacggcaagagcaacatgggcggcagccccaagaccgccgtggaccacatcagagagatcctgaacatcaaccagaagagaaacgactacctggacatctacgccatcggcgtgggcaagctggacgtggactggagagagctgaacgagctgggcagcaagaaggacggcgagagacacgccttcatcctgcaggacaccaaggccctgcaccaggtgttcgagcacatgctggacgtgagcaagctgaccgacaccatctgcggcgtgggcaacatgagcgccaacgccagcgaccaggagagaaccccctggcacgtgaccatcaagcccaagagccaggagacctgcagaggcgccctgatcagcgaccagtgggtgctgaccgccgcccactgcttcagagacggcaacgaccacagcctgtggagagtgaacgtgggcgaccccaagagccagtggggcaaggagttcctgatcgagaaggccgtgatcagccccggcttcgacgtgttcgccaagaagaaccagggcatcctggagttctacggcgacgacatcgccctgctgaagctggcccagaaggtgaagatgagcacccacgccagacccatctgcctgccctgcaccatggaggccaacctggccctgagaagaccccagggcagcacctgcagagaccacgagaacgagctgctgaacaagcagagcgtgcccgcccacttcgtggccctgaacggcagcaagctgaacatcaacctgaagatgggcgtggagtggaccagctgcgccgaggtggtgagccaggagaagaccatgttccccaacctgaccgacgtgagagaggtggtgaccgaccagttcctgtgcagcggcacccaggaggacgagagcccctgcaagggcgagagcggcggcgccgtgttcctggagagaagattcagattcttccaggtgggcctggtgagctggggcctgtacaacccctgcctgggcagcgccgacaagaacagcagaaagagagcccccagaagcaaggtgcccccccccagagacttccacatcaacctgttcagaatgcagccctggctgagacagcacctgggcgacgtgctgaacttcctgcccctgtag

SEQ ID NO: 70537 - DNA, 510 bp, Artificial Sequence
  derived and/or modified sequence
atgagagccctgtgcatcagagagacctgcagcagcgagctgggcttcagcagaaactggagcagaagaaaggccggccactgccccaaccccggcatcagcctgggcgccgtgagaaccggcttcagattcggccacggcgacaaggtgagatacagatgcagcagcaacctggtgctgaccggcagcagcgagagagagtgccagggcaacggcgtgtggagcggcaccgagcccatctgcagacagccctacagctacgacttccccgaggacgtggcccccgccctgggcaccagcttcagccacatgctgggcgccaccaaccccacccagaagaccaaggaccacgagaacggcaccggcaccaacacctacgccgccctgaacagcgtgtacctgatgatgaacaaccagatgagactgctgggcatggagaccatggcctggcaggagatcagacacgccatcatcctgctgaccgacggcaagagcaacatgggcggctag

SEQ ID NO: 70538 - DNA, 438 bp, Artificial Sequence
  derived and/or modified sequence
tgaggccactgccccaaccccggcatcagcctgggcgccgtgagaaccggcttcagattcggccacggcgacaaggtgagatacagatgcagcagcaacctggtgctgaccggcagcagcgagagagagtgccagggcaacggcgtgtggagcggcaccgagcccatctgcagacagccctacagctacgacttccccgaggacgtggcccccgccctgggcaccagcttcagccacatgctgggcgccaccaaccccacccagaagaccaaggaccacgagaacggcaccggcaccaacacctacgccgccctgaacagcgtgtacctgatgatgaacaaccagatgagactgctgggcatggagaccatggcctggcaggagatcagacacgccatcatcctgctgaccgacggcaagagcaacatgggcggctag

SEQ ID NO: 70539 - DNA, 1617 bp, Artificial Sequence
  derived and/or modified sequence
atgagagccctgtgcatcagagagacctgcagcagcgagctgggcttcagcagaaactggagcagaagaaaggccggccactgccccaaccccggcatcagcctgggcgccgtgagaaccggcttcagattcggccacggcgacaaggtgagatacagatgcagcagcaacctggtgctgaccggcagcagcgagagagagtgccagggcaacggcgtgtggagcggcaccgagcccatctgcagacagccctacagctacgacttccccgaggacgtggcccccgccctgggcaccagcttcagccacatgctgggcgccaccaaccccacccagaagaccaaggaccacgagaacggcaccggcaccaacacctacgccgccctgaacagcgtgtacctgatgatgaacaaccagatgagactgctgggcatggagaccatggcctggcaggagatcagacacgccatcatcctgctgaccgacggcaagagcaacatgggcggcagccccaagaccgccgtggaccacatcagagagatcctgaacatcaaccagaagagaaacgactacctggacatctacgccatcggcgtgggcaagctggacgtggactggagagagctgaacgagctgggcagcaagaaggacggcgagagacacgccttcatcctgcaggacaccaaggccctgcaccaggtgttcgagcacatgctggacgtgagcaagctgaccgacaccatctgcggcgtgggcaacatgagcgccaacgccagcgaccaggagagaaccccctggcacgtgaccatcaagcccaagagccaggagacctgcagaggcgccctgatcagcgaccagtgggtgctgaccgccgcccactgcttcagagacggcaacgaccacagcctgtggagagtgaacgtgggcgaccccaagagccagtggggcaaggagttcctgatcgagaaggccgtgatcagccccggcttcgacgtgttcgccaagaagaaccagggcatcctggagttctacggcgacgacatcgccctgctgaagctggcccagaaggtgaagatgagcacccacgccagacccatctgcctgccctgcaccatggaggccaacctggccctgagaagaccccagggcagcacctgcagagaccacgagaacgagctgctgaacaagcagagcgtgcccgcccacttcgtggccctgaacggcagcaagctgaacatcaacctgaagatgggcgtggagtggaccagctgcgccgaggtggtgagccaggagaagaccatgttccccaacctgaccgacgtgagagaggtggtgaccgaccagttcctgtgcagcggcacccaggaggacgagagcccctgcaagggcgagagcggcggcgccgtgttcctggagagaagattcagattcttccaggtgggcctggtgagctggggcctgtacaacccctgcctgggcagcgccgacaagaacagcagaaagagagcccccagaagcaaggtgcccccccccagagacttccacatcaacctgttcagaatgcagccctggctgagacagcacctgggcgacgtgctgaacttcctgcccctgtag

SEQ ID NO: 70540 - protein, 500 aa, Artificial Sequence
  derived and/or modified sequence
MGAAASRRRALRSEAMSSVAAKVRAARAFGEYLSQSHPENRNGADHLLADAYSGHDGSPEMQPAPQNKRRLSLVSNGCYEGSLSEEPSIRKPAGEGPQPRVYTISGEPALLPSPEAEAIELAVVKGRRQRHPHHHSQPLRASPGGSREDVSRPCQSWAGSRQGSKECPGCAQLAPGPTPRAFGLDQPPLPETSGRRKKLERMYSVDRVSDDIPIRTWFPKENLFSFQTATTTMQAISVFRGYAERKRRKRENDSASVIQRNFRKHLRMVGSRRVKAQSSDLQSSHCTLDEAFEDLDWDTEKGLEAVACDTEGFVPPKVMLISSKVPKAEYIPTIIRRDDPSIIPILYDHEHATFEDILEEIERKLNVYHKGAKIWKMLIFCQGGPGHLYLLKNKVATFAKVEKEEDMIHFWKRLSRLMSKVNPEPNVIHIMGCYILGNPNGEKLFQNLRTLMTPYRVTFESPLELSAQGKQMIETYFDFRLYRLWKSRQHSKLLDFDDVL

SEQ ID NO: 70541 - DNA, 1503 bp, Artificial Sequence
  derived and/or modified sequence
atgggcgctgccgccagcagacggcgcgccttgcgaagcgaggcaatgtccagtgttgccgcaaaggtgagggccgcgcgcgcatttggagagtacctgagccagtcgcaccccgaaaatcggaacggcgctgaccatctcctagccgacgcttattccggtcatgatggctccccggagatgcagcccgctccccagaataagagaagactttcgcttgtgtcaaacggatgctatgaaggttcactatcagaggagccctcaattcgcaaaccagcaggggagggaccgcagcccagagtgtataccatctccggcgaacccgctcttctgccgagccccgaggccgaagctatagaactggccgtcgtaaaggggcgcaggcagaggcatccacaccaccattcacagcctctgcgcgcaagccctggcggatctcgcgaggacgttagccggccctgccagagctgggcaggtagcaggcagggtagcaaggagtgccccggatgcgcccagctggccccagggccaaccccacgcgcctttggtctggatcagccaccactgccagaaacttccggaaggcgtaagaagctggagcggatgtacagcgtggatagagtaagcgatgacatcccgatcaggacttggttcccaaaggagaacctttttagcttccagacggccacaacaaccatgcaagccatttctgtgtttagagggtatgccgagaggaaaagacgcaagagggaaaacgacagcgcatctgtaatacagagaaacttccggaaacacctcaggatggtcggttcacgccgagtgaaggcccagtcaagtgacctgcagtccagccactgtactcttgacgaagcctttgaggatctcgattgggacaccgagaagggcctggaagctgtagcctgtgatactgaaggcttcgtccctcctaaggtcatgctgatcagctcaaaagtgccaaaggcagaatatatacctacaattatcagacgagatgatcccagcataattccaatcctgtatgatcacgagcacgccacctttgaagatattcttgaggaaattgaaagaaaactaaatgtctatcacaagggcgccaagatttggaagatgctcatcttttgccagggaggacccggacatctctatctgctgaagaacaaagtggccacattcgctaaggtcgagaaagaggaggatatgatacacttttggaaaaggctgagcagactgatgagtaaagttaatcctgagccaaacgttatccacatcatgggatgttacattctgggcaacccgaatggtgagaaactgttccaaaacctgaggaccctgatgaccccgtaccgagtcacttttgagtccccactggaattgagcgcccaaggaaagcagatgatcgagacgtacttcgacttccgcttatatcggctctggaagtccagacagcatagcaaactgctggatttcgatgacgtactgtag

SEQ ID NO: 70542 - DNA, 1503 bp, Artificial Sequence
  derived and/or modified sequence
atgggcgccgccgccagcagaagaagagccctgcggtctgaggccatgagctctgtggccgccaaggtgcgggccgcccgggcctttggagagtacctgagccagagccacccagaaaatagaaatggagctgaccacctgctggctgatgcctacagcggccatgatggcagccctgagatgcagcctgccccccagaacaagaggcggctgagcctggtgtccaatggctgctatgagggcagcctgtctgaggagcccagcatcaggaagccagctggggagggcccccagccccgggtgtacaccatctctggagagcccgccctgctgcccagccctgaggccgaggccatcgagctggccgtggtgaagggccggcggcagaggcacccccaccaccacagccagcccctgcgggccagccctgggggcagccgggaggatgtgtcccggccctgccagagctgggccggcagccggcagggcagcaaggagtgccccggctgtgcccagctggcccctggccccaccccccgggccttcggcctggaccagccccccctgcctgagaccagcggccgcaggaagaagctggagaggatgtacagcgtggacagagtgtctgatgacatccccatccgcacctggttccccaaggaaaatctcttctccttccagacagccaccaccaccatgcaggccatctctgtgttccggggctatgcagagaggaagaggaggaagagagaaaatgacagcgccagcgtcatccagaggaacttcaggaagcacctgaggatggtgggcagccggcgggtgaaggcccagagcagtgacctgcagagcagccactgcaccctggatgaggcctttgaggacctggactgggacacagagaagggcctggaggccgtggcctgtgacacagagggctttgtgccccccaaggtgatgctgatcagcagcaaggtgcccaaggccgagtacatccccaccatcatcagaagagatgaccccagcatcatccccatcctgtatgaccatgaacatgccacctttgaggacatcctggaggagattgaaaggaagctgaatgtgtaccacaagggggccaagatctggaagatgctgatcttctgccagggcggccctggccacctgtacctgctgaagaacaaggtggccacctttgccaaggtggagaaggaggaggacatgatccacttctggaagaggctgagccggctgatgagcaaggtgaaccctgagcccaacgtcatccacatcatgggctgctacatcctgggcaaccccaacggggagaagctgttccagaacctgcggaccctgatgaccccctacagagtgacctttgagagccccctggagctgagcgcccagggcaagcagatgattgagacctactttgacttccggctgtaccgcctgtggaagagccggcagcacagcaagctgctggactttgatgatgtgctgtag

SEQ ID NO: 70543 - DNA, 3556 bp, Artificial Sequence
  derived and/or modified sequence
ggttcgggcagcgctctcccgggagcggcggcacgcgcggagcgccgggtgcggccatgcggggaccgggcccgaccccgagcccgaccccgagcccaagcccgagccggagcccgagcgagaccccgagcccgagcccgagcgcgacccccggtgcggcgcggctaccccggcggaggcggcgggcgcggggcgcgctctgaggcccgggggatgcgccgccgcctcgaccatgggcgccgccgcctccaggaggagggcgctgaggagcgaggccatgtcctcggtggcggccaaagtgcgagcagcccgagcgtttggagagtacctgtcccagagtcaccctgagaaccgcaacggcgcagatcacctgctggctgatgcctactctggccacgacgggtcccccgagatgcagccggccccccagaacaagcgccgcctgtccctcgtctccaacggctgctacgagggcagcctctcagaggagcccagcattaggaagcccgcaggcgagggccctcagcctcgagtgtacaccatctctggggagcctgccctgctgcccagccctgaggcggaggccattgagctggcggtggtgaaggggcggcggcagcggcaccctcaccatcacagccagcccctgcgcgccagccctggtggcagccgggaggacgtcagcaggccctgccagagctgggcgggcagccgccagggctccaaggagtgccccggatgtgcccagctggctcctggccccacccctcgggcctttgggctggaccagccacctctgcctgagacctccggtcgccgcaagaagctggagaggatgtacagcgttgaccgtgtgtctgacgacatccctattcgtacctggttccccaaggaaaatcttttcagcttccagacagcaaccacaactatgcaagccatctcggtgttcaggggctacgcggagaggaagcgccggaaacgggagaatgattccgcgtctgtaatccagaggaacttccgcaaacacctgcgcatggtcggcagccggagggtgaaggcccagagcagtgacctgcagagctcccactgcacgctggacgaggccttcgaggacctggactgggacactgagaagggcctggaggctgtggcctgcgacaccgaaggcttcgtgccaccaaaggtcatgctcatttcctccaaggtgcccaaggctgagtacatccccactatcatccgccgggatgacccctccatcatccccatcctctacgaccatgagcacgcaaccttcgaggacatccttgaggagatagagaggaagctgaacgtctaccacaagggagccaagatctggaaaatgctgattttctgccagggaggtcctggacacctctatctcctcaagaacaaggtggccacctttgccaaagtggagaaggaagaggacatgattcacttctggaagcggctgagccgcctgatgagcaaagtgaacccagagccgaacgtcatccacatcatgggctgctacattctggggaaccccaatggagagaagctgttccagaacctcaggaccctcatgactccttatagggtcaccttcgagtcacccctggagctctcagcccaagggaagcagatgatcgagacgtactttgacttccggttgtatcgcctgtggaagagccgccagcactcgaagctgctggactttgacgacgtcctgtgaggggcagaggcctccgcccagtcaccatcaggccactccctctgcaccgggacctggggctgggccgcctcgtgctccccgggactgtgtggctccggtctcgcctggagccacttcagggcacctcagacgttgctcaggttccccctgtgggttccggtcctcgctgcacccgtggccgcagaggctgcagtccctgggggccgggaggatcccgccctgtggcccgtggatgctcagcggccaggcactgacctgccatgcctcgcctggaggctcagctgtgggcatccctccatggggttcatagaaataagtgcaatttctacacccccgaaacaattcaaagggaagcagcatttcttgttaactagttaagcactatgctgctagttacagtgtaggcaccccggcccagcagcccagcagcccacatgtgttcaggaccctccctgcccaccccctccctgccgtatcgatcaccagcaccagggtggcccgtgtgcgtggggccagcgtcgccgggctgcccagcctggctctgtctacactggccgagtctctgggtctgtctacactggccgagtctccgactgtctgtgctttcacttacactcctcttgccaccccccatccctgcttacttagacctcagccggcgccggacccggtaggggcagtctgggcagcaggaaggaagggcgcagcgtcccctccttcagaggaggctctgggtggggcctgctccccatccccccaagcccacccagcactctcattgctgctgttgagttcagcttttaccagcctcagtgtggaggctccatcccagcacacaggcctggggcttggcaggggcccagctggggctgggccctgggttttgagaaactcgctggcaccacagtgggcccctggacccggccgcgcagctggtggactgtaggggctcctgactgggcacaggagctcccagcttttgtccacggccagcaggatgggctgtcgtgtatatagctggggcgagggggcaggccccccttgtgcagagccaggggtctgagggcacctggctgtgttcccagctgagggagggctggggcgggggccgggcttggaacgatgtacgataccctcatagtgaccattaaacctgatcctccaccgcggccgccgcgtgggtctgtcctctcagtgctttccaggggccttcctgtgcccagcttctgggcccactcctgtgaggtcactgctgcagggccttcctgcctggacagagttggagctaggccactagaccaccccacagggcatagccagggggaccagcacaggaggggacggagaggagctgcaggagggctggggggaggctgcagtctcggaggggggcctcgccgggtctggaggggacagcagagacagcccgttccccctgccgcctgagggcaccagggagagggctgtatgtccctcacgccacactgtgtgtgcagtcagcagtgtggccacagatgggggccactctctcaacctcaggtgtcctcagggcccagaccgctgctgggcacagccaggctggctgccagctggttccctgccccgtggctgggggacagagcagcacgtatcagctgggctagggtcagggggccactggtgcgcagcctggcacagcctggcaggcttgaggcccagtgtgctgggggtggtcacacagccgtcagccacctccagctcttccagggcattctagatggggtcccgggagggggcaggttttggtgccaatttgagtgtataaagttttaggtaaatacc

SEQ ID NO: 70544 - DNA, 1503 bp, Artificial Sequence
  derived and/or modified sequence
atgggcgccgccgccagccggcggcgggccctgcggagcgaggccatgtctagcgtggcagcaaaggtgcgcgccgcaagggcgttcggagaatacttgtcccagtcccaccctgagaatagaaatggcgccgaccatttgctggctgacgcttactctggtcacgatgggtcgcctgaaatgcagcccgcacctcagaataagagaagactgagcttggtcagcaatggatgctatgaggggagtttgagtgaagagccaagcataagaaagcccgcaggcgagggaccacaaccccgcgtgtatactatttctggagaaccggcattattaccatctcccgaagctgaggcaatcgagttagcagtcgtgaagggtcgccggcagcggcaccctcatcaccatagccagccgttacgtgcctctcccggcggctcccgcgaggacgtatctcggccttgccagtcctgggcaggttccagacaggggtcgaaggaatgtcccggctgcgcccagctcgccccaggaccaacgcccagggccttcgggctcgatcagccacctctcccagaaacctcagggcggcggaagaagttggagcgcatgtacagtgtagaccgggtttcagacgatattcctattcgcacctggttccccaaagaaaatctttttagctttcagaccgccactaccaccatgcaagctatcagcgtcttccgcggatacgcagaacgcaagagaagaaaacgcgagaacgactccgcatccgtgatccaaaggaactttagaaaacacctgcgtatggttgggtcccggagagtgaaagctcaatctagcgatctgcaatcttcccactgtactttggacgaggcttttgaagatctcgattgggataccgaaaaaggcctggaggccgttgcttgcgatactgaaggcttcgtccctcctaaggtcatgttaatttcgagcaaagtgcccaaggccgagtacatccccacaataattcggagagacgacccttccatcattccgattctttacgaccatgagcatgccacctttgaggacatcctcgaagaaattgagaggaagcttaacgtgtatcacaagggtgctaaaatctggaaaatgcttatattctgccagggaggccccgggcatctgtatttgttgaagaataaggttgccacctttgccaaagtcgagaaggaagaagatatgatccacttttggaaacggttgtctcgcttaatgtctaaagtgaatccagagccaaatgtcatccatataatgggttgctacatccttggcaatccgaacggtgagaaactcttccagaacctgagaaccctaatgacaccctatagggtgactttcgagagcccgctcgagctctccgcccagggcaagcagatgatcgaaacctacttcgatttcagactctaccgcttatggaaatccaggcagcactctaaactgctggattttgatgacgtgctgtag

SEQ ID NO: 70545 - DNA, 1503 bp, Artificial Sequence
  derived and/or modified sequence
atgggcgctgcagcaagtaggcgcagagccttgagatccgaagccatgtcttccgtagccgctaaggtacgcgctgcacgggctttcggggaatacctcagccaatcacatccagagaatcgaaatggagcagaccatctgctggcagacgcctacagtggacatgacggatctccagagatgcaaccggcacctcagaacaagcgtagactctccctggtttctaacgggtgttacgagggtagtttatccgaagagcctagcatccgcaagccggctggtgaggggccacagcctcgagtgtataccatcagcggtgagcctgccctattgccatcccctgaggcagaagctatcgaactggctgtggttaaaggccgtcgtcaacgtcacccgcatcatcatagccagcccctgcgggctagccccggtggaagcagagaagacgtctcacgtccctgtcaatcttgggctgggtcccgtcagggatcaaaagagtgtccaggatgtgctcagctggccccagggcctaccccgagagcttttggcctcgaccagccaccactccccgagactagtggcagaagaaagaaactggaaaggatgtatagcgtcgacagagtctctgatgacatacccattcgaacatggtttcccaaggagaatttgttctccttccagactgcaacaacgacgatgcaggccatttctgtatttagggggtacgcagagcgtaaaaggcgaaagagagagaacgatagtgcttctgtaatacaacggaatttccggaaacacctgaggatggtgggcagtcgcagggtgaaggctcaaagctctgacctgcagtcctcgcattgtacccttgatgaggcattcgaggatctggactgggacacagagaaggggctcgaggccgtcgcatgcgacaccgagggctttgtgccgcctaaggtgatgctcatctcttcaaaggtaccaaaggcagagtacatccctaccattatcaggagagatgatccctccattatcccgatactctatgatcacgagcacgcaaccttcgaggacattctcgaggaaattgaaagaaagttaaacgtgtaccacaagggagccaagatttggaaaatgttgatattctgtcagggaggacccggacatctctatctgttgaagaataaagtggccacctttgctaaggtagagaaagaggaggacatgatacatttctggaagaggttatctcgccttatgtccaaggttaaccctgaacccaacgtgattcatatcatgggctgttacattttgggaaatcccaacggagagaaattgttccagaatctgcgtacgctgatgactccctatcgcgtgaccttcgaatcccccctcgagctcagcgcacagggaaagcagatgattgagacgtactttgacttcagactgtaccggctgtggaaatcccgccaacactccaaactgctcgatttcgatgatgtgctctag

SEQ ID NO: 70546 - DNA, 1503 bp, Artificial Sequence
  derived and/or modified sequence
atgggcgccgccgccagcagaagaagagccctgagaagcgaggccatgagcagcgtggccgccaaggtgagagccgccagagccttcggcgagtacctgagccagagccaccccgagaacagaaacggcgccgaccacctgctggccgacgcctacagcggccacgacggcagccccgagatgcagcccgccccccagaacaagagaagactgagcctggtgagcaacggctgctacgagggcagcctgagcgaggagcccagcatcagaaagcccgccggcgagggcccccagcccagagtgtacaccatcagcggcgagcccgccctgctgcccagccccgaggccgaggccatcgagctggccgtggtgaagggcagaagacagagacacccccaccaccacagccagcccctgagagccagccccggcggcagcagagaggacgtgagcagaccctgccagagctgggccggcagcagacagggcagcaaggagtgccccggctgcgcccagctggcccccggccccacccccagagccttcggcctggaccagccccccctgcccgagaccagcggcagaagaaagaagctggagagaatgtacagcgtggacagagtgagcgacgacatccccatcagaacctggttccccaaggagaacctgttcagcttccagaccgccaccaccaccatgcaggccatcagcgtgttcagaggctacgccgagagaaagagaagaaagagagagaacgacagcgccagcgtgatccagagaaacttcagaaagcacctgagaatggtgggcagcagaagagtgaaggcccagagcagcgacctgcagagcagccactgcaccctggacgaggccttcgaggacctggactgggacaccgagaagggcctggaggccgtggcctgcgacaccgagggcttcgtgccccccaaggtgatgctgatcagcagcaaggtgcccaaggccgagtacatccccaccatcatcagaagagacgaccccagcatcatccccatcctgtacgaccacgagcacgccaccttcgaggacatcctggaggagatcgagagaaagctgaacgtgtaccacaagggcgccaagatctggaagatgctgatcttctgccagggcggccccggccacctgtacctgctgaagaacaaggtggccaccttcgccaaggtggagaaggaggaggacatgatccacttctggaagagactgagcagactgatgagcaaggtgaaccccgagcccaacgtgatccacatcatgggctgctacatcctgggcaaccccaacggcgagaagctgttccagaacctgagaaccctgatgaccccctacagagtgaccttcgagagccccctggagctgagcgcccagggcaagcagatgatcgagacctacttcgacttcagactgtacagactgtggaagagcagacagcacagcaagctgctggacttcgacgacgtgctgtag

SEQ ID NO: 70547 - protein, 1088 aa, Artificial Sequence
  derived and/or modified sequence
MAFYSCCWVLLALTWHTSAYGPDQRAQKKGDIILGGLFPIHFGVAAKDQDLKSRPESVECIRYNFRGFRWLQAMIFAIEEINSSPALLPNLTLGYRIFDTCNTVSKALEATLSFVAQNKIDSLNLDEFCNCSEHIPSTIAVVGATGSGVSTAVANLLGLFYIPQVSYASSSRLLSNKNQFKSFLRTIPNDEHQATAMADIIEYFRWNWVGTIAADDDYGRPGIEKFREEAEERDICIDFSELISQYSDEEEIQHVVEVIQNSTAKVIVVFSSGPDLEPLIKEIVRRNITGKIWLASEAWASSSLIAMPQYFHVVGGTIGFALKAGQIPGFREFLKKVHPRKSVHNGFAKEFWEETFNCHLQEGAKGPLPVDTFLRGHEESGDRFSNSSTAFRPLCTGDENISSVETPYIDYTHLRISYNVYLAVYSIAHALQDIYTCLPGRGLFTNGSCADIKKVEAWQVLKHLRHLNFTNNMGEQVTFDECGDLVGNYSIINWHLSPEDGSIVFKEVGYYNVYAKKGERLFINEEKILWSGFSREPLTFVLSVLQVPFSNCSRDCLAGTRKGIIEGEPTCCFECVECPDGEYSDETDASACNKCPDDFWSNENHTSCIAKEIEFLSWTEPFGIALTLFAVLGIFLTAFVLGVFIKFRNTPIVKATNRELSYLLLFSLLCCFSSSLFFIGEPQDWTCRLRQPAFGISFVLCISCILVKTNRVLLVFEAKIPTSFHRKWWGLNLQFLLVFLCTFMQIVICVIWLYTAPPSSYRNQELEDEIIFITCHEGSLMALGFLIGYTCLLAAICFFFAFKSRKLPENFNEAKFITFSMLIFFIVWISFIPAYASTYGKFVSAVEVIAILAASFGLLACIFFNKIYIILFKPSRNTIEEVRCSTAAHAFKVAARATLRRSNVSRKRSSSLGGSTGSTPSSSISSKSNSEDPFPQPERQKQQQPLALTQQEQQQQPLTLPQQQRSQQQPRCKQKVIFGSGTVTFSLSFDEPQKNAMAHRNSTHQNSLEAQKSSDTLTRHEPLLPLQCGETDLDLTVQETGLQGPVGGDQRPEVEDPEELSPALVVSSSQSFVISGGGSTVTENVVNS

SEQ ID NO: 70548 - DNA, 3267 bp, Artificial Sequence
  derived and/or modified sequence
atggcattctactcctgttgttgggtccttctggccctgacatggcatacgtcagcgtatgggcctgatcaacgtgcgcagaaaaagggagacattattctcgggggcctgttcccaatccacttcggcgtggccgccaaagaccaggacctcaaatcgcgccctgagagcgttgagtgtatcagatacaattttcgcgggtttcgatggctgcaagccatgatcttcgctatcgaggagataaatagttctcctgcgttactcccgaacttaaccctgggatataggatcttcgatacgtgcaatacagtttccaaggctttggaggcaacgctgagtttcgttgcccaaaacaaaatagacagcctgaacctggatgaattttgcaactgttctgaacacatcccaagtacaatcgctgtcgttggcgcaaccgggtcaggtgttagcaccgcagtggctaatttgctggggcttttctatatcccgcaggttagttacgcaagtagctccagactcttgagcaacaagaatcagtttaaaagctttttacgcaccatcccaaacgacgaacaccaggccacggcgatggcagatataattgagtatttccgatggaactgggttgggaccatagcggcggacgatgattatggaaggcctggcatagaaaagtttcgagaggaagccgaggagcgcgatatttgcattgatttctcggaactgattagtcagtattccgatgaagaagagatccagcacgttgtcgaggtgatccaaaattccacagccaaggtgatcgtcgtcttttctagcgggcctgaccttgagcccctaattaaagagatcgtcaggcggaatattacagggaaaatatggctggcctccgaagcgtgggcttccagttctctgatcgccatgccccagtatttccatgttgtgggaggtacaatcggtttcgctctcaaagctggccagatccctggcttcagagaatttctgaagaaggttcacccaaggaagtcggttcataatggattcgctaaagaattctgggaagaaacatttaattgtcacctccaggagggagcgaagggccccctcccagtcgatacgtttctgcgcgggcacgaggaaagcggggatcggttctccaacagctcaacggctttcagacccctgtgtacaggcgatgaaaacatcagttccgtcgaaactccttatatagactatacccacctgagaatttcatacaacgtgtacttggccgtgtactcgattgcccacgcccttcaggacatttacacctgcctccctggtcgggggctgttcaccaacggcagctgtgcagacatcaagaaggtcgaagcatggcaggtattaaaacatctccggcacctaaatttcaccaataacatgggagaacaggtgacctttgacgaatgcggagacctggtgggtaattattctatcatcaactggcatctctccccagaagacggatcaattgtcttcaaggaggtcggctactacaatgtatatgcaaagaagggggagagactcttcatcaacgaggagaaaatcctatggagtggattcagtcgcgaacctctgacctttgtcctgtcagtcctgcaagtccctttctccaactgtagccgggactgcttagcgggtaccagaaaagggatcattgaaggggaaccaacttgctgcttcgaatgtgtggaatgcccagatggagagtactcagacgaaacagatgcttccgcctgtaacaaatgccctgacgacttctggagcaacgagaaccacacttcctgtatcgcaaaagagattgagttcctgagctggactgaaccattcggaattgcccttactctcttcgcagttttaggcattttcctgactgcatttgtattgggggtgtttattaagttccgcaatactcccatcgtgaaggctacaaatcgcgaactgtcttatctcctgttgttctccctcctgtgctgtttcagcagctctttgttttttataggggagccccaggactggacttgcaggctaagacagccagcttttgggattagtttcgtcctgtgcatctcctgtattctagtgaaaaccaaccgggtactgctggtgttcgaggcaaagattccaacctcattccatcgtaaatggtggggactgaatctgcaatttttgctggtctttctatgtacgtttatgcaaatagtaatctgcgttatctggctatatactgctccccccagcagttacagaaaccaggagctggaagacgagatcatctttattacatgccacgaggggagcctcatggcgcttggattcctaatcgggtacacatgccttcttgccgcaatctgctttttctttgcatttaagtcccggaaattgcccgagaactttaatgaggccaagttcataacattttccatgctcattttctttatcgtgtggatctcttttatcccagcctacgcgtccacctacggaaaatttgtgagtgccgtcgaggtcattgcaattctggccgcatcttttggtctcctggcatgcatttttttcaacaagatatatatcatattatttaagccctcacgtaataccattgaagaggtgcgttgctccaccgccgcccatgctttcaaagttgctgccagggccacgctccggagatcaaacgtctcacggaaacgcagcagctccctcggcggaagtaccggcagtacacctagctccagcatctcttcgaaatctaacagcgaagatccgttccctcaacccgagagacaaaagcaacaacagccccttgccctgacacaacaggagcaacagcagcagcccctgactctgcctcagcaacagcgctcccagcagcagccgcgctgcaagcagaaggtcattttcggctcgggaacggtgaccttttcccttagcttcgatgagccccagaaaaacgctatggcccatcgcaacagtactcatcaaaactcactggaagcccagaaatcctccgataccctgacacggcacgaacccctactgccactgcagtgcggtgagacggacctcgacctcacagtccaagagactggcttgcagggaccggtgggcggggatcagaggcctgaggtggaagaccctgaagagctgtcccctgctttagtagtgtcttccagccagtcttttgttatttccggaggcgggtccaccgtcaccgaaaatgtggtgaattcctag

SEQ ID NO: 70549 - DNA, 3267 bp, Artificial Sequence
  derived and/or modified sequence
atggccttctacagctgctgctgggtgctgctggccctgacctggcacaccagcgcctacggccctgaccagagggcccagaagaagggggacatcatcctgggcggcctcttccccatccactttggagtggccgccaaggaccaggacctgaagagcaggcctgagagcgtggagtgcatccgctacaacttccggggcttccgctggctgcaggccatgatctttgccatcgaggagatcaacagcagccctgccctgctgcccaacctgaccctgggctaccgcatctttgacacctgcaacacagtgtccaaggccctggaggccaccctgagctttgtggcccagaacaagattgacagcctgaacctggatgagttctgcaactgcagcgagcacatccccagcaccatcgctgtggtgggcgccactggaagtggagtgtccacagctgtggccaacctgctgggcctcttctacatcccccaggtgtcctatgccagcagcagccggctgctgagcaacaagaaccagttcaagagcttcctgcggaccatccccaatgatgagcaccaggccacagccatggctgacatcatcgagtacttccgctggaactgggtgggcaccatcgccgcagatgatgattatggccggcccggcatcgagaagttccgggaggaggccgaggagcgggacatctgcatcgacttcagcgagctgatcagccagtacagtgatgaggaggagatccagcacgtggtggaggtgatccagaacagcacagccaaggtgattgtggtgttcagcagcggccctgacctggagcccctcatcaaggagatcgtgagaagaaacatcaccgggaagatctggctggccagcgaggcctgggccagcagcagcctgattgccatgccccagtacttccacgtggtgggcggcaccatcggctttgccctgaaggccggccagatccctggcttccgggagttcctgaagaaggtgcaccccaggaagtctgtgcacaatggatttgccaaggagttctgggaggagaccttcaactgccacctgcaggagggcgccaagggccccctgcctgtggacaccttcctgcggggccacgaggagagcggggaccgcttcagcaacagcagcacagccttccggcccctgtgcacaggagatgagaacatcagctctgtggagaccccctacatcgactacacccacctgcgcatctcctacaacgtgtacctggccgtgtacagcatcgcccacgccctgcaggacatctacacctgcctgcccggccggggcctcttcaccaacggcagctgtgccgacatcaagaaggtggaggcctggcaggtgctgaagcacctgcggcacctgaacttcaccaacaacatgggagagcaggtgacctttgatgaatgtggggacctggtgggcaactacagcatcatcaactggcacctgagcccagaagatggcagcatcgtgttcaaggaggtgggctactacaacgtgtatgccaagaagggggagcggctcttcatcaatgaggagaagatcctgtggagcggcttcagccgggagcccctgacctttgtgctgtctgtgctgcaggtgcccttcagcaactgcagccgggactgcctggccggcaccaggaagggcatcattgaaggagagcccacctgctgctttgaatgtgtggagtgcccagatggagagtacagtgatgaaacagatgccagcgcctgcaacaagtgcccagatgacttctggagcaatgaaaaccacaccagctgcatcgccaaggagattgagttcctgtcctggacagagcccttcggcatcgccctgaccctgtttgctgtgctgggcatcttcctgacagcctttgtgctgggcgtcttcatcaagttcaggaacacccccatcgtgaaggccaccaaccgggagctgagctacctgctgctcttcagcctgctgtgctgcttcagcagcagcctcttcttcatcggggagccccaggactggacctgccgcctgcggcagcctgccttcggcatcagctttgtgctgtgcatcagctgcatcctggtgaagaccaacagagtgctgctggtgtttgaggccaagatccccaccagcttccacaggaagtggtggggcctgaacctgcagttcctgctggtgttcctgtgcaccttcatgcagatcgtcatctgtgtgatctggctgtacacagccccacccagcagctacagaaaccaggagctggaggatgagatcatcttcatcacctgccacgagggcagcctgatggccctgggcttcctgattggctacacctgcctgctggccgccatctgcttcttctttgccttcaagagcaggaagctgcctgagaacttcaatgaggccaagttcatcaccttctccatgctgatcttcttcatcgtgtggatctccttcatcccagcctatgccagcacctacggcaagtttgtgtctgctgtggaggtgattgccatcctggccgccagctttggcctgctggcctgcatcttcttcaacaagatctacatcatcctcttcaagcccagcaggaacaccatcgaggaggtgcgctgcagcacagctgcccacgccttcaaggtggccgcccgggccaccctgcggcgcagcaatgtgtccaggaagaggagcagcagcctgggcggcagcacaggcagcacccccagcagcagcatcagcagcaagagcaacagcgaggaccccttcccccagcctgagcggcagaagcagcagcagcccctggccctgacccagcaggagcagcagcagcagcccctgaccctgccccagcagcagaggagccagcagcagccccgctgcaagcagaaggtgatcttcggcagcggcaccgtgaccttcagcctgagctttgatgagccccagaagaatgccatggcccacaggaacagcacccaccagaacagcctggaggcccagaagagcagtgacaccctgaccaggcatgagcccctgctgcccctgcagtgtggggagacagacctggacctgactgtgcaggagaccggcctgcagggccctgtgggcggggaccagaggcctgaggtggaggaccctgaggagctgagccctgccctggtggtgagcagcagccagagctttgtgatcagcggcggcggcagcacagtgacagaaaatgtggtgaacagctag

SEQ ID NO: 70550 - DNA, 3267 bp, Artificial Sequence
  derived and/or modified sequence
atggccttctacagctgctgctgggtgctgctggccctgacctggcacacgagcgcctatggcccagaccagcgcgcacaaaagaagggcgatattatactgggagggctctttccgatccactttggcgtcgctgccaaggatcaggatctgaagtctaggccagagtctgttgagtgtatccggtataactttcggggctttcgttggttgcaagctatgatctttgctattgaggagatcaactcctctcccgctctattgcccaatcttaccctggggtatcgcatctttgacacatgcaacacagtatccaaagccctggaggctactctcagctttgttgcgcaaaataaaatcgactctctgaacctggacgagttctgcaattgttcagagcacatcccatctaccatcgccgtggttggagcgactggctctggcgtctctactgccgttgctaatctacttgggttgttttacatcccccaagtcagttatgcctcttcctcgcggctgctgtctaacaaaaaccagttcaagagttttctccgcacgatcccgaatgacgaacaccaggccactgcaatggctgacattatagagtactttcgttggaattgggtcggcacgatcgccgcagacgatgactacggccgacctggaatcgagaaattccgcgaggaagcagaggagagagatatatgcatcgacttctccgaactgatatcccagtacagcgacgaggaggagatacagcacgtggtggaagtgattcagaacagcacagccaaagtaattgtggtattctcctccggcccggatctggagccactaatcaaggaaattgttcggaggaacataacgggtaaaatctggctggcatccgaagcgtgggcgagttcttctctcatcgcaatgcctcagtatttccatgttgtggggggcacaatcgggtttgcccttaaggctggacaaattccaggtttcagggagttcctaaaaaaagtgcacccgagaaagagcgttcataatggattcgctaaggaattttgggaggaaacttttaactgccaccttcaagagggcgctaagggcccactccccgttgatacctttcttcgcggccatgaggagtccggcgaccgctttagcaattcttctactgctttcaggcccctctgtactggcgatgagaatatatcaagtgtcgaaaccccctatattgactacacccaccttcggatttcatataatgtgtacctggcagtctattcaatcgcgcatgccctgcaggacatctatacttgccttccaggccgcggactgtttaccaatggctcttgtgccgacattaaaaaagtggaggcctggcaggtgcttaaacatctaagacaccttaatttcacaaacaatatgggtgagcaggtgaccttcgacgagtgcggggaccttgtcggaaactactccattataaactggcacctgtcacccgaggacggaagcattgtgttcaaggaggtcgggtactataatgtttatgctaagaagggagaacggttattcattaacgaggagaaaattctctggtccggattttcccgtgaacctctaacgttcgtattatctgtgttgcaagtgccctttagcaactgcagtcgagactgtcttgcgggtactcggaagggtatcatagaaggagagccaacttgctgcttcgagtgtgtggagtgtcctgatggcgaatacagcgacgagactgacgctagtgcttgcaataaatgtcctgatgacttctggagcaatgaaaatcatacttcatgtatcgcaaaggagattgagtttctgagttggacagagcccttcgggatcgccttaacactgttcgccgtactggggatctttttgactgcctttgtgcttggagtgttcatcaaattccgtaatactccaattgtgaaagcaacaaacagggagctttcttatttgttattattttctctgctctgctgcttttccagcagccttttcttcataggcgaacctcaagattggacttgtagactcaggcagcccgcctttgggatatctttcgttctgtgtatctcctgtatcctagttaaaacaaatcgggtcctactggtttttgaggctaagatccctacatccttccaccgtaagtggtgggggctaaacttacaattccttctggttttcctgtgcacatttatgcagattgtcatttgcgtgatctggctgtataccgcacctcccagcagctacaggaaccaggagctcgaggatgagatcatcttcataacatgccacgaagggtccctaatggcattagggttcctgatcgggtatacctgcttgttggccgctatttgtttttttttcgcctttaaatcccggaagctgcctgagaatttcaatgaggcgaaatttatcaccttttcaatgctcatcttttttatcgtgtggataagcttcatccccgcttacgcttccacgtacggaaaattcgtctcagctgttgaggttattgctatattggctgcctctttcggactcttggcatgcatattctttaataagatatacattatcctctttaagcctagccgcaatacaatagaggaagtgagatgttcaaccgcagcgcacgccttcaaggtggcagcaagggcaactctcaggcgttccaacgtaagccggaaacggagctctagccttgggggttcaacaggctctacaccgtcttcctccatctctagcaaaagcaatagcgaagatccattcccacagcctgagcgccaaaagcagcagcagccgttagctctgacccaacaagagcaacagcagcaaccactgactttgccccagcaacagcgaagccagcagcagccgaggtgcaagcaaaaagtgatttttgggtccggtactgtcactttctctctaagctttgatgagcctcagaagaacgccatggcccatcgcaacagcacccaccaaaacagtctggaagcacagaaatccagcgacaccttaacccgccacgagccattgctccccctgcagtgtggcgaaacagatcttgatctgacggtgcaggaaaccggactgcagggccctgtgggaggcgaccaaagaccagaagtcgaggaccctgaggaattatcccctgctctagtggtgagcagctcccagtcgttcgtgatttcaggcgggggcagtactgtaacggaaaacgtggtgaatagctag

SEQ ID NO: 70551 - DNA, 3267 bp, Artificial Sequence
  derived and/or modified sequence
atggccttctattcctgttgctgggtgctcctcgcgttaacatggcacaccagcgcgtacggcccagatcagcgcgctcagaagaagggcgatattattctggggggactctttccgatacacttcggcgtggccgctaaggatcaggacctcaaaagtagacctgaatccgtagaatgtataaggtacaattttcggggtttcagatggctgcaagcgatgatcttcgccatcgaggaaatcaactcatcccccgctctcctgcctaatctcaccttggggtatcggatcttcgacacatgcaatactgtgagtaaagctttggaagcgacgctatcatttgtggcccagaataagattgattcattaaatctcgatgaattctgtaattgcagcgaacatataccctcaactatcgccgtagtaggggctacagggtctggagtctcaaccgctgtagcaaatttgttgggactcttctacataccccaggtctcctacgcttcttcctcaaggttgctgagcaataaaaatcagttcaaatctttccttcgcacaattccgaatgatgagcaccaggccaccgccatggccgatatcatagagtacttccgctggaattgggtcggcactatcgcagcagacgacgattacggtaggccaggaatcgagaagttccgcgaagaggccgaggaacgcgacatatgcatagacttcagcgaattgataagtcagtattcggacgaagaagagatccagcatgtagtagaagtgattcaaaacagtaccgcaaaggtgattgtggttttttcttctgggccagacttagagccactcatcaaggagattgttcggaggaacatcaccggcaagatctggctggcctctgaggcatgggccagctcatcccttatcgccatgccacaatacttccatgtcgtaggaggtaccatagggtttgctttgaaggcgggacagatcccaggcttccgagagttcttaaaaaaagtccatcccaggaagtctgtgcataacggattcgccaaggaattctgggaagagacatttaactgccacctgcaagaaggtgccaagggacctctgccagtcgatactttcctacgcggacacgaagagtcaggcgacaggttctctaattcctccactgctttccgacctctatgtactggcgatgagaacatctcaagcgtggagactccttacatcgattacacccacctgcgcatctcatacaacgtttatctggcagtgtattcaatcgcccacgcactccaggatatctacacttgtcttcctggacgcggtctgttcacaaacggaagctgtgcggatattaagaaggttgaggcctggcaggtgctgaaacacttgcgccacctcaacttcaccaacaatatgggcgagcaggtcacttttgacgagtgtggggacctggtcggaaactattctatcatcaactggcacctcagccctgaggatggaagtatcgtgttcaaggaagtcgggtactacaatgtgtacgcaaagaaaggagaaagacttttcatcaatgaggagaagatcctttggtccggattcagccgggagcctttaaccttcgttttgagtgtgctgcaggtgcctttttccaattgcagtagggactgccttgcgggtactaggaaggggattatcgagggtgaaccgacatgttgtttcgagtgcgttgagtgtcccgacggagaatactctgacgaaaccgacgcctctgcatgcaacaaatgccctgatgatttttggtcaaacgagaaccatacctcctgcatagcaaaagagatcgaattcctgtcctggaccgagccattcgggattgcactgactctcttcgccgtgctcgggatcttccttaccgcctttgtcctgggggtttttattaaattccgaaacactccaatcgtgaaagcaacaaatcgtgagctgtcttatctcctgttattttctttgttatgctgctttagcagctcactattttttattggagagcctcaggactggacctgtagattaaggcagccagctttcggaatttcctttgtactgtgcatctcctgcatcctggttaaaacaaatagggtgctgctggtgtttgaagccaaaattcccacctcatttcaccggaagtggtggggcttgaatctccaatttcttctggttttcctctgcacgttcatgcagatcgtaatctgtgtgatctggctgtacactgcccctccgagtagttaccggaatcaagagcttgaggacgagatcatttttatcacatgtcacgagggatccctgatggccctgggctttctaattggctacacttgtctccttgcggctatttgttttttctttgcctttaaatccaggaaacttcccgaaaatttcaacgaagccaaatttataacattcagcatgttgatattctttattgtctggatcagttttataccagcctatgcctcaacctacggtaagttcgtctccgctgtcgaagttatcgcaatcctcgcggctagctttggactgcttgcttgtatcttctttaacaaaatttacattattctgttcaaaccgtctcgcaacacaattgaagaagtacgctgcagcacagcagcccacgccttcaaggtggcagcacgcgcaacactgcgcaggtcaaacgtctctcggaaaagaagcagcagcctcggaggttctaccggatcaaccccttccagcagcatcagctcaaagagcaactctgaggatccttttcctcagccggaacgccaaaagcagcagcagcctctggcattgacccagcaggagcaacagcagcaaccactcaccctgccccagcaacagaggtcccagcagcagcctcgctgtaagcagaaggtgatctttggctcaggcacggttacgttctctctgtcatttgatgagccccagaaaaatgccatggcccatcgcaattctacccatcagaacagcctggaggcgcagaaatcatccgacactctgactagacacgaacctcttctgcctttgcaatgtggcgagacagatcttgatctcacggtgcaggagacggggctgcagggcccagtggggggagaccaaagacctgaggttgaagacccagaagaactgtcccccgctttggtggtctctagcagccagtcctttgtgattagcggaggaggcagcactgtgacggagaacgtagtgaactcatag

SEQ ID NO: 70552 - DNA, 5009 bp, Artificial Sequence
  derived and/or modified sequence
ggggctgctgtggccggacccgaaggcgggcgccgggagcgcagcgagccagacgcgcctctccaagaccgtgaccttggcatagggagcggggctgcgcgcagtcctgagatcagaccagagctcatcctcgtggagacccacggccgaggggccggagctgcctctgtgcgagggagccctggccgcggcgcagaaggcatcacaggaggcctctgcatgatgtggcttccaaagactcaaggaccacccacattacaagtctggattgaggaaggcagaaatggagattcaaacaccacgtcttctattattttattaatcaatctgtagacatgtgtccccactgcagggagtgaactgctccaagggagaaacttctgggagcctccaaactcctagctgtctcatcccttgccctggagagacggcagaaccatggcattttatagctgctgctgggtcctcttggcactcacctggcacacctctgcctacgggccagaccagcgagcccaaaagaagggggacattatccttggggggctctttcctattcattttggagtagcagctaaagatcaagatctcaaatcaaggccggagtctgtggaatgtatcaggtataatttccgtgggtttcgctggttacaggctatgatatttgccatagaggagataaacagcagcccagcccttcttcccaacttgacgctgggatacaggatatttgacacttgcaacaccgtttctaaggccttggaagccaccctgagttttgttgctcaaaacaaaattgattctttgaaccttgatgagttctgcaactgctcagagcacattccctctacgattgctgtggtgggagcaactggctcaggcgtctccacggcagtggcaaatctgctggggctcttctacattccccaggtcagttatgcctcctccagcagactcctcagcaacaagaatcaattcaagtctttcctccgaaccatccccaatgatgagcaccaggccactgccatggcagacatcatcgagtatttccgctggaactgggtgggcacaattgcagctgatgacgactatgggcggccggggattgagaaattccgagaggaagctgaggaaagggatatctgcatcgacttcagtgaactcatctcccagtactctgatgaggaagagatccagcatgtggtagaggtgattcaaaattccacggccaaagtcatcgtggttttctccagtggcccagatcttgagcccctcatcaaggagattgtccggcgcaatatcacgggcaagatctggctggccagcgaggcctgggccagctcctccctgatcgccatgcctcagtacttccacgtggttggcggcaccattggattcgctctgaaggctgggcagatcccaggcttccgggaattcctgaagaaggtccatcccaggaagtctgtccacaatggttttgccaaggagttttgggaagaaacatttaactgccacctccaagaaggtgcaaaaggacctttacctgtggacacctttctgagaggtcacgaagaaagtggcgacaggtttagcaacagctcgacagccttccgacccctctgtacaggggatgagaacatcagcagtgtcgagaccccttacatagattacacgcatttacggatatcctacaatgtgtacttagcagtctactccattgcccacgccttgcaagatatatatacctgcttacctgggagagggctcttcaccaatggctcctgtgcagacatcaagaaagttgaggcgtggcaggtcctgaagcacctacggcatctaaactttacaaacaatatgggggagcaggtgacctttgatgagtgtggtgacctggtggggaactattccatcatcaactggcacctctccccagaggatggctccatcgtgtttaaggaagtcgggtattacaacgtctatgccaagaagggagaaagactcttcatcaacgaggagaaaatcctgtggagtgggttctccagggagccactcacctttgtgctgtctgtcctccaggtgcccttctccaactgcagccgagactgcctggcagggaccaggaaagggatcattgagggggagcccacctgctgctttgagtgtgtggagtgtcctgatggggagtatagtgatgagacagatgccagtgcctgtaacaagtgcccagatgacttctggtccaatgagaaccacacctcctgcattgccaaggagatcgagtttctgtcgtggacggagccctttgggatcgcactcaccctctttgccgtgctgggcattttcctgacagcctttgtgctgggtgtgtttatcaagttccgcaacacacccattgtcaaggccaccaaccgagagctctcctacctcctcctcttctccctgctctgctgcttctccagctccctgttcttcatcggggagccccaggactggacgtgccgcctgcgccagccggcctttggcatcagcttcgtgctctgcatctcatgcatcctggtgaaaaccaaccgtgtcctcctggtgtttgaggccaagatccccaccagcttccaccgcaagtggtgggggctcaacctgcagttcctgctggttttcctctgcaccttcatgcagattgtcatctgtgtgatctggctctacaccgcgcccccgtcaagctaccgcaaccaggagctggaggatgagatcatcttcatcacgtgccacgagggctccctcatggccctgggcttcctgatcggctacacctgcctgctggctgccatctgcttcttctttgccttcaagtcccggaagctgccggagaacttcaatgaagccaagttcatcaccttcagcatgctcatcttcttcatcgtctggatctccttcattccagcctatgccagcacctatggcaagtttgtctctgccgtagaggtgattgccatcctggcagccagctttggcttgctggcgtgcatcttcttcaacaagatctacatcattctcttcaagccatcccgcaacaccatcgaggaggtgcgttgcagcaccgcagctcacgctttcaaggtggctgcccgggccacgctgcgccgcagcaacgtctcccgcaagcggtccagcagccttggaggctccacgggatccaccccctcctcctccatcagcagcaagagcaacagcgaagacccattcccacagcccgagaggcagaagcagcagcagccgctggccctaacccagcaagagcagcagcagcagcccctgaccctcccacagcagcaacgatctcagcagcagcccagatgcaagcagaaggtcatctttggcagcggcacggtcaccttctcactgagctttgatgagcctcagaagaacgccatggcccacaggaattctacgcaccagaactccctggaggcccagaaaagcagcgatacgctgacccgacacgagccattactcccgctgcagtgcggggaaacggacttagatctgaccgtccaggaaacaggtctgcaaggacctgtgggtggagaccagcggccagaggtggaggaccctgaagagttgtccccagcacttgtagtgtccagttcacagagctttgtcatcagtggtggaggcagcactgttacagaaaacgtagtgaattcataaaatggaaggagaagactgggctagggagaatgcagagaggtttcttggggtcccagggaagaggaatcgccccagactcctttcctctgaggaagaagggataatagacacatcaaatgccccgaatttagtcacaccatcttaaatgacagtgaattgacccatgttccctttaaaattaaaaaaaagaagagccttgtgtttctgtggttgcatttgtcaaagcattgagatctccacggtcagatttgctgttcacccacatctaatgtctcttcctctgttctatcccacccaacagctcagagatgaaactatggctttaaactaccctccagagtgtgcagactgatgggacatcaaatttgccaccactagagctgagagtctgaaagacagaatgtcaccagtcctgcccaatgccttgacaacagactgaattttaaatgttcacaacataaggagaatgtatctcctcctatttatgaaaaccatatgatattttgtctcctacctgctgctgctattatgtaacatccagaaggtttgcacccctcctataccatatgtctgcttctgtccaggacatgatactgatgccatgtttagattccaggatcacaagaatcacctcaaattgttaggaagggactgcataaaccaatgagctgtatctgtaattaatattcctatatgtagctttatccttaggaaaatgcttctgttgtaatagtccatggacaatataaactgaaaaatgtcagtctggtttatataaggcagtattattgagctctatttccccaccccactatcctcactcccataagctaagccttatgtgagccccttcagggactcaagggtccagaagtccctcccatctctaccccaaagaattcctgaagccagatccaccctatccctgtacagagtaagttctcaattattggcctgctaatagctgctagggtaggaaagcgtggttccaagaaagatccaccctcaaatgtcagagctatgttccctccagcagtggtattaatactgccggtcacccaggctctggagccagagagacagaccggggttcaagccatggcttcgtcatttgcaagctgagtgactgtaggcagggaaccttaacctctctaagccacagcttcttcatctttaaaataaggataataatcattctttcccctcagagctcttatgtggattaaacgagataatgtatataaagtactttagcctggtacctagcacacaataagcattcaataaatattagttaatattat

SEQ ID NO: 70553 - DNA, 3267 bp, Artificial Sequence
  derived and/or modified sequence
atggccttctacagctgctgctgggtgctgctggccctgacctggcacaccagcgcctacggccccgaccagagagcccagaagaagggcgacatcatcctgggcggcctgttccccatccacttcggcgtggccgccaaggaccaggacctgaagagcagacccgagagcgtggagtgcatcagatacaacttcagaggcttcagatggctgcaggccatgatcttcgccatcgaggagatcaacagcagccccgccctgctgcccaacctgaccctgggctacagaatcttcgacacctgcaacaccgtgagcaaggccctggaggccaccctgagcttcgtggcccagaacaagatcgacagcctgaacctggacgagttctgcaactgcagcgagcacatccccagcaccatcgccgtggtgggcgccaccggcagcggcgtgagcaccgccgtggccaacctgctgggcctgttctacatcccccaggtgagctacgccagcagcagcagactgctgagcaacaagaaccagttcaagagcttcctgagaaccatccccaacgacgagcaccaggccaccgccatggccgacatcatcgagtacttcagatggaactgggtgggcaccatcgccgccgacgacgactacggcagacccggcatcgagaagttcagagaggaggccgaggagagagacatctgcatcgacttcagcgagctgatcagccagtacagcgacgaggaggagatccagcacgtggtggaggtgatccagaacagcaccgccaaggtgatcgtggtgttcagcagcggccccgacctggagcccctgatcaaggagatcgtgagaagaaacatcaccggcaagatctggctggccagcgaggcctgggccagcagcagcctgatcgccatgccccagtacttccacgtggtgggcggcaccatcggcttcgccctgaaggccggccagatccccggcttcagagagttcctgaagaaggtgcaccccagaaagagcgtgcacaacggcttcgccaaggagttctgggaggagaccttcaactgccacctgcaggagggcgccaagggccccctgcccgtggacaccttcctgagaggccacgaggagagcggcgacagattcagcaacagcagcaccgccttcagacccctgtgcaccggcgacgagaacatcagcagcgtggagaccccctacatcgactacacccacctgagaatcagctacaacgtgtacctggccgtgtacagcatcgcccacgccctgcaggacatctacacctgcctgcccggcagaggcctgttcaccaacggcagctgcgccgacatcaagaaggtggaggcctggcaggtgctgaagcacctgagacacctgaacttcaccaacaacatgggcgagcaggtgaccttcgacgagtgcggcgacctggtgggcaactacagcatcatcaactggcacctgagccccgaggacggcagcatcgtgttcaaggaggtgggctactacaacgtgtacgccaagaagggcgagagactgttcatcaacgaggagaagatcctgtggagcggcttcagcagagagcccctgaccttcgtgctgagcgtgctgcaggtgcccttcagcaactgcagcagagactgcctggccggcaccagaaagggcatcatcgagggcgagcccacctgctgcttcgagtgcgtggagtgccccgacggcgagtacagcgacgagaccgacgccagcgcctgcaacaagtgccccgacgacttctggagcaacgagaaccacaccagctgcatcgccaaggagatcgagttcctgagctggaccgagcccttcggcatcgccctgaccctgttcgccgtgctgggcatcttcctgaccgccttcgtgctgggcgtgttcatcaagttcagaaacacccccatcgtgaaggccaccaacagagagctgagctacctgctgctgttcagcctgctgtgctgcttcagcagcagcctgttcttcatcggcgagccccaggactggacctgcagactgagacagcccgccttcggcatcagcttcgtgctgtgcatcagctgcatcctggtgaagaccaacagagtgctgctggtgttcgaggccaagatccccaccagcttccacagaaagtggtggggcctgaacctgcagttcctgctggtgttcctgtgcaccttcatgcagatcgtgatctgcgtgatctggctgtacaccgccccccccagcagctacagaaaccaggagctggaggacgagatcatcttcatcacctgccacgagggcagcctgatggccctgggcttcctgatcggctacacctgcctgctggccgccatctgcttcttcttcgccttcaagagcagaaagctgcccgagaacttcaacgaggccaagttcatcaccttcagcatgctgatcttcttcatcgtgtggatcagcttcatccccgcctacgccagcacctacggcaagttcgtgagcgccgtggaggtgatcgccatcctggccgccagcttcggcctgctggcctgcatcttcttcaacaagatctacatcatcctgttcaagcccagcagaaacaccatcgaggaggtgagatgcagcaccgccgcccacgccttcaaggtggccgccagagccaccctgagaagaagcaacgtgagcagaaagagaagcagcagcctgggcggcagcaccggcagcacccccagcagcagcatcagcagcaagagcaacagcgaggaccccttcccccagcccgagagacagaagcagcagcagcccctggccctgacccagcaggagcagcagcagcagcccctgaccctgccccagcagcagagaagccagcagcagcccagatgcaagcagaaggtgatcttcggcagcggcaccgtgaccttcagcctgagcttcgacgagccccagaagaacgccatggcccacagaaacagcacccaccagaacagcctggaggcccagaagagcagcgacaccctgaccagacacgagcccctgctgcccctgcagtgcggcgagaccgacctggacctgaccgtgcaggagaccggcctgcagggccccgtgggcggcgaccagagacccgaggtggaggaccccgaggagctgagccccgccctggtggtgagcagcagccagagcttcgtgatcagcggcggcggcagcaccgtgaccgagaacgtggtgaacagctag

SEQ ID NO: 70554 - protein, 540 aa, Artificial Sequence
  derived and/or modified sequence
MKIAHRGPDAFRFENVNGYTNCCFGFHRLAVVDPLFGMQPIRVKKYPYLWLCYNGEIYNHKKMQQHFEFEYQTKVDGEIILHLYDKGGIEQTICMLDGVFAFVLLDTANKKVFLGRDTYGVRPLFKAMTEDGFLAVCSEAKGLVTLKHSATPFLKVEPFLPGHYEVLDLKPNGKVASVEMVKYHHCRDVPLHALYDNVEKLFPGFEIETVKNNLRILFNNAVKKRLMTDRRIGCLLSGGLDSSLVAATLLKQLKEAQVQYPLQTFAIGMEDSPDLLAARKVADHIGSEHYEVLFNSEEGIQALDEVIFSLETYDITTVRASVGMYLISKYIRKNTDSVVIFSGEGSDELTQGYIYFHKAPSPEKAEEESERLLRELYLFDVLRADRTTAAHGLELRVPFLDHRFSSYYLSLPPEMRIPKNGIEKHLLRETFEDSNLIPKEILWRPKEAFSDGITSVKNSWFKILQEYVEHQVDDAMMANAAQKFPFNTPKTKEGYYYRQVFERHYPGRADWLSHYWMPKWINATDPSARTLTHYKSAVKA

SEQ ID NO: 70555 - DNA, 192 bp, Artificial Sequence
  derived and/or modified sequence
atgaaaatcgctcaccgcggtcccgatgcgttccgattcgaaaacgtgaacggatacaccaattgttgctttggcttccacaggttggccgtggtcgatccactattcggtatgcaacctattcgcgtgaagaagtacccttacttgtggctgtgctacaatggagagatttacaaccataaaaaagtgtag

SEQ ID NO: 70556 - DNA, 192 bp, Artificial Sequence
  derived and/or modified sequence
atgaagatcgcccaccggggcccagatgccttccgctttgaaaatgtgaatggctacaccaactgctgcttcggcttccaccggctggccgtggtggaccccctgtttggcatgcagcccatccgggtgaagaagtacccctacctgtggctgtgctacaacggggagatctacaaccacaagaaggtgtag

SEQ ID NO: 70557 - DNA, 192 bp, Artificial Sequence
  derived and/or modified sequence
atgaagatcgcccaccggggccccgacgccttccggttcgagaacgtgaacggctacactaactgctgtttcggcttccaccgactggccgtggttgaccctctctttggaatgcagcccataagggtcaagaaatacccctatctctggctttgttacaatggtgagatctataatcacaaaaaggtgtag

SEQ ID NO: 70558 - DNA, 192 bp, Artificial Sequence
  derived and/or modified sequence
atgaagattgctcacagaggcccagatgcattccgattcgaaaacgtgaacggctatacgaattgctgttttgggtttcataggctggcagtcgtcgaccccctatttggtatgcagcctattcgggtgaaaaagtacccatacctctggctttgctacaacggggagatctataaccacaagaaagtctag

SEQ ID NO: 70559 - DNA, 192 bp, Artificial Sequence
  derived and/or modified sequence
atgaagatcgcccacagaggccccgacgccttcagattcgagaacgtgaacggctacaccaactgctgcttcggcttccacagactggccgtggtggaccccctgttcggcatgcagcccatcagagtgaagaagtacccctacctgtggctgtgctacaacggcgagatctacaaccacaagaaggtgtag

SEQ ID NO: 70560 - protein, 478 aa, Artificial Sequence
  derived and/or modified sequence
MQQHFEFEYQTKVDGEIILHLYDKGGIEQTICMLDGVFAFVLLDTANKKVFLGRDTYGVRPLFKAMTEDGFLAVCSEAKGLVTLKHSATPFLKVEPFLPGHYEVLDLKPNGKVASVEMVKYHHCRDVPLHALYDNVEKLFPGFEIETVKNNLRILFNNAVKKRLMTDRRIGCLLSGGLDSSLVAATLLKQLKEAQVQYPLQTFAIGMEDSPDLLAARKVADHIGSEHYEVLFNSEEGIQALDEVIFSLETYDITTVRASVGMYLISKYIRKNTDSVVIFSGEGSDELTQGYIYFHKAPSPEKAEEESERLLRELYLFDVLRADRTTAAHGLELRVPFLDHRFSSYYLSLPPEMRIPKNGIEKHLLRETFEDSNLIPKEILWRPKEAFSDGITSVKNSWFKILQEYVEHQVDDAMMANAAQKFPFNTPKTKEGYYYRQVFERHYPGRADWLSHYWMPKWINATDPSARTLTHYKSAVKA

SEQ ID NO: 70561 - DNA, 1437 bp, Artificial Sequence
  derived and/or modified sequence
atgcagcagcacttcgaatttgagtaccaaactaaggtcgacggagagattatccttcacctgtatgacaaagggggtatcgagcaaacaatttgcatgctcgatggtgtgttcgcattcgtgctcctcgacactgccaataaaaaggtgtttctgggacgcgatacttacggcgttagacccctttttaaagccatgacagaggacggattcctcgccgtgtgcagcgaggccaagggtctggtcaccctaaagcactcagctacgccctttttgaaagtcgaacccttcctgcctggacactacgaagtcctcgacctgaagccgaacggcaaggtggccagcgtggagatggtgaaataccaccactgtcgtgatgtccccctgcacgccttgtacgataacgtggaaaagctattcccaggattcgagattgaaaccgtcaaaaataatcttaggattctcttcaataacgctgtaaagaaaagattaatgactgaccggcggatcgggtgcctcctctcaggcggtctcgactctagtctggtggctgccacactgttaaaacaactgaaggaggcgcaagttcaatacccattacagacatttgctatcggaatggaggattctcctgacctgttggccgcccgaaaggtggcggaccacataggatccgaacactacgaggtcctctttaatagcgaagagggcattcaagctctcgacgaagtcatttttagtctcgagacttacgatatcacaacagtgcgggcgagcgtcgggatgtatctgatatctaagtacattaggaagaataccgattctgtggttatcttctcaggcgaaggcagcgacgaactgactcaggggtatatttatttccacaaggcacccagtcccgaaaaggctgaggaagagtctgagaggctgcttcgcgagctctacctcttcgacgtactgagagccgatcgtacaaccgccgctcatggcctagaattgcgtgtcccatttctggatcataggttcagctcatattatttgagccttcctcccgagatgaggatccctaagaacggcattgagaaacatcttctgagggagacatttgaggattcgaacctgataccgaaggaaattctttggcggcccaaggaagcttttagcgacggcattacttctgttaaaaactcatggttcaaaatcctgcaagaatacgtggaacatcaggtggatgacgccatgatggccaacgccgcacaaaagttcccctttaacacaccaaagaccaaggagggatattactacagacaggtgttcgaaagacactaccccggacgcgccgactggctgtcgcattactggatgcctaagtggataaatgccaccgacccaagcgcccgcaccttaacacactacaaatctgctgtgaaagcatag

SEQ ID NO: 70562 - DNA, 1437 bp, Artificial Sequence
  derived and/or modified sequence
atgcagcagcatttcgagttcgagtaccaaactaaagtggacggagagattatactgcatctgtatgacaaagggggcatcgagcagaccatctgcatgctcgacggagtctttgcttttgtgctgctggacaccgccaataagaaggttttcctggggcgagacacctatggcgtacgccctttgttcaaagctatgactgaggatggttttctcgcagtttgtagcgaggcaaaaggtctcgtgactctcaagcattctgccactcccttcctcaaggtcgagccattcctgccgggacattatgaagtactcgatctgaaaccaaacggtaaggtcgcaagcgttgaaatggtgaaataccaccattgccgcgatgtgcccctgcatgcgttgtatgataacgttgaaaagctgtttcccggctttgagatagaaactgttaaaaataacttgcgtattctgtttaataacgccgtcaaaaaacggttgatgaccgatcgcagaattggttgtctgctgtctggagggctggactcctccttggtcgcagcaacgttgctgaaacagctcaaagaagcccaggtacagtaccctctgcagacattcgcaattggcatggaggacagtccggacttgctggccgcaagaaaggtcgctgaccacatcgggtcagagcactacgaggtactctttaattctgaggagggaatccaggctctcgacgaggtaattttctctcttgaaacctacgatattacaaccgtgcgtgcctccgtaggtatgtacttgatttcaaagtacatccgcaaaaatacagactctgtcgtaatttttagcggagagggcagtgatgagctgactcagggatatatctatttccataaggccccctcacccgaaaaggccgaggaggagtccgagaggctgttgcgagaactttacttattcgatgttctcagggctgacaggacaactgcggctcatggattggagctgagggtgccgtttctggatcataggtttagctcctattatctgtccctaccgcccgaaatgcgaatccccaagaacggtatcgagaaacacctgttgcgagaaactttcgaagactccaatctgataccaaaggagatcttatggagacctaaggaggccttttcagatggaatcacttctgtcaagaacagttggtttaagattcttcaggagtacgttgagcaccaggtggatgatgccatgatggctaatgctgcgcagaagttcccatttaacacccccaagactaaagaaggctattattatcgccaggttttcgagcgtcattatcctggaagggctgactggttatcccattactggatgccgaaatggatcaacgcaacagatcccagcgctcggacgctgacccactataagtcagcagtcaaggcgtag

SEQ ID NO: 70563 - DNA, 1437 bp, Artificial Sequence
  derived and/or modified sequence
atgcagcagcactttgaatttgagtaccagaccaaggtggatggagagatcatcctgcacctgtatgacaagggcggcatcgagcagaccatctgcatgctggatggagtgtttgcctttgtgctgctggacacagccaacaagaaggtgttcctgggccgggacacctatggagtgcggcccctcttcaaggccatgacagaagatggcttcctggccgtgtgcagcgaggccaagggcctggtgaccctgaagcacagcgccacccccttcctgaaggtggagcccttcctgcccggccactatgaggtgctggacctgaagcccaacgggaaggtggcctctgtggagatggtgaagtaccaccactgcagagatgtgcccctgcacgccctgtatgacaacgtggagaagctgtttcctggctttgaaattgaaacagtgaagaacaacctgcgcatcctcttcaacaatgctgtgaagaagaggctgatgacagaccggcgcatcggctgcctgctgagcggcggcctggacagcagcctggtggccgccaccctgctgaagcagctgaaggaggcccaggtgcagtaccccctgcagacctttgccatcggcatggaggacagcccagacctgctggccgccaggaaggtggccgaccacatcggcagcgagcactatgaggtgctcttcaacagcgaggagggcatccaggccctggatgaggtgatcttcagcctggagacctatgacatcaccaccgtgcgggcctctgtgggcatgtacctgatcagcaagtacatcaggaagaacacagattctgtggtgatcttcagcggggagggcagtgatgagctgacccagggctacatctacttccacaaggcccccagccctgagaaggccgaggaggagagcgagcggctgctgcgggagctgtacctgtttgatgtgctgcgggctgacaggaccacagctgcccacggcctggagctgcgggtgcccttcctggaccaccgcttcagcagctactacctgagcctgcccccagagatgaggatccccaagaatggcatcgagaagcacctgctgcgggagacctttgaggacagcaacctgatccccaaggagatcctgtggaggcccaaggaggccttcagtgatggcatcacctctgtgaagaacagctggttcaagatcctgcaggagtatgtggagcaccaggtggatgatgccatgatggccaatgctgcccagaagttccccttcaacacccccaagaccaaggagggctactactaccggcaggtgtttgagcggcactacccaggccgggctgactggctgagccactactggatgcccaagtggatcaatgccacagaccccagcgcccggaccctgacccactacaagtctgctgtgaaggcctag

SEQ ID NO: 70564 - DNA, 1437 bp, Artificial Sequence
  derived and/or modified sequence
atgcagcagcacttcgagttcgagtaccagaccaaggtggacggcgagatcatacttcacttgtacgacaaaggtgggattgaacaaaccatttgtatgctcgatggggtgttcgctttcgtcttactagatacagccaacaaaaaggtctttctggggcgagatacttacggtgtgaggcccctattcaaggccatgaccgaagacggctttttggccgtgtgcagcgaggcaaaaggtttggtcacccttaaacactcggcgacaccattcttgaaggttgagccctttctccctgggcattacgaggtgctggatcttaagcccaatggaaaagtggcctctgtggagatggtgaagtaccatcattgcagagacgtgcctttgcacgccctatatgacaacgtcgagaaactgtttcccgggttcgagatcgaaacggtaaaaaacaatttgagaattttattcaataatgctgtcaaaaaacgactgatgactgatagacgaatcggctgcctcctgtcagggggcctcgacagcagcttagtagccgcaaccctcctcaaacagttgaaagaggcccaggtacagtacccacttcaaaccttcgctataggaatggaagatagcccggacctgctcgccgctaggaaggtggccgaccatattggaagtgagcattacgaggtgctgtttaactctgaggaaggcattcaggctcttgatgaggtgatcttctctttggagacttacgatattactacggtcagagcctcagtaggaatgtatctgatcagtaagtatatcagaaagaatacagacagcgttgtgattttcagcggagaaggatctgatgaactcacccagggctatatctattttcataaggcccccagcccggaaaaagcggaggaagaatccgagcggctgcttcgcgagctctacctcttcgacgtgttaagagccgatcggaccacagccgcacacggtctagaattaagggtgccgtttctggatcataggttctcatcctattatctcagccttcctcccgaaatgcgtatcccaaagaacggtattgaaaaacacctgctaagagagaccttcgaggacagtaatctgattccaaaggagatattgtggagacctaaggaagcattctcggatggcatcacgagcgtgaaaaattcctggtttaaaatattgcaagagtatgtggagcaccaggtcgatgacgccatgatggcaaatgccgcacagaaatttccctttaacaccccaaaaactaaggaggggtattattatcgtcaagttttcgaaagacactaccccggcagggccgactggctgtctcattactggatgcctaagtggataaacgcaaccgacccctcagctcggactctcacccattataagtccgctgtcaaggcctag

SEQ ID NO: 70565 - DNA, 1437 bp, Artificial Sequence
  derived and/or modified sequence
atgcagcagcacttcgagttcgagtaccagaccaaggtggacggcgaaattatcttacatctgtacgataaaggcggaattgaacagaccatatgcatgctggacggcgtgtttgcattcgtgctgctagacaccgccaacaagaaggtattcttgggtcgggacacctatggtgtcaggccactctttaaagccatgactgaggatggtttcctggcagtgtgttcagaggccaaaggcctagttactctcaaacactctgcaacacccttcctcaaagttgagcccttcctgccaggccattacgaggtgctggatttaaagccaaatggcaaggtagccagtgttgagatggtgaagtaccatcactgtcgagacgtgcctctccacgcactctacgacaacgtggaaaaactgttcccgggtttcgaaattgagacagtgaagaacaatctgcgaatccttttcaacaacgccgttaagaaaagacttatgaccgaccgacgcattggttgcttactgtccggtgggctcgactcatccctggtagcagccaccctgttaaagcagctcaaggaggcccaggtccagtacccgctccagacctttgcgatcgggatggaagattcacctgatctgctggctgctcggaaggtggccgatcacatcgggagtgagcattacgaggtgttgtttaactcagaggaggggatccaagcactggatgaggtgattttttccctggagacgtacgatataactaccgtccgtgcctccgttggtatgtaccttatcagtaaatatattcggaagaacaccgatagcgtcgtgattttttctggtgaggggtcagacgaattaacccagggctatatttactttcacaaagccccttcgcctgaaaaggccgaggaggagagtgaaagactgctccgggaactctaccttttcgacgtattgcgggcagatagaactactgccgcacacggtcttgagctgagagtccccttcctggaccatcgcttttcctcttattatttgtctctgccccctgagatgcgaattcctaagaatggcatcgagaagcacctgcttagagaaacctttgaggactccaatttaatcccgaaggagatcctttggaggcccaaggaggctttttctgacggaattaccagcgtgaaaaactcatggtttaagatcctgcaagagtacgtcgagcatcaggtggacgatgcaatgatggctaatgcagcccagaagtttccattcaatacaccaaagacgaaggaaggatattactacagacaggtgtttgaaagacactaccccgggagggccgattggctcagtcactattggatgccaaaatggatcaatgccacggatccatccgcccggacactgacccattacaagtccgccgtgaaggcctag

SEQ ID NO: 70566 - DNA, 1437 bp, Artificial Sequence
  derived and/or modified sequence
atgcagcagcatttcgagttcgagtaccaaacaaaagtggatggcgaaatcattctgcacctgtacgacaaaggcggaatcgagcagaccatttgcatgttggatggggtttttgcattcgtgctcttggacacagccaacaaaaaggtttttcttgggcgtgatacatacggggtaagaccgctgtttaaggcgatgacggaggatggtttcctcgcagtgtgctccgaagccaaaggactggttaccctcaagcattcggctacaccatttctgaaggttgagccttttctgccaggccattatgaagtccttgatctgaagcccaatggcaaagtggcgtccgtggagatggttaaataccaccactgtcgggatgtcccacttcacgccttatacgacaacgttgaaaagctcttcccagggtttgagatcgagaccgtcaagaacaatctgcgcatcctgtttaacaacgctgtgaagaaacggttgatgacagatagaagaatcggttgccttctgagcggaggcctcgattcttctctggtcgcagctacactgttaaaacagctcaaggaggctcaggtgcagtatcccttacaaacctttgccattggcatggaagatagtcccgacttgctcgccgcacgtaaggtggccgaccacatcggcagtgaacactatgaagttctgttcaattctgaggaagggattcaggccctcgacgaggttatattctcactggagacgtacgatatcaccaccgtgcgcgctagcgttggcatgtatctgatcagcaaatacatcagaaagaatacagacagcgttgtgattttttccggggagggaagcgacgagctgacgcaggggtacatctactttcacaaagccccttcaccagaaaaggccgaggaggaatcggaacggctcctccgcgaactgtacctgttcgatgtcctgcgagcagatcggaccaccgctgcccatgggctggagttgcgcgtcccctttctagatcacagattctccagctattacctgtcgctgccacctgagatgaggatccctaagaatgggatcgagaaacacctgttaagggagactttcgaggattcaaatctgatcccaaaagagattctatggaggcctaaagaagctttcagtgacggcattacaagtgtaaagaattcctggttcaagatcctgcaggaatacgtggagcaccaagttgacgatgccatgatggcgaatgccgcacagaagttccccttcaacacccccaaaacgaaagagggttattattatagacaggtgttcgagaggcattacccaggacgtgctgactggctctctcactattggatgccaaagtggatcaacgctacggatccctctgctcgaaccctaacgcattataagagtgcagtcaaagcatag

SEQ ID NO: 70567 - DNA, 1437 bp, Artificial Sequence
  derived and/or modified sequence
atgcagcagcattttgaattcgagtatcagacgaaggtcgacggagagatcatcctgcatctttatgacaagggagggatcgagcagacaatctgcatgctggatggggtctttgcctttgtgctgctggacactgctaataaaaaggtctttctggggagggatacgtacggagtacgaccactgtttaaagcaatgacagaggatggctttctcgccgtctgtagtgaggccaaagggctggtcacgctgaaacacagcgccacgccatttctaaaggtagagccctttctgcctggacactatgaggtcctcgacttaaagcccaatggaaaagtggcttcggtggagatggtcaaatatcatcattgccgcgacgtgcccctgcacgccctttatgacaatgttgaaaaactgttccccggtttcgaaatcgagacagtaaagaacaatctgagaattttatttaacaatgctgtgaagaagaggttgatgactgataggagaatcggctgcttgctgtccggaggcttggattcatctttagtagcagccactttattgaaacagctaaaagaggcccaggttcaataccctctccagaccttcgcgattggaatggaggactcccctgacctgctcgccgctcgcaaggtcgccgaccatattggaagcgaacattacgaggttttgttcaatagtgaagagggcattcaggcccttgatgaagtaatcttttctctggaaacatatgacatcaccacagtccgggcatcagtcggaatgtacctgattagtaagtacatccgcaaaaataccgatagtgtagtcatattttcgggcgaaggcagtgacgaattaacccaggggtatatttacttccataaggcgccaagccccgagaaggcagaagaggagtctgaaagattactacgggaactgtacctcttcgacgtactgcgcgctgaccgcactactgcagcccatggattggaactcagagttcctttcctggaccatcgcttctcgtcttactatctaagtctgcctcctgagatgaggattcccaagaatggaatcgagaagcacctcttaagggagaccttcgaagattccaatctcattccgaaagagattctttggagaccaaaagaagctttctcggatggtatcacgagtgtgaagaactcatggttcaagatccttcaggagtatgtggaacaccaggtcgacgacgccatgatggcaaatgcagcccagaagtttccatttaacactcccaagactaaggaggggtactactatcgccaagtgttcgaacggcattaccccggacgggctgattggttaagccactactggatgcccaaatggattaatgctacagaccccagcgccagaactctgactcattataaatcggctgtgaaagcgtag

SEQ ID NO: 70568 - DNA, 1638 bp, Artificial Sequence
  derived and/or modified sequence
gaagcatcgagagggaaccgcggccggcaggccggaccgctccggagaggaggcagcggcagtttgagcccctatgcaacagcattttgaatttgaataccagaccaaagtggatggtgagataatccttcatctttatgacaaaggaggaattgagcaaacaatttgtatgttggatggtgtgtttgcatttgttttactggatactgccaataagaaagtgttcctgggtagagatacatatggagtcagacctttgtttaaagcaatgacagaagatggatttttggctgtatgttcagaagctaaaggtcttgttacattgaagcactccgcgactccctttttaaaagtggagccttttcttcctggacactatgaagttttggatttaaagccaaatggcaaagttgcatccgtggaaatggttaaatatcatcactgtcgggatgtacccctgcacgccctctatgacaatgtggagaaactctttccaggttttgagatagaaactgtgaagaacaacctcaggatcctttttaataatgctgtaaagaaacgtttgatgacagacagaaggattggctgccttttatcagggggcttggactccagcttggttgctgccactctgttgaagcagctgaaagaagcccaagtacagtatcctctccagacatttgcaattggcatggaagacagccccgatttactggctgctagaaaggtggcagatcatattggaagtgaacattatgaagtcctttttaactctgaggaaggcattcaggctctggatgaagtcatattttccttggaaacttatgacattacaacagttcgtgcttcagtaggtatgtatttaatttccaagtatattcggaagaacacagatagcgtggtgatcttctctggagaaggatcagatgaacttacgcagggttacatatattttcacaaggctccttctcctgaaaaagccgaggaggagagtgagaggcttctgagggaactctatttgtttgatgttctccgcgcagatcgaactactgctgcccatggtcttgaactgagagtcccatttctagatcatcgattttcttcctattacttgtctctgccaccagaaatgagaattccaaagaatgggatagaaaaacatctcctgagagagacgtttgaggattccaatctgatacccaaagagattctctggcgaccaaaagaagccttcagtgatggaataacttcagttaagaattcctggtttaagattttacaggaatacgttgaacatcaggttgatgatgcaatgatggcaaatgcagcccagaaatttcccttcaatactcctaaaaccaaagaaggatattactaccgtcaagtctttgaacgccattacccaggccgggctgactggctgagccattactggatgcccaagtggatcaatgccactgacccttctgcccgcacgctgacccactacaagtcagctgtcaaagcttaggtggtctttatgctgtaatgtgaaagcaaatatttcttcgtgttggatggggactgtgggtagataggggaacaatgagagtcaactcaggctaacttgggtgtgaaaaaaataaaagtcctaaatct

SEQ ID NO: 70569 - DNA, 1437 bp, Artificial Sequence
  derived and/or modified sequence
atgcagcagcacttcgagttcgagtaccagaccaaggtggacggcgagatcatcctgcacctgtacgacaagggcggcatcgagcagaccatctgcatgctggacggcgtgttcgccttcgtgctgctggacaccgccaacaagaaggtgttcctgggcagagacacctacggcgtgagacccctgttcaaggccatgaccgaggacggcttcctggccgtgtgcagcgaggccaagggcctggtgaccctgaagcacagcgccacccccttcctgaaggtggagcccttcctgcccggccactacgaggtgctggacctgaagcccaacggcaaggtggccagcgtggagatggtgaagtaccaccactgcagagacgtgcccctgcacgccctgtacgacaacgtggagaagctgttccccggcttcgagatcgagaccgtgaagaacaacctgagaatcctgttcaacaacgccgtgaagaagagactgatgaccgacagaagaatcggctgcctgctgagcggcggcctggacagcagcctggtggccgccaccctgctgaagcagctgaaggaggcccaggtgcagtaccccctgcagaccttcgccatcggcatggaggacagccccgacctgctggccgccagaaaggtggccgaccacatcggcagcgagcactacgaggtgctgttcaacagcgaggagggcatccaggccctggacgaggtgatcttcagcctggagacctacgacatcaccaccgtgagagccagcgtgggcatgtacctgatcagcaagtacatcagaaagaacaccgacagcgtggtgatcttcagcggcgagggcagcgacgagctgacccagggctacatctacttccacaaggcccccagccccgagaaggccgaggaggagagcgagagactgctgagagagctgtacctgttcgacgtgctgagagccgacagaaccaccgccgcccacggcctggagctgagagtgcccttcctggaccacagattcagcagctactacctgagcctgccccccgagatgagaatccccaagaacggcatcgagaagcacctgctgagagagaccttcgaggacagcaacctgatccccaaggagatcctgtggagacccaaggaggccttcagcgacggcatcaccagcgtgaagaacagctggttcaagatcctgcaggagtacgtggagcaccaggtggacgacgccatgatggccaacgccgcccagaagttccccttcaacacccccaagaccaaggagggctactactacagacaggtgttcgagagacactaccccggcagagccgactggctgagccactactggatgcccaagtggatcaacgccaccgaccccagcgccagaaccctgacccactacaagagcgccgtgaaggcctag

SEQ ID NO: 70570 - protein, 728 aa, Artificial Sequence
  derived and/or modified sequence
MCASVKYNIRGPALIPRMKTKHRIYYITLFSIVLLGLIATGMFQFWPHSIESSNDWNVEKRSIRDVPVVRLPADSPIPERGDLSCRMHTCFDVYRCGFNPKNKIKVYIYALKKYVDDFGVSVSNTISREYNELLMAISDSDYYTDDINRACLFVPSIDVLNQNTLRIKETAQAMAQLSRWDRGTNHLLFNMLPGGPPDYNTALDVPRDRALLAGGGFSTWTYRQGYDVSIPVYSPLSAEVDLPEKGPGPRQYFLLSSQVGLHPEYREDLEALQVKHGESVLVLDKCTNLSEGVLSVRKRCHKHQVFDYPQVLQEATFCVVLRGARLGQAVLSDVLQAGCVPVVIADSYILPFSEVLDWKRASVVVPEEKMSDVYSILQSIPQRQIEEMQRQLFMEPARRENWSAANHQMNSLIWPREQWDSQIINDRIYPYAAISYEEWNDPPAVKWGSVSNPLFLPLIPPQSQGFTAIVLTYDRVESLFRVITEVSKVPSLSKLLVVWNNQNKNPPEDSLWPKIRVPLKVVRTAENKLSNRFFPYDEIETEAVLAIDDDIIMLTSDELQFGYEVWREFPDRLVGYPGRLHLWDHEMNKWKYESEWTNEVSMVLTGAAFYHKYFNYLYTYKMPGDIKNWVDAHMNCEDIAMNFLVANVTGKAVIKVTPRKKFKCPECTAIDGLSLDQTHMVERSECINKFASVFGTMPLKVVEHRADPVLYKDDFPEKLKSFPNIGSL

SEQ ID NO: 70571 - DNA, 2187 bp, Artificial Sequence
  derived and/or modified sequence
atgtgcgccagcgtgaagtacaacatcagaggccccgccctgatccccagaatgaagaccaagcacagaatctactacatcaccctgttcagcatcgtgctgctgggcctgatcgccaccggcatgttccagttctggccccacagcatcgagagcagcaacgactggaacgtggagaagagaagcatcagagacgtgcccgtggtgagactgcccgccgacagccccatccccgagagaggcgacctgagctgcagaatgcacacctgcttcgacgtgtacagatgcggcttcaaccccaagaacaagatcaaggtgtacatctacgccctgaagaagtacgtggacgacttcggcgtgagcgtgagcaacaccatcagcagagagtacaacgagctgctgatggccatcagcgacagcgactactacaccgacgacatcaacagagcctgcctgttcgtgcccagcatcgacgtgctgaaccagaacaccctgagaatcaaggagaccgcccaggccatggcccagctgagcagatgggacagaggcaccaaccacctgctgttcaacatgctgcccggcggcccccccgactacaacaccgccctggacgtgcccagagacagagccctgctggccggcggcggcttcagcacctggacctacagacagggctacgacgtgagcatccccgtgtacagccccctgagcgccgaggtggacctgcccgagaagggccccggccccagacagtacttcctgctgagcagccaggtgggcctgcaccccgagtacagagaggacctggaggccctgcaggtgaagcacggcgagagcgtgctggtgctggacaagtgcaccaacctgagcgagggcgtgctgagcgtgagaaagagatgccacaagcaccaggtgttcgactacccccaggtgctgcaggaggccaccttctgcgtggtgctgagaggcgccagactgggccaggccgtgctgagcgacgtgctgcaggccggctgcgtgcccgtggtgatcgccgacagctacatcctgcccttcagcgaggtgctggactggaagagagccagcgtggtggtgcccgaggagaagatgagcgacgtgtacagcatcctgcagagcatcccccagagacagatcgaggagatgcagagacagctgttcatggagcccgccagaagagagaactggagcgccgccaaccaccagatgaacagcctgatctggcccagagagcagtgggacagccagatcatcaacgacagaatctacccctacgccgccatcagctacgaggagtggaacgacccccccgccgtgaagtggggcagcgtgagcaaccccctgttcctgcccctgatccccccccagagccagggcttcaccgccatcgtgctgacctacgacagagtggagagcctgttcagagtgatcaccgaggtgagcaaggtgcccagcctgagcaagctgctggtggtgtggaacaaccagaacaagaacccccccgaggacagcctgtggcccaagatcagagtgcccctgaaggtggtgagaaccgccgagaacaagctgagcaacagattcttcccctacgacgagatcgagaccgaggccgtgctggccatcgacgacgacatcatcatgctgaccagcgacgagctgcagttcggctacgaggtgtggagagagttccccgacagactggtgggctaccccggcagactgcacctgtgggaccacgagatgaacaagtggaagtacgagagcgagtggaccaacgaggtgagcatggtgctgaccggcgccgccttctaccacaagtacttcaactacctgtacacctacaagatgcccggcgacatcaagaactgggtggacgcccacatgaactgcgaggacatcgccatgaacttcctggtggccaacgtgaccggcaaggccgtgatcaaggtgacccccagaaagaagttcaagtgccccgagtgcaccgccatcgacggcctgagcctggaccagacccacatggtggagagaagcgagtgcatcaacaagttcgccagcgtgttcggcaccatgcccctgaaggtggtggagcacagagccgaccccgtgctgtacaaggacgacttccccgagaagctgaagagcttccccaacatcggcagcctgtag

SEQ ID NO: 70572 - DNA, 2187 bp, Artificial Sequence
  derived and/or modified sequence
atgtgcgcctctgtgaaatataacatcagaggccctgctctcattccccggatgaaaaccaagcataggatttattacatcactcttttctctatcgtactcctgggtctcatcgctacaggcatgtttcagttttggcctcatagtatcgagagctctaacgactggaatgtggagaaaaggtcgatccgcgatgtgccggtggtgagattgcctgctgattccccaatccccgagcggggcgacttgagttgtaggatgcacacctgcttcgatgtctacagatgtggcttcaatcccaagaacaaaattaaagtgtacatatatgcgctcaagaagtatgttgatgactttggcgtgagcgtctctaatacaattagcagagaatataacgagcttctgatggcgatctccgactctgactactacacagacgacatcaatagggcttgcttgtttgtgccaagcattgatgtcctgaaccagaatactctgcggatcaaggaaacggcccaggcaatggcccagttatcacgatgggaccgcggcactaaccaccttctctttaacatgttgcctggtggcccacctgattacaacacagcgctagatgtgccacgggatcgggccctgttggcgggcggcgggttctctacgtggacttataggcagggatacgacgtttctatcccggtgtattccccattgtctgcagaggtggatctgccagagaagggtccaggacccaggcagtatttccttctatcgagccaggtgggcctccaccccgagtacagggaggacctggaggcactgcaggtaaaacacggcgaatcagtcctggtactggataagtgcaccaatctgagtgaaggagtgctgagtgtgcggaagcgatgtcataaacatcaggttttcgattaccctcaggtcttacaggaggccaccttctgcgtggtgctgcgtggcgccagactgggtcaggcagtgctgtccgatgttctgcaggcagggtgcgttcccgtcgttatcgcagatagctatatcctgcccttttctgaggtgctcgactggaaacgcgctagcgtggttgtgcccgaagagaaaatgtccgatgtgtactcaattctgcagtccattcctcagagacagattgaagagatgcagcgtcagttatttatggagcccgccagaagggagaactggagtgcggctaaccaccagatgaactcccttatttggcctagagagcagtgggatagccagattattaacgaccggatttacccctatgcagctatctcatatgaggagtggaatgatcctcctgcagtcaagtggggttcagtatccaacccacttttcctgccactcatccccccccagagccagggtttcacagccattgttctgacctacgatagagtggagtcacttttcagagttatcacggaggtgagcaaggtgccaagtttgagtaagctgctggtggtgtggaacaatcagaacaaaaacccaccagaagactccttgtggcccaagatccgtgtgcccctgaaggtcgttcgtactgcggagaacaagctgagcaacagatttttcccttacgatgaaatagagaccgaagccgttttggcaattgatgatgacattataatgctgacatccgacgagttgcagttcggctatgaggtctggagggaattcccagaccgcctggtaggataccctggcaggctgcacctctgggatcatgagatgaacaagtggaagtacgagtcagagtggaccaacgaggtctctatggtcttgactggagctgccttttaccataaatactttaactatctgtatacctacaagatgccaggcgatatcaagaactgggtcgacgctcatatgaattgtgaagacatcgcaatgaacttcctggtggcaaacgtgaccggaaaagcagtgattaaagtcaccccgagaaaaaagttcaagtgcccagagtgcactgcgatcgacggactgtctctggatcagactcatatggtcgagcgcagcgagtgtatcaacaaattcgcatctgtgtttggcacgatgcctttgaaggttgttgaacatagagctgaccccgttttatataaagacgacttccccgaaaagctgaaatcctttcccaacatcggcagtctgtag

SEQ ID NO: 70573 - DNA, 2997 bp, Artificial Sequence
  derived and/or modified sequence
ctcgccagcccagactcggccctggcagtggcggctggcgattcggaccgatccgacctgggcggaggtggcccgcgccccgcggcatgagccggtgaccaagctcggggccgagcgggaggcagccgtggccgaggagtgtgaggaagaggctgtctgtgtcattatgtgtgcgtcggtcaagtataatatccggggtcctgccctcatcccaagaatgaagaccaagcaccgaatctactatatcaccctcttctccattgtcctcctgggcctcattgccactggcatgtttcagttttggccccattctatcgagtcctcaaatgactggaatgtagagaagcgcagcatccgtgatgtgccggttgttaggctgccagccgacagtcccatcccagagcggggggatctcagttgcagaatgcacacgtgttttgatgtctatcgctgtggcttcaacccaaagaacaaaatcaaggtgtatatctatgctctgaaaaagtacgtggatgactttggcgtctctgtcagcaacaccatctcccgggagtataatgaactgctcatggccatctcagacagtgactactacactgatgacatcaaccgggcctgtctgtttgttccctccatcgatgtgcttaaccagaacacactgcgcatcaaggagacagcacaagcgatggcccagctctctaggtgggatcgaggtacgaatcacctgttgttcaacatgttgcctggaggtcccccagattataacacagccctggatgtccccagagacagggccctgttggctggtggcggcttttctacgtggacttaccggcaaggctacgatgtcagcattcctgtctatagtccactgtcagctgaggtggatcttccagagaaaggaccaggtccacggcaatacttcctcctgtcatctcaggtgggtctccatcctgagtacagagaggacctagaagccctccaggtcaaacatggagagtcagtgttagtactcgataaatgcaccaacctctcagagggtgtcctttctgtccgtaagcgctgccacaagcaccaggtcttcgattacccacaggtgctacaggaggctactttctgtgtggttcttcgtggagctcggctgggccaggcagtattgagcgatgtgttacaagctggctgtgtcccggttgtcattgcagactcctatattttgcctttctctgaagttcttgactggaagagagcatctgtggttgtaccagaagaaaagatgtcagatgtgtacagtattttgcagagcatcccccaaagacagattgaagaaatgcagagacagctcttcatggaaccagccaggagagagaactggtcagctgctaatcaccaaatgaactccctgatctggcctagggaacagtgggattcacagattatcaatgaccggatctatccatatgctgccatctcctatgaagaatggaatgaccctcctgctgtgaagtggggcagcgtgagcaatccactcttcctcccgctgatcccaccacagtctcaagggttcaccgccatagtcctcacctacgaccgagtagagagcctcttccgggtcatcactgaagtgtccaaggtgcccagtctatccaaactacttgtcgtctggaataatcagaataaaaaccctccagaagattctctctggcccaaaatccgggttccattaaaagttgtgaggactgctgaaaacaagttaagtaaccgtttcttcccttatgatgaaatcgagacagaagctgttctggccattgatgatgatatcattatgctgacctctgacgagctgcaatttggttatgaggtctggcgggaatttcctgaccggttggtgggttacccgggtcgtctgcatctctgggaccatgagatgaataagtggaagtatgagtctgagtggacgaatgaagtgtccatggtgctcactggggcagctttttatcacaagtattttaattacctgtatacctacaaaatgcctggggatatcaagaactgggtagatgctcatatgaactgtgaagatattgccatgaacttcctggtggccaacgtcacgggaaaagcagttatcaaggtaaccccacgaaagaaattcaagtgtcctgagtgcacagccatagatgggctttcactagaccaaacacacatggtggagaggtcagagtgcatcaacaagtttgcttcagtcttcgggaccatgcctctcaaggtggtggaacaccgagctgaccctgtcctgtacaaagatgactttcctgagaagctgaagagcttccccaacattggcagcttatgaaacgtgtcattggtggaggtctgaatgtgaggctgggacagagggagagaacaaggcctcccagcactctgatgtcagagtagtaggttaagggtggaaggttgacctacttggatcttggcatgcacccacctaacccactttctcaagaacaagaacctagaatgaatatccaagcacctcgagctatgcaacctctgttcttgtatttcttatgatctctgatgggttcttctcgaaaatgccaagtggaagactttgtggcatgctccagatttaaatccagctgaggctccctttgttttcagttccatgtaacaatctggaaggaaacttcacggacaggaagactgctggagaagagaagcgtgttagcccatttgaggtctggggaatcatgtaaagggtacccagacctcacttttagttatttacatcaatgagttctttcagggaaccaaacccagaattcggtgcaaaagccaaacatcttggtgggatttgataaatgccttgggacctggagtgctgggcttgtgcacaggaagagcaccagccgctgagtcaggatcctgtcagttccatgagctattcctctttggtttggctttttgatatgattaaaattattttttattcctttt

SEQ ID NO: 70574 - DNA, 2187 bp, Artificial Sequence
  derived and/or modified sequence
atgtgtgcctctgtgaagtacaacatccggggccctgccctgatccccaggatgaagaccaagcaccgcatctactacatcaccctcttcagcatcgtgctgctgggcctcatcgccaccggcatgttccagttctggccccacagcattgagagcagcaatgactggaatgtggagaagaggagcatcagagatgtgcctgtggtgcggctgcctgctgacagccccatccctgagcggggggacctgagctgcaggatgcacacctgctttgatgtgtaccgctgtggcttcaaccccaagaacaagatcaaggtgtacatctatgccctgaagaagtatgtggatgactttggagtgtctgtgagcaacaccatcagccgggagtacaatgagctgctgatggccatcagtgacagcgactactacacagatgacatcaacagagcctgcctgtttgtgcccagcattgatgtgctgaaccagaacaccctgcgcatcaaggagacagcccaggccatggcccagctgagccgctgggaccggggcaccaaccacctgctcttcaacatgctgcccggcggccccccagactacaacacagccctggatgtgccccgggaccgggccctgctggccggcggcggcttcagcacctggacctaccggcagggctatgatgtgtccatccctgtgtacagccccctgtctgctgaggtggacctgcctgagaagggccctggcccccggcagtacttcctgctgagcagccaggtgggcctgcaccctgagtaccgggaggacctggaggccctgcaggtgaagcacggggagagcgtgctggtgctggacaagtgcaccaacctgtctgagggcgtgctgtctgtgaggaagcgctgccacaagcaccaggtgtttgactacccccaggtgctgcaggaggccaccttctgtgtggtgctgcggggggcccggctgggccaggccgtgctgagtgatgtgctgcaggccggctgtgtgcctgtggtgattgctgacagctacatcctgcccttcagcgaggtgctggactggaagagggcctctgtggtggtgcctgaggagaagatgtctgatgtgtacagcatcctgcagagcatcccccagaggcagatcgaggagatgcagaggcagctgttcatggagcccgcccggcgggagaactggagcgctgccaaccaccagatgaacagcctcatctggccccgggagcagtgggacagccagatcatcaatgaccgcatctacccctatgctgccatctcctatgaggagtggaatgaccccccagctgtgaagtggggctctgtgagcaaccccctcttcctgcccctcatccccccccagagccagggcttcaccgccatcgtgctgacctatgacagagtggagagcctcttccgggtcatcacagaggtgtccaaggtgcccagcctgagcaagctgctggtggtgtggaacaaccagaacaagaaccccccagaggacagcctgtggcccaagatccgggtgcccctgaaggtggtgaggacagctgagaacaagctgagcaaccgcttcttcccctatgatgaaattgaaacagaagctgtgctggccattgatgatgacatcatcatgctgaccagtgatgagctgcagtttggctatgaggtgtggagggagttcccagaccggctggtgggctacccaggccgcctgcacctgtgggaccacgagatgaacaagtggaagtatgagagcgagtggaccaatgaggtgtccatggtgctgactggagctgccttctaccacaagtacttcaactacctgtacacctacaagatgcctggggacatcaagaactgggtggatgcccacatgaactgtgaagatattgccatgaacttcctggtggccaacgtgacaggcaaggccgtcatcaaggtgacccccaggaagaagttcaagtgcccagagtgcacagccattgatggcctgagcctggaccagacccacatggtggagaggtctgagtgcatcaacaagtttgcctctgtgtttggcaccatgcccctgaaggtggtggagcacagagctgaccctgtgctgtacaaggatgacttccctgagaagctgaagagcttccccaacatcggcagcctgtag

SEQ ID NO: 70575 - DNA, 2187 bp, Artificial Sequence
  derived and/or modified sequence
atgtgcgccagcgtgaagtacaacatccggggccccgccctgatcccaaggatgaaaacaaagcacaggatttactatattacactatttagcatcgtgttgcttggcctgatagctaccggaatgttccaattctggccacactctatcgaatccagcaacgattggaatgtggaaaagcggtctatcagggacgtgcctgttgtccgcttgcccgcagactccccgatcccagaaagaggggacctgagctgcagaatgcacacctgctttgatgtgtatcggtgcggattcaaccctaaaaacaagatcaaggtgtacatctacgcccttaagaagtacgtggacgacttcggcgtatcggtgtccaacaccatttcacgagagtacaacgagttgttgatggccatttctgatagcgattactacaccgatgacatcaaccgggcttgcttgtttgtgccttcgatcgacgtgctcaaccagaatacattgaggattaaagagacggctcaggccatggcccagctatctagatgggaccgggggacaaaccaccttctgtttaacatgctgccaggggggccccccgattataacacagcgttggatgtgccaagggaccgggctctcttagccggggggggattcagcacctggacgtaccgacagggatacgatgtatctatacccgtgtactctcctctgagcgctgaggtcgacctgcctgagaagggccctgggcctcgacagtattttctcctatcttcccaggtcggccttcatccagagtaccgtgaggatctcgaagccctgcaagtgaagcacggcgagagcgttctcgtgctggataaatgcacaaatctatccgagggagttttaagcgtgcgtaagcgctgccacaagcaccaggttttcgactatccccaagtgcttcaagaggccactttctgtgttgtcctgagaggtgcgagactgggacaagcagtcctgtcggatgtgttacaggccggctgtgttccagtggttatcgcagattcctacattctcccattctcagaagtattggattggaagagggcaagcgttgtggtgccggaggagaaaatgtcagacgtctattcgatcttgcagtcaatcccccaacggcaaatcgaagagatgcagcgacagctgtttatggaacctgcacgacgggagaactggtccgccgcaaatcaccagatgaatagtctcatctggccacgggagcagtgggatagtcagattatcaacgatcgtatatacccgtatgccgccataagctatgaagagtggaacgacccccccgccgtgaagtggggctcagtcagcaatcccctctttcttccactgatacctccacaatcgcagggcttcactgctatcgtcctaacatacgaccgagtagagtctttgttccgggtgatcaccgaggtgagtaaagtacccagcctgtctaaactgctggttgtgtggaacaaccagaacaagaacccaccggaagactcgctgtggcctaagataagagtgcctctcaaggtggtgcgcaccgctgaaaacaaactcagtaaccgtttcttcccttatgatgaaattgagactgaagcagtcctggcaattgatgatgacatcattatgctgacatccgacgaacttcagttcggttacgaagtgtggagagagtttccagatcggctcgtgggctaccccgggagactccatctgtgggaccatgaaatgaacaaatggaagtacgagagtgagtggacaaacgaagtctctatggtgctaacaggagctgccttttatcacaagtatttcaactacttgtatacatataagatgccgggtgatataaagaattgggtcgatgcccacatgaattgcgaagacatcgctatgaatttcttggtggctaacgtcaccggcaaggcagtcataaaggtcacgcctaggaagaagtttaagtgcccagagtgcaccgcaatagacggcttgtcactggaccaaacccatatggttgagcgttccgaatgcatcaataagtttgcctcagtcttcgggactatgcccctcaaagttgtggagcaccgcgctgatccagtcctgtataaagatgattttcctgaaaaactgaaatcgttcccgaacatcggctccctttag

SEQ ID NO: 70576 - DNA, 2187 bp, Artificial Sequence
  derived and/or modified sequence
atgtgcgccagcgtcaagtacaacattagaggccctgcacttattccaaggatgaaaacaaaacaccggatctactatatcaccctattcagtattgtgttgctcgggcttattgccacaggcatgtttcaattctggccccattccattgagagtagcaacgactggaacgtggaaaagcgctctattagagatgtgcctgtcgtgcgcctgccagcagactcccccattcccgagcgaggggatctcagctgtcgaatgcatacttgcttcgacgtgtaccggtgtggatttaatcctaaaaacaagattaaggtttatatctacgccctcaaaaagtacgtggacgatttcggcgtgagcgtgtcaaatactattagtcgggaatacaacgaattactgatggctatatcagactccgactattataccgatgacatcaatcgggcatgcctcttcgtgccctcaattgatgtccttaaccaaaacaccctccgaatcaaagagactgctcaggcaatggcccagctctcacgctgggaccgaggcaccaatcacttgctgttcaacatgctacccggtggacctccagattacaataccgctttagatgtccccagggaccgagctctcttggccggaggaggctttagcacttggacctataggcagggatacgacgtgagtattccagtgtacagcccattatccgcagaggtggatctccctgagaagggccctgggcctcggcagtattttctgctttcgtcccaagtaggccttcatcctgagtacagagaggacctggaagcattacaggtaaagcatggagagagcgtgctagtccttgacaagtgcactaatctgagtgaaggcgtgttaagcgttagaaaacggtgtcacaaacatcaggtgttcgattacccccaggtgctccaggaggccacattctgcgttgtgctgcggggtgccaggctgggccaggctgtgttgtctgatgtgctgcaggccggttgcgtgccggtcgttatagccgattcttatatcttaccttttagtgaggtgctagattggaagcgggcttccgtggtcgtgcccgaggagaaaatgtctgacgtgtatagtatcctacagagcatcccccagcgccaaatcgaagagatgcaacgccagctctttatggaacccgcacggcgtgagaactggtccgccgcaaatcatcagatgaacagcctgatttggcccagggaacagtgggacagccagatcattaatgaccgcatttacccctatgcggctatctcctatgaagagtggaacgacccgcctgccgtcaagtggggaagtgtgtcgaatccactatttctgccccttatcccacctcagagccagggctttacagctattgtcctgacttacgacagagtcgagtcattattccgggtgattacagaggtgtccaaggtgccttcactctctaaactccttgttgtctggaacaaccagaacaaaaatcctcccgaggactccctatggccgaagataagagtgccgttgaaggtagtgcggactgccgaaaacaagctctccaaccgatttttcccctacgacgaaatcgagaccgaggctgtgcttgccatcgatgacgacataataatgctaaccagcgacgagcttcagttcggctacgaagtctggagggagtttcccgacagactcgttggctatcctgggagactccacctctgggaccatgaaatgaataaatggaaatacgagtcagagtggactaacgaggtttctatggttttaactggagctgctttttaccacaagtacttcaactacctgtacacctataagatgcctggagacattaagaattgggtcgacgcacacatgaattgcgaggacatcgctatgaacttcttagtcgctaacgttacgggcaaggcggtgatcaaggtgactccaagaaaaaagttcaagtgcccagaatgcactgccatcgacggtctgtcactagaccagacacacatggtcgagcgaagcgagtgcattaacaaattcgcctctgtatttggcactatgccactaaaagtggtggagcatagggctgatcccgtcctatataaggacgattttcccgaaaagctgaagagcttccccaatattgggtccctctag

SEQ ID NO: 70577 - DNA, 1731 bp, Artificial Sequence
  derived and/or modified sequence
atgaccatggacaccgagagcgagatcgacccctgcaaggtggacggcacctgccccgaggtgatcaaggtgtacatcttcaaggccgaccccggcgaggacgacctgggcggcaccgtggacatcgtggagagcgagcccgagaacgaccacggcgtggagctgctggaccagaacagcagcatcagagtgcccagagagaagatggtgtacatgaccgtgaacgacagccagcccgaggacgaggacctgaacgtggccgagatcgccgacgaggtgtacatggaggtgatcgtgggcgaggaggacgccgccgccgccgccgccgccgccgccgtgcacgagcagcagatggacgacaacgagatcaagaccttcatgcccatcgcctgggccgccgcctacggcaacaacagcgacggcatcgagaacagaaacggcaccgccagcgccctgctgcacatcgacgagagcgccggcctgggcagactggccaagcagaagcccaagaagagaagaagacccgacagcagacagtaccagaccgccatcatcatcggccccgacggccaccccctgaccgtgtacccctgcatgatctgcggcaagaagttcaagagcagaggcttcctgaagagacacatgaagaaccaccccgagcacctggccaagaagaagtacagatgcaccgactgcgactacaccaccaacaagaagatcagcctgcacaaccacctggagagccacaagctgaccagcaaggccgagaaggccatcgagtgcgacgagtgcggcaagcacttcagccacgccggcgccctgttcacccacaagatggtgcacaaggagaagggcgccaacaagatgcacaagtgcaagttctgcgagtacgagaccgccgagcagggcctgctgaacagacacctgctggccgtgcacagcaagaacttcccccacatctgcgtggagtgcggcaagggcttcagacaccccagcgagctgaagaagcacatgagaatccacaccggcgagaagccctaccagtgccagtactgcgagtacagaagcgccgacagcagcaacctgaagacccacgtgaagaccaagcacagcaaggagatgcccttcaagtgcgacatctgcctgctgaccttcagcgacaccaaggaggtgcagcagcacgccctgatccaccaggagagcaagacccaccagtgcctgcactgcgaccacaagagcagcaacagcagcgacctgaagagacacatcatcagcgtgcacaccaaggactacccccacaagtgcgacatgtgcgacaagggcttccacagacccagcgagctgaagaagcacgtggccgcccacaagggcaagaagatgcaccagtgcagacactgcgacttcaagatcgccgaccccttcgtgctgagcagacacatcctgagcgtgcacaccaaggacctgcccttcagatgcaagagatgcagaaagggcttcagacagcagagcgagctgaagaagcacatgaagacccacagcggcagaaaggtgtaccagtgcgagtactgcgagtacagcaccaccgacgccagcggcttcaagagacacgtgatcagcatccacaccaaggactacccccacagatgcgagtactgcaagaagggcttcagaagacccagcgagaagaaccagcacatcatgagacaccacaaggaggtgggcctgccctag

SEQ ID NO: 70578 - DNA, 1731 bp, Artificial Sequence
  derived and/or modified sequence
atgaccatggacacagaatcggaaattgatccatgtaaagtggacggaacctgtcccgaggtaatcaaagtgtatatattcaaggctgacccgggtgaggatgaccttggtggaaccgttgacatcgtcgagtccgagccagagaatgatcatggagttgagctgcttgatcagaattcctccatcagggtccccagagagaaaatggtttatatgactgttaatgacagccaacccgaggatgaggatctgaacgttgccgagatcgccgacgaagtctatatggaggtgatcgtgggggaagaggacgcagcagcggccgccgccgccgctgccgttcacgaacagcagatggatgacaacgagatcaagaccttcatgccaattgcatgggcggcagcgtacgggaacaacagcgatgggattgaaaaccgaaacggcacagcatctgctctccttcatatagatgagtccgctgggctagggcggctggcaaaacagaagccaaaaaagcgacgaaggcctgactcccggcagtatcagactgctattatcattgggcccgatggacaccccctgaccgtgtacccgtgcatgatctgcggaaagaagttcaaaagccgggggttcttgaaacggcacatgaagaaccaccccgagcaccttgccaagaagaagtaccgctgcacagattgcgactacaccactaacaagaaaatttccctgcacaatcacctggaatctcacaaactcacatccaaagccgaaaaagccatcgagtgtgacgagtgcgggaaacatttctcgcatgccggcgctttgtttacacacaagatggtacacaaagagaagggtgctaataagatgcataaatgcaaattttgcgaatatgaaaccgccgagcagggcctccttaatcggcatctcctagcagttcactccaagaatttcccccacatctgcgtggaatgcgggaagggatttcggcaccccagtgaattaaagaaacatatgaggattcacaccggcgagaagccgtatcaatgccagtattgcgaatatagaagtgctgacagtagcaacctgaaaacccatgtgaagaccaaacatagcaaggaaatgcccttcaagtgcgacatatgtctgctgaccttctcggacactaaggaggtacagcagcacgctcttattcaccaggagagcaagacgcatcagtgtctgcattgtgaccacaagtcctcaaactcatccgatctgaaaaggcacattatctctgtccataccaaggactaccctcacaagtgtgacatgtgcgataagggctttcaccggccgtccgagctgaaaaagcacgtagcggcccacaaaggaaagaagatgcatcagtgcaggcactgtgattttaaaattgcagatccctttgtcctgagtcgccacatactgtctgtgcataccaaggacttgccatttcggtgtaagagatgtagaaaagggtttagacagcagtccgagctcaaaaagcatatgaagacacatagcggcagaaaggtataccaatgtgaatactgtgagtacagcacgaccgacgcatctggcttcaagcggcatgtgatatcaattcataccaaagattatccacacagatgtgaatattgtaagaagggattccgtcgtccttcagaaaaaaatcagcatatcatgcgccatcataaagaagtgggtctgccctag

SEQ ID NO: 70579 - DNA, 1731 bp, Artificial Sequence
  derived and/or modified sequence
atgaccatggacacagaaagtgaaattgacccctgcaaggtggatggcacctgcccagaggtgatcaaggtgtacatcttcaaggctgaccctggagaagatgacctgggcggcaccgtggacatcgtggagagcgagccagaaaatgaccatggagtggagctgctggaccagaacagcagcatccgggtgccccgggagaagatggtgtacatgacagtgaatgacagccagccagaagatgaggacctgaatgtggccgagattgctgatgaggtgtacatggaggtgattgtgggggaggaggatgctgctgctgctgctgctgctgctgctgtgcatgagcagcagatggatgacaatgagatcaagaccttcatgcccatcgcctgggccgccgcctacggcaacaacagtgatggcattgaaaatagaaatggaacagccagcgccctgctgcacattgatgagagcgctggcctgggccgcctggccaagcagaagcccaagaagagaagaagaccagacagccggcagtaccagacagccatcatcatcggcccagatggccaccccctgactgtgtacccctgcatgatctgtgggaagaagttcaagagccggggcttcctgaagaggcacatgaagaaccaccctgagcacctggccaagaagaagtaccgctgcacagactgtgactacaccaccaacaagaagatcagcctgcacaaccacctggagagccacaagctgaccagcaaggccgagaaggccattgaatgtgatgaatgtgggaagcacttcagccatgctggggccctcttcacccacaagatggtgcacaaggagaagggggccaacaagatgcacaagtgcaagttctgtgaatatgaaacagctgagcagggcctgctgaacagacacctgctggccgtgcacagcaagaacttcccccacatctgtgtggagtgtgggaagggcttccgccaccccagcgagctgaagaagcacatgaggatccacactggagagaagccctaccagtgccagtactgtgagtacagatctgctgacagcagcaacctgaagacccacgtgaagaccaagcacagcaaggagatgcccttcaagtgtgacatctgcctgctgaccttcagtgacaccaaggaggtgcagcagcacgccctgatccaccaggagagcaagacccaccagtgcctgcactgtgaccacaagagcagcaacagcagtgacctgaagaggcacatcatctctgtgcacaccaaggactacccccacaagtgtgacatgtgtgacaagggcttccaccggcccagcgagctgaagaagcacgtggccgcccacaagggcaagaagatgcaccagtgccgccactgtgacttcaagattgctgacccctttgtgctgagccgccacatcctgtctgtgcacaccaaggacctgcccttccgctgcaagcgctgcaggaagggcttccggcagcagagcgagctgaagaagcacatgaagacccacagcggcaggaaggtgtaccagtgtgagtactgtgagtacagcaccacagatgccagcggcttcaagagacatgtgatcagcatccacaccaaggactacccccaccgctgtgagtactgcaagaagggcttcagaagacccagcgagaagaaccagcacatcatgaggcaccacaaggaggtgggcctgccctag

SEQ ID NO: 70580 - DNA, 1731 bp, Artificial Sequence
  derived and/or modified sequence
atgaccatggacaccgagagcgagatcgacccctgcaaggtggacggaacatgccccgaagttattaaagtgtatatttttaaggccgaccctggtgaggatgaccttggtggcacagtcgacatcgttgaaagtgagcccgagaacgatcacggggtggaactcctcgatcagaactcttccattagggtgccaagggagaagatggtatatatgacagttaacgactctcagccggaagatgaagatctcaatgtcgcagaaattgctgacgaggtatatatggaagtcattgtcggagaggaagacgctgctgcagcagccgctgcagcagcggttcacgaacagcagatggatgataatgagatcaagacattcatgccgattgcttgggctgccgcgtatggtaacaatagtgatggaatcgagaacaggaacgggaccgctagcgccctccttcacatcgatgagtccgcaggacttggacggctagccaaacagaaaccaaaaaagcgccggaggcctgattcacgccagtatcagactgcaataattatagggccagatgggcaccccctaacagtgtacccttgcatgatctgtgggaagaagtttaagagccgaggctttctgaagcgccacatgaaaaatcacccagagcatcttgcaaagaagaagtaccgctgcacagattgtgattacactaccaataagaaaatttccttgcacaaccatttagaatcccataaactgaccagcaaggctgaaaaggccatcgagtgcgacgagtgtgggaaacatttctctcatgccggagcacttttcacccataagatggtgcacaaagagaaaggcgcaaataagatgcataaatgcaagttctgtgagtacgagactgcggaacaggggctgctaaataggcatctgcttgccgtccattcgaaaaatttccctcatatctgcgtagagtgcggaaaaggattcaggcatccatccgagcttaaaaaacatatgcggatacacaccggagaaaaaccctatcagtgtcagtactgcgagtatcgctctgctgattcttcaaatctcaagactcacgtgaaaaccaaacacagtaaggaaatgcctttcaagtgtgatatctgccttctgaccttttccgatacaaaggaggttcaacagcacgccctgatccatcaggaaagtaagacccatcagtgtctccactgcgaccataaatcctcgaactccagtgacctgaagcgacacatcatttctgtgcacaccaaagactatcctcataagtgcgacatgtgtgacaaaggcttccatagacccagtgagctgaaaaagcacgttgcggcccacaaagggaagaaaatgcaccagtgtaggcattgcgatttcaagatagccgacccatttgtgctgagtcgtcacatcctctctgtgcacactaaagatctgcccttccgatgcaaacggtgcagaaaggggtttcgccagcaaagcgaacttaaaaaacacatgaagacacattccgggcggaaggtgtaccaatgtgagtattgcgagtattctaccaccgatgcttccgggttcaaacgccatgtcattagtattcatactaaggactaccctcatcgatgtgaatactgcaaaaaggggttccggcggcctagcgaaaaaaaccaacacatcatgcggcaccacaaggaagtggggctgccctag

SEQ ID NO: 70581 - DNA, 1731 bp, Artificial Sequence
  derived and/or modified sequence
atgaccatggataccgaatccgaaatagatccttgtaaagtggacgggacctgtccagaagttatcaaagtgtatattttcaaagctgacccgggtgaggatgatctaggtggcaccgtcgacatagtggagtcggagcctgagaacgaccacggagtcgaacttttagatcagaactcttccatacgtgttccacgggagaaaatggtttacatgactgtcaacgattcccaacctgaggatgaggatctcaatgtggctgaaattgccgatgaggtgtacatggaagtgatagtaggcgaggaggatgctgccgcagccgctgcagccgctgctgtgcacgaacagcaaatggatgacaacgagatcaagactttcatgcctatagcatgggctgcagcatacggtaacaatagcgatggaatagagaaccggaacgggacagcaagcgctctcctgcatatcgatgagagtgctggacttggcaggctcgccaaacaaaaacctaagaaacgcagacgaccagattcccggcagtatcaaactgccataatcattggtcctgatggtcacccacttactgtgtacccatgtatgatttgtggaaagaagttcaagtcacgaggatttttaaagaggcacatgaaaaatcaccccgaacacttagccaagaaaaagtatagatgtactgattgtgactacaccaccaacaaaaaaatttctcttcataaccacctggagagccacaagttgacaagtaaggcagaaaaagctattgagtgtgacgagtgtgggaaacacttcagccacgccggagcactgttcactcacaagatggtgcacaaggagaaaggggcaaacaagatgcataagtgtaagttttgtgaatacgaaacagctgaacaaggacttctcaacaggcacctgctggcagtgcactcgaagaatttccctcacatttgcgttgagtgtggtaaagggttcaggcaccccagtgagctaaaaaagcacatgaggattcatacaggcgagaagccttaccaatgtcagtactgcgagtaccggtccgccgacagtagtaacttaaaaacccacgttaagacaaaacatagcaaagaaatgcctttcaaatgcgatatctgtctcctcaccttcagcgacactaaagaagtgcagcagcacgcactgattcatcaggagtccaagacacaccagtgtctccactgcgatcataagtccagcaacagttctgacctgaagagacacattatcagcgtgcatacaaaggactacccccataaatgtgacatgtgcgataagggattccatagaccttctgaattgaaaaagcacgttgccgcacacaaaggcaagaagatgcatcaatgccgacattgcgatttcaaaatcgcagatcccttcgtgctctcacgacatattcttagtgtgcatacgaaagatctcccttttcggtgcaagcgctgcagaaaggggttccgtcaacagtcagagctgaaaaaacatatgaaaacccattctggacgcaaagtctaccagtgcgagtattgtgagtacagcaccaccgacgcttctggatttaaacgacatgtgatttccatccacaccaaggattatccccatagatgtgaatattgtaagaaagggtttaggcgtccgagcgaaaagaaccagcacataatgcggcatcataaagaggtgggcctgccgtag

SEQ ID NO: 70582 - DNA, 1746 bp, Artificial Sequence
  derived and/or modified sequence
atgcagaccctgggcagctacggcaccatcgtgctggtgagaatcaaccagggccagatgctggtgaccttcgccgacagccacagcgccctgagcgtgctggacgtggacggcatgaaggtgaagggcagagccgtgaagatcagacccaagaccaaggactggctgaagggcctgagagaggagatcatcagaaagagagacagcatggcccccgtgagccccaccgccaacagctgcctgctggaggagaacttcgacttcaccagcctggactacgagagcgagggcgacatcctggaggacgacgaggactacctggtggacgagttcaaccagcccggcgtgagcgacagcgagctgggcggcgacgacctgagcgacgtgcccggccccaccgccctggccccccccagcaagagccccgccctgaccaagaagaagcagcaccccacctacaaggacgacgccgacctggtggagctgaagagagagctggaggccgtgggcgagttcagacacagaagccccagcagaagcctgagcgtgcccaacagacccagacccccccagcccccccagagaccccccccccccaccggcctgatggtgaagaagagcgccagcgacgccagcatcagcagcggcacccacggccagtacagcatcctgcagaccgccagactgctgcccggcgccccccagcagccccccaaggccagaaccggcatcagcaagccctacaacgtgaagcagatcaagaccaccaacgcccaggaggccgaggccgccatcagatgcctgctggaggccagaggcggcgccagcgaggaggccctgagcgccgtggcccccagagacctggaggccagcagcgagcccgagcccacccccggcgccgccaagcccgagaccccccaggccccccccctgctgcccagaagacccccccccagagtgcccgccatcaagaagcccaccctgagaagaaccggcaagcccctgagccccgaggagcagttcgagcagcagaccgtgcacttcaccatcggcccccccgagaccagcgtggaggccccccccgtggtgaccgcccccagagtgccccccgtgcccaagcccagaaccttccagcccggcaaggccgccgagagacccagccacagaaagcccgccagcgacgaggccccccccggcgccggcgccagcgtgcccccccccctggaggccccccccctggtgcccaaggtgccccccagaagaaagaagagcgcccccgccgccttccacctgcaggtgctgcagagcaacagccagctgctgcagggcctgacctacaacagcagcgacagccccagcggccacccccccgccgccggcaccgtgttcccccagggcgacttcctgagcaccagcagcgccaccagccccgacagcgacggcaccaaggccatgaagcccgaggccgcccccctgctgggcgactaccaggaccccttctggaacctgctgcaccaccccaagctgctgaacaacacctggctgagcaagagcagcgaccccctggacagcggcaccagaagccccaagagagaccccatcgaccccgtgagcgccggcgccagcgccgccaaggccgagctgccccccgaccacgagcacaagaccctgggccactgggtgaccatcagcgaccaggagaagagaaccgccctgcaggtgttcgaccccctggccaagacctag

SEQ ID NO: 70583 - DNA, 1746 bp, Artificial Sequence
  derived and/or modified sequence
atgcagacactggggagttacgggacaatcgtgttggtgcgcattaaccaaggccagatgctcgttacatttgccgatagccactccgctctgtcggtcctggatgtggacggcatgaaagtgaagggcagggcagtcaaaatccgacccaagacgaaagactggcttaaaggcttacgagaagaaatcattcgcaagcgggacagcatggcccctgtctccccaaccgcaaattcgtgtctcctcgaggagaactttgatttcacatcattggattatgaatctgagggagatattctggaagacgatgaggactatctggtcgatgaattcaatcagccaggtgtgtccgatagcgaactcggcggggacgatttatctgacgtgcctgggcccaccgccttggcccctcccagcaagagtcccgctctcacaaaaaagaagcagcacccaacttacaaggatgacgccgacctagtcgagctcaagcgcgagcttgaggcagtcggagaatttaggcaccggtcgcccagcagaagcttatccgtcccaaatcgcccgagacctccgcaaccgccccagagacccccaccccctacaggcctgatggtaaaaaaatcggctagcgatgcatccatcagtagtggcacccatgggcagtatagtattctccagaccgcaaggctgttgcccggcgccccccagcagccccctaaggcacgaaccggtatctctaagccatacaacgttaaacagattaagacaactaacgctcaggaagccgaggccgcaataagatgtctcctggaggcacgcggcggtgcctctgaggaagcattgtccgcagtggctcctcgcgatctcgaagccagctctgagccagaacccacgcccggagccgctaaaccggagacccctcaagccccccctctgctgccaaggaggccaccaccgcgcgtgccagccattaaaaagccgaccctgcgtcgaaccgggaagcctctttctcctgaagaacaattcgaacaacagaccgtgcacttcaccattggaccaccagaaactagtgttgaggcgcccccagtggttaccgccccgagggtcccccctgtgcccaaacccaggacttttcaacctgggaaggcagcagagcggcctagtcatcggaagccagcttctgacgaggcaccaccaggagccggggcctcagttccacctccgctggaggcaccccccctcgtcccgaaagtgcctcctcggagaaaaaaaagcgcacctgcggccttccacctccaagtcctgcagtctaattcccaactcctgcaggggctgacttataattcatcggatagtccctcgggccaccctccagctgctggtactgtgtttccccagggggactttttgagcactagcagtgccacatcccccgattctgacggcacaaaggccatgaagcccgaggccgccccactgttaggcgactatcaggatccgttctggaatctgctgcaccacccaaaactgctgaataacacttggctttccaaatctagtgatccactagactcagggaccaggagcccgaagcgggaccctatagaccctgtttccgccggcgcatctgctgccaaggccgaactgcctcccgaccacgagcacaaaactcttggtcattgggtgacgatcagtgaccaggagaaacgaacggctcttcaggtcttcgaccctcttgccaaaacatag

SEQ ID NO: 70584 - DNA, 1746 bp, Artificial Sequence
  derived and/or modified sequence
atgcagaccctgggcagctatggcaccatcgtgctggtgcgcatcaaccagggccagatgctggtgacctttgctgacagccacagcgccctgtctgtgctggatgtggatggcatgaaggtgaagggccgggctgtgaagatccggcccaagaccaaggactggctgaagggcctgcgggaggagatcatcaggaagagggacagcatggcccctgtgagccccacagccaacagctgcctgctggaggagaactttgacttcaccagcctggactatgaaagtgaaggagacatcctggaggatgatgaggactacctggtggatgagttcaaccagcccggggtgtctgattctgagctgggcggagatgacctgagtgatgtgcccggccccacagccctggccccacccagcaagagccctgccctgaccaagaagaagcagcaccccacctacaaggatgatgctgacctggtggagctgaagcgggagctggaggccgtgggggagttccgccacaggagccccagccgcagcctgtctgtgcccaaccggcccaggcctccccagcccccccagaggcctcctccacccaccggcctgatggtgaagaagagcgccagtgatgccagcatcagcagcggcacccacggccagtacagcatcctgcagacagcccggctgctgcccggggccccccagcagccccccaaggccaggacaggcatcagcaagccctacaacgtgaagcagatcaagaccaccaatgcccaggaggccgaggccgccatccgctgcctgctggaggcccggggcggggccagcgaggaggccctgtctgctgtggccccccgggacctggaggccagcagcgagcctgagcccacccctggggccgccaagccagagaccccccaggccccacccctgctgccccggcggcccccaccccgggtgcctgccatcaagaagcccaccctgcggaggacaggcaagcccctgagccctgaggagcagtttgagcagcagacagtgcacttcaccatcggccccccagagacctctgtggaggcccctcctgtggtgacagccccccgggtgccccctgtgcccaagcccaggaccttccagcccgggaaggctgctgagcggcccagccacaggaagccagccagtgatgaggcccctcctggggccggggcctctgtgcccccacccctggaggccccacccctggtgcccaaggtgccccccaggaggaagaagagcgccccagctgccttccacctgcaggtgctgcagagcaacagccagctgctgcagggcctgacctacaacagcagtgacagccccagcggccaccccccagctgctggcaccgtcttcccccagggcgacttcctgagcaccagcagcgccaccagcccagacagtgatggcaccaaggccatgaagccagaggccgcccccctgctgggggactaccaggaccccttctggaacctgctgcaccaccccaagctgctgaacaacacctggctgagcaagagcagtgaccccctggacagcggcaccaggagccccaagagggaccccatcgaccctgtgtctgctggggccagcgctgccaaggccgagctgcccccagaccacgagcacaagaccctgggccactgggtgaccatcagtgaccaggagaagaggacagccctgcaggtgtttgaccccctggccaagacctag

SEQ ID NO: 70585 - DNA, 1746 bp, Artificial Sequence
  derived and/or modified sequence
atgcagaccctgggcagctacggcaccatcgtgctggtgcggatcaatcagggacagatgctggtgacatttgccgactctcattctgctctttccgtgctggacgttgatggcatgaaagtaaaaggaagggcagttaagatccgccccaagacaaaagactggcttaaaggtctgcgagaggagatcatcagaaaaagggatagtatggcaccagtgtcccccaccgctaattcctgtttacttgaagaaaacttcgacttcacaagcctcgattatgagtctgagggtgatatcctcgaggatgacgaagattacctcgtggacgagttcaatcagccaggcgtgagtgacagcgagttgggcggcgatgacctctccgacgtgcctgggccaaccgcgcttgctcccccctccaaatcccctgctctgacaaaaaagaagcagcacccaacctataaggatgacgccgatctggtggagctcaagagggaactggaagccgtaggggagtttcgccacagatccccaagtagaagtctgtctgtgcccaatcggccaaggccccctcaaccaccgcagcgacctccaccaccaacagggcttatggtgaagaaaagcgccagtgatgcctccatatcctctggcacccacggacagtactccatcctgcagactgcccgactgttaccgggcgcaccacagcagcctccaaaggcaaggaccgggatttctaaaccttacaatgtgaaacagatcaaaaccaccaatgcccaagaggcggaggccgccataaggtgcctcttagaggctcgggggggcgcttctgaggaagccctgtccgctgtggcccccagggatctcgaggcctcaagcgagcccgagccgactcctggtgctgcgaagccagaaactcctcaggcgcccccactgttgcccagacggcccccccccagagtgcccgcaatcaagaaacccacccttaggcgcaccgggaagccgctctccccagaggagcagtttgaacagcagaccgtccattttacaatcggtccaccagaaacctctgtggaggctcctcccgtggtgaccgctcctcgggtgccacctgtgcccaagccgcgcactttccagccaggaaaagccgccgagcggcccagccatagaaagcccgcttctgacgaagcccctcccggtgccggagccagcgtgccaccccctctcgaggcaccaccattagtaccaaaggtgccaccccgcaggaaaaagagtgcgcctgcggcatttcatttacaagtcttgcagagtaactctcaacttctgcaggggctgacatataattcaagcgatagcccctcgggccacccaccagcagcgggcaccgtgttcccccaaggcgattttctctccacttcttctgcaacctcgcccgactctgacggtactaaggccatgaagcccgaagccgccccactcctcggggattaccaggaccccttctggaacctccttcaccaccccaaactccttaacaacacatggctgagcaaaagcagtgaccctcttgatagtggcacaagaagccccaagcgggacccaattgacccggtgtctgcaggtgccagtgcagcaaaggcagaactgccccccgaccacgagcacaaaaccctcgggcactgggtgacaatcagcgatcaggaaaagaggaccgccctacaagtgttcgacccccttgcaaagacatag

SEQ ID NO: 70586 - DNA, 1746 bp, Artificial Sequence
  derived and/or modified sequence
atgcagacactcggcagctacggcactattgttcttgtgagaattaatcaaggacaaatgttggttaccttcgcagacagccactctgctctctctgtcttggacgtagacggcatgaaggtgaagggacgcgctgtaaaaattagacccaagaccaaggattggttaaaaggcctaagggaggagattatccggaagcgtgattctatggccccagtctcccccactgctaactcctgtcttttggaagaaaatttcgacttcacatcccttgattacgaaagcgagggtgacattttggaggacgacgaagattaccttgtcgacgaattcaatcagcctggcgtgtccgactctgaactcgggggagacgatctgtcggatgtcccaggccctaccgctttggccccaccatctaaatcccccgcacttacaaagaaaaagcagcaccctacgtataaagatgacgccgacctcgtggagctgaaaagagagttggaggccgtgggggaatttcgccatagaagccccagccgctccctgtcggttcctaatcgaccacgaccgccacaacctccgcagcgccctccaccccctaccggccttatggtgaagaagagcgctagcgatgcttcgatttcctctggcacacacggccaatattcaatacttcagacggctcgcttgctcccaggggcacctcaacaaccccctaaggcccgaactggcatctcgaaaccttataatgttaagcaaattaaaaccacaaacgctcaggaggctgaggcagccattagatgcttactagaagcacgcggtggggctagcgaggaagcactatccgccgtcgctccaagggacctggaagcctccagtgagcccgaacctacgccgggagccgctaaaccagaaacacctcaggcgcctcccttattaccaagacggcctcctcctagagtaccagccataaagaaaccaacgcttagacggacaggtaaacctctgtcccctgaggaacagttcgagcagcaaacagttcattttaccattggacccccagagacaagcgtggaagcaccccctgtggtaacagccccaagggtgccccctgtgcccaagcccaggaccttccagcccggaaaagctgccgaacggcctagccacaggaagcccgctagtgatgaagctccgccaggtgcgggtgcgtccgtgccaccacctctagaagctccacccttggtccctaaagtgccacccaggcggaagaagtcagccccagccgcttttcacctccaagtgctgcagagcaatagccagctgcttcagggcctcacctataactcttccgactccccatcagggcatccgcctgctgctggaactgtgttcccccagggggattttctcagcaccagttccgctacctcgccggactctgacggtaccaaagccatgaaacccgaggccgcacccttgctcggagattaccaggatcctttttggaatttgctgcatcatcctaagctactgaataatacttggctgtccaaaagttctgatcctcttgactctggcacgcgatcccccaagcgggacccaatagatcccgtatcagccggagcctctgctgctaaggccgaattacccccagaccacgagcacaaaacgttaggccattgggtgacaattagcgaccaggaaaaacgcaccgcgctccaagtgttcgacccacttgccaaaacatag

SEQ ID NO: 70587 - DNA, 5091 bp, Artificial Sequence
  derived and/or modified sequence
cctaattacacattttgggagagcatagccaggaaattgcatctgtgaaaagaaaatacaaattttcctctagatgagtttgtgaacgcctgtgtggccccagcgctctgagaggtggggcctagaatgagtccgagtgttctcagctcctgcagctcttaccataccaattgctgccaaccttctgggattcctgggtcctggaaacccggcagcaacactgtgtctcaagcctacagtgggcatgctggcgaggactgcaggcatggtcatgactgttttgaataattatatgcgaggaatgtttttaaccaaaggccccaaagcatccgaagcctggcttcaaggtggaggagtaaggaggatgagtctgggacgtggggtggttcgtggcgcagacctctattgtggaagtgtcatgatcgcattcttggatattgactcgattctatatgggtctctcgaatggaacccctgcgagtagctggagaactcaaccttctagacagtgatctagatgttgacaccaaagtcagacacacctggtctcctggtgccctgcagtattatggtcgtgcggagctacaagcgtctgatcacaggtgaggtcctgacttccatggcgttttctcctgtgctgggcaaggcagcgtctccctctccgcaggaaaatgcatgctgtccccataaggatgtgtgtgcgcatgggggtgcattttgtgtgcatacaatacaccaaagaacaaagaatgatggaacaaatatctgtggacccaccaccaagaactaattaatcttagcattttgtcattgctccatatcataaatgacatcattgatgaaaatttcaaagatgcaacctacgtattttgcggcttttatattttcttaaatgatgtcgttgtgcaacttgcttttttgttactatttttgagatacagtcgtgttgatgttatagctctggtgcattcatttgtaactgctgtctagtatcccactaaatatatccatggaacttacaacttatccattcacctcttgatgaatattttctccaggattttatgattacaaacaccatagggtttttaaatctgggatgcacaaccttttttttttttttttttttgagagagagtcttgctctattgcccaggctggatggagtacagtggtgtgatctcagctcactgcaacctccgcttcccagattcaagcaattctcctgcctcagcctcccaagtagctgggattacaggtgcacaccaccatgcctggctaatttttgtgtttttagtagagacggggtttcaccatgttggccaggctggtcccaaactcctgacctcaggtgatccacccaccttggcctctcaaagtgttgggattacaggcgtgagccaccgcacctggccctaggatgcagggctttttaaatgctctgtgcatcatgcattgaggatagagtggaggcagcagagggagcaccgtgggcaccagcacctgtgccctgggattgctgcagaggaagactcaccctgcagaatgtctttaaagacagaggagaggatggcatttgagggtgtgaagaaggaagagtttgatcttcccaaggctgctgcctaaactctcatgtcagtttcaacttttacaaggaaagaaattaagaaaaagaagacctgtgctggcgatcgtggaggtggaagttcaggaagtcgatgtgggtgctcgggagagggttttccaggaagtgtcctccttccagggccccctggatgccactgttgtagtaaaccttcaatcaccgaccttagaagagaaaaacgagtttccagaggacctgcgtactgagctcatgcagaccttggggagttatgggacaattgttcttgtcaggatcaaccaagggcagatgctggtaacttttgcagacagtcactcggctctcagtgtcctggacgtggacggtatgaaggtgaaaggcagagcagtgaagattagaccgaagaccaaggactggctgaaaggtttgcgagaggagatcattcggaaacgagacagcatggcccccgtgtctcccactgccaactcctgtttgctggaggaaaactttgacttcacaagtttggactatgagtcagaaggggatattcttgaagacgatgaagactacttggtggatgaattcaatcagcctggagtctcggacagtgaactcgggggagacgacctctctgatgtccccggccccacagcactggctcctcccagcaagtcacctgctctcaccaaaaagaagcagcatccaacgtacaaagatgacgcggacctggtggagctcaagcgggagctggaagccgtcggggagttccgccaccgttctccgagcaggtctctgtcggtccccaaccggcctcggccacctcaacccccgcagagacccccccctccaaccggtttaatggtgaaaaagtcggcttcagatgcgtccatctcctccggcacccatggacagtattcaattttgcagacggcaagacttctaccaggagcacctcagcaacctcccaaggctcggactggaataagtaaaccttataatgtcaagcagatcaaaaccaccaatgcccaggaggcagaagcagcaatccggtgtctcctggaagccagaggaggtgcctccgaagaagccctaagtgccgtggccccaagggaccttgaagcatcctctgaaccagagcccacaccgggggcagccaaaccagagaccccacaggcgcccccactccttccccgtcggcccccacccagagttcctgccatcaagaagccaaccttgagaaggacaggaaagcccctgtcaccggaagaacagtttgagcaacagactgtccattttacaatcgggcccccggagacaagcgttgaggcccctcctgtcgtgacagcccctcgagtccctcctgttcccaaaccaagaacatttcagcctgggaaagctgcagagaggccaagccacaggaagccagcatcagacgaagcccctcctggggcaggagcctctgtgccaccacctctggaggcgccgcctcttgtgcccaaggtacccccgaggaggaagaagtcagcccccgcagccttccacctgcaggtcctgcagagcaacagccagcttctccagggcctcacttacaatagcagtgacagcccctctgggcacccacctgccgcgggcaccgtcttcccacaaggggactttctcagcacttcatctgctacaagccccgacagcgatggcaccaaagcgatgaagccagaggcagccccacttcttggtgattatcaggaccccttctggaaccttcttcaccaccctaaactgttgaataacacttggctttctaagagctcagaccctttggactcaggaaccaggagccccaaaagagatcccatagacccagtgtcagctggcgcttcagctgccaaggcagagctgccaccagatcatgaacacaaaaccttaggtcactgggtgacaatcagtgaccaagaaaagaggacagcactgcaggtgtttgacccactggcaaaaacatgactgagcagctttgaaggctgcagtcctatagaatgcataccttcctccctctagacatccctccaccagaagagacatctatttaaaggcacactggccaaaacgtttgtgcatctgtcactctcgtgtagtttacaaaaatcgtgtctcttattcagtaagatggttactcagccaccaaaatatatttcactcaaggcttgtacatctgaagtttgctcttcaaggaatgggaaccttcctgttaaattcggtgtatggattttaagaaaggaatctagccaatgaggtccaagaagttctcacccattgaatttttaaatggctgttcagttcatgttgtacgtgatggagatttgtcttttgttttatttgcattttacagatttggtataacattttggggagccacctgaaggttgatgtataaagtaaggattagagaaagaggtcgttgtgaccattagtagctgtcctggcccacttaaacaaggttacaaaaaatcagagtcggaagcagccaaataggtcaacctaatgactagactgtacattcccatgagccttcatgtttaagtgtgtacatgtgcgttaaccttgatgatgcgtgaatcccgagggagccggtggcatacaccgttagcttaaccttagcttaaactagctgaaggctcctgtgccatgtcttagacattgcatgccctatcaattactataatcctgagccatggtgtgctactgaaaccaatttttatccaccatctagtccttattaaatgaaacctcacggatcctttgttccgcttatattccatgcataccacataaaagcacacagtgcgaaaactcttgctgatacgcgatattgattctcattgttagaatatggagagtgtttcagcctcgtctgtccggctggagcttcgggatggaaagtgctatgtgtccctgcatataagaatcaccaggccagtgtttctgggtttgcttgtctatatgtttgtctatattttttgcctatacatttttcccacgtttccaacagcacttctcacctattcaataactgaaaaagacattaccatagtgctttacatttttaaagtaatgttacaaggtctggaatccatttggagcagataccgtgttttcgctatttaataagaagttcagtagtgaaatcttactgtaccgcctgttgtatctgggagcctcgtacagaggctcgcacagcagtgatcaagtgtcatcccttacgtgactgggggatgtctgtcctaaaagctgactgctaggatagtaaggatcatcttgcctgggctatgccactgtcttgttaccaattagacatctggaatttcataattagttttcattgtcactgtcaagatatattgcagattacttaaatatggccatcaaaacaaaagttacaacacgtatctcttttcatctgaaaactaatacctggaaaaggataaaaaaaaaaa

SEQ ID NO: 70588 - protein, 349 aa, Artificial Sequence
  derived and/or modified sequence
MKDCSNGCSAECTGEGGSKEVVGTFKAKDLIVTPATILKEKPDPNNLVFGTVFTDHMLTVEWSSEFGWEKPHIKPLQNLSLHPGSSALHYAVEVFDKEELLECIQQLVKLDQEWVPYSTSASLYIRPTFIGTEPSLGVKKPTKALLFVLLSPVGPYFSSGTFNPVSLWANPKYVRAWKGGTGDCKMGGNYGSSLFAQCEAVDNGCQQVLWLYGEDHQITEVGTMNLFLYWINEDGEEELATPPLDGIILPGVTRRCILDLAHQWGEFKVSERYLTMDDLTTALEGNRVREMFGSGTACVVCPVSDILYKGETIHIPTMENGPKLASRILSKLTDIQYGREESDWTIVLS

SEQ ID NO: 70589 - DNA, 1050 bp, Artificial Sequence
  derived and/or modified sequence
atgaaggattgctcaaacggctgctccgctgaatgcaccggagagggcggaagtaaggaagtggtaggcacttttaaggccaaggacctaatcgtgacccccgcgacgattctaaaagagaagcccgaccccaataatctggtgttcgggacagtgtttacagaccacatgctcaccgtggaatggtcttcagaatttggatgggagaaaccacatataaaacccctgcagaatctttctctgcatcccggcagtagtgccttacactatgccgtggaagtgtttgacaaagaggaactcctcgaatgtatccagcagctggtgaagctggaccaggagtgggtgccctattccacctccgctagcctgtacatccggcctaccttcattggcaccgaaccatctttaggcgtcaagaagcctacaaaggctctgctcttcgtattactcagtcccgtgggaccctacttctcctcaggcacctttaatcctgtcagtttatgggctaaccccaagtacgtgcgcgcttggaagggcgggacaggcgactgtaagatgggcggcaactacggcagcagtctttttgcccaatgtgaagctgtcgacaatggatgccagcaggtgctgtggctgtatggagaggaccatcaaattaccgaagtgggaaccatgaatctatttctctactggatcaatgaagatggcgaagaggagcttgcgacccctccattggacggtatcattttacctggcgttactagacgctgtatcttagacttggcccaccagtggggcgaatttaaagtcagcgaaaggtacttaacaatggacgatctgaccactgcactggagggcaaccgcgtgcgggagatgtttggatcgggcacagcctgtgtcgtgtgtccagtgtccgatatcctgtataaaggcgagaccattcacattccaacgatggaaaacggcccaaaactcgcttccagaatcttgtcaaagctgacggacatccagtatggaagagaggaatcagattggaccatcgtgctctcctag

SEQ ID NO: 70590 - DNA, 1050 bp, Artificial Sequence
  derived and/or modified sequence
atgaaggactgcagcaatggctgcagcgcagaatgtactggagagggcggcagcaaggaggtggtgggcaccttcaaggccaaggacctgattgtgaccccagccaccatcctgaaggagaagccagaccccaacaacctggtgtttggaacagtgttcacagaccacatgctgactgtggagtggagcagcgagtttggctgggagaagccccacatcaagcccctgcagaacctgagcctgcaccctggcagcagcgccctgcactatgctgtggaggtgtttgacaaggaggagctgctggagtgcatccagcagctggtgaagctggaccaggagtgggtgccctacagcaccagcgccagcctgtacatccggcccaccttcatcggcacagagcccagcctgggcgtgaagaagcccaccaaggccctgctgtttgtgctgctgagccctgtgggcccctacttcagcagcggcaccttcaaccctgtgtccctgtgggccaaccccaagtatgtgcgggcctggaagggcggcactggagactgcaagatgggcggcaactacggcagcagcctgtttgcccagtgtgaggccgtggacaatggctgccagcaggtgctgtggctgtatggagaggaccaccagatcacagaggtgggcaccatgaacctcttcctgtactggatcaatgaagatggagaggaggagctggccaccccacccctggatggcatcatcctgcccggggtgacccggcgctgcatcctggacctggcccaccagtggggcgagttcaaggtgtctgagcgctacctgaccatggatgacctgaccacagccctggagggcaacagagtgcgggagatgtttggcagcggcacagcctgtgtggtgtgccctgtgtctgacatcctgtacaagggggagaccatccacatccccaccatggagaatggccccaagctggccagccgcatcctgagcaagctgacagacatccagtatggccgggaggagagtgactggaccatcgtgctgtcctag

SEQ ID NO: 70591 - DNA, 1050 bp, Artificial Sequence
  derived and/or modified sequence
atgaaggactgcagcaacggctgcagcgccgagtgcaccggcgagggaggttccaaggaggtggtaggtacattcaaggctaaggacttaatcgtgacacccgccaccatcttgaaggagaagccagaccctaataaccttgtctttggcaccgtcttcaccgaccacatgctgacggttgaatggagcagcgaattcggatgggagaagcctcatatcaaacccctgcaaaatctgtctctgcatccaggctcaagtgcgttgcactacgccgttgaggtgttcgataaggaggagttgctggagtgcatccagcagctggtgaaactcgaccaggagtgggtcccttatagcacctcagcctctttatacatccgaccaacattcattggaacagagccctctctaggagtgaaaaaacccactaaggccctgctctttgtcttgctctctccagtaggaccctacttctcatcggggacctttaatcccgtgtcactctgggccaacccgaagtacgtacgggcctggaagggagggacaggggattgcaaaatgggcggtaactacgggtcttcgctgtttgcgcagtgtgaagcggtggacaatggctgccagcaggtgctgtggctgtatggagaggatcatcaaatcacagaggttgggacgatgaatttgttcctgtattggatcaatgaggacggtgaggaagaactcgcgacacccccactggatgggatcatcctcccaggcgtgaccagacggtgtattctggacctggctcatcaatggggggagtttaaggtctctgaacggtacctgacaatggacgatcttactaccgctctcgagggaaatcgcgtgagggaaatgtttggcagcgggaccgcctgtgtcgtgtgccccgtgtctgacattctctacaagggggaaactatccatattccaacgatggaaaatgggccaaagctggcctcacgaatactgtcgaagctgaccgacatccaatatggccgcgaggagagtgactggaccatcgtgctcagctag

SEQ ID NO: 70592 - DNA, 1050 bp, Artificial Sequence
  derived and/or modified sequence
atgaaggattgtagtaacggttgtagcgcagagtgcaccggagagggtgggagcaaggaagttgtggggacttttaaggccaaagacctgattgtgaccccagcaacgattctcaaggaaaagccagatccaaataatcttgtgtttgggacggtgtttaccgaccatatgcttactgtggaatggagcagtgagtttgggtgggagaaacctcatattaagccccttcagaacctgtcgctccatccagggagttccgcccttcattacgccgtggaagtctttgataaggaagagctcctggagtgcatccagcagctggtaaagctggaccaggaatgggttccttattcaacatctgcaagcctgtatattaggcccacgttcattggaactgagccgagccttggagtaaagaagcccacaaaggcgctcctgtttgttctgctgtctcctgtgggtccctacttttctagcgggacgttcaatcccgtctcactttgggccaacccaaaatatgttcgcgcatggaagggtggcactggcgattgcaagatggggggaaactatgggtcctctctgttcgctcaatgtgaagcagtggacaacggctgccagcaggtactctggctatacggagaggaccatcaaataacagaagtgggtacaatgaatctgtttctttattggattaacgaagatggcgaagaagagttagccactccgccactggatgggataatactgcccggagttactcggcgttgcatcctggacctggcccaccagtggggcgagttcaaggtgtctgagcggtacctgacaatggatgatctgacaacggctctggaggggaacagggtgcgcgagatgttcgggtccgggacagcttgtgttgtgtgtccagtctctgacatcctgtataaaggtgagacaatccacattcctaccatggagaacggtccaaagctggcgtcccgcatattaagtaaattgactgatatacaatacggccgtgaggagagcgactggacgatcgttctgtcttag

SEQ ID NO: 70593 - DNA, 4319 bp, Artificial Sequence
  derived and/or modified sequence
acgtgtactcgccgccgcctcgggcactgccccaggtcttgctgcagccgggaccgcgctctgcagccgcagacccggtccacacggccaggggctacgacccttgggatctgccctccgctcagctcgagcttccctcgtggccgacggaacaatgaaggctaaagacctaatagtcacaccagctaccattttaaaggaaaaaccagaccccaataatctggtttttggaactgtgttcacggatcatatgctgacggtggagtggtcctcagagtttggatgggagaaacctcatatcaagcctcttcagaacctgtcattgcaccctggctcatcagctttgcactatgcagtggaagtatttgacaaagaagagctcttagagtgtattcaacagcttgtgaaattggatcaagaatgggtcccatattcaacatctgctagtctgtatattcgtcctacattcattggaactgagccttctcttggagtcaagaagcctaccaaagccctgctctttgtactcttgagcccagtgggaccttatttttcaagtggaacctttaatccagtgtccctgtgggccaatcccaagtatgtaagagcctggaaaggtggaactggggactgcaagatgggagggaattacggctcatctctttttgcccaatgtgaagcagtagataatgggtgtcagcaggtcctgtggctctatggagaggaccatcagatcactgaagtgggaactatgaatctttttctttactggataaatgaagatggagaagaagaactggcaactcctccactagatggcatcattcttccaggagtgacaaggcggtgcattctggacctggcacatcagtggggtgaatttaaggtgtcagagagatacctcaccatggatgacttgacaacagccctggaggggaacagagtgagagagatgtttggctctggtacagcctgtgttgtttgcccagtttctgatatactgtacaaaggcgagacaatacacattccaactatggagaatggtcctaagctggcaagccgcatcttgagcaaattaactgatatccagtatggaagagaagagagcgactggacaattgtgctatcctgaatggaaaatagaggatacaatggaaaatagaggataccaactgtatgctactgggacagactgttgcatttgaattgtgatagatttctttggctacctgtgcataatgtagtttgtagtatcaatgtgttacaagagtgattgtttcttcatgccagagaaaatgaattgcaatcatcaaatggtgtttcataacttggtagtagtaacttaccttaccttacctagaaaaacattaatgtaagccatataacatgggattttcctcaatgattttagtgcctccttttgtacttcactcagatactaaatagtagtttattctttaatataagttacattctgctcctcaaacaaatgcaattttttgtgtgtgtttgaaagctaatttgagaaaatttcataggttacatttcctgcagcctatctttatccacagaaagtgttttcttttttttaaatcaagacttttaaaactggatttcctcccatcactgttttttgaaggtcctccaagtccgtgttaaggtaaatatctgttttcttcctgatgtcacagcctgagcatactctgtgcattaggaagacctgagtgcatttcccaccattgtcctttccacattatgttgtagctggctggctgtcaggcgactacaagactgagggtcttgtgccttatagatctttgtatcccccatggctgacatatagtaggtactcagtaaatggttttataatgaatcagtgaacattttgcttctatagaagtgtaccttctttgtttctatattatgaaacctctttattagaatttgtgattgattctgacagtgtatagatttaccttatattgtctttattttccatgagctactaagtcattagagatactctgaagcatagttagtttaggaaatcacttcatattgattgtattagaattatcttggaattgaagatatatccctagagcaggggaccccaacccccaggccatgggccacacagcaggaagaggtgagtggtgggccattgaggagcttcatctgtatttatggctacttcccatcactcgaattaccacctgaactccacctcttgtcagctcagtggcagcattagattctcataggagcacaaatcctattgtgaactctgcatgcaagggatctaggctatgcgctccttatgagaatctaatgcttgatgacctgaggtgtaacagtttcatcctgaaaccacccttcaccctgcagtctgtggaaaaattgtcttccacaaaactggtccctggtgccaaaaatgttggggaccactgctctagagagaggtcatgatatcataccaaccaaatggaaatgacaaatgttttatgtcaagtgttaattgcagaaataaatcttttttttttttttttggtagaaaacaaagaggcatactctgatttttatactctgtttttgcaggtgctcttttctttgaatggagatttgatgagcaagtggttaggatgcagggagagctactatgggtgatattttccttgtttaggagctgtgagttaaaattgtatcctttgtggtttatctaaggaaagtcaaatcttgacagaaaacatttttccttggaaggtcaactctcagacattgtattttggtttccctcagtcctcataacttccttcttgctgaacatattttattctcttttcagagaaggaaaataaaaaggattctaaaagtttgatgcattggaaaaatttccttgaggcatttagcaacacatagaaaatgggctttgattcttttccaaaacttttagccatagggtcttttatagacagggatagtaaaatgaaaattgagaaatataagatgaaaaggaatgataaaaatatcttttagggggcttttaattggtgatctgaaatcttgggagaagctgttcttttcaggcctgaggtgctcttgactgtcgcctgcgcactgtgtaccccgagcaacattctaagggtgtgctttcgccttggctaactcctttgacctcattcttcatatagtagtctaggaaaaagttgcaggtaatttaaactgtctagtggtacatagtaactaaatttctattcctatgagaaatgagaattatttatttgccatcaacacattttatactttgcatctccaaatttattgtggcgagacttgtccattgtgaaagttagagaacattatgtttgtatcatttctttcataaaacctcaagagcatttttaagcccttttcatcagacccagtgaaaactaaggatagatgtttaaaaactggaggtctcctgataaggagaacacaatccaccattgtcatttaagtaataagacaggaaattgaccttgacgctttcttgttaaatagatttaacaggaacatctgcacatcttttttccttgtgcactatttgtttaattgcagtggattaatacagcaagagtgccacattataactaggcaattatccattcttcaagacttagttattgtcacactaattgatcgtttaaggcataagatggtctagcattaggaacatgtgaagctaatctgctcaaaaagatcaacaaattaatattgttgctgatatttgcataattggctgcaattatttaatgtttaattgggttgatcaaatgagattcagcaattcacaagtgcattaatataaacagaactggtggcacttaaaatgataatgattaacttatattgcatgttctcttcctttcacttttttcagtttctacatttcagaccgagcttgtcagcttttttgaaaacacatcagtagaaaccaagattttaaaatgaagtgtcaagacaaaggcaaaacctgagcagttcctaaaaagatttgctgttagaaattttctttgtggcagtcatttattaaggattcaactcgtgatacaccaaaagaagagttgacttcagagatgtgttccatgctctctagcacaggaatgaataaatttataacacctgctttagcctttgttttcaaaagcacaaaggaaaagtgaaagggaaagagaaacaagtgactgagaagtcttgttaaggaatcaggttttttctacctggtaaacattctctattcttttctcaaaagattgctgtaagaaaaaatgtaagac

SEQ ID NO: 70594 - DNA, 1360 bp, Artificial Sequence
  derived and/or modified sequence
gcagccgggaccgcgctctgcagccgcagacccggtccacacggccaggggctacgacccttgggatctgccctccgctcagctcgagcttccctcgtggccgacggaacaatgaaggattgcagtaacggatgctccgcagagtgtaccggagaaggaggatcaaaagaggtggtggggacttttaaggctaaagacctaatagtcacaccagctaccattttaaaggaaaaaccagaccccaataatctggtttttggaactgtgttcacggatcatatgctgacggtggagtggtcctcagagtttggatgggagaaacctcatatcaagcctcttcagaacctgtcattgcaccctggctcatcagctttgcactatgcagtggaagtatttgacaaagaagagctcttagagtgtattcaacagcttgtgaaattggatcaagaatgggtcccatattcaacatctgctagtctgtatattcgtcctacattcattggaactgagccttctcttggagtcaagaagcctaccaaagccctgctctttgtactcttgagcccagtgggaccttatttttcaagtggaacctttaatccagtgtccctgtgggccaatcccaagtatgtaagagcctggaaaggtggaactggggactgcaagatgggagggaattacggctcatctctttttgcccaatgtgaagcagtagataatgggtgtcagcaggtcctgtggctctatggagaggaccatcagatcactgaagtgggaactatgaatctttttctttactggataaatgaagatggagaagaagaactggcaactcctccactagatggcatcattcttccaggagtgacaaggcggtgcattctggacctggcacatcagtggggtgaatttaaggtgtcagagagatacctcaccatggatgacttgacaacagccctggaggggaacagagtgagagagatgtttggctctggtacagcctgtgttgtttgcccagtttctgatatactgtacaaaggcgagacaatacacattccaactatggagaatggtcctaagctggcaagccgcatcttgagcaaattaactgatatccagtatggaagagaagagagcgactggacaattgtgctatcctgaatggaaaatagaggatacaatggaaaatagaggataccaactgtatgctactgggacagactgttgcatttgaattgtgatagatttctttggctacctgtgcataatgtagtttgtagtatcaatgtgttacaagagtgattgtttcttcatgccagagaaaatgaattgcaatcatcaaatggtgtttcataacttg

SEQ ID NO: 70595 - DNA, 1050 bp, Artificial Sequence
  derived and/or modified sequence
atgaaggactgcagcaacggctgcagcgccgagtgcaccggcgagggcggcagcaaggaggtggtgggcaccttcaaggccaaggacctgatcgtgacccccgccaccatcctgaaggagaagcccgaccccaacaacctggtgttcggcaccgtgttcaccgaccacatgctgaccgtggagtggagcagcgagttcggctgggagaagccccacatcaagcccctgcagaacctgagcctgcaccccggcagcagcgccctgcactacgccgtggaggtgttcgacaaggaggagctgctggagtgcatccagcagctggtgaagctggaccaggagtgggtgccctacagcaccagcgccagcctgtacatcagacccaccttcatcggcaccgagcccagcctgggcgtgaagaagcccaccaaggccctgctgttcgtgctgctgagccccgtgggcccctacttcagcagcggcaccttcaaccccgtgagcctgtgggccaaccccaagtacgtgagagcctggaagggcggcaccggcgactgcaagatgggcggcaactacggcagcagcctgttcgcccagtgcgaggccgtggacaacggctgccagcaggtgctgtggctgtacggcgaggaccaccagatcaccgaggtgggcaccatgaacctgttcctgtactggatcaacgaggacggcgaggaggagctggccaccccccccctggacggcatcatcctgcccggcgtgaccagaagatgcatcctggacctggcccaccagtggggcgagttcaaggtgagcgagagatacctgaccatggacgacctgaccaccgccctggagggcaacagagtgagagagatgttcggcagcggcaccgcctgcgtggtgtgccccgtgagcgacatcctgtacaagggcgagaccatccacatccccaccatggagaacggccccaagctggccagcagaatcctgagcaagctgaccgacatccagtacggcagagaggagagcgactggaccatcgtgctgagctag

SEQ ID NO: 70596 - protein, 325 aa, Artificial Sequence
  derived and/or modified sequence
MKAKDLIVTPATILKEKPDPNNLVFGTVFTDHMLTVEWSSEFGWEKPHIKPLQNLSLHPGSSALHYAVEVFDKEELLECIQQLVKLDQEWVPYSTSASLYIRPTFIGTEPSLGVKKPTKALLFVLLSPVGPYFSSGTFNPVSLWANPKYVRAWKGGTGDCKMGGNYGSSLFAQCEAVDNGCQQVLWLYGEDHQITEVGTMNLFLYWINEDGEEELATPPLDGIILPGVTRRCILDLAHQWGEFKVSERYLTMDDLTTALEGNRVREMFGSGTACVVCPVSDILYKGETIHIPTMENGPKLASRILSKLTDIQYGREESDWTIVLS

SEQ ID NO: 70597 - DNA, 978 bp, Artificial Sequence
  derived and/or modified sequence
atgaaggccaaagacttgatcgtgacccctgctaccattttaaaggagaagcctgaccctaacaacctggtgttcggcaccgtcttcaccgaccacatgcttacagtggagtggtctagcgaattcggctgggagaaacctcatattaaaccattgcagaatttgtcacttcatccagggtcctccgccctgcattatgcagtcgaggtgttcgacaaggaggagctgctcgaatgtattcaacaactagtgaagttagaccaagagtgggttccatattccactagcgcctccctgtatattcggccaacttttattgggacagaaccgtcattaggtgtcaaaaaacccacaaaagctcttctgtttgtgttactgtctccagtagggccgtatttttctagcggaacattcaacccagtcagcttatgggctaaccctaagtacgtgagagcttggaaggggggaaccggtgattgcaagatgggcggtaactacgggtctagcctcttcgcccaatgtgaagccgtcgacaacggttgccagcaagtgctctggctgtacggtgaggaccaccagataaccgaggtgggaacaatgaacctcttcttatactggatcaacgaggatggtgaagaggaacttgcgacacctccactggacgggattatccttccaggtgtgacacgcaggtgtattctggatctggctcaccagtggggggagtttaaagtttctgagcggtacctgaccatggacgacctcaccacagccctcgaggggaacagagtgcgcgagatgtttggctcaggcaccgcctgtgttgtttgtcccgtcagcgacatcttgtataagggggagaccatccatattccaaccatggaaaacgggccaaaactggcctcacgcatactgtcaaagctgacggacatacagtatggcagagaggagagcgattggacaattgtgctctcatag

SEQ ID NO: 70598 - DNA, 978 bp, Artificial Sequence
  derived and/or modified sequence
atgaaggccaaggacctgattgtgaccccagccaccatcctgaaggagaagccagaccccaacaacctggtgtttggaacagtgttcacagaccacatgctgactgtggagtggagcagcgagtttggctgggagaagccccacatcaagcccctgcagaacctgagcctgcaccctggcagcagcgccctgcactatgctgtggaggtgtttgacaaggaggagctgctggagtgcatccagcagctggtgaagctggaccaggagtgggtgccctacagcaccagcgccagcctgtacatccggcccaccttcatcggcacagagcccagcctgggcgtgaagaagcccaccaaggccctgctgtttgtgctgctgagccctgtgggcccctacttcagcagcggcaccttcaaccctgtgtccctgtgggccaaccccaagtatgtgcgggcctggaagggcggcactggagactgcaagatgggcggcaactacggcagcagcctgtttgcccagtgtgaggccgtggacaatggctgccagcaggtgctgtggctgtatggagaggaccaccagatcacagaggtgggcaccatgaacctcttcctgtactggatcaatgaagatggagaggaggagctggccaccccacccctggatggcatcatcctgcccggggtgacccggcgctgcatcctggacctggcccaccagtggggcgagttcaaggtgtctgagcgctacctgaccatggatgacctgaccacagccctggagggcaacagagtgcgggagatgtttggcagcggcacagcctgtgtggtgtgccctgtgtctgacatcctgtacaagggggagaccatccacatccccaccatggagaatggccccaagctggccagccgcatcctgagcaagctgacagacatccagtatggccgggaggagagtgactggaccatcgtgctgtcctag

SEQ ID NO: 70599 - DNA, 978 bp, Artificial Sequence
  derived and/or modified sequence
atgaaggccaaggacctgatcgtgacccccgccaccatcctgaaggagaagcctgacccaaacaacttggttttcggcacagtctttaccgaccatatgctgacggtggaatggagcagcgagtttgggtgggaaaaaccgcacatcaagccgcttcagaatctgtcactgcatccagggagtagtgcactgcactacgctgtggaagtgtttgacaaggaagagcttctggagtgcatacagcagctggtaaaactggaccaggagtgggtaccgtactccacgtccgccagcctatacatacgtcccaccttcatcggtacagagccatctctgggtgtcaagaagccaacgaaggccctcctgttcgtgctgctaagtccagtcgggccttatttctcgtcaggcacctttaatcctgtcagtctatgggccaaccctaagtatgtccgcgcctggaagggcgggactggtgactgtaaaatggggggcaattatggcagttccttgttcgcgcagtgtgaggccgttgataacgggtgccaacaggtattgtggctttacggcgaggaccaccagattacggaagtaggcactatgaatcttttcctgtactggatcaacgaagacggcgaggaggaactcgctactccacccctagacggaattatcctaccgggtgtgactcgcaggtgtatcttagatctggcccaccagtggggcgaatttaaagtgtcggagagatatctcacaatggacgacttgacaactgccttggagggaaaccgggttcgagaaatgtttgggtctggaacagcttgtgtcgtgtgtcctgtttcggacatattatataaaggggaaaccatccatattcctactatggaaaacgggccgaagctggctagccgaatactgagcaagcttacagatatacagtacgggcgcgaggagagtgactggaccattgtcttgtcttag

SEQ ID NO: 70600 - DNA, 978 bp, Artificial Sequence
  derived and/or modified sequence
atgaaggctaaagacttgatcgtgactcctgcgactattttgaaagagaagcccgatcccaacaacctcgtctttgggactgtattcacagaccatatgctgacagtggaatggagtagtgaatttggatgggagaagccacacattaaaccacttcaaaatctgtctctgcatcccggatcgtcagctcttcactatgcagtggaggtctttgacaaggaagaattgctggaatgcatccagcagctggtaaagttggaccaggagtgggtgccctactctacaagcgcctcactttatattaggcctacgtttattggcacagaaccatcactgggtgtgaagaaacccacaaaggcactcctctttgtcttactgtcccccgtgggcccatacttctctagtggtacctttaatcctgtgtcactctgggcgaacccaaaatacgtaagagcttggaagggagggaccggcgattgcaaaatgggtggcaactatggatcaagcctgttcgcacaatgcgaggcagtggacaatggatgccagcaagtgttgtggctgtatggcgaggatcaccagattacagaggtaggcaccatgaacctctttctttattggatcaatgaagacggggaggaggaactggctactccccctctggacggtattatactcccaggagtgacccgacgttgcatcttggatttagcgcaccaatggggagaattcaaagtgtctgaacgctatcttaccatggacgatctgaccacagctctggaagggaatagggtgcgggagatgtttgggtctggcaccgcctgtgttgtatgtccggttagcgacattctgtacaaaggcgaaactatccacatccctacaatggagaacggaccaaagctcgcaagtagaattctgagtaaactgactgacatccaatacggccgtgaggagtccgattggaccatagtactgtcctag

SEQ ID NO: 70601 - DNA, 978 bp, Artificial Sequence
  derived and/or modified sequence
atgaaggccaaggacctgatcgtgacccccgccaccatcctgaaggagaagcccgaccccaacaacctggtgttcggcaccgtgttcaccgaccacatgctgaccgtggagtggagcagcgagttcggctgggagaagccccacatcaagcccctgcagaacctgagcctgcaccccggcagcagcgccctgcactacgccgtggaggtgttcgacaaggaggagctgctggagtgcatccagcagctggtgaagctggaccaggagtgggtgccctacagcaccagcgccagcctgtacatcagacccaccttcatcggcaccgagcccagcctgggcgtgaagaagcccaccaaggccctgctgttcgtgctgctgagccccgtgggcccctacttcagcagcggcaccttcaaccccgtgagcctgtgggccaaccccaagtacgtgagagcctggaagggcggcaccggcgactgcaagatgggcggcaactacggcagcagcctgttcgcccagtgcgaggccgtggacaacggctgccagcaggtgctgtggctgtacggcgaggaccaccagatcaccgaggtgggcaccatgaacctgttcctgtactggatcaacgaggacggcgaggaggagctggccaccccccccctggacggcatcatcctgcccggcgtgaccagaagatgcatcctggacctggcccaccagtggggcgagttcaaggtgagcgagagatacctgaccatggacgacctgaccaccgccctggagggcaacagagtgagagagatgttcggcagcggcaccgcctgcgtggtgtgccccgtgagcgacatcctgtacaagggcgagaccatccacatccccaccatggagaacggccccaagctggccagcagaatcctgagcaagctgaccgacatccagtacggcagagaggagagcgactggaccatcgtgctgagctag

SEQ ID NO: 70602 - protein, 385 aa, Artificial Sequence
  derived and/or modified sequence
MDCSNGCSAECTGEGGSKEVVGTFKAKDLIVTPATILKEKPDPNNLVFGTVFTDHMLTVEWSSEFGWEKPHIKPLQNLSLHPGSSALHYAVELFEGLKAFRGVDNKIRLFQPNLNMDRMYRSAVRATLPVFDKEELLECIQQLVKLDQEWVPYSTSASLYIRPTFIGTEPSLGVKKPTKALLFVLLSPVGPYFSSGTFNPVSLWANPKYVRAWKGGTGDCKMGGNYGSSLFAQCEAVDNGCQQVLWLYGEDHQITEVGTMNLFLYWINEDGEEELATPPLDGIILPGVTRRCILDLAHQWGEFKVSERYLTMDDLTTALEGNRVREMFGSGTACVVCPVSDILYKGETIHIPTMENGPKLASRILSKLTDIQYGREESDWTIVLS

SEQ ID NO: 70603 - DNA, 1158 bp, Artificial Sequence
  derived and/or modified sequence
atggactgctccaacggatgcagcgccgaatgcaccggcgaggggggaagtaaagaggttgtgggcaccttcaaggcgaaagatctcatagtgacccctgccactattctcaaagaaaagccagacccaaacaacttggtgttcggcaccgtgtttacagatcatatgctgaccgtggaatggtcctcagagtttgggtgggaaaagcctcacattaagcccttacagaatttatcgttgcaccccggctcttcagctctgcactacgccgtggagctgttcgagggccttaaggcattcagaggcgtcgacaacaagattcgactatttcagcctaatctcaacatggaccgaatgtataggagtgccgtcagagcaaccctccctgtatttgataaggaggaacttctcgagtgtatccagcagctcgtaaagctagaccaggagtgggtaccctatagcacctccgcttctctgtacattaggcctacatttatcggaaccgaaccaagccttggtgtcaagaaaccaactaaggcactgctgtttgtactgttgtcaccagttggcccctacttctcttccggtaccttcaaccctgtgagcctctgggcaaaccctaagtacgtacgcgcttggaaagggggcactggagattgcaaaatgggggggaactatggtagttcactctttgctcagtgcgaggccgtagataatggatgccaacaggtgttgtggctgtatggcgaagaccatcagatcactgaagtgggcaccatgaatctgttcctgtactggattaatgaagatggagaggaagagctggctaccccgcctctagatggcatcatactccctggcgtgacacggaggtgcatactggacctcgcacaccagtggggcgaatttaaagtgtccgagcggtacctgaccatggacgacctgacaacggcactggaaggaaatagggtgagagaaatgtttggcagcggtacggcctgcgttgtgtgtcccgttagcgacattctgtacaagggagagaccatacacattccgaccatggagaatggtcctaagttggcctcccggatcctatccaaactgactgacatacagtacggccgggaggaatcagattggaccatcgtgctgtcctag

SEQ ID NO: 70604 - DNA, 1158 bp, Artificial Sequence
  derived and/or modified sequence
atggactgcagcaatggctgcagcgctgagtgcaccggggagggcggcagcaaggaggtggtgggcaccttcaaggccaaggacctgattgtgaccccagccaccatcctgaaggagaagccagaccccaacaacctggtgtttggcaccgtcttcacagaccacatgctgactgtggagtggagcagcgagtttggctgggagaagccccacatcaagcccctgcagaacctgagcctgcaccctggcagcagcgccctgcactatgctgtggagctgtttgagggcctgaaggccttccggggcgtggacaacaagatccgcctcttccagcccaacctgaacatggacaggatgtacagatctgctgtgcgggccaccctgcctgtgtttgacaaggaggagctgctggagtgcatccagcagctggtgaagctggaccaggagtgggtgccctacagcaccagcgccagcctgtacatccggcccaccttcatcggcacagagcccagcctgggcgtgaagaagcccaccaaggccctgctgtttgtgctgctgagccctgtgggcccctacttcagcagcggcaccttcaaccctgtgtccctgtgggccaaccccaagtatgtgcgggcctggaagggcggcactggagactgcaagatgggcggcaactacggcagcagcctgtttgcccagtgtgaggccgtggacaatggctgccagcaggtgctgtggctgtatggagaggaccaccagatcacagaggtgggcaccatgaacctcttcctgtactggatcaatgaagatggagaggaggagctggccaccccacccctggatggcatcatcctgcccggggtgacccggcgctgcatcctggacctggcccaccagtggggcgagttcaaggtgtctgagcgctacctgaccatggatgacctgaccacagccctggagggcaacagagtgcgggagatgtttggcagcggcacagcctgtgtggtgtgccctgtgtctgacatcctgtacaagggggagaccatccacatccccaccatggagaatggccccaagctggccagccgcatcctgagcaagctgacagacatccagtatggccgggaggagagtgactggaccatcgtgctgtcctag

SEQ ID NO: 70605 - DNA, 1158 bp, Artificial Sequence
  derived and/or modified sequence
atggactgcagcaacggctgcagcgccgagtgcaccggcgagggcggctccaaggaagtcgtcggtacatttaaggccaaagatctgattgtgacgccggcgactatcctcaaagaaaagccagatcccaacaatctcgtgtttggcacggtttttaccgaccacatgctgaccgtcgaatggagtagcgaattcgggtgggaaaaaccacacataaagccactgcagaacctgtccctgcatccaggcagttccgctctgcattacgccgtggagctctttgaaggcctcaaggcgtttagaggggtggataacaaaatacgactgttccaacctaatctgaatatggatcgcatgtacagaagtgctgttcgcgcaacactcccagtgtttgataaagaggaattactcgagtgcatccagcaactcgtgaagctagatcaggaatgggtcccatatagcacgtccgcctcactatacattcgacccacctttataggaacggaaccatcattgggcgtgaagaagcctaccaaagcattgctgtttgtgctgttgagccccgttgggccttacttcagctcaggcacctttaatccggtgtctctgtgggccaatccaaagtatgtgagagcgtggaaaggcgggactggcgattgcaagatggggggtaattatggctcatccctttttgcacagtgtgaggcagtagataacggatgccaacaagtgctgtggctctatggcgaagatcatcagattaccgaggtgggcaccatgaacttgtttctatattggatcaatgaagacggagaagaggagctcgctacacctcccctcgacggtatcatcttgccaggggtcacgcggcggtgcatacttgaccttgctcaccagtggggcgaattcaaagtttcggagcgatacctcaccatggatgacttgacgacagccctggaaggcaatcgagtgcgcgagatgtttggctcagggactgcatgtgtcgtttgcccagtgagtgacattctgtataagggagagaccatccacatacctactatggagaatggacctaaactggcctccagaattctttctaagctgaccgatattcagtacgggagggaagaatcagactggacaattgtgctgtcttag

SEQ ID NO: 70606 - DNA, 1158 bp, Artificial Sequence
  derived and/or modified sequence
atggattgttcaaacggctgctctgctgagtgtaccggcgagggcggaagtaaagaggtcgtcgggacattcaaggccaaagatctgattgttaccccggctactatcctgaaggagaagcccgatcccaataaccttgttttcgggaccgtgttcaccgaccacatgctaaccgtagagtggagctcagagtttggctgggagaaaccacatataaagccactgcagaatctgagccttcatccaggcagttctgcactccattacgccgtcgagctgttcgaaggacttaaagcattccgtggcgtcgacaacaaaattcgccttttccagcctaacctgaatatggacaggatgtaccgttcagctgtgcgcgctactttgcctgtttttgataaggaagagttgctcgaatgtattcaacaactggttaaattggatcaggagtgggtgccctacagcacctcagcgtctctgtatatcaggcctaccttcatcggcaccgaaccttctcttggcgttaaaaagcctacaaaggccctgctgtttgtgcttctcagtccagttggcccttacttttcgtccggtacgttcaaccccgtttcactgtgggccaaccctaagtatgttcgggcttggaaaggcggtaccggtgactgtaagatgggcggaaattatggcagctctcttttcgcacagtgtgaggccgtggataatggatgccaacaggtactttggttgtacggagaagaccaccaaataacggaagtgggcacaatgaacctgtttctgtattggataaatgaagatggcgaagaagagctggcaaccccgcctctggatggaataatcctgccaggggtcaccaggcgatgcatcctggacctggctcaccagtggggcgagtttaaagtgagcgaacggtacctgacaatggacgacttgaccaccgccctcgaagggaatcgggtaagggagatgttcggcagtggcaccgcgtgcgtggtttgcccggttagcgacatcttgtacaagggggagactatccatatccctacaatggaaaatggccctaagctggctagccgcatcctcagcaaactgaccgacatccaatacggacgtgaggagtccgattggacaatcgtgctttcttag

SEQ ID NO: 70607 - DNA, 4694 bp, Artificial Sequence
  derived and/or modified sequence
tgattgacaagaccacgaggctgagcgcgccctggagatttttctataaatggcttaacaccccagtctagactatttgctcggatataagggagacaattgtttttttgttctttgccggcgaaccctggctctgtagggctgacctggaatttaaccagtcttccctgagccggcggaggaggacaaaaaccgccgcgaccccggcagggtgggaagtgcagggcagcgctcccaagacacgcttgttggaggttcgggcctgggtgcttggttgtctgagcctccttttttgtgtttgcctgggtcctggagaggagcgcacggtatcatggattgcagtaacggatgctccgcagagtgtaccggagaaggaggatcaaaagaggtggtggggacttttaaggctaaagacctaatagtcacaccagctaccattttaaaggaaaaaccagaccccaataatctggtttttggaactgtgttcacggatcatatgctgacggtggagtggtcctcagagtttggatgggagaaacctcatatcaagcctcttcagaacctgtcattgcaccctggctcatcagctttgcactatgcagtggaattatttgaaggattgaaggcatttcgaggagtagataataaaattcgactgtttcagccaaacctcaacatggatagaatgtatcgctctgctgtgagggcaactctgccggtatttgacaaagaagagctcttagagtgtattcaacagcttgtgaaattggatcaagaatgggtcccatattcaacatctgctagtctgtatattcgtcctacattcattggaactgagccttctcttggagtcaagaagcctaccaaagccctgctctttgtactcttgagcccagtgggaccttatttttcaagtggaacctttaatccagtgtccctgtgggccaatcccaagtatgtaagagcctggaaaggtggaactggggactgcaagatgggagggaattacggctcatctctttttgcccaatgtgaagcagtagataatgggtgtcagcaggtcctgtggctctatggagaggaccatcagatcactgaagtgggaactatgaatctttttctttactggataaatgaagatggagaagaagaactggcaactcctccactagatggcatcattcttccaggagtgacaaggcggtgcattctggacctggcacatcagtggggtgaatttaaggtgtcagagagatacctcaccatggatgacttgacaacagccctggaggggaacagagtgagagagatgtttggctctggtacagcctgtgttgtttgcccagtttctgatatactgtacaaaggcgagacaatacacattccaactatggagaatggtcctaagctggcaagccgcatcttgagcaaattaactgatatccagtatggaagagaagagagcgactggacaattgtgctatcctgaatggaaaatagaggatacaatggaaaatagaggataccaactgtatgctactgggacagactgttgcatttgaattgtgatagatttctttggctacctgtgcataatgtagtttgtagtatcaatgtgttacaagagtgattgtttcttcatgccagagaaaatgaattgcaatcatcaaatggtgtttcataacttggtagtagtaacttaccttaccttacctagaaaaacattaatgtaagccatataacatgggattttcctcaatgattttagtgcctccttttgtacttcactcagatactaaatagtagtttattctttaatataagttacattctgctcctcaaacaaatgcaattttttgtgtgtgtttgaaagctaatttgagaaaatttcataggttacatttcctgcagcctatctttatccacagaaagtgttttcttttttttaaatcaagacttttaaaactggatttcctcccatcactgttttttgaaggtcctccaagtccgtgttaaggtaaatatctgttttcttcctgatgtcacagcctgagcatactctgtgcattaggaagacctgagtgcatttcccaccattgtcctttccacattatgttgtagctggctggctgtcaggcgactacaagactgagggtcttgtgccttatagatctttgtatcccccatggctgacatatagtaggtactcagtaaatggttttataatgaatcagtgaacattttgcttctatagaagtgtaccttctttgtttctatattatgaaacctctttattagaatttgtgattgattctgacagtgtatagatttaccttatattgtctttattttccatgagctactaagtcattagagatactctgaagcatagttagtttaggaaatcacttcatattgattgtattagaattatcttggaattgaagatatatccctagagcaggggaccccaacccccaggccatgggccacacagcaggaagaggtgagtggtgggccattgaggagcttcatctgtatttatggctacttcccatcactcgaattaccacctgaactccacctcttgtcagctcagtggcagcattagattctcataggagcacaaatcctattgtgaactctgcatgcaagggatctaggctatgcgctccttatgagaatctaatgcttgatgacctgaggtgtaacagtttcatcctgaaaccacccttcaccctgcagtctgtggaaaaattgtcttccacaaaactggtccctggtgccaaaaatgttggggaccactgctctagagagaggtcatgatatcataccaaccaaatggaaatgacaaatgttttatgtcaagtgttaattgcagaaataaatcttttttttttttttttggtagaaaacaaagaggcatactctgatttttatactctgtttttgcaggtgctcttttctttgaatggagatttgatgagcaagtggttaggatgcagggagagctactatgggtgatattttccttgtttaggagctgtgagttaaaattgtatcctttgtggtttatctaaggaaagtcaaatcttgacagaaaacatttttccttggaaggtcaactctcagacattgtattttggtttccctcagtcctcataacttccttcttgctgaacatattttattctcttttcagagaaggaaaataaaaaggattctaaaagtttgatgcattggaaaaatttccttgaggcatttagcaacacatagaaaatgggctttgattcttttccaaaacttttagccatagggtcttttatagacagggatagtaaaatgaaaattgagaaatataagatgaaaaggaatgataaaaatatcttttagggggcttttaattggtgatctgaaatcttgggagaagctgttcttttcaggcctgaggtgctcttgactgtcgcctgcgcactgtgtaccccgagcaacattctaagggtgtgctttcgccttggctaactcctttgacctcattcttcatatagtagtctaggaaaaagttgcaggtaatttaaactgtctagtggtacatagtaactaaatttctattcctatgagaaatgagaattatttatttgccatcaacacattttatactttgcatctccaaatttattgtggcgagacttgtccattgtgaaagttagagaacattatgtttgtatcatttctttcataaaacctcaagagcatttttaagcccttttcatcagacccagtgaaaactaaggatagatgtttaaaaactggaggtctcctgataaggagaacacaatccaccattgtcatttaagtaataagacaggaaattgaccttgacgctttcttgttaaatagatttaacaggaacatctgcacatcttttttccttgtgcactatttgtttaattgcagtggattaatacagcaagagtgccacattataactaggcaattatccattcttcaagacttagttattgtcacactaattgatcgtttaaggcataagatggtctagcattaggaacatgtgaagctaatctgctcaaaaagatcaacaaattaatattgttgctgatatttgcataattggctgcaattatttaatgtttaattgggttgatcaaatgagattcagcaattcacaagtgcattaatataaacagaactggtggcacttaaaatgataatgattaacttatattgcatgttctcttcctttcacttttttcagtttctacatttcagaccgagcttgtcagcttttttgaaaacacatcagtagaaaccaagattttaaaatgaagtgtcaagacaaaggcaaaacctgagcagttcctaaaaagatttgctgttagaaattttctttgtggcagtcatttattaaggattcaactcgtgatacaccaaaagaagagttgacttcagagatgtgttccatgctctctagcacaggaatgaataaatttataacacctgctttagcctttgttttcaaaagcacaaaggaaaagtgaaagggaaagagaaacaagtgactgagaagtcttgttaaggaatcaggttttttctacctggtaaacattctctattcttttctcaaaagattgctgtaagaaaaaatgtaagacaaaaaaaaaaaaaaaaaa

SEQ ID NO: 70608 - DNA, 1158 bp, Artificial Sequence
  derived and/or modified sequence
atggactgcagcaacggctgcagcgccgagtgcaccggcgagggcggcagcaaggaggtggtgggcaccttcaaggccaaggacctgatcgtgacccccgccaccatcctgaaggagaagcccgaccccaacaacctggtgttcggcaccgtgttcaccgaccacatgctgaccgtggagtggagcagcgagttcggctgggagaagccccacatcaagcccctgcagaacctgagcctgcaccccggcagcagcgccctgcactacgccgtggagctgttcgagggcctgaaggccttcagaggcgtggacaacaagatcagactgttccagcccaacctgaacatggacagaatgtacagaagcgccgtgagagccaccctgcccgtgttcgacaaggaggagctgctggagtgcatccagcagctggtgaagctggaccaggagtgggtgccctacagcaccagcgccagcctgtacatcagacccaccttcatcggcaccgagcccagcctgggcgtgaagaagcccaccaaggccctgctgttcgtgctgctgagccccgtgggcccctacttcagcagcggcaccttcaaccccgtgagcctgtgggccaaccccaagtacgtgagagcctggaagggcggcaccggcgactgcaagatgggcggcaactacggcagcagcctgttcgcccagtgcgaggccgtggacaacggctgccagcaggtgctgtggctgtacggcgaggaccaccagatcaccgaggtgggcaccatgaacctgttcctgtactggatcaacgaggacggcgaggaggagctggccaccccccccctggacggcatcatcctgcccggcgtgaccagaagatgcatcctggacctggcccaccagtggggcgagttcaaggtgagcgagagatacctgaccatggacgacctgaccaccgccctggagggcaacagagtgagagagatgttcggcagcggcaccgcctgcgtggtgtgccccgtgagcgacatcctgtacaagggcgagaccatccacatccccaccatggagaacggccccaagctggccagcagaatcctgagcaagctgaccgacatccagtacggcagagaggagagcgactggaccatcgtgctgagctag

SEQ ID NO: 70609 - protein, 32 aa, Artificial Sequence
  derived and/or modified sequence
MDEDGLELQQEPNSFFDATGADGTHMDGDQIV

SEQ ID NO: 70610 - DNA, 99 bp, Artificial Sequence
  derived and/or modified sequence
atggacgaggacggcctggagctgcagcaggagcccaacagcttcttcgacgccaccggcgccgacggcacccacatggacggcgaccagatcgtgtag

SEQ ID NO: 70611 - DNA, 408 bp, Artificial Sequence
  derived and/or modified sequence
atggacgaggacggcctggagctgcagcaggagcccaacagcttcttcgacgccaccggcgccgacggcacccacatggacggcgaccagatcgtggtggaggtgcaggagaccgtgttcgtgagcgacgtggtggacagcgacatcaccgtgcacaacttcgtgcccgacgaccccgacagcgtggtgatccaggacgtgatcgaggacgtggtgatcgaggacgtgcagtgccccgacatcatggaggaggccgacgtgagcgagaccgtgatcatccccgagcaggtgctggacagcgacgtgaccgaggaggtgagcctggcccactgcaccgtgcccgacgacgtgctggccagcgacatcaccagcgccagcatgagcatgcccgagcacgtgctgacctag

SEQ ID NO: 70612 - DNA, 789 bp, Artificial Sequence
  derived and/or modified sequence
atggacgaggacggcctggagctgcagcaggagcccaacagcttcttcgacgccaccggcgccgacggcacccacatggacggcgaccagatcgtggtggaggtgcaggagaccgtgttcgtgagcgacgtggtggacagcgacatcaccgtgcacaacttcgtgcccgacgaccccgacagcgtggtgatccaggacgtgatcgaggacgtggtgatcgaggacgtgcagtgccccgacatcatggaggaggccgacgtgagcgagaccgtgatcatccccgagcaggtgctggacagcgacgtgaccgaggaggtgagcctggcccactgcaccgtgcccgacgacgtgctggccagcgacatcaccagcgccagcatgagcatgcccgagcacgtgctgaccggcgacagcatccacgtgagcgacgtgggccacgtgggccacgtgggccacgtggagcacgtggtgcacgacagcgtggtggaggccgagatcgtgaccgaccccctgaccaccgacgtggtgagcgaggaggtgctggtggccgactgcgccagcgaggccgtgatcgacgccaacggcatccccgtggaccagcaggacgacgacaagggcaactgcgaggactacctgatgatcagctgcaacaacagcgacggcatcgagaacagaaacggcaccgccagcgccctgctgcacatcgacgagagcgccggcctgggcagactggccaagcagaagcccaagaagagaagaagacccgacagcagacagtaccagacctag

SEQ ID NO: 70613 - DNA, 522 bp, Artificial Sequence
  derived and/or modified sequence
ggcggctgcagccagtacctgctgctgttcgtggacgacgccggcaagatcgagcacgacggcagcagcggcatgaccatggacaccgagagcgagatcgacccctgcaaggtggacggcacctgccccgaggtgatcaaggtgtacatcttcaaggccgaccccggcgaggacgacctgggcggcaccgtggacatcgtggagagcgagcccgagaacgaccacggcgtggagctgctggaccagaacagcagcatcagagtgcccagagagaagatggtgtacatgaccgtgaacgacagccagcccgaggacgaggacctgaacgtggccgagatcgccgacgaggtgtacatggaggtgatcgtgggcgaggaggacgccgccgccgccgccgccgccgccgccgtgcacgagcagcagatggacgacaacgagatcaagaccttcatgcccatcgcctgggccgccgcctacggcaacaacagcgacggcatcgagaacagaaacggcaccgcctag

SEQ ID NO: 70614 - DNA, 99 bp, Artificial Sequence
  derived and/or modified sequence
atggacgaggatggactggagttacagcaggagcctaactcttttttcgacgctacaggggctgacggcacacacatggacggcgaccagattgtatag

SEQ ID NO: 70615 - DNA, 408 bp, Artificial Sequence
  derived and/or modified sequence
atggatgaagatgggttggagctgcagcaagagcctaattctttttttgacgccaccggcgccgatggcactcacatggatggggatcagatagtcgtggaagtacaggagaccgtctttgtgagcgacgtagttgactccgacatcacagtgcataactttgtccccgatgaccccgattcagtggtgatacaggatgtgatcgaggatgtggtgatcgaggacgttcagtgcccagacattatggaggaggccgatgttagcgagacagtgataattcctgagcaagtactggattctgacgtgactgaagaggtgtcccttgcacattgtacggtaccggatgatgtgctcgctagcgacatcacttctgcctccatgtctatgcccgagcatgttctgacatag

SEQ ID NO: 70616 - DNA, 789 bp, Artificial Sequence
  derived and/or modified sequence
atggacgaagatggcttagagctgcaacaggaaccaaacagtttttttgatgcgacaggtgccgacggaactcacatggatggtgatcaaatcgtggtggaggtacaggaaaccgtcttcgtgtcagacgttgtggactctgacatcacggtgcacaattttgtgcccgatgaccctgatagtgtagtaatacaagatgtcatagaagatgtggtcatagaagatgttcaatgtccagacataatggaggaagcagacgtatcggaaaccgtcattattccggagcaggttctcgacagcgacgtcaccgaggaggtatccctcgctcattgtactgtacctgatgacgtgttagcttctgacattaccagcgcaagtatgtcaatgcccgagcatgtcctcactggcgatagcatccatgtttcagatgttggacatgtggggcacgtcggacacgtggaacatgttgtccatgactctgttgtcgaagcggagatagtgaccgatccattgactactgacgtcgtgtccgaggaagtgctcgtcgctgactgcgcatctgaggctgtgatagatgccaacggcatcccggtggaccagcaggacgacgataagggcaactgtgaagactatctgatgatcagttgcaataatagtgacggtatcgagaataggaatgggaccgcaagcgcccttctccatattgacgaatcggctgggctgggtcggctcgctaagcaaaaaccaaagaagagaaggagacctgatagtcgccagtatcagacttag

SEQ ID NO: 70617 - DNA, 522 bp, Artificial Sequence
  derived and/or modified sequence
ggaggctgttcccaatacttacttttgttcgtggatgacgccggcaagatcgaacacgacggctcgtccggaatgaccatggacacggaatccgaaatcgacccctgtaaggttgacggtacatgccctgaagtgatcaaagtttacatcttcaaggctgatcccggggaagacgaccttggaggcacagtggatatcgtcgaaagtgaaccggagaacgaccatggcgtcgagctgctcgaccagaacagcagtatcagagttccgagagagaagatggtatacatgacagtcaacgacagccaacccgaggatgaggatttgaatgtggcggagatcgctgatgaggtctacatggaggtgatcgtgggcgaggaagatgccgcagccgcagcggcagccgccgcagtccacgagcagcaaatggacgataatgaaatcaaaacctttatgccaattgcctgggccgccgcttacgggaacaactcagacggcattgagaatcgcaacgggacggcatag

SEQ ID NO: 70618 - DNA, 99 bp, Artificial Sequence
  derived and/or modified sequence
atggatgaagatggcctggagctgcagcaggagcccaacagcttctttgatgccactggagcagatggcacccacatggatggagaccagatcgtgtag

SEQ ID NO: 70619 - DNA, 408 bp, Artificial Sequence
  derived and/or modified sequence
atggatgaagatggcctggagctgcagcaggagcccaacagcttctttgatgccactggagcagatggcacccacatggatggagaccagatcgtggtggaggtgcaggagaccgtgtttgtgtctgatgtggtggacagcgacatcaccgtgcacaactttgtgcctgatgatcctgattctgtggtgatccaggatgtgattgaagatgtggtgattgaagatgtgcagtgcccagacatcatggaggaggctgatgtgtctgagaccgtcatcatccctgagcaggtgctggacagtgatgtgacagaggaggtgtccctggcccactgcaccgtgcctgatgatgtgctggccagtgacatcaccagcgcctccatgtccatgcctgagcacgtgctgacctag

SEQ ID NO: 70620 - DNA, 789 bp, Artificial Sequence
  derived and/or modified sequence
atggatgaagatggcctggagctgcagcaggagcccaacagcttctttgatgccactggagcagatggcacccacatggatggagaccagatcgtggtggaggtgcaggagaccgtgtttgtgtctgatgtggtggacagcgacatcaccgtgcacaactttgtgcctgatgatcctgattctgtggtgatccaggatgtgattgaagatgtggtgattgaagatgtgcagtgcccagacatcatggaggaggctgatgtgtctgagaccgtcatcatccctgagcaggtgctggacagtgatgtgacagaggaggtgtccctggcccactgcaccgtgcctgatgatgtgctggccagtgacatcaccagcgcctccatgtccatgcctgagcacgtgctgactggagacagcatccacgtgtctgatgtgggccacgtgggccacgtgggccacgtggagcacgtggtgcatgacagcgtggtggaggccgagatcgtgacagaccccctgaccacagatgtggtgtctgaggaggtgctggtggccgactgtgccagcgaggccgtgattgatgccaacggcatccctgtggaccagcaggatgatgacaagggcaactgtgaggactacctgatgatcagctgcaacaacagtgatggcattgaaaatagaaatggaacagccagcgccctgctgcacattgatgagagcgctggcctgggccgcctggccaagcagaagcccaagaagagaagaagaccagacagccggcagtaccagacctag

SEQ ID NO: 70621 - DNA, 522 bp, Artificial Sequence
  derived and/or modified sequence
gggggctgcagccagtacctgctgctgtttgtggatgatgctgggaagattgaacatgatggcagcagcggcatgaccatggacacagaaagtgaaattgacccctgcaaggtggatggcacctgcccagaggtgatcaaggtgtacatcttcaaggctgaccctggagaagatgacctgggcggcaccgtggacatcgtggagagcgagccagaaaatgaccatggagtggagctgctggaccagaacagcagcatccgggtgccccgggagaagatggtgtacatgacagtgaatgacagccagccagaagatgaggacctgaatgtggccgagattgctgatgaggtgtacatggaggtgattgtgggggaggaggatgctgctgctgctgctgctgctgctgctgtgcatgagcagcagatggatgacaatgagatcaagaccttcatgcccatcgcctgggccgccgcctacggcaacaacagtgatggcattgaaaatagaaatggaacagcctag

SEQ ID NO: 70622 - DNA, 99 bp, Artificial Sequence
  derived and/or modified sequence
atggacgaggacggcctggagctgcagcaggagcccaacagcttctttgatgctacaggggctgatgggacgcatatggatggcgaccagattgtttag

SEQ ID NO: 70623 - DNA, 408 bp, Artificial Sequence
  derived and/or modified sequence
atggacgaggacggcctggagctgcagcaggagcccaacagcttcttcgacgccacgggggccgacgggacccatatggatggcgatcagattgtcgttgaagtgcaggaaaccgttttcgtaagtgatgttgtggatagtgacatcacggttcacaatttcgtgcctgatgatccagatagtgtcgttattcaggatgtgatcgaagatgtggtgatcgaagacgttcagtgtccggacatcatggaagaagcggatgtatctgagactgtgattattccagagcaggtgctcgacagcgatgtcactgaagaagtgtctctggcccattgcacagtgccagacgatgtcctggcaagcgatatcacatcagcctcgatgtccatgcctgaacacgtgttgacctag

SEQ ID NO: 70624 - DNA, 789 bp, Artificial Sequence
  derived and/or modified sequence
atggacgaggacggcctggagctgcagcaggagcccaacagcttctttgatgctactggcgctgacggcacccacatggatggcgatcagattgttgtggaggtgcaggagaccgtatttgtctccgacgtcgtggatagtgatatcacagtgcacaattttgtcccggatgaccccgacagcgtcgtaatccaggacgtgattgaggatgtggtgattgaagatgtgcagtgccccgacatcatggaagaggccgatgtgagcgagaccgttatcataccggagcaggttctggattcggacgttaccgaggaggttagtctggctcactgtacagtgccagatgacgtcctggcctcagatattacatctgccagtatgagcatgcccgaacacgtcctgaccggcgacagcatccacgtgagcgacgtagggcacgtgggacatgttgggcatgtcgagcatgttgtgcatgacagtgtcgttgaggccgagatcgtgacagaccctctgaccactgatgtcgtgagtgaggaagtactggtcgccgactgtgcctcggaggctgtcatcgatgccaacggaattcctgtggatcagcaagacgacgataaaggaaactgtgaggactatctaatgatttcctgcaataattccgacggaatcgaaaatagaaacggcaccgccagcgcactgctccacattgacgagtctgcagggttaggccggcttgccaaacagaagcctaagaaacggaggcggcctgacagtcgccagtatcagacgtag

SEQ ID NO: 70625 - DNA, 522 bp, Artificial Sequence
  derived and/or modified sequence
ggcggctgcagccagtacctgctgctgttcgtggacgacgccggcaagatcgagcatgatggatcctcaggcatgaccatggatacggaaagcgaaatcgatccctgtaaggtggatggaacctgcccagaggtgatcaaagtgtacatctttaaagcagaccccggcgaggatgacttaggtgggacagttgatatcgtggagtccgaaccggagaacgatcacggggtcgagctgctggaccagaacagctcgataagggtccccagggaaaagatggtgtatatgacagtgaacgatagccagcccgaagacgaagatctcaacgttgctgaaatcgcagacgaagtatacatggaggtgatcgtgggggaagaagatgccgccgctgcggctgcagccgcagcagtccacgaacaacagatggatgacaatgaaatcaagacctttatgccaatcgcctgggctgcagcgtacggcaacaactctgacggcatcgagaatcgcaacggaaccgcttag

SEQ ID NO: 70626 - DNA, 99 bp, Artificial Sequence
  derived and/or modified sequence
atggacgaggatggtctggaattacagcaggaacccaactctttctttgatgcaactggcgcagacgggactcacatggatggggaccaaattgtttag

SEQ ID NO: 70627 - DNA, 408 bp, Artificial Sequence
  derived and/or modified sequence
atggatgaggacggcctcgagcttcagcaggaacctaacagtttctttgacgccaccggtgccgacggcacccacatggacggggatcagatcgtagtggaggtgcaggagacagtcttcgtgtccgatgttgtggatagtgatatcacagttcataattttgttccagacgacccggactccgtcgttatacaggacgtaattgaagatgtcgttatcgaagacgtccagtgtcccgatattatggaggaggccgatgtcagcgagactgtgattattccggagcaagtgctggactcagatgttaccgaggaagtaagtctggcacattgtacggtgcccgatgatgtcttggcaagtgacatcacatccgcttccatgagtatgccagagcatgtccttacatag

SEQ ID NO: 70628 - DNA, 789 bp, Artificial Sequence
  derived and/or modified sequence
atggacgaggatgggcttgaactacaacaggagcctaacagctttttcgatgcgaccggagcagacggcactcatatggacggtgaccagatcgtggtggaggtgcaggagaccgtgtttgtttctgacgttgtagatagcgatattaccgtgcataactttgtgccagatgatcccgatagtgtcgttattcaggacgtcattgaggacgttgtcatcgaagacgttcaatgcccagacataatggaagaggccgacgttagtgaaacagttatcatcccagaacaggttctggatagcgacgttaccgaggaagttagtctagcccactgtaccgtccctgatgatgtcctcgctagtgatataactagtgccagcatgtcaatgcctgagcacgtgctcacaggtgatagtatacacgtatcagatgttggtcatgtggggcacgttggccatgtcgagcacgtagtccacgactccgtggtcgaagccgagatcgtgactgatcctttgacgaccgacgtcgtgagcgaggaagtgttggtcgccgactgtgcatcagaagccgtgatagacgcaaacggtatcccagtggaccaacaggacgatgataaagggaattgtgaggactatttgatgatttcatgcaacaattcagatgggatcgaaaatcgcaatggaacggccagcgcccttctgcacattgatgaatcggcagggctgggacgtctagcaaaacagaaacccaagaagcgcagacgccctgacagccggcaataccaaacctag

SEQ ID NO: 70629 - DNA, 522 bp, Artificial Sequence
  derived and/or modified sequence
gggggatgcagtcaatacctgctactgttcgtggatgacgcgggaaagatcgaacacgatggctcatccggaatgactatggatacagaatctgagatagatccatgcaaagtggatggtacatgccctgaggtgatcaaggtgtacatctttaaagctgatccaggcgaagatgatctgggcggtacagtggatatagttgagagcgaacctgaaaacgatcacggcgtggaattactggaccagaatagttccatccgcgttcccagagaaaagatggtctacatgactgtcaacgatagtcaacctgaagacgaggacctcaatgtcgccgaaattgccgatgaggtttatatggaagtcatagtcggtgaggaggatgctgcagcagcagccgctgccgctgccgttcacgaacaacagatggatgataacgaaatcaaaactttcatgccgattgcgtgggctgctgcttacggcaacaatagcgacgggattgagaaccgaaatgggaccgcgtag

SEQ ID NO: 70630 - DNA, 300 bp, Artificial Sequence
  derived and/or modified sequence
agtgctccagagaaaggccggcctgcagcacccgccaccgtcgccggccgcccgcacgtccgtccgctgggaaagacatagaagaactattaagaagatagaattgttttgctgcgcagtacagcaacagtggatgttcaagattaagattagagtcaagttgtgtgattaagacaggagctgtgactgatgagaattaaaggccatggatgaagatgggcttgaattacaacaagagccaaactcattttttgatgcaacaggagctgatggtacacacatggatggtgatcaaattgt

SEQ ID NO: 70631 - DNA, 600 bp, Artificial Sequence
  derived and/or modified sequence
gacggcgggcccgtgccggggagctgggccgctttttgtcagctccgagctcggcccctcctccctccctccgcccgccccaccagccggagcccggcccagtgctccagagaaaggccggcctgcagcacccgccaccgtcgccggccgcccgcacgtccgtccggagctgtgactgatgagaattaaaggccatggatgaagatgggcttgaattacaacaagagccaaactcattttttgatgcaacaggagctgatggtacacacatggatggtgatcaaattgttgtggaagtacaagaaactgtttttgtttcagatgttgtggattcagacataactgtgcataactttgttcctgatgacccagattcagttgtaatccaagatgttattgaggacgttgttatagaagatgttcagtgcccagatatcatggaagaagcagatgtgtctgaaacggtcatcattcctgagcaagtgctggactcagatgtaactgaagaagtttctttagcacattgcacagtcccagatgatgttttagcttctgacattacttcagcctcaatgtctatgccagaacacgtcttgacgg

SEQ ID NO: 70632 - protein, 557 aa, Artificial Sequence
  derived and/or modified sequence
MPPPRLLFFLLFLTPMEVRPEEPLVVKVEEGDNAVLQCLKGTSDGPTQQLTWSRESPLKPFLKLSLGLPGLGIHMRPLAIWLFIFNVSQQMGGFYLCQPGPPSEKAWQPGWTVNVEGSGELFRWNVSDLGGLGCGLKNRSSEGPSSPSGKLMSPKLYVWAKDRPEIWEGEPPCLPPRDSLNQSLSQDLTMAPGSTLWLSCGVPPDSVSRGPLSWTHVHPKGPKSLLSLELKDDRPARDMWVMETGLLLPRATAQDAGKYYCHRGNLTMSFHLEITARPVLWHWLLRTGGWKVSAVTLAYLIFCLCSLVGILHLQRALVLRRKRKRMTDPTRRFFKVTPPPGSGPQNQYGNVLSLPTPTSGLGRAQRWAAGLGGTAPSYGNPSSDVQADGALGSRSPPGVGPEEEEGEGYEEPDSEEDSEFYENDSNLGQDQLSQDGSGYENPEDEPLGPEDEDSFSNAESYENEDEELTQPVARTMDFLSPHGSAWDPSREATSLAGSQSYEDMRGILYAAPQLRSIRGQPGPNHEEDADSYENMDNPDGPDPAWGGGGRMGTWSTR

SEQ ID NO: 70633 - DNA, 1674 bp, Artificial Sequence
  derived and/or modified sequence
atgcctcctcctcggctgctttttttcctcctgtttttgacacctatggaggtgagacctgaggagcctctcgtcgttaaggtagaagagggagacaacgcagtgctccagtgtttaaaggggacctccgacggcccaacacagcagctcacttggtctagggaaagccccctgaaaccattcctgaagctcagcctgggtttgcccggtctgggcatccatatgaggccattggcaatctggctttttatcttcaatgttagccagcagatggggggcttctacctgtgccaaccggggcctccaagcgagaaggcctggcagcccggatggactgtgaacgttgaaggttccggcgaactcttccggtggaacgtttccgatctgggagggttaggctgcgggctcaaaaaccgttcttcagagggccctagttcaccatcggggaagttgatgtctccgaagctgtacgtttgggctaaagatcgccccgagatctgggagggagaaccaccttgcctccccccccgggacagccttaatcagtcactgagccaggatctgacaatggctcctgggtccaccttgtggttgagctgtggagtaccccccgacagtgtgagtagaggcccgctcagctggacccacgtgcatcccaagggtcccaagtcactcctgtcgctggagttaaaagatgaccgcccggcacgcgacatgtgggttatggaaacgggcctacttctgccacgggccacagctcaggacgcgggcaaatattactgtcaccgtggaaacctcacaatgtcctttcacctggagattacagcgcgcccagtgctctggcactggcttttgcgaacgggcggatggaaagtgtcagctgtgactcttgcgtacttgatattctgcctttgttccctcgttggcattctgcacctgcagcgcgctctcgttctgagacggaaaagaaagaggatgaccgatccaacccggcggttctttaaggtcactccaccgccaggatcgggcccacaaaaccagtacggtaacgtgctcagcctacccacacccacctctggtctcggtcgcgcccagaggtgggcggccggactcggaggaactgccccttcttatggtaaccccagcagtgatgtccaggccgatggcgccttgggctcaagaagccctcctggggtgggtccggaggaagaagagggtgagggctatgaggaacctgactcagaagaagattctgaattttacgaaaatgacagcaatctgggacaggatcagctttcccaggatggatcaggatacgagaacccggaggatgaaccgctgggcccagaagacgaagactccttcagtaatgcagagtcttacgaaaacgaggacgaagaactgacacagcctgtggcccgtactatggatttcctgagtccccatggctccgcttgggatccatcccgggaggcaactagtctggctggtagtcagtcgtacgaagatatgagaggtatcctgtatgccgccccccaattaagatccatccgcgggcagccgggccccaaccacgaggaggacgccgatagttacgagaacatggataacccggatggtcctgacccggcgtggggcggcggcggacgtatgggaacttggtctacccgctag

SEQ ID NO: 70634 - DNA, 1674 bp, Artificial Sequence
  derived and/or modified sequence
atgcccccaccccggctgctcttcttcctgctcttcctgacccccatggaggtgcggcctgaggagcccctggtggtgaaggtggaggagggggacaatgctgtgctgcagtgcctgaagggcaccagtgatggccccacccagcagctgacctggagccgggagagccccctgaagcccttcctgaagctgagcctgggcctgcccggcctgggcatccacatgaggcccctggccatctggctgttcatcttcaacgtgtcccagcagatgggcggcttctacctgtgccagcccggccccccatctgagaaggcctggcagcccggctggacagtgaatgtggagggcagcggggagctgttccgctggaatgtgtctgacctgggcggcctgggctgcggcctgaagaacagaagcagcgagggccccagcagccccagcggcaagctgatgagccccaagctgtatgtgtgggccaaggacaggcctgagatctgggagggggagcccccctgcctgcccccccgggacagcctgaaccagagcctgagccaggacctgaccatggcccctggcagcaccctgtggctgagctgtggggtgcccccagacagcgtgtcccggggccccctgtcctggacccacgtgcaccccaagggccccaagagcctgctgagcctggagctgaaggatgacaggcctgcccgggacatgtgggtgatggagaccggcctgctgctgccccgggccacagcccaggatgctgggaagtactactgccaccggggcaacctgaccatgtccttccacctggagatcacagcccggcctgtgctgtggcactggctgctgaggactggaggctggaaggtgtctgctgtgaccctggcctacctgatcttctgcctgtgcagcctggtgggcatcctgcacctgcagagggccctggtgctgcggaggaagaggaagaggatgacagaccccacccggcgcttcttcaaggtgaccccacctcctggcagcggcccccagaaccagtatggaaatgtgctgagcctgcccacccccaccagcggcctgggccgggcccagcgctgggccgccggcctgggcggcacagcccccagctatggcaaccccagcagtgatgtgcaggctgatggagccctgggcagccgcagccccccaggagtgggccctgaggaggaggagggggagggctatgaggagccagacagcgaggaggacagcgagttctatgaaaatgacagcaacctgggccaggaccagctgagccaggacggcagcggctatgagaacccagaagatgagcccctgggcccagaagatgaggacagcttcagcaatgctgagagctatgaaaatgaagatgaggagctgacccagcctgtggcccggaccatggacttcctgagcccccacggcagcgcctgggaccccagccgggaggccaccagcctggccggcagccagagctatgaggacatgaggggcatcctgtatgctgccccccagctgcggagcatccggggccagcccggccccaaccatgaagaagatgctgacagctatgagaacatggacaacccagatggccctgaccctgcctggggcggcggcggccgcatgggcacctggagcaccaggtag

SEQ ID NO: 70635 - DNA, 1674 bp, Artificial Sequence
  derived and/or modified sequence
atgccccccccccggctgctgttcttcctgctgttcctgacccccatggaagtccggcctgaggagcccctggtggtgaaggtggaagagggtgacaacgcggtgctgcaatgcctgaaagggaccagcgatggacccacccagcagctgacatggagcagggagagtcctctgaaacccttccttaaactcagtctgggcttgccaggcctcggcatacatatgaggcctcttgcgatatggctattcatctttaacgtgagccagcagatggggggattctatctgtgccaaccggggccaccatcagagaaggcatggcagcctggctggaccgtcaatgttgaagggtcaggcgagctatttcgatggaacgtgtctgacctgggcgggctcggctgcggactcaagaacaggtccagcgaaggccctagcagcccatccggaaagctgatgtcccccaagctgtatgtgtgggccaaagataggccagaaatttgggagggcgagccaccatgcctcccgccacgcgactctctcaatcagtcactatcgcaggatctcaccatggcacccgggtccaccctctggctctcgtgcggagtccctcctgattctgtttctaggggtcccctctcatggacccacgtgcatccgaagggccctaagtcactgttatcccttgagttgaaggacgacaggcccgcccgcgacatgtgggtgatggaaacaggtctgctgctgccacgggcaacggcccaggatgcaggaaagtattactgtcatcggggcaacctcaccatgtccttccacttagagatcacggcacgtcctgttctgtggcactggctgctgcgcacaggcgggtggaaagtgagtgccgtgaccttagcttatctgatcttttgcctctgcagcctcgtgggaatattacatctgcagagagccctggtgttgcgaaggaaacggaagcgcatgacagatcccacgcgccgcttctttaaggttacaccaccgcccggatcaggcccgcagaatcaatatggcaacgtgctttccttgccgacacccacttctggcctgggcagagcccaacggtgggccgcagggctgggtgggactgctccgagctacggtaatccatcaagcgacgtgcaggctgatggggctcttggaagtagatcccctcctggtgtgggtcccgaagaggaagagggtgagggatatgaggagcccgacagcgaggaggactccgagttttatgagaacgatagcaacttagggcaggatcagctgtctcaggatggctcaggctatgaaaaccccgaggacgaacccctcgggcctgaagacgaggattccttctcgaatgctgagtcatacgagaatgaggacgaagaattaacccaaccagtagctcggactatggatttcttgagtccccatggctccgcatgggatccctcaagagaggccaccagtctcgccggctctcagtcttacgaggatatgagagggattctctacgctgcccctcaattgcgctccattcgtggccagcctggtccaaatcatgaggaggacgctgactcctacgaaaatatggataaccccgacggtcccgaccccgcttggggtgggggcggtaggatgggcacatggagtacgaggtag

SEQ ID NO: 70636 - DNA, 1674 bp, Artificial Sequence
  derived and/or modified sequence
atgccaccaccgcgactgttgttctttttgctgtttcttactccaatggaggtgaggccagaggaacctcttgttgtaaaagttgaagagggagataacgctgtgcttcagtgtctgaagggaacttccgacggacctacacagcaactcacgtggagccgcgagtctcctcttaaaccattcttaaagttgtcccttggcctgcctggactagggatacacatgagacctctggcaatctggctgttcatctttaatgtgagccagcagatgggaggtttctacctgtgccagcccggacccccttctgagaaagcttggcagcccggatggaccgtgaatgtcgaaggaagcggggaactctttcgctggaatgtatccgacctaggaggtctcgggtgtggactgaaaaatcggtcatccgaaggacccagttcacccagtgggaaactgatgagtcctaagctctatgtgtgggcaaaagatcgccctgaaatatgggagggcgagcccccatgcctacctccacgcgattcattgaatcaaagcttgtcccaggacttgacgatggcccctggaagtaccctatggttgtcctgcggcgtgcccccagactccgtttccaggggaccactgtcgtggacgcacgtgcaccctaaaggtcctaagtctctgctcagtcttgagcttaaagatgaccgccctgccagggacatgtgggtgatggagaccggcctgctgctgcctagggccactgcccaggatgcaggtaaatattactgccaccggggaaatttaacaatgtcctttcacctagagattaccgccaggccggtcctctggcactggctgctgcgaactgggggttggaaagtttccgcagtgaccctggcttaccttatattctgtctgtgcagcctggtgggcatcctgcatctgcagagggccttggtattgaggagaaagcgcaaaaggatgacagaccctacccggagattcttcaaggtgacacccccacccggaagtggccctcagaatcagtatgggaatgtgttgtcgctgcccacacccacctcgggcctcggacgagcccagagatgggcagccggactgggcggtacagcgccaagctacggtaatccgtcatcggacgtgcaagccgatggagcactgggctctaggtcaccgccaggggtcgggccagaggaagaggaaggggagggctatgaggaaccagatagcgaggaggattccgaattctatgaaaatgactctaatctgggtcaggatcaactttcacaggacggatctggatatgagaatcctgaagacgagccactggggccagaggatgaagacagcttcagcaacgctgaaagctatgagaacgaggacgaggaactcacacaacccgtcgctagaacaatggattttcttagtccacacggcagcgcatgggatccttcaagggaggccacgagtctggccggaagccagagttacgaagatatgcgagggatcctctatgcggctcctcagcttagatccattagaggacagcctgggccaaaccatgaagaggacgcagattcatatgagaatatggacaatcctgacggcccagatccagcctgggggggagggggtcgcatggggacatggtcaaccaggtag

SEQ ID NO: 70637 - DNA, 1957 bp, Artificial Sequence
  derived and/or modified sequence
aggcccctgcctgccccagcatcccctgcgcgaagctgggtgccccggagagtctgaccaccatgccacctcctcgcctcctcttcttcctcctcttcctcacccccatggaagtcaggcccgaggaacctctagtggtgaaggtggaagagggagataacgctgtgctgcagtgcctcaaggggacctcagatggccccactcagcagctgacctggtctcgggagtccccgcttaaacccttcttaaaactcagcctggggctgccaggcctgggaatccacatgaggcccctggccatctggcttttcatcttcaacgtctctcaacagatggggggcttctacctgtgccagccggggcccccctctgagaaggcctggcagcctggctggacagtcaatgtggagggcagcggggagctgttccggtggaatgtttcggacctaggtggcctgggctgtggcctgaagaacaggtcctcagagggccccagctccccttccgggaagctcatgagccccaagctgtatgtgtgggccaaagaccgccctgagatctgggagggagagcctccgtgtctcccaccgagggacagcctgaaccagagcctcagccaggacctcaccatggcccctggctccacactctggctgtcctgtggggtaccccctgactctgtgtccaggggccccctctcctggacccatgtgcaccccaaggggcctaagtcattgctgagcctagagctgaaggacgatcgcccggccagagatatgtgggtaatggagacgggtctgttgttgccccgggccacagctcaagacgctggaaagtattattgtcaccgtggcaacctgaccatgtcattccacctggagatcactgctcggccagtactatggcactggctgctgaggactggtggctggaaggtctcagctgtgactttggcttatctgatcttctgcctgtgttcccttgtgggcattcttcatcttcaaagagccctggtcctgaggaggaaaagaaagcgaatgactgaccccaccaggagattcttcaaagtgacgcctcccccaggaagcgggccccagaaccagtacgggaacgtgctgtctctccccacacccacctcaggcctcggacgcgcccagcgttgggccgcaggcctggggggcactgccccgtcttatggaaacccgagcagcgacgtccaggcggatggagccttggggtcccggagcccgccgggagtgggcccagaagaagaggaaggggagggctatgaggaacctgacagtgaggaggactccgagttctatgagaacgactccaaccttgggcaggaccagctctcccaggatggcagcggctacgagaaccctgaggatgagcccctgggtcctgaggatgaagactccttctccaacgctgagtcttatgagaacgaggatgaagagctgacccagccggtcgccaggacaatggacttcctgagccctcatgggtcagcctgggaccccagccgggaagcaacctccctggcagggtcccagtcctatgaggatatgagaggaatcctgtatgcagccccccagctccgctccattcggggccagcctggacccaatcatgaggaagatgcagactcttatgagaacatggataatcccgatgggccagacccagcctggggaggagggggccgcatgggcacctggagcaccaggtgatcctcaggtggccagcctggatctcctcaagtccccaagattcacacctgactctgaaatctgaagacctcgagcagatgatgccaacctctggagcaatgttgcttaggatgtgtgcatgtgtgtaagtgtgtgtgtgtgtgtgtgtgtgtatacatgccagtgacacttccagtcccctttgtattccttaaataaactcaatgagctcttccaatcct

SEQ ID NO: 70638 - DNA, 1674 bp, Artificial Sequence
  derived and/or modified sequence
atgcccccccccagactgctgttcttcctgctgttcctgacccccatggaggtgagacccgaggagcccctggtggtgaaggtggaggagggcgacaacgccgtgctgcagtgcctgaagggcaccagcgacggccccacccagcagctgacctggagcagagagagccccctgaagcccttcctgaagctgagcctgggcctgcccggcctgggcatccacatgagacccctggccatctggctgttcatcttcaacgtgagccagcagatgggcggcttctacctgtgccagcccggcccccccagcgagaaggcctggcagcccggctggaccgtgaacgtggagggcagcggcgagctgttcagatggaacgtgagcgacctgggcggcctgggctgcggcctgaagaacagaagcagcgagggccccagcagccccagcggcaagctgatgagccccaagctgtacgtgtgggccaaggacagacccgagatctgggagggcgagcccccctgcctgccccccagagacagcctgaaccagagcctgagccaggacctgaccatggcccccggcagcaccctgtggctgagctgcggcgtgccccccgacagcgtgagcagaggccccctgagctggacccacgtgcaccccaagggccccaagagcctgctgagcctggagctgaaggacgacagacccgccagagacatgtgggtgatggagaccggcctgctgctgcccagagccaccgcccaggacgccggcaagtactactgccacagaggcaacctgaccatgagcttccacctggagatcaccgccagacccgtgctgtggcactggctgctgagaaccggcggctggaaggtgagcgccgtgaccctggcctacctgatcttctgcctgtgcagcctggtgggcatcctgcacctgcagagagccctggtgctgagaagaaagagaaagagaatgaccgaccccaccagaagattcttcaaggtgacccccccccccggcagcggcccccagaaccagtacggcaacgtgctgagcctgcccacccccaccagcggcctgggcagagcccagagatgggccgccggcctgggcggcaccgcccccagctacggcaaccccagcagcgacgtgcaggccgacggcgccctgggcagcagaagcccccccggcgtgggccccgaggaggaggagggcgagggctacgaggagcccgacagcgaggaggacagcgagttctacgagaacgacagcaacctgggccaggaccagctgagccaggacggcagcggctacgagaaccccgaggacgagcccctgggccccgaggacgaggacagcttcagcaacgccgagagctacgagaacgaggacgaggagctgacccagcccgtggccagaaccatggacttcctgagcccccacggcagcgcctgggaccccagcagagaggccaccagcctggccggcagccagagctacgaggacatgagaggcatcctgtacgccgccccccagctgagaagcatcagaggccagcccggccccaaccacgaggaggacgccgacagctacgagaacatggacaaccccgacggccccgaccccgcctggggcggcggcggcagaatgggcacctggagcaccagatag

SEQ ID NO: 70639 - protein, 198 aa, Artificial Sequence
  derived and/or modified sequence
MRPRLWLLLAAQLTVLHGNSVLQQTPAYIKVQTNKMVMLSCEAKISLSNMRIYWLRQRQAPSSDSHHEFLALWDSAKGTIHGEEVEQEKIAVFRDASRFILNLTSVKPEDSGIYFCMIVGSPELTFGKGTQLSVVDFLPTTAQPTKKSTLKKRVCRLPRPETQKGLKGKVYQEPLSPNACMDTTAILQPHRSCLTHGS

SEQ ID NO: 70640 - DNA, 597 bp, Artificial Sequence
  derived and/or modified sequence
atgcgcccccggttgtggctgttgctcgccgctcagcttacagtcctgcacggcaacagcgtgttgcagcagactcccgcttatatcaaggtacagacgaataagatggtcatgttgtcttgcgaggccaaaattagtctcagtaatatgaggatttactggctccgccagcgacaggcaccctcgagcgactcccaccacgagttcctcgctctgtgggattccgctaagggtacaatccacggggaagaggtcgaacaggagaagatagccgtttttagagatgccagccgatttatccttaacttgacttcagtaaaacctgaagacagtggcatatacttctgcatgatcgtcggcagtccagagttgactttcggaaagggcacacaactgtcagtcgtagatttcctgcctactaccgctcagccaacaaagaagtccactttgaagaaacgcgtgtgtcggctgccgcgccccgagacacagaaaggattgaagggcaaagtctatcaggaacccttgagccccaacgcatgcatggacacgaccgctatcctgcaaccccacaggagttgcctgacccacggtagttag

SEQ ID NO: 70641 - DNA, 597 bp, Artificial Sequence
  derived and/or modified sequence
atgaggccccggctgtggctgctgctggccgcccagctgactgtgctgcacggcaacagcgtgctgcagcagaccccagcctacatcaaggtgcagaccaacaagatggtgatgctgagctgtgaggccaagatcagcctgagcaacatgaggatctactggctgcggcagaggcaggcccccagcagtgacagccaccacgagttcctggccctgtgggacagcgccaagggcaccatccatggagaggaggtggagcaggagaagattgctgtgttcagagatgccagccgcttcatcctgaacctgacctctgtgaagccagaagattctggcatctacttctgcatgattgtgggcagccctgagctgaccttcggcaagggcacccagctgtctgtggtggacttcctgcccaccacagcccagcccaccaagaagagcaccctgaagaagagggtgtgccgcctgcccaggcctgagacccagaagggcctgaagggcaaggtgtaccaggagcccctgagccccaatgcctgcatggacaccacagccatcctgcagccccacaggagctgcctgacccacggcagctag

SEQ ID NO: 70642 - DNA, 597 bp, Artificial Sequence
  derived and/or modified sequence
atgcggccccggctgtggctgctgctggccgcccagctgaccgtgttgcatgggaactcggtgctgcaacagacccccgcatatatcaaagtgcagacaaataaaatggtaatgttatcttgcgaggccaagatctctctgagcaacatgcgcatctactggctacggcaacgccaggccccctcatctgactcgcaccatgagttcctcgcactgtgggactctgctaaaggaactatccacggggaagaggtcgaacaagagaagatcgccgtttttagggatgcttctaggtttatccttaatttaacatctgtgaagcccgaggattcaggtatctacttctgtatgatagtcggatcccctgaactgacattcggtaaaggaacacagctaagtgtagtggacttccttccaaccaccgcccaacccacaaaaaagtctactttgaagaagagggtttgccgcctgccacggccagagactcagaaggggctgaaagggaaggtgtaccaggaacctctaagcccaaacgcctgcatggacaccactgctatcttgcagccacatcgctcttgcctaacccacggtagttag

SEQ ID NO: 70643 - DNA, 597 bp, Artificial Sequence
  derived and/or modified sequence
atgcggcctagactctggcttttgttggccgcacaactgaccgtactgcatggcaattccgtgctccagcagacgccagcctacatcaaggtccaaactaataagatggtgatgttgagttgtgaggctaagatcagcctctcaaatatgcgcatctattggctgaggcaacggcaggcgccatcttctgactcccaccacgagtttcttgccctttgggatagtgctaaggggacaatccatggggaggaagtggaacaagagaaaatcgccgtgttccgtgatgccagccggtttattttgaacttaactagcgtcaaacctgaagactccggtatctatttttgcatgatcgtcggatctcctgagcttactttcgggaagggcacgcagctgagcgtggtcgattttctgccaacgaccgctcagccaactaagaagagcacacttaagaagagggtgtgcagacttccacgaccagagacccagaagggcctcaagggcaaggtgtatcaagaacccttatcacccaacgcctgtatggacacaaccgccatactgcagcctcacaggagctgcctaacccacggaagctag

SEQ ID NO: 70644 - DNA, 932 bp, Artificial Sequence
  derived and/or modified sequence
accccagccgcgactgtctccgccgagcccccggggccaggtgtcccgggcgcgccacgatgcggccgcggctgtggctcctcttggccgcgcagctgacagttctccatggcaactcagtcctccagcagacccctgcatacataaaggtgcaaaccaacaagatggtgatgctgtcctgcgaggctaaaatctccctcagtaacatgcgcatctactggctgagacagcgccaggcaccgagcagtgacagtcaccacgagttcctggccctctgggattccgcaaaagggactatccacggtgaagaggtggaacaggagaagatagctgtgtttcgggatgcaagccggttcattctcaatctcacaagcgtgaagccggaagacagtggcatctacttctgcatgatcgtcgggagccccgagctgaccttcgggaagggaactcagctgagtgtggttgatttccttcccaccactgcccagcccaccaagaagtccaccctcaagaagagagtgtgccggttacccaggccagagacccagaagggcctcaaggggaaggtatatcaggaacctttgtcccccaatgcctgcatggatactacagcaatactacaacctcacagaagctgcttaacccatggatcctgaaaacataggcaagaagcacaggtcctgatgagtggatctttactacttttaccagattcctccctcgctcagagggatcctcccacacacccagcagagacttctctgccaccatcaaccccccaagtcatagggggctcaagttctgccctggtgagctgtggcccccatccttgtgaaccccaaagtgtcccccttgtggaaccaaatgtatccatcttgaataaatttgcccaaaatcctaaagaccgggaaaagggaaccattgagcttggc

SEQ ID NO: 70645 - DNA, 597 bp, Artificial Sequence
  derived and/or modified sequence
atgagacccagactgtggctgctgctggccgcccagctgaccgtgctgcacggcaacagcgtgctgcagcagacccccgcctacatcaaggtgcagaccaacaagatggtgatgctgagctgcgaggccaagatcagcctgagcaacatgagaatctactggctgagacagagacaggcccccagcagcgacagccaccacgagttcctggccctgtgggacagcgccaagggcaccatccacggcgaggaggtggagcaggagaagatcgccgtgttcagagacgccagcagattcatcctgaacctgaccagcgtgaagcccgaggacagcggcatctacttctgcatgatcgtgggcagccccgagctgaccttcggcaagggcacccagctgagcgtggtggacttcctgcccaccaccgcccagcccaccaagaagagcaccctgaagaagagagtgtgcagactgcccagacccgagacccagaagggcctgaagggcaaggtgtaccaggagcccctgagccccaacgcctgcatggacaccaccgccatcctgcagccccacagaagctgcctgacccacggcagctag

SEQ ID NO: 70646 - protein, 330 aa, Artificial Sequence
  derived and/or modified sequence
  misc_feature (1)..(1): Xaa can be any naturally occurring amino acid
XSEMAARDELGLGGDSLEAMPVPAARGRPRITNGPEELAAPSPAALADYEGKDVATRVGEAWQERPGAPRGGQGDPAVPAQQPADPSTPERQSSPSGSEQLVRRESCGSSVLTDFEGKDVATKVGEAWQDRPGAPRGGQGDPAVPTQQPADPSTPEQQNSPSGSEQFVRRESCTSRVRSPSSCMVTVTVTATSEQPHIYIPAPASELDSSSTTKGILFVKEYVNASEVSSGKPVSARYSNVSSIEDSFAMEKKPPCGSTPYSERTTGGICTYCNREIRDCPKITLEHLGICCHEYCFKCGICSKPMGDLLDQIFIHRDTIHCGKCYEKLF

SEQ ID NO: 70647 - DNA, 993 bp, Artificial Sequence
  derived and/or modified sequence
tgaagcgagatggccgccagagacgagctgggcctgggcggcgacagcctggaggccatgcccgtgcccgccgccagaggcagacccagaatcaccaacggccccgaggagctggccgcccccagccccgccgccctggccgactacgagggcaaggacgtggccaccagagtgggcgaggcctggcaggagagacccggcgcccccagaggcggccagggcgaccccgccgtgcccgcccagcagcccgccgaccccagcacccccgagagacagagcagccccagcggcagcgagcagctggtgagaagagagagctgcggcagcagcgtgctgaccgacttcgagggcaaggacgtggccaccaaggtgggcgaggcctggcaggacagacccggcgcccccagaggcggccagggcgaccccgccgtgcccacccagcagcccgccgaccccagcacccccgagcagcagaacagccccagcggcagcgagcagttcgtgagaagagagagctgcaccagcagagtgagaagccccagcagctgcatggtgaccgtgaccgtgaccgccaccagcgagcagccccacatctacatccccgcccccgccagcgagctggacagcagcagcaccaccaagggcatcctgttcgtgaaggagtacgtgaacgccagcgaggtgagcagcggcaagcccgtgagcgccagatacagcaacgtgagcagcatcgaggacagcttcgccatggagaagaagcccccctgcggcagcaccccctacagcgagagaaccaccggcggcatctgcacctactgcaacagagagatcagagactgccccaagatcaccctggagcacctgggcatctgctgccacgagtactgcttcaagtgcggcatctgcagcaagcccatgggcgacctgctggaccagatcttcatccacagagacaccatccactgcggcaagtgctacgagaagctgttctag

SEQ ID NO: 70648 - DNA, 993 bp, Artificial Sequence
  derived and/or modified sequence
tagtctgagatggcagcccgggatgagctcggtctcggcggagactcacttgaggctatgcccgttcccgctgctaggggaagacctagaatcactaacgggcccgaggagctcgcggctccgtctcccgctgctcttgctgactatgagggaaaagacgtcgccactcgcgttggcgaggcctggcaagagagacctggggcccctcggggtggccagggcgaccccgctgtgccagcccagcagccggccgacccctctactcctgagcggcaaagttctccgtctggcagcgaacaactggtgcgaagagaatcttgcggatcaagtgtgctcaccgactttgagggaaaggacgtagccacaaaagtgggcgaagcctggcaggacaggccgggagccccccggggcgggcagggggatcccgccgtgccgacacagcagcctgccgacccctccacacccgaacaacagaactcaccttcgggatctgagcagtttgtgagaagagagagttgcacctcgagagtgaggagcccgtctagttgtatggtcacagtgaccgtgaccgccacgtctgaacaacctcatatttacataccagcaccagcgagtgaacttgattcctcctccacaaccaaggggattctcttcgtgaaagaatatgttaacgccagtgaggtgtcatctggcaaacctgtgtccgctaggtattcaaacgtctcatccatcgaagattcttttgctatggagaagaaacctccttgtggcagcacaccctacagtgagaggaccacaggaggtatttgcacttactgcaatcgcgagatccgcgactgccctaagattaccctggagcaccttggaatctgctgtcatgagtattgtttcaaatgcgggatttgtagcaaaccaatgggcgatctcctggaccagatctttatccaccgagacaccatacattgcggaaagtgctacgaaaagctgttttag

SEQ ID NO: 70649 - DNA, 993 bp, Artificial Sequence
  derived and/or modified sequence
tgaagtgagatggccgccagagatgagctgggcctgggcggggacagcctggaggccatgcctgtgcctgctgcccggggccggccccgcatcaccaatggacctgaggagctggccgcccccagccctgctgccctggccgactatgagggcaaggatgtggccaccagggtgggggaggcctggcaggagaggcctggggccccccggggcggccagggcgaccctgctgtgcctgcccagcagcctgctgaccccagcaccccagagcggcagagcagccccagcggcagcgagcagctggtgagaagagagagctgtggcagctctgtgctgacagactttgagggcaaggatgtggccaccaaggtgggggaggcctggcaggacaggcctggggccccccggggcggccagggcgaccctgctgtgcccacccagcagcctgctgaccccagcaccccagagcagcagaacagccccagcggcagcgagcagtttgtgagaagagagagctgcaccagccgggtgcgcagccccagcagctgcatggtgacagtgacagtgacagccaccagcgagcagccccacatctacatcccagccccagccagcgagctggacagcagcagcaccaccaagggcatcctgtttgtgaaggagtatgtgaatgccagcgaggtgagcagcggcaagcctgtgtctgcccgctacagcaatgtgagcagcattgaagattcttttgccatggagaagaagccaccctgtggcagcaccccctacagcgagaggaccaccggcggcatctgcacctactgcaaccgggagatccgggactgccccaagatcaccctggagcacctgggcatctgctgccacgagtactgcttcaagtgtggcatctgcagcaagcccatgggagacctgctggaccagatcttcatccaccgggacaccatccactgtgggaagtgctatgagaagctgttctag

SEQ ID NO: 70650 - DNA, 993 bp, Artificial Sequence
  derived and/or modified sequence
tgaagcgagatggccgcccgggacgagctgggcctgggcggcgactctcttgaagctatgccggtccccgccgccagaggcaggcctcgcatcactaacggccccgaagaattagcagctccctccccggctgccctagcagattacgaagggaaggatgtcgctaccagggtaggagaggcttggcaagagaggccgggtgccccgagaggtggacaaggagatcctgcagttcccgcccaacaaccagccgatccctccacgccagagcgacagtcatcgccctccgggtcagagcagcttgttaggcgggaaagctgcggttcaagtgtactgactgatttcgagggtaaggacgtggccaccaaggtgggggaggcttggcaggatagacctggcgctcccagggggggccagggggatcccgctgtccctacacaacagccagcagatccctccaccccagagcaacagaactctcctagcggctctgagcagtttgtcagacgcgaatcttgtactagtagagtaaggtcccctagcagttgcatggtgacagttactgtgacggcgaccagtgagcagccacacatttacatccccgcccccgctagcgagctggacagctccagtaccaccaaaggcatcctgtttgtgaaagagtacgtgaacgcaagtgaagtatcgtccggaaaacctgttagtgctaggtactctaatgtcagctcaattgaggattcctttgcaatggaaaaaaagccgccgtgtggaagtaccccatatagtgagcgaacaacgggcgggatctgtacatactgcaaccgagagatcagagattgccccaagatcaccctcgagcatctcggcatctgttgccacgagtactgcttcaaatgcggcatttgttcaaagcctatgggcgacctcttagaccagatttttattcaccgcgacacgattcactgcgggaagtgttatgagaagctgttctag

SEQ ID NO: 70651 - DNA, 993 bp, Artificial Sequence
  derived and/or modified sequence
tagagtgaaatggccgcacgggacgagctcgggcttgggggtgactctctggaggctatgcccgtgcccgcagcacgtgggagacctcgtatcactaatgggccagaggagttggccgcacctagtcccgctgccctcgcggattatgaggggaaagatgtggcaaccagggtgggtgaagcctggcaggaacgccctggagccccaagagggggacagggcgatccagcagtgccagcccagcaacctgctgatccttcaacaccagagagacagagcagcccatccggatcggaacaactggtccggagagaatcctgtgggtctagcgtcctgactgacttcgagggcaaagatgttgccacaaaagtcggtgaagcgtggcaggacagacccggtgcccctaggggcggacaaggagatcctgctgtgcccacacagcagcctgctgatccaagcaccccagaacaacaaaatagcccctcaggaagtgagcagttcgttagacgtgaaagttgcacatccagagttagatctccatccagctgtatggtgaccgtcacggtaactgcaacgagtgagcagccccacatttatatccccgcacctgcatcggaacttgatagttcctcaactactaaaggaatactgtttgtcaaagaatatgtcaacgcgagcgaagtctcctctgggaaaccagtgagcgccagatatagcaacgtcagttctatcgaagattcgttcgctatggaaaaaaagcctccatgcggaagcacaccatatagtgaacggaccacaggtggcatctgcacatactgcaacagagaaatcagggactgccctaagattactctcgagcacctaggcatttgctgccatgagtattgcttcaagtgtggcatttgctcaaaaccgatgggagaccttttggatcagatatttatacaccgcgacaccatccactgcggcaaatgttatgagaagctgttctag

SEQ ID NO: 70652 - DNA, 3191 bp, Artificial Sequence
  derived and/or modified sequence
aaagtgaaatggccgcccgggacgagctcggcctcggcggggattctcttgaggccatgcccgtgccggccgccagaggtcgcccgaggatcacgaatgggcccgaggagctggctgccccttcccccgcggccttggctgattatgaggggaaggatgtggccaccagggtcggagaggcctggcaggagaggcctggagctccaagaggtggccaaggagacccagctgtacccgctcagcaacctgcagatcccagcaccccagagcggcagagcagccccagcggatctgagcaacttgtcagacgagagagttgtggcagcagcgtgttgactgattttgaggggaaggatgtggccaccaaggtcggagaggcctggcaggacaggcctggagccccaagaggtggccaaggagacccagctgtacccactcagcaacctgcagatcccagtaccccagaacagcagaacagccccagcggatctgagcaattcgtcagacgagagagctgcaccagcagggtgaggagcccctcgagctgcatggtcactgttactgtcactgccacatctgagcagcctcacatttatattccagcccccgcaagtgaattggactccagctctaccaccaaagggattctcttcgtgaaggagtacgtgaatgctagtgaagtgtcttctgggaagccagtatctgcacgctatagcaacgtcagcagcattgaggactcattcgccatggagaagaagcctccatgtggcagcactccatactctgagaggacaactggagggatctgtacttactgcaaccgtgagatccgagactgtccaaagattaccctagaacatcttggtatctgctgccatgaatattgctttaagtgtgggatttgcagtaaaccgatgggcgatctcctggatcagatcttcattcaccgtgacaccattcactgtgggaaatgctatgagaagctcttctagcgaccccccaccgccaggctgatcagaagctgatgactcgtggacaaatttggctgtccccagttttgccccaagttgctgtctccccttccctcacctcctccctccctgtttgatttcttcatgcttttgcccttctcaagttgaagttgcatacatccaatatcgtatcttaatgatgctatgataattgcttgtgtgtgtagcttcttgtagcttagaaagcgctttatgcccatgatgtcatttcaggctcaaccaaagaggatcaaacaggaattccatcttggcttccctaagacagattggctttctaatgagtttaagtgggcagaagtgtagggttcagtgtgtcctgactcccttgaggcttataatgggccaagttgaagactgttgatgatccctggtgggtaaattgcagacatcaaatgctagggattggcataggctagtgtttagcttgtctatttgccatatctattttttttaaatttccatacacttgtaaaagtagttagttgcttttgattgagttatatagcagtttttcatttggtcttccactcacctttcactatatttgagtgttcccttacaggtatgttggcatgtgttggaaaatttacacaattaggtttaaattcagtaggatgtgattttaggatgctactgatcaaagtgatatctgtgtctgttggaatcttgatagctgattaatttgccctcaattctgctccctgaacttcacacataaatcttcccaagtgggttttagggtgtatagatcccagcaggattaaggaggtggaaaagcagctaacatttcttgaggctctaccacatagcaggcactgtcacagagtaatggcattaatccccataataatcctgtgaaggtgatattctcatcccatcttagacatgaggatattggaactcagagaggtggctattgcattgcgcagaacgctacagagcccatgctcttcccagagcagcacccacaaaagcaagcattgattttgtgctcagtgtgtgccaagcactgtgcagagggtacacagttcctgccaggttaacaccctcccttcaggcctcccaaaggcataggcttgcaaagagcagaaggtgtgaaatcacactcttcctctgggcatcctggatccctgaattatccccccccccatgaagtacttcaagggccaagctgcccctttccctcctctccgcccatgaaaatgcctccaaactgagatgctttcagctgagaacagatttgactcacagacattaccaaagaggagcttgtgaatccaggaaaagctccagggggctagctgatctgagcagagagctttcagtgacccattttcctgtctagactctgccttaagctagtggcaactgctggggccccaggtacttgggacatggaaactcgttggatggctgggcagatgtaagcctgtccatgcagtcagccgatcctctgctcaggttcagctggactctgccatctgtgggcccagcatcactctgtaagttccttgaaaggaagaacaaccttagagtatttctgatacaaaatgagggcctctgctcttgatttaattataaaatgtctacgtctttctccagtttctgagccctatgcacattggcttgtgggcttgttcttcctgccaaatgatcagagaggaacattccatttatttgtagtggatttcctctggagggcatgtacccacactaaataccaactgctcttcctcagctgtagtccccaacatcagacttggcacgtggtggacactaacacacaggcactcaatgaatgagtgaaggaaataaaagtcaccccgttggtgagaggtgctatccctgagtctcagtgcaggaccagtggatgaaaggcaaggtaaagaggcccaagataggctggcttcccccgttcaaggtatagtctgcctttaagggagttttagaaccaacatgcaagacattgaaagaaatcttgcaagagccattattgacttagatccaaaacagcctctctcatgtctaaaaaggcacagaattttgcagatctgaggaagagggatgcattacctttttgcttcttttcaattgcttagtgtttctaatcatacttaatccacactaatgtgcgcaattataataaatggtaagatatca

SEQ ID NO: 70653 - DNA, 993 bp, Artificial Sequence
  derived and/or modified sequence
tgatccgaaatggccgcccgggacgagctcgggttgggtggcgactcactggaagctatgccagtgcccgccgctcgcggcaggcctcgaattactaacggtccggaagagcttgccgcgccatcaccggcagcgctggctgactacgaaggcaaagacgtggctactagggtaggggaggcatggcaggaaaggccgggtgccccaaggggaggtcagggagatcctgcagtaccagcccagcagcctgccgacccatccacacccgagcgccagagttcgccctccggaagcgagcaattagtccgtagggagtcctgtggatcaagcgtgttgacggatttcgagggcaaggacgtggccaccaaggtgggggaggcatggcaggacaggcctggcgcccctagaggcggacagggggacccagcagtgccgacgcaacagccagccgacccttcgaccccagaacagcagaatagtcctagtgggtccgaacagtttgttcgcagggagtcgtgtaccagcagggttcggtcccccagctcgtgtatggtcaccgtgactgtgactgccacatcagaacaaccccacatctatattccagcacccgcatccgaactggacagtagtagcacaactaaggggatactcttcgtaaaagagtatgtgaacgcttcggaagtctctagcggcaagcctgtgtcagcacgatactccaacgtatcctctatcgaagacagctttgccatggagaaaaagccaccatgcggtagcacgccctattccgagagaacaaccggcgggatatgtacatattgcaaccgggagatccgcgattgtccgaaaatcacactcgaacacttggggatttgctgtcacgaatattgttttaaatgtggcatatgtagtaagccaatgggggatcttctggatcagattttcattcaccgcgatacaatacactgcggtaagtgctatgagaaattattttag

SEQ ID NO: 70654 - DNA, 993 bp, Artificial Sequence
  derived and/or modified sequence
tgaagcgagatggccgcccgggacgagctgggcctgggcggcgactcactcgaagccatgcccgtaccagcagcgcgggggaggccacgtattaccaatgggcctgaggagctcgctgcaccttccccagctgccctcgctgactacgaagggaaggatgtggctacaagagtgggcgaggcctggcaagagcggcccggggccccacgcgggggccagggtgacccagccgtcccagcccagcaacccgccgatccttctaccccggagcgccagagttcgccaagtggctccgagcagctggtaaggcgagagtcttgtggttcatccgtgcttacagactttgagggtaaggatgtggcaacaaaagtgggcgaggcttggcaagatcggccaggggctcctaggggcggccagggtgacccagccgttccaacccagcaacccgcggatccatccaccccagagcagcaaaatagtccgtcggggtctgaacaatttgttcggagggagagctgtacctcccgtgtgaggagtccttcctcttgcatggtgaccgtgactgtgacagctacaagtgagcaaccccacatttatataccagcaccagcatcggaacttgactcctcatccacgaccaagggtatcctgtttgtgaaagagtacgtgaatgcctccgaagtatcctccggtaagcccgtcagcgctaggtacagcaatgtcagtagtattgaggacagttttgccatggaaaagaaacccccctgtggatccacaccatactctgagcgaactacaggagggatctgcacttattgtaatcgggagatcagagactgccctaaaattaccctggaacacctcggcatctgctgccacgagtattgctttaagtgcggcatctgttccaagcccatgggggatctgttggaccaaattttcattcatcgggacaccattcactgtggaaagtgctatgaaaagctcttttag

SEQ ID NO: 70655 - DNA, 993 bp, Artificial Sequence
  derived and/or modified sequence
tagtccgaaatggccgctcgggacgagttgggcctgggaggggattctctggaggccatgcctgtgccggctgctcgcggtcgaccaaggattactaatgggcctgaagagctcgctgcccctagccctgctgcactagccgactacgaaggtaaagacgtggccacgcgggtcggcgaagcctggcaagagaggccgggtgctcctcgcggtgggcagggagatccagccgtgcccgctcagcaacctgccgatccatccacccctgaacgacaaagctccccaagtggctctgaacaactagtgaggcgagaaagttgtggcagctctgttctgaccgactttgaaggcaaggacgtggctactaaagtcggcgaagcctggcaggacaggccgggtgcgcctcggggtggccaaggtgacccagcagtccccacacaacagcctgctgatccttccactcctgaacaacaaaactcaccctctggatctgaacagttcgtgaggcgcgagtcatgcacctctcgtgtccgatcaccgtcatcgtgcatggtgaccgtgaccgtcacagcaacctccgaacaacctcatatctatatccctgcgcctgcttcagagttggattccagtagtactacaaaggggattctgttcgttaaagaatatgtcaacgccagtgaggttagtagcggtaagccagtgtccgcacgctactcaaacgtctcctccatcgaggactcattcgcaatggaaaagaaacctccttgtggttccacaccgtactccgaacggactaccgggggtatatgtacctattgcaacagagaaatcagagactgccccaagattaccctcgagcaccttggcatttgttgccatgaatattgtttcaaatgcggtatctgcagtaaaccgatgggcgacctgctcgaccaaattttcatccacagagatacgatccattgtggaaaatgttacgaaaaactgttttag

SEQ ID NO: 70656 - protein, 496 aa, Artificial Sequence
  derived and/or modified sequence
MAELQMLLEEEIPSGKRALIESYQNLTRVADYCENNYIQRHGFAVLLCLLSNSWPQATDKRKALEETKAYTTQSLASVAYQINALANNVLQLLDIQASQLRRMESSINHISQTVDIHKEKVARREIGILTTNKNTSRTHKIIAPANMERPVRYIRKPIDYTVLDDVGHGVKWLKAKHGNNQPARTGTLSRTNPPTQKPPSPPMSGRGTLGRNTPYKTLEPVKPPTVPNDYMTSPARLGSQHSPGRTASLNQRPRTHSGSSGGSGSRENSGSSSIGIPIAVPTPSPPTIGPENISVPPPSGAPPAPPLAPLLPVSTVIAAPGSAPGSQYGTMTRQISRHNSTTSSTSSGGYRRTPSVTAQFSAQPHVNGGPLYSQNSIADSPTPPPPPPPDDIPMFDDSPPPPPPPPVDYEDEEAAVVQYNDPYADGDPAWAPKNYIEKVVAIYDYTKDKDDELSFMEGAIIYVIKKNDDGWYEGVCNRVTGLFPGNYVESIMHYTD

SEQ ID NO: 70657 - DNA, 1491 bp, Artificial Sequence
  derived and/or modified sequence
atggccgagctgcagatgctcttggaggaagaaatccctagcggcaaaagggctttgattgaatcctatcagaatcttacccgggtcgcagactattgcgagaacaattacatacagcggcatgggtttgcggtgttgctatgtctgctctctaattcttggccgcaggcaacagacaaacgcaaagctttggaggagactaaagcctacacaacccaatcattggcttccgtcgcatatcagattaacgccctggcgaataatgtgctgcagttgctggacattcaagccagccagctgagacggatggagtcttctatcaatcacatctcccaaaccgtggacattcacaaggagaaggtggcgagacgagaaattggcatcctaacgacaaataagaacaccagtaggacgcataagatcatcgctccggccaacatggagaggccagttagatacatccgtaaacctattgactacactgtgcttgatgacgtgggccacggtgttaagtggctgaaggccaagcacggtaataaccagcctgctaggactggcactctcagccggacaaacccgccgacacagaagcctccttcacccccaatgagtggcagaggcacgctgggcagaaataccccctataaaactctcgaacccgtgaagcctccgactgtgcccaacgattacatgacaagccccgcacggctagggagtcagcactctcccggccgtactgctagtcttaaccagagaccaaggacacatagtgggagttccggcggcagcggttcaagagagaattctggcagtagctctattggaattccaatcgcagtgcccacaccgtcgcccccaaccatcggaccagaaaacatttctgtcccccctccctcaggcgcccccccggcgcctccgctagcccctttgttgccagtttccacggtgatagccgccccagggtccgctcccggaagtcagtatggaactatgacgcgacaaatctctcgccacaactcaactacttcctccacgagctccggagggtaccggcgaaccccatcagtgactgcccagttttctgcgcaaccacatgtgaatggaggaccgttgtactctcagaattctatcgccgacagccctactcctcctccccccccccccccggacgacatcccgatgttcgacgacagcccccccccccccccaccccctccggtggattacgaggatgaagaggctgcggttgtgcagtataatgatccgtatgccgatggtgaccctgcttgggcacccaagaactatattgaaaaggtcgtggctatatacgattatactaaggataaagacgacgagctttcctttatggaaggtgcaatcatctatgtgattaaaaagaacgatgatggatggtatgaaggggtgtgcaaccgggtgactgggctgttccctggaaattacgtggaatccattatgcattacaccgactag

SEQ ID NO: 70658 - DNA, 1491 bp, Artificial Sequence
  derived and/or modified sequence
atggccgagctgcagatgctgctggaggaggagatccccagcggcaagagggccctgattgagagctaccagaacctgaccagggtggccgactactgtgagaacaactacatccagagacatggctttgctgtgctgctgtgcctgctgagcaacagctggccccaggccacagacaagaggaaggccctggaggagaccaaggcctacaccacccagagcctggcctctgtggcctaccagatcaatgccctggccaacaacgtgctgcagctgctggacatccaggccagccagctgcggaggatggagagcagcatcaaccacatcagccagacagtggacatccacaaggagaaggtggcccggcgggagatcggcatcctgaccaccaacaagaacaccagcaggacccacaagatcatcgccccagccaacatggagaggcctgtgcgctacatcaggaagcccatcgactacacagtgctggatgatgtgggccacggcgtgaagtggctgaaggccaagcacggcaacaaccagcctgccaggacaggcaccctgagcaggaccaacccccccacccagaagccacccagcccccccatgagcggccggggcaccctgggcaggaacaccccctacaagaccctggagcctgtgaagcccccaacagtgcccaatgactacatgaccagccctgcccggctgggcagccagcacagccctggccgcacagccagcctgaaccagaggcccaggacccacagcggcagcagcggcggcagcggcagcagagaaaattctggcagcagcagcatcggcatccccatcgctgtgcccacccccagcccccccaccatcggccctgagaacatctctgtgcccccaccttctggggcccccccagccccacccctggcccccctgctgcctgtgtccacagtgattgctgcccctggcagcgcccctggcagccagtatggcaccatgacccggcagatcagccgccacaacagcaccaccagcagcaccagcagcggcggctacagaaggaccccatctgtgacagcccagttcagcgcccagccccacgtgaatggaggccccctgtacagccagaacagcattgctgacagccccaccccacctcctcctcctcctccagatgacatccccatgtttgatgacagccccccacctcctcctcctcctcctgtggactatgaagatgaggaggccgctgtggtgcagtacaatgacccctatgcagatggagaccctgcctgggcccccaagaactacatcgagaaggtggtggccatctatgactacaccaaggacaaggatgatgagctgtccttcatggagggcgccatcatctacgtgatcaagaagaatgatgatggctggtatgagggcgtgtgcaacagagtgacaggcctcttccctggcaactacgtggagagcatcatgcactacacagactag

SEQ ID NO: 70659 - DNA, 1491 bp, Artificial Sequence
  derived and/or modified sequence
atggccgagctgcagatgctgctggaggaggagatccccagcggcaagcgcgccctgatcgagagttaccagaatttgacgcgcgtggccgactattgcgagaacaactacatccagaggcacggcttcgccgtactactgtgccttctgtctaattcttggcctcaggccacggataaacgtaaggctcttgaagagacaaaggcgtacactacccagagtctggccagcgtggcttaccagattaacgccctggccaacaatgtgctccagctgctcgacattcaggctagccaacttagacgcatggaaagttctattaaccatatatctcaaacagttgacatccacaaagaaaaggttgccagacgggagattggaatacttacaaccaataagaacacatctaggactcataagatcatcgcaccggcaaacatggagcgcccggtcaggtacatccgtaaacccatcgattataccgtgctcgatgatgttgggcatggagtcaaatggctgaaggcaaagcacggtaacaatcagcccgctcggactggcactctgtctaggaccaatccgcccacccaaaagcccccaagtccaccaatgagcggccgtggcactctgggaaggaacactccttacaagaccctggagccagtgaagccccctactgttcccaacgactatatgacctcaccagctaggttgggcagccagcacagccccggtcggacagcctcgctcaatcagcgtcctaggacacatagtggatcctctggaggttcagggagcagagagaattccggctcaagttcaatcggaatcccaattgcagtcccgactccttccccccctaccatcggccctgagaacattagtgtgccgccacctagcggggccccaccagcaccacctctggccccactccttccagtctccactgttatcgccgctccgggatccgcacctggatctcagtatggcactatgaccagacagatcagcagacacaacagcaccactagctcaacatctagcggcggttatcgccgcaccccgagtgttacagctcagttcagtgcacaaccacatgttaacgggggtccgttgtattcccagaactccatcgcagacagccctactccaccacccccaccccctccggacgacatacctatgtttgatgattcccctccgccgccacccccccctcccgtggattacgaagacgaggaagcagcagtcgtgcagtacaacgacccctatgcggacggagacccagcatgggctcctaaaaactatatcgagaaagttgtcgcaatatacgattatactaaagataaagatgacgagttgtcctttatggaaggcgcaattatttatgtgatcaagaagaatgacgacgggtggtacgagggagtctgcaaccgggtgacaggactatttccaggcaactatgtggaatcaattatgcactacaccgactag

SEQ ID NO: 70660 - DNA, 1491 bp, Artificial Sequence
  derived and/or modified sequence
atggccgagttgcagatgctgctggaggaggaaataccaagtggcaaaagggcactgatcgagtcctatcagaatttaacgagggttgctgattactgtgagaataactacattcagaggcatggtttcgccgttttactgtgtctactgagcaactcttggcctcaagccaccgacaagcgcaaagcactcgaagagacaaaggcctacacaacccagtctctcgcatccgttgcctaccagataaacgcacttgcaaacaacgtgctgcagctgctagacatccaggcatctcagttgaggcgcatggaatctagcataaatcacataagtcaaactgtggatatccacaaggagaaggttgccaggagagaaatagggatccttaccacaaataaaaacacatctcggacccataagataatcgcaccggctaacatggagagacctgtgcgctacatccgaaaaccgattgactacacagtcctagatgacgttgggcatggcgtaaaatggttgaaggctaaacacggcaataaccagcccgctaggacaggaacactctccagaaccaatccacccacccaaaaaccccctagcccaccaatgtccggtaggggcactctggggagaaacacaccatacaaaactttggagcccgtgaagccccctacagtgccaaatgactacatgacgagccccgcacggctgggatctcagcattctcctggcagaaccgcttctttaaaccaaagaccgcgaactcactcggggtcttctggcggatcaggatctcgcgaaaatagcggctccagttccatcggtataccaatagcagtccccacaccgtcccctcccacaataggccctgagaacatttcagtcccaccaccatctggcgctcctcctgccccaccattggcacccctgctgcctgtgtccacggtgatcgccgctccgggatctgcaccaggcagtcagtacggaaccatgacccggcagatctctaggcacaacagtacaacctctagcacctcatcgggcggatacaggcgcactcccagcgtgacagcccagttctctgcacagccgcatgtaaacggaggcccactctacagccagaacagtatcgccgactctccaacacctccaccgccaccaccccctgatgacattcccatgttcgatgacagtccccctcctcctccacctccccctgtggattatgaggatgaagaggcagcagtggtgcagtataacgacccttacgccgacggcgatcctgcctgggcccctaaaaattacatcgaaaaagtggttgccatctatgactacactaaagataaagacgatgaactctcattcatggaaggggcaatcatatacgtcatcaagaagaatgacgatggttggtacgagggcgtgtgtaacagagttacaggcttattcccaggcaactacgtggaatcaattatgcactataccgattag

SEQ ID NO: 70661 - DNA, 3689 bp, Artificial Sequence
  derived and/or modified sequence
gagaaataaacgctcgcgagagaacgaggttcaggcggctgcacgaagggggtggaggggggctggagagagtgaggaggaaggggaggaggtgccgtcccacaataccaggcgggagggcgggtaggcggtttgtatccgggctgtgaggtgctcggagcctcggcggaccttgctgcctctgtctctttaacgcgagaggaagcgatgcagaggggtggaaaatggcagagctgcagatgttactagaggaggagatcccgtctggcaagagggcgctgatcgagagttaccagaacctgactcgggtggcagactactgtgaaaacaactacatacagagacatggttttgctgtgttgctgtgtctgctctcaaactcctggcctcaggctacagacaagagaaaagctttagaggagaccaaagcctatacaacccaatctctagctagtgttgcttatcaaataaatgcattggccaacaatgtactccagttgctggatatccaagcctctcagcttcggagaatggagtcttccatcaatcatatctcacagactgtggatattcataaggagaaagtggcacgaagagagattggtattttgacaacaaataagaatacatcaagaactcacaaaataatagcacctgcgaatatggagcgccctgtaaggtatattcggaaacctatcgattacacagttctggatgatgtgggccatggtgtcaagtggctaaaagccaagcatggaaataaccagcctgcaagaactggcacactgtcgagaacaaatcctcctactcagaaaccgccaagtcctcccatgtcaggccggggaacactgggacggaatactccttataaaaccctggaacctgttaaacccccaacagttcctaatgactatatgaccagtcctgctaggcttggaagtcagcatagtccaggcaggacagcatctttaaatcagagaccaaggacacacagtggaagtagtggaggaagtggaagtcgagaaaacagtggtagcagtagtattggcattcccattgctgtgcctacaccttcgccacccactattggaccagaaaacatttctgtccctcctccttctggagctccaccagcaccacctctggcaccacttctcccagtgagcactgtgatagcagccccgggctcagctcctggttcccagtatggcacaatgaccaggcagatatctcgacacaactctactacttcttcgacatcttctggtggatacagacgaactccctctgtgactgctcaattttctgctcagcctcatgttaatggaggtccactttattctcaaaattcaattgctgatagtccaactccaccgccaccacctccaccagatgacattcccatgtttgatgactctccacctcccccaccaccaccaccagtggattatgaagatgaggaggctgcagtagttcagtataatgatccatatgcagatggggatcctgcttgggcccccaagaattatattgagaaagttgttgcaatatatgattatacaaaagacaaggatgatgagctgtcatttatggagggtgcaatcatttatgttataaagaagaatgatgatggctggtatgaaggagtctgcaatcgagtgactggtctgttccctgggaactatgttgaatcaatcatgcactatactgattaatttttttttttcttttgaagtagattcttattactcagtcatactgtgggactattatggttaacagaactgtcttaatatgttttaaaatgtgcccatattttcagaacatgctgttttattggtaaattgaatgtctacctgtaagcataaatctttgaggcagtttatgtattgctgaatagcaatttatacaagaagctgtccataactgattatgcttatgtacttacttacacatttttaactttatgaccagcctaaatattctgggggaagtggggtataatatttaacgaatcatgattcagattgtaccattacatgtttcagtgcagcatggttactaacgctatgtcagactaatattaaaatcagaaaatttaaatgctggtgctggtcagactttttttgttagattctctcatttaaaaaaaatactgtttgtttaaagcatgcataaaaatttatgtattgaaatatacttaaaaattcaagatgcttcccatttgtgtaatatttacctggaggactcgtacttaggtgtcttaacgtgaattgagtctccaaggtctccatgtgaaacaagcaaaaagagaattatctgtaatgttgtaatttgtacctaagttttttaatgagtgaaatttgcattataaactttttccattcataaatacataagtgaaccaaaggtttttgtcctttccttcactgatttgctttaaaaaaaataaaagataatgatttattgcagaattatgattctattttctcaatatgttaacttggaaaaaaattttagccttatcttaatctgtcccaacagcaatgtgacggatttttgcagattcaaaatctgcaatggttatttacaagtcaatctactgaattccttttttaaataatcttttgaaactaagaaaatgtgtcaaattgtgtgcattcattctgtaggtaaaattcttaaggattgccatgtcagtccttcagttgtacagtgaactgttgtacactggttcaatgaaaggaagttaaaagtaccttttacatattgtaaaagtggatacagttgatttgtgagtaggcactctttaatccattacctggcactagcaacattagaattttaaaataaaataattgggaaagaaggtgggtcatgtattaatcagtgaacagagatttacctaaccaacagacttggattgtcttttgacataatcaaaatgcaacacatgcactttgtgtgtctcctcttaattgaagggagggctgagggatgttttctcttcttgtcttgtgtataattctctattgcttaggatattaaagtagagcactcaagtgtgggtttctgtgttattgaggatttgtttggaattcaaattacagttatgtactggatgctacagacttataacagcatagtgaatggtaagactagtgcaaaacagttatttctgaaaattaaagaccattattgctaccaaatcaatgtgactatttcatatgcattttgcctttgttaattttaaacaaacaaagtatcattagtgatcagctagctaccttctactttccatttttcaagtggattgttctcttaatttgtatataacctgttgtctaaattttatgtacagtcttttataataaaccattctcctatatgaaattttggatactgttaaaatataactcatgtggacttcaatgcagacttcacatttttctgacctttactcctacggtaaatcaagacaaaccatttgaattttaacattggttatttatttgtgtaatggccttacatgtggatattaacagtgtaaacaataccacatataaccatcaagataccttgattataatttataggactagaatgacagattcaggtggtttattaattacatttaaaaagttttctgaaaaaacttttgcaataaaaaaaaataaattgcccatcaa

SEQ ID NO: 70662 - DNA, 1491 bp, Artificial Sequence
  derived and/or modified sequence
atggccgagctgcagatgctgctggaggaggagatccccagcggcaagagagccctgatcgagagctaccagaacctgaccagagtggccgactactgcgagaacaactacatccagagacacggcttcgccgtgctgctgtgcctgctgagcaacagctggccccaggccaccgacaagagaaaggccctggaggagaccaaggcctacaccacccagagcctggccagcgtggcctaccagatcaacgccctggccaacaacgtgctgcagctgctggacatccaggccagccagctgagaagaatggagagcagcatcaaccacatcagccagaccgtggacatccacaaggagaaggtggccagaagagagatcggcatcctgaccaccaacaagaacaccagcagaacccacaagatcatcgcccccgccaacatggagagacccgtgagatacatcagaaagcccatcgactacaccgtgctggacgacgtgggccacggcgtgaagtggctgaaggccaagcacggcaacaaccagcccgccagaaccggcaccctgagcagaaccaacccccccacccagaagccccccagcccccccatgagcggcagaggcaccctgggcagaaacaccccctacaagaccctggagcccgtgaagccccccaccgtgcccaacgactacatgaccagccccgccagactgggcagccagcacagccccggcagaaccgccagcctgaaccagagacccagaacccacagcggcagcagcggcggcagcggcagcagagagaacagcggcagcagcagcatcggcatccccatcgccgtgcccacccccagcccccccaccatcggccccgagaacatcagcgtgcccccccccagcggcgccccccccgccccccccctggcccccctgctgcccgtgagcaccgtgatcgccgcccccggcagcgcccccggcagccagtacggcaccatgaccagacagatcagcagacacaacagcaccaccagcagcaccagcagcggcggctacagaagaacccccagcgtgaccgcccagttcagcgcccagccccacgtgaacggcggccccctgtacagccagaacagcatcgccgacagccccacccccccccccccccccccccccgacgacatccccatgttcgacgacagcccccccccccccccccccccccccgtggactacgaggacgaggaggccgccgtggtgcagtacaacgacccctacgccgacggcgaccccgcctgggcccccaagaactacatcgagaaggtggtggccatctacgactacaccaaggacaaggacgacgagctgagcttcatggagggcgccatcatctacgtgatcaagaagaacgacgacggctggtacgagggcgtgtgcaacagagtgaccggcctgttccccggcaactacgtggagagcatcatgcactacaccgactag

SEQ ID NO: 70663 - protein, 312 aa, Artificial Sequence
  derived and/or modified sequence
MLRAPGCLLRTSVAPAAALAAALLSSLARCSLLEPRDPVASSLSPYFGTKTRYEDVNPVLLSGPEAPWRDPELLEGTCTPVQLVALIRHGTRYPTVKQIRKLRQLHGLLQARGSRDGGASSTGSRDLGAALADWPLWYADWMDGQLVEKGRQDMRQLALRLASLFPALFSRENYGRLRLITSSKHRCMDSSAAFLQGLWQHYHPGLPPPDVADMEFGPPTVNDKLMRFFDHCEKFLTEVEKNATALYHVEAFKTGPEMQNILKKVAATLQVPVNDLNAGLSQFLLQSSSSLVMQRLFFHCFLSWATSKTRNP

SEQ ID NO: 70664 - DNA, 939 bp, Artificial Sequence
  derived and/or modified sequence
atgctgcgagcccctgggtgtcttctgagaacgagcgtggcgcccgctgccgctctagccgcggctctcctaagctctctggctaggtgtagcctgcttgaaccacgggacccagtagcctcttctctcagtccctattttgggaccaagacgagatacgaagatgtgaaccccgtgctcctctccggaccagaggccccatggcgcgacccagaactgctggaaggcacctgtactcctgtgcaattggtggcactgatcagacatgggaccagatatccaaccgtgaagcagatccgcaaactgcgccagcttcatggattactgcaggctcgcggatccagagacggtggcgcatcttccacaggaagcagggatcttggcgccgccctggccgactggcctctgtggtatgcggactggatggatggccagctcgttgaaaaaggccggcaagatatgcggcagttggctttgcggttagcctccctgttccccgctttgttttccagagagaactatggacgtcttaggctgatcacatctagcaaacatcgctgtatggactctagcgcagccttcctccagggcctctggcagcattatcatccaggcctgcccccccctgacgtcgctgatatggaattcggacctcctaccgttaacgataagctgatgcgcttttttgatcactgcgaaaaattccttacagaggtcgagaagaatgcaactgccctctaccacgtcgaggccttcaaaactggccccgagatgcagaacatactaaagaaagttgcggccacacttcaagtgcctgttaatgacctaaatgccggcttgtcccagttcctcctccaatcaagttctagcctggtcatgcagcgcctgttcttccattgctttttaagttgggctacatccaaaacaagaaatccgtag

SEQ ID NO: 70665 - DNA, 939 bp, Artificial Sequence
  derived and/or modified sequence
atgctgcgggcccctggctgcctgctgcggacctctgtggccccagctgctgccctggccgccgccctgctgagcagcctggcccgctgcagcctgctggagccccgggaccctgtggccagcagcctgagcccctacttcggcaccaagaccaggtatgaagatgtgaaccctgtgctgctgagcggccctgaggccccctggagggaccctgagctgctggagggcacctgcacccctgtgcagctggtggccctgatcagacatggcacccgctaccccaccgtgaagcagatcaggaagctgcggcagctgcacggcctgctgcaggcccggggcagcagagatggaggagccagcagcacaggcagccgggacctgggcgccgccctggccgactggcccctgtggtatgctgactggatggatggccagctggtggagaagggccggcaggacatgaggcagctggccctgcggctggccagcctcttccctgccctcttcagccgggagaactacggccgcctgcggctcatcaccagcagcaagcaccgctgcatggacagcagcgctgccttcctgcagggcctgtggcagcactaccaccctggcctgcccccaccagatgtggccgacatggagtttggcccccccaccgtgaatgacaagctgatgaggttctttgaccactgtgagaagttcctgacagaggtggagaagaatgccacagccctgtaccacgtggaggccttcaagacaggccctgagatgcagaacatcctgaagaaggtggccgccaccctgcaggtgcctgtgaatgacctgaatgccggcctgagccagttcctgctgcagagcagcagcagcctggtgatgcagaggctcttcttccactgcttcctgtcctgggccaccagcaagaccaggaacccctag

SEQ ID NO: 70666 - DNA, 2183 bp, Artificial Sequence
  derived and/or modified sequence
atctgcagctggctcggcgcactccactgaccgtcccgacgatgctacgcgcgcccggctgcctcctccggacctccgtagcgcctgccgcggccctggctgcggcgctgctctcgtcgcttgcgcgctgctctcttctagagccgagggacccggtggcctcgtcgctcagcccctatttcggcaccaagactcgctacgaggatgtcaaccccgtgctattgtcgggccccgaggctccgtggcgggaccctgagctgctggaggggacctgcaccccggtgcagctggtcgccctcattcgccacggcacccgctaccccacggtcaaacagatccgcaagctgaggcagctgcacgggttgctgcaggcccgcgggtccagggatggcggggctagtagtaccggcagccgcgacctgggtgcagcgctggccgactggcctttgtggtacgcggactggatggacgggcagctagtagagaagggacggcaggatatgcgacagctggcgctgcgtctggcctcgctcttcccggcccttttcagccgtgagaactacggccgcctgcggctcatcaccagttccaagcaccgctgcatggatagcagcgccgccttcctgcaggggctgtggcagcactaccaccctggcttgccgccgccggacgtcgcagatatggagtttggacctccaacagttaatgataaactaatgagattttttgatcactgtgagaagtttttaactgaagtagaaaaaaatgctacagctctttatcacgtggaagccttcaaaactggaccagaaatgcagaacattttaaaaaaagttgcagctactttgcaagtgccagtaaatgatttaaatgcaggtctcagccaatttcttctccagtcatcctccagtttggtcatgcagagactcttcttccactgctttctctcatgggctacttcaaagacaaggaacccctaacagcgtacaattacaaaaaacaaatgcatcggaagttccgaagtggtctcattgtaccttatgcctcgaacctgatatttgtgctttaccactgtgaaaatgctaagactcctaaagaacaattccgagtgcagatgttattaaatgaaaaggtgttacctttggcttactcacaagaaactgtttcattttatgaagatctgaagaaccactacaaggacatccttcagagttgtcaaaccagtgaagaatgtgaattagcaagggctaacagtacatctgatgaactatgagtaactgaagaacatttttaattctttaggaatctgcaatgagtgattacatgcttgtaataggtaggcaattccttgattacaggaagcttttatattacttgagtatttctgtcttttcacagaaaaacattgggtttctctctgggtttggacatgaaatgtaagaaaagatttttcactggagcagctctcttaaggagaaacaaatctatttagagaaacagctggccctgcaaatgtttacagaaatgaaattcttcctacttatataagaaatctcacactgagatagaattgtgatttcataataacacttgaaaagtgctggagtaacaaaatatctcagttggaccatccttaacttgattgaactgtctaggaactttacagattgttctgcagttctctcttcttttcctcaggtaggacagctctagcattttcttaatcaggaatattgtggtaagctgggagtatcactctggaagaaagtaacatctccagatgagaatttgaaacaagaaacagagtgttgtaaaaggacaccttcactgaagcaagtcggaaagtacaatgaaaataaatatttttggtatttatttatgaaatatttgaacattttttcaataattcctttttacttctaggaagtctcaaaagaccatcttaaattattatatgtttggacaattagcaacaagtcagatagttagaatcgaagtttttcaaatccattgcttagctaactttttcattctgtcacttggcttcgatttttatattttcctattatatgaaatgtatcttttggttgtttgatttttctttctttctttgtaaatagttctgagttctgtcaaatgccgtgaaagtatttgctataataaagaaaattcttgtgacttta

SEQ ID NO: 70667 - DNA, 939 bp, Artificial Sequence
  derived and/or modified sequence
atgctgcgggcccccggctgcctgctgcggaccagcgtggcccccgctgcagccctggctgccgcactgctgagttccctcgccaggtgctcccttctggagcccagggatcctgtagccagtagtctctcgccctattttggcaccaagacacgatatgaggacgtgaaccccgtcctgcttagcgggcccgaggcaccttggcgtgatccggaacttctggaaggcacgtgcacacctgtgcagcttgtcgcgttaattaggcatggaaccaggtatccaacggttaaacagatccgtaagctcaggcaactgcacgggctgctgcaagccagaggctcacgagacgggggggcttctagcacggggagtagggacctgggggcagctctggctgattggcccctctggtacgccgattggatggatggacagctggtagagaagggcagacaggatatgagacagctggcgctgcgacttgccagcttgttccctgccctgttttctcgcgagaactacggcagactgaggttgatcaccagttccaaacatagatgcatggactcatcagccgccttccttcagggattgtggcagcactaccacccaggtctacctccgcctgacgttgctgacatggagtttggtcccccaacggttaacgacaagctgatgcgtttcttcgatcattgcgagaaattcctgactgaagtggagaaaaacgcaaccgccctttatcacgtggaggccttcaaaacaggccctgagatgcaaaatattctgaagaaagtggctgccactctgcaggtgccagtgaatgacctgaacgctgggttaagccagtttttgctgcagtccagttctagcctggtgatgcagcgactattctttcactgttttttgtcatgggccacatctaagaccaggaacccatag

SEQ ID NO: 70668 - DNA, 939 bp, Artificial Sequence
  derived and/or modified sequence
atgctgcgggcaccagggtgcctcctgagaacaagcgttgccccagctgccgcactggcagccgcactgctgtccagtctagccagatgctcccttctggagccacgcgatcctgtcgcttcttccctgagtccttattttgggacaaaaacccgatatgaagacgtgaacccggtgctgctgtcaggtcctgaggccccatggcgcgatcccgagttgctggagggcacctgcacccctgtgcagctggtcgccctgattcgacacgggacccggtatcccacggtcaagcagataaggaagctgcgtcagctccacggccttctccaggcacgtggatctagggatggcggagcaagctccacgggaagtagagacctaggagctgcgctagccgattggcctttgtggtacgctgactggatggatggccagcttgtggaaaaggggaggcaggacatgagacagctggcactccgtcttgccagcctgttcccagcactcttcagccgcgagaactatggaaggctgcgacttatcaccagtagtaaacacagatgcatggactcctcagcggcttttctgcaggggttgtggcagcattaccatcctggcttacctcctcctgacgttgcggacatggagttcgggccacccacagtcaatgataagcttatgagattcttcgatcactgcgagaagtttctcactgaagtggagaagaatgccaccgccctgtatcacgtggaggcattcaagaccggcccagaaatgcagaatatcctcaagaaggtcgctgcaaccctgcaagttcccgtgaacgacctgaatgcgggactgagccagtttttgcttcagtcttccagcagtctcgtcatgcaaaggcttttcttccactgttttctaagttgggctactagtaagactcgaaacccctag

SEQ ID NO: 70669 - DNA, 939 bp, Artificial Sequence
  derived and/or modified sequence
atgctgagagcccccggctgcctgctgagaaccagcgtggcccccgccgccgccctggccgccgccctgctgagcagcctggccagatgcagcctgctggagcccagagaccccgtggccagcagcctgagcccctacttcggcaccaagaccagatacgaggacgtgaaccccgtgctgctgagcggccccgaggccccctggagagaccccgagctgctggagggcacctgcacccccgtgcagctggtggccctgatcagacacggcaccagataccccaccgtgaagcagatcagaaagctgagacagctgcacggcctgctgcaggccagaggcagcagagacggcggcgccagcagcaccggcagcagagacctgggcgccgccctggccgactggcccctgtggtacgccgactggatggacggccagctggtggagaagggcagacaggacatgagacagctggccctgagactggccagcctgttccccgccctgttcagcagagagaactacggcagactgagactgatcaccagcagcaagcacagatgcatggacagcagcgccgccttcctgcagggcctgtggcagcactaccaccccggcctgcccccccccgacgtggccgacatggagttcggcccccccaccgtgaacgacaagctgatgagattcttcgaccactgcgagaagttcctgaccgaggtggagaagaacgccaccgccctgtaccacgtggaggccttcaagaccggccccgagatgcagaacatcctgaagaaggtggccgccaccctgcaggtgcccgtgaacgacctgaacgccggcctgagccagttcctgctgcagagcagcagcagcctggtgatgcagagactgttcttccactgcttcctgagctgggccaccagcaagaccagaaacccctag

SEQ ID NO: 70670 - protein, 480 aa, Artificial Sequence
  derived and/or modified sequence
MAELQMLLEEEIPSGKRALIESYQNLTRVADYCENNYIQATDKRKALEETKAYTTQSLASVAYQINALANNVLQLLDIQASQLRRMESSINHISQTVDIHKEKVARREIGILTTNKNTSRTHKIIAPANMERPVRYIRKPIDYTVLDDVGHGVKWLKAKHGNNQPARTGTLSRTNPPTQKPPSPPMSGRGTLGRNTPYKTLEPVKPPTVPNDYMTSPARLGSQHSPGRTASLNQRPRTHSGSSGGSGSRENSGSSSIGIPIAVPTPSPPTIGPAPGSAPGSQYGTMTRQISRHNSTTSSTSSGGYRRTPSVTAQFSAQPHVNGGPLYSQNSISIAPPPPPMPQLTPQIPLTGFVARVQENIADSPTPPPPPPPDDIPMFDDSPPPPPPPPVDYEDEEAAVVQYNDPYADGDPAWAPKNYIEKVVAIYDYTKDKDDELSFMEGAIIYVIKKNDDGWYEGVCNRVTGLFPGNYVESIMHYTD

SEQ ID NO: 70671 - DNA, 1443 bp, Artificial Sequence
  derived and/or modified sequence
atggctgaattacagatgttgctcgaggaggagattccttctgggaaacgggcattaatcgaaagctaccagaacctcacacgggtggcggattactgtgagaataattacattcaagcaacagacaagagaaaggctctggaagaaacaaaggcttatacgacacagtcgttggcaagcgtcgcataccagatcaacgcactggccaacaatgttcttcagttactcgatatccaagcctctcagctgcgccgtatggagagcagcattaaccatattagccagactgttgatatacacaaagaaaaggttgctcgccgcgaaatcggcattttgacaaccaacaaaaatacctctagaactcacaaaattattgcccccgctaacatggagcggcctgtcagatatatccggaaacccatcgactacaccgtcctggacgatgtgggacacggcgtcaagtggctcaaagctaaacatggaaacaaccagccggcgcggaccggaactctcagccgcactaatcccccaacacagaaaccccccagccccccaatgagcggccggggcaccttagggaggaacaccccctataaaacactggagcccgtgaagcccccgactgtacctaacgattacatgacctcccccgcccgtttaggatcacagcattctcccggacgcaccgcctccctgaatcagcgccctcggactcactctggatcctcaggagggagtggcagtagggaaaactctggctcatcaagtattggcattcccattgccgtgcctactccctctcctccaacaatcggcccagcaccaggatcagcccctggctcacagtacggcaccatgacaagacaaatcagccggcacaattccacaacctcaagcaccagttcgggcggctaccgcaggacacctagcgtcacagcgcaattctctgcccagccacacgtgaacggagggcccttgtatagccagaattctatctctatcgcccctcctcccccacccatgccccaactcaccccccaaatcccgcttacagggtttgtcgcccgagttcaggaaaacatcgccgactcccccacccccccaccaccacctcctccggatgacatcccaatgtttgacgatagcccccctcctccgccaccgccccccgtggactacgaggacgaggaggccgctgtggttcagtacaatgacccttatgcggacggagatccagcctgggcccccaagaattacatcgaaaaggttgttgcaatctatgattatactaaagataaagatgacgaacttagctttatggaaggcgccattatttatgttatcaagaaaaacgacgacggatggtatgagggagtctgcaacagagtgactgggctcttccccggaaattacgtggaatctatcatgcactacaccgattag

SEQ ID NO: 70672 - DNA, 1443 bp, Artificial Sequence
  derived and/or modified sequence
atggccgagctgcagatgctgctggaggaggagatccccagcggcaagagggccctgattgagagctaccagaacctgaccagggtggccgactactgtgagaacaactacatccaggccacagacaagaggaaggccctggaggagaccaaggcctacaccacccagagcctggcctctgtggcctaccagatcaatgccctggccaacaacgtgctgcagctgctggacatccaggccagccagctgcggaggatggagagcagcatcaaccacatcagccagacagtggacatccacaaggagaaggtggcccggcgggagatcggcatcctgaccaccaacaagaacaccagcaggacccacaagatcatcgccccagccaacatggagaggcctgtgcgctacatcaggaagcccatcgactacacagtgctggatgatgtgggccatggagtgaagtggctgaaggccaagcacggcaacaaccagcctgccaggacaggcaccctgagcaggaccaacccccccacccagaagccacccagcccccccatgagcggccggggcaccctgggcaggaacaccccctacaagaccctggagcctgtgaagccacccaccgtgcccaatgactacatgaccagccctgcccggctgggcagccagcacagccctggccgcacagccagcctgaaccagaggcccaggacccacagcggcagcagcggcggcagcggcagccgggagaacagcggcagcagcagcatcggcatccccatcgctgtgcccacccccagcccccccaccatcggccctgcccctggcagcgcccctggcagccagtatggcaccatgacccggcagatcagccgccacaacagcaccaccagcagcaccagcagcggcggctacagaaggacccccagcgtgacagcccagttcagcgcccagccccacgtgaatggaggccccctgtacagccagaacagcatcagcatcgcccctcctcctccacccatgccccagctgaccccccagatccccctgactggatttgtggcccgggtgcaggagaacattgctgacagccccaccccacctcctcctcctcctccagatgacatccccatgtttgatgacagccccccacctcctcctcctcctcctgtggactatgaagatgaggaggccgctgtggtgcagtacaatgacccctatgcagatggagaccctgcctgggcccccaagaactacatcgagaaggtggtggccatctatgactacaccaaggacaaggatgatgagctgtccttcatggagggcgccatcatctacgtgatcaagaagaatgatgatggctggtatgagggcgtgtgcaacagagtgacaggcctcttccctggcaactacgtggagagcatcatgcactacacagactag

SEQ ID NO: 70673 - DNA, 1443 bp, Artificial Sequence
  derived and/or modified sequence
atggccgagctgcagatgctgctggaggaggagatccccagcggcaagagggctctgattgagtcatatcagaacctgactcgcgtggctgactactgcgaaaataactatattcaggctacagacaaaagaaaggccctggaggaaaccaaggcatacaccacacaatcacttgcatcagtggcatatcagataaatgctctcgccaataacgtcctccaactgctcgatatacaggcaagtcagcttcgccgcatggagtcttccatcaaccatatatcacagaccgtggatattcacaaagagaaagtcgctaggcgggaaatcgggattctgactactaacaaaaatacctcacgtacccacaagatcattgccccggctaacatggagcggccagtgaggtacatcagaaagcctatcgattataccgtcctggacgacgtcggtcacggcgtaaagtggcttaaagcaaagcatgggaataaccaacccgctcgcacaggcacgctgtctaggacgaacccccctactcagaaacccccgtccccccccatgagcggccggggcaccctgggccggaacacgccctataagacactcgagccagtgaaacctccaactgtgcctaacgattacatgactagccccgccagactgggcagccagcattcaccaggacgaactgctagtctgaaccaacgcccgcgcacacattctggcagctccgggggaagcggctccagggagaactccggtagtagctctatcggaatccccattgccgtgccaacccccagccctccaactattgggcccgctcctgggtcagctccaggaagtcaatacggaaccatgacacggcagatttcccggcacaattcaacgacatcatccacttcaagtggtggatatcggagaacgccatccgtcaccgcgcagttttccgcccagccccacgttaatggcggccccctgtactcccaaaattctatatccattgcgcctccgcccccccctatgcctcagctcactccccagattcctctgaccggatttgttgctagggtgcaggaaaatatcgcagattctccgacacctccaccccctcctccacccgatgacatccccatgtttgatgacagccccccaccacccccccctccacccgtggattacgaagacgaggaagccgccgtggtgcagtacaacgatccctatgcagatggcgaccctgcttgggccccaaaaaactacatagaaaaagtggtggctatctacgattatacaaaagataaggatgacgagttgagcttcatggaaggggccataatttacgtgatcaagaagaacgatgatggctggtacgagggggtctgcaatcgggttactgggctgttcccgggtaactacgtcgaatccattatgcactataccgactag

SEQ ID NO: 70674 - DNA, 1443 bp, Artificial Sequence
  derived and/or modified sequence
atggcagaactacaaatgctgttggaagaggagatcccttcaggtaaacgggctcttattgaaagctaccagaatctaacacgagtcgccgactattgcgaaaacaactatattcaagctacagacaaacggaaagccttagaggagactaaggcctatactactcagagtctcgcttccgtggcttatcaaatcaacgccctggctaacaacgttttgcaactactcgatatccaagcatctcaactgcggagaatggagtcttcaatcaatcacatttcccaaactgtcgatatccacaaggaaaaggttgccaggagagagataggtattttgactactaataagaacacctccaggacccacaagatcatcgcgcctgcaaacatggagcggcctgtgagatatatcagaaaacccattgactacactgttctcgatgacgtggggcatggcgtaaaatggctcaaagccaagcacggtaataatcaacctgcacggacaggaacgctaagcagaactaatccacccacgcaaaaaccaccctctccacctatgtccggtcggggaacactaggtcgaaacacaccttacaaaaccttggagccggtgaagcctcctacggtccccaatgattatatgacctctcccgcaagattggggagtcagcattcccctggcaggacggcaagtcttaaccaaaggccaaggacacacagtggtagctccggcggtagcggatcccgcgagaattccggatccagtagcatcggtatcccaatagcagtgcctacaccttcaccgccaaccatagggccagctcctgggtcagctcctgggtctcagtacggtacaatgaccagacagatttccaggcacaatagcacgacctcatctacttcatccggcggatacagacgaacgccctccgtgactgcgcaattcagtgcccagcctcacgtcaacggcggacctctgtattcccagaattcaatttccatcgcccctccgcctcctcctatgccacagttaacaccgcagatacctctgaccggtttcgtggcaagagttcaggagaatattgcggacagccctacacccccaccacctccgccacccgatgacatacctatgtttgacgatagccctcctcccccacctccaccacctgtcgattatgaggatgaggaagccgcagtggttcagtacaacgacccctatgccgacggagaccccgcttgggccccaaaaaactatattgagaaggtggtggcaatttacgactacactaaagataaagatgacgaactgagcttcatggaaggggctataatatatgtgatcaaaaagaacgatgacgggtggtacgagggggtgtgcaatcgggtcacgggcttgtttcctgggaattacgtcgagagcatcatgcactacaccgattag

SEQ ID NO: 70675 - DNA, 3492 bp, Artificial Sequence
  derived and/or modified sequence
gctcggagcctcggcggaccttgctgcctctgtctctttaacgcgagaggaagcgatgcagaggggtggaaaatggcagagctgcagatgttactagaggaggagatcccgtctggcaagagggcgctgatcgagagttaccagaacctgactcgggtggcagactactgtgaaaacaactacatacaggctacagacaagagaaaagctttagaggagaccaaagcctatacaacccaatctctagctagtgttgcttatcaaataaatgcattggccaacaatgtactccagttgctggatatccaagcctctcagcttcggagaatggagtcttccatcaatcatatctcacagactgtggatattcataaggagaaagtggcacgaagagagattggtattttgacaacaaataagaatacatcaagaactcacaaaataatagcacctgcgaatatggagcgccctgtaaggtatattcggaaacctatcgattacacagttctggatgatgtgggccatggtgtcaagtggctaaaagccaagcatggaaataaccagcctgcaagaactggcacactgtcgagaacaaatcctcctactcagaaaccgccaagtcctcccatgtcaggccggggaacactgggacggaatactccttataaaaccctggaacctgttaaacccccaacagttcctaatgactatatgaccagtcctgctaggcttggaagtcagcatagtccaggcaggacagcatctttaaatcagagaccaaggacacacagtggaagtagtggaggaagtggaagtcgagaaaacagtggtagcagtagtattggcattcccattgctgtgcctacaccttcgccacccactattggaccagccccgggctcagctcctggttcccagtatggcacaatgaccaggcagatatctcgacacaactctactacttcttcgacatcttctggtggatacagacgaactccctctgtgactgctcaattttctgctcagcctcatgttaatggaggtccactttattctcaaaattcaatttctattgctccaccccctccccctatgcctcagttgactccacagatacctctcacaggcttcgtggccagggtgcaggaaaacattgctgatagtccaactccaccgccaccacctccaccagatgacattcccatgtttgatgactctccacctcccccaccaccaccaccagtggattatgaagatgaggaggctgcagtagttcagtataatgatccatatgcagatggggatcctgcttgggcccccaagaattatattgagaaagttgttgcaatatatgattatacaaaagacaaggatgatgagctgtcatttatggagggtgcaatcatttatgttataaagaagaatgatgatggctggtatgaaggagtctgcaatcgagtgactggtctgttccctgggaactatgttgaatcaatcatgcactatactgattaatttttttttttcttttgaagtagattcttattactcagtcatactgtgggactattatggttaacagaactgtcttaatatgttttaaaatgtgcccatattttcagaacatgctgttttattggtaaattgaatgtctacctgtaagcataaatctttgaggcagtttatgtattgctgaatagcaatttatacaagaagctgtccataactgattatgcttatgtacttacttacacatttttaactttatgaccagcctaaatattctgggggaagtggggtataatatttaacgaatcatgattcagattgtaccattacatgtttcagtgcagcatggttactaacgctatgtcagactaatattaaaatcagaaaatttaaatgctggtgctggtcagactttttttgttagattctctcatttaaaaaaaatactgtttgtttaaagcatgcataaaaatttatgtattgaaatatacttaaaaattcaagatgcttcccatttgtgtaatatttacctggaggactcgtacttaggtgtcttaacgtgaattgagtctccaaggtctccatgtgaaacaagcaaaaagagaattatctgtaatgttgtaatttgtacctaagttttttaatgagtgaaatttgcattataaactttttccattcataaatacataagtgaaccaaaggtttttgtcctttccttcactgatttgctttaaaaaaaataaaagataatgatttattgcagaattatgattctattttctcaatatgttaacttggaaaaaaattttagccttatcttaatctgtcccaacagcaatgtgacggatttttgcagattcaaaatctgcaatggttatttacaagtcaatctactgaattccttttttaaataatcttttgaaactaagaaaatgtgtcaaattgtgtgcattcattctgtaggtaaaattcttaaggattgccatgtcagtccttcagttgtacagtgaactgttgtacactggttcaatgaaaggaagttaaaagtaccttttacatattgtaaaagtggatacagttgatttgtgagtaggcactctttaatccattacctggcactagcaacattagaattttaaaataaaataattgggaaagaaggtgggtcatgtattaatcagtgaacagagatttacctaaccaacagacttggattgtcttttgacataatcaaaatgcaacacatgcactttgtgtgtctcctcttaattgaagggagggctgagggatgttttctcttcttgtcttgtgtataattctctattgcttaggatattaaagtagagcactcaagtgtgggtttctgtgttattgaggatttgtttggaattcaaattacagttatgtactggatgctacagacttataacagcatagtgaatggtaagactagtgcaaaacagttatttctgaaaattaaagaccattattgctaccaaatcaatgtgactatttcatatgcattttgcctttgttaattttaaacaaacaaagtatcattagtgatcagctagctaccttctactttccatttttcaagtggattgttctcttaatttgtatataacctgttgtctaaattttatgtacagtcttttataataaaccattctcctatatgaaattttggatactgttaaaatataactcatgtggacttcaatgcagacttcacatttttctgacctttactcctacggtaaatcaagacaaaccatttgaattttaacattggttatttatttgtgtaatggccttacatgtggatattaacagtgtaaacaataccacatataaccatcaagataccttgattataatttataggactagaatgacagattcaggtggtttattaattacatttaaaaagttttctgaaaaaacttttgcaataaaaaaaaataaattgcccatcaataa

SEQ ID NO: 70676 - DNA, 1443 bp, Artificial Sequence
  derived and/or modified sequence
atggccgagctgcagatgctgctggaggaggagatccccagcggcaagagagccctgatcgagagctaccagaacctgaccagagtggccgactactgcgagaacaactacatccaggccaccgacaagagaaaggccctggaggagaccaaggcctacaccacccagagcctggccagcgtggcctaccagatcaacgccctggccaacaacgtgctgcagctgctggacatccaggccagccagctgagaagaatggagagcagcatcaaccacatcagccagaccgtggacatccacaaggagaaggtggccagaagagagatcggcatcctgaccaccaacaagaacaccagcagaacccacaagatcatcgcccccgccaacatggagagacccgtgagatacatcagaaagcccatcgactacaccgtgctggacgacgtgggccacggcgtgaagtggctgaaggccaagcacggcaacaaccagcccgccagaaccggcaccctgagcagaaccaacccccccacccagaagccccccagcccccccatgagcggcagaggcaccctgggcagaaacaccccctacaagaccctggagcccgtgaagccccccaccgtgcccaacgactacatgaccagccccgccagactgggcagccagcacagccccggcagaaccgccagcctgaaccagagacccagaacccacagcggcagcagcggcggcagcggcagcagagagaacagcggcagcagcagcatcggcatccccatcgccgtgcccacccccagcccccccaccatcggccccgcccccggcagcgcccccggcagccagtacggcaccatgaccagacagatcagcagacacaacagcaccaccagcagcaccagcagcggcggctacagaagaacccccagcgtgaccgcccagttcagcgcccagccccacgtgaacggcggccccctgtacagccagaacagcatcagcatcgcccccccccccccccccatgccccagctgaccccccagatccccctgaccggcttcgtggccagagtgcaggagaacatcgccgacagccccacccccccccccccccccccccccgacgacatccccatgttcgacgacagcccccccccccccccccccccccccgtggactacgaggacgaggaggccgccgtggtgcagtacaacgacccctacgccgacggcgaccccgcctgggcccccaagaactacatcgagaaggtggtggccatctacgactacaccaaggacaaggacgacgagctgagcttcatggagggcgccatcatctacgtgatcaagaagaacgacgacggctggtacgagggcgtgtgcaacagagtgaccggcctgttccccggcaactacgtggagagcatcatgcactacaccgactag

SEQ ID NO: 70677 - protein, 451 aa, Artificial Sequence
  derived and/or modified sequence
MAELQMLLEEEIPSGKRALIESYQNLTRVADYCENNYIQATDKRKALEETKAYTTQSLASVAYQINALANNVLQLLDIQASQLRRMESSINHISQTVDIHKEKVARREIGILTTNKNTSRTHKIIAPANMERPVRYIRKPIDYTVLDDVGHGVKWLKAKHGNNQPARTGTLSRTNPPTQKPPSPPMSGRGTLGRNTPYKTLEPVKPPTVPNDYMTSPARLGSQHSPGRTASLNQRPRTHSGSSGGSGSRENSGSSSIGIPIAVPTPSPPTIGPAPGSAPGSQYGTMTRQISRHNSTTSSTSSGGYRRTPSVTAQFSAQPHVNGGPLYSQNSIADSPTPPPPPPPDDIPMFDDSPPPPPPPPVDYEDEEAAVVQYNDPYADGDPAWAPKNYIEKVVAIYDYTKDKDDELSFMEGAIIYVIKKNDDGWYEGVCNRVTGLFPGNYVESIMHYTD

SEQ ID NO: 70678 - DNA, 1356 bp, Artificial Sequence
  derived and/or modified sequence
atggccgagctgcagatgctactggaggaagaaattccctcaggaaaacgggcccttatcgaaagctaccagaatctaacacgcgtggctgactactgtgaaaacaattatatccaggcaacagacaaaagaaaggctctggaggagaccaaggcctatacaactcagagcttggcttccgtggcttatcagatcaacgccctagctaataacgtactgcagctgctggatatacaagcttcgcagctgcggcggatggaatcctccataaatcatatctcacagactgtagatattcacaaggaaaaagtggcgcgccgggagattggtattttgaccactaacaaaaacacttccagaacccataaaattatcgccccagcaaatatggagcgcccggtcagatatattaggaagccaatagattatacagttctggatgatgtgggacacggagtgaagtggttgaaggccaaacacgggaataatcagcccgcccgcactggcacattatcccggacaaacccgcctacccagaagcccccctccccccctatgagtggccgtgggacattaggacggaatacgccttacaagaccctggagccggtgaaacctcccactgtgcctaatgactatatgacttccccagcacgcctgggttcacaacactctcccgggagaacagctagtcttaaccaacgtccccggacccacagcggctcctcagggggctccggatcccgggagaacagcggtagctcttcaatcggcattccaattgcggtacctacccctagtccacccactattgggcccgcacctggcagcgcccctggaagccaatacggcacaatgacacgccagatttctagacataacagcaccacctccagcaccagttctggaggctacaggcggactccaagtgtgacagctcagttcagtgctcagccccacgtcaatggcggccctttgtacagccagaattcaattgctgacagccccaccccccccccccctccccctcctgacgacattccgatgttcgacgacagtccaccccccccccctcccccccccgtcgactatgaggacgaggaagccgctgtggtgcaatacaatgacccttacgcagacggcgatccagcttgggcgccgaaaaattacatcgagaaggttgttgctatttatgattatacgaaggataaggacgacgagctgtctttcatggaaggagctatcatctatgtgataaagaaaaatgatgatggctggtacgaaggggtgtgtaatcgcgtgaccgggttgttcccaggcaactatgtggagagtatcatgcactatactgactag

SEQ ID NO: 70679 - DNA, 1356 bp, Artificial Sequence
  derived and/or modified sequence
atggccgagctgcagatgctgctggaggaggagatccccagcggcaagagggccctgattgagagctaccagaacctgaccagggtggccgactactgtgagaacaactacatccaggccacagacaagaggaaggccctggaggagaccaaggcctacaccacccagagcctggcctctgtggcctaccagatcaatgccctggccaacaacgtgctgcagctgctggacatccaggccagccagctgcggaggatggagagcagcatcaaccacatcagccagacagtggacatccacaaggagaaggtggcccggcgggagatcggcatcctgaccaccaacaagaacaccagcaggacccacaagatcatcgccccagccaacatggagaggcctgtgcgctacatcaggaagcccatcgactacacagtgctggatgatgtgggccatggagtgaagtggctgaaggccaagcacggcaacaaccagcctgccaggacaggcaccctgagcaggaccaacccccccacccagaagccacccagcccccccatgagcggccggggcaccctgggcaggaacaccccctacaagaccctggagcctgtgaagccacccaccgtgcccaatgactacatgaccagccctgcccggctgggcagccagcacagccctggccgcacagccagcctgaaccagaggcccaggacccacagcggcagcagcggcggcagcggcagccgggagaacagcggcagcagcagcatcggcatccccatcgctgtgcccacccccagcccccccaccatcggccctgcccctggcagcgcccctggcagccagtatggcaccatgacccggcagatcagccgccacaacagcaccaccagcagcaccagcagcggcggctacagaaggacccccagcgtgacagcccagttcagcgcccagccccacgtgaatggaggccccctgtacagccagaacagcattgctgacagccccaccccacctcctcctcctcctccagatgacatccccatgtttgatgacagccccccacctcctcctcctcctcctgtggactatgaagatgaggaggccgctgtggtgcagtacaatgacccctatgcagatggagaccctgcctgggcccccaagaactacatcgagaaggtggtggccatctatgactacaccaaggacaaggatgatgagctgtccttcatggagggcgccatcatctacgtgatcaagaagaatgatgatggctggtatgaaggagtgtgcaacagagtgacaggcctcttccctggcaactacgtggagagcatcatgcactacacagactag

SEQ ID NO: 70680 - DNA, 1356 bp, Artificial Sequence
  derived and/or modified sequence
atggccgagctgcagatgctgctggaggaggagatccccagcggcaaaagagccctgatcgagagttaccagaacttaacacgggtggccgattactgcgaaaataattatatacaggctacagacaaacgaaaggccttagaagagacaaaggcctacaccacacagtccttggcctctgtggcctatcagataaacgcattggcaaataacgtgttacagcttctggatatccaggcttcgcagctgcggcgcatggaatcctccattaaccacatatcccagactgtcgacattcacaaagagaaggtggcccggagagaaattgggatactcacaacaaataaaaatacatcacggacgcataagatcattgcccctgcgaatatggagcgacctgtacgctacatacggaaacccatcgattatacagtcttggatgacgtgggacacggtgttaagtggctgaaagccaagcacgggaataatcagccagcacgtaccgggacactgagtaggacaaatccccctacacagaaacctccaagccccccaatgtcagggcgaggaaccctcggtcgcaataccccatacaaaaccctcgaaccagtgaagcccccaaccgtgccgaacgactatatgacctctcctgcgaggcttggcagtcagcattctcccggccggaccgcctccttgaaccagaggccaaggactcactcaggctcatccggaggcagcggaagtagagaaaattcgggctccagttcaattgggatcccaatcgcggtgcctacacccagtcccccaacgataggacccgcacccggaagtgcccccggctcgcaatacggcaccatgacccggcagatatcgagacataatagtacaacaagtagcacctcttcagggggctacagaagaactccctcagtgactgcacagtttagcgctcaacctcatgtcaacggaggcccattgtacagtcagaattccatcgctgacagtcctacccctccccccccgccaccgccagacgatatccccatgttcgatgatagtcctccccctccgcccccgcctcccgttgattatgaggacgaggaggcagccgtggtgcagtataacgatccctatgccgatggcgaccctgcttgggcccccaagaactacatagagaaggttgtggccatatacgactataccaaggataaggacgatgagctgagctttatggaaggcgccataatctacgtgatcaagaaaaatgatgacggatggtatgaaggcgtgtgcaaccgcgtgaccggtctgtttcccgggaattatgttgagtccattatgcattataccgattag

SEQ ID NO: 70681 - DNA, 1356 bp, Artificial Sequence
  derived and/or modified sequence
atggctgagctacagatgttgctcgaagaagaaatcccttctggtaagagagccttgattgagtcctaccaaaacctgacccgggtggcagattactgtgaaaacaattacattcaagccaccgacaaacgcaaagccctggaggaaaccaaagcttacacgacacagagtctagcttccgtggcctaccagatcaacgccctggccaataacgtgttacagctgctggacatccaggcttctcagctccgaaggatggaatcttcaataaatcatatatctcagactgttgacattcataaggagaaggtcgcacggagggagattggtatacttactactaacaagaacacctcaaggacccacaaaattattgcccctgctaatatggagcgcccagttagatatattcgcaagccgattgattataccgtgttagacgatgtcggtcacggtgtcaagtggctgaaggcaaagcacggcaacaatcagcccgctcgtactggtacgctgagccgtaccaaccctcccacccagaaacctcccagtccccctatgagcggcaggggaacgttgggaagaaatacaccttataagactctggagcctgtaaaacctcctaccgtgccaaatgattacatgacctccccggctagactcggttctcagcatagtccgggtcggacagcgtcccttaatcagaggccacggactcacagcggctcttctgggggatcaggatccagggagaactccggttcctccagtattgggatccccattgccgtgcctacgccctcccctccaacgataggcccagcacccggatctgcacccggatcccagtacgggaccatgacacgtcagattagcagacacaattcaactacctcaagcacaagttccggaggataccggagaacgcctagcgtgacagcccagtttagcgcccaacctcacgtcaacgggggacctctctattcgcagaacagcatcgcagattccccgacccctccgccacctcccccaccagatgacattcctatgttcgatgactccccaccacctccaccaccgcctccagtagattacgaagacgaggaggctgccgtggtgcaatataatgatccgtacgcggacggcgatcccgcttgggctcccaaaaactatatcgaaaaggtggtggcgatttatgattatacaaaggacaaagacgatgaactgagcttcatggagggcgctattatttatgtaatcaagaaaaatgatgacggctggtacgagggcgtgtgtaaccgagtgactggcctgttcccagggaactatgtggagtccattatgcactacactgattag

SEQ ID NO: 70682 - DNA, 3362 bp, Artificial Sequence
  derived and/or modified sequence
cgagaggaagcgatgcagaggggtggaaaatggcagagctgcagatgttactagaggaggagatcccgtctggcaagagggcgctgatcgagagttaccagaacctgactcgggtggcagactactgtgaaaacaactacatacaggctacagacaagagaaaagctttagaggagaccaaagcctatacaacccaatctctagctagtgttgcttatcaaataaatgcattggccaacaatgtactccagttgctggatatccaagcctctcagcttcggagaatggagtcttccatcaatcatatctcacagactgtggatattcataaggagaaagtggcacgaagagagattggtattttgacaacaaataagaatacatcaagaactcacaaaataatagcacctgcgaatatggagcgccctgtaaggtatattcggaaacctatcgattacacagttctggatgatgtgggccatggtgtcaagtggctaaaagccaagcatggaaataaccagcctgcaagaactggcacactgtcgagaacaaatcctcctactcagaaaccgccaagtcctcccatgtcaggccggggaacactgggacggaatactccttataaaaccctggaacctgttaaacccccaacagttcctaatgactatatgaccagtcctgctaggcttggaagtcagcatagtccaggcaggacagcatctttaaatcagagaccaaggacacacagtggaagtagtggaggaagtggaagtcgagaaaacagtggtagcagtagtattggcattcccattgctgtgcctacaccttcgccacccactattggaccagccccgggctcagctcctggttcccagtatggcacaatgaccaggcagatatctcgacacaactctactacttcttcgacatcttctggtggatacagacgaactccctctgtgactgctcaattttctgctcagcctcatgttaatggaggtccactttattctcaaaattcaattgctgatagtccaactccaccgccaccacctccaccagatgacattcccatgtttgatgactctccacctcccccaccaccaccaccagtggattatgaagatgaggaggctgcagtagttcagtataatgatccatatgcagatggggatcctgcttgggcccccaagaattatattgagaaagttgttgcaatatatgattatacaaaagacaaggatgatgagctgtcatttatggagggtgcaatcatttatgttataaagaagaatgatgatggctggtatgaaggagtctgcaatcgagtgactggtctgttccctgggaactatgttgaatcaatcatgcactatactgattaatttttttttttcttttgaagtagattcttattactcagtcatactgtgggactattatggttaacagaactgtcttaatatgttttaaaatgtgcccatattttcagaacatgctgttttattggtaaattgaatgtctacctgtaagcataaatctttgaggcagtttatgtattgctgaatagcaatttatacaagaagctgtccataactgattatgcttatgtacttacttacacatttttaactttatgaccagcctaaatattctgggggaagtggggtataatatttaacgaatcatgattcagattgtaccattacatgtttcagtgcagcatggttactaacgctatgtcagactaatattaaaatcagaaaatttaaatgctggtgctggtcagactttttttgttagattctctcatttaaaaaaaatactgtttgtttaaagcatgcataaaaatttatgtattgaaatatacttaaaaattcaagatgcttcccatttgtgtaatatttacctggaggactcgtacttaggtgtcttaacgtgaattgagtctccaaggtctccatgtgaaacaagcaaaaagagaattatctgtaatgttgtaatttgtacctaagttttttaatgagtgaaatttgcattataaactttttccattcataaatacataagtgaaccaaaggtttttgtcctttccttcactgatttgctttaaaaaaaataaaagataatgatttattgcagaattatgattctattttctcaatatgttaacttggaaaaaaattttagccttatcttaatctgtcccaacagcaatgtgacggatttttgcagattcaaaatctgcaatggttatttacaagtcaatctactgaattccttttttaaataatcttttgaaactaagaaaatgtgtcaaattgtgtgcattcattctgtaggtaaaattcttaaggattgccatgtcagtccttcagttgtacagtgaactgttgtacactggttcaatgaaaggaagttaaaagtaccttttacatattgtaaaagtggatacagttgatttgtgagtaggcactctttaatccattacctggcactagcaacattagaattttaaaataaaataattgggaaagaaggtgggtcatgtattaatcagtgaacagagatttacctaaccaacagacttggattgtcttttgacataatcaaaatgcaacacatgcactttgtgtgtctcctcttaattgaagggagggctgagggatgttttctcttcttgtcttgtgtataattctctattgcttaggatattaaagtagagcactcaagtgtgggtttctgtgttattgaggatttgtttggaattcaaattacagttatgtactggatgctacagacttataacagcatagtgaatggtaagactagtgcaaaacagttatttctgaaaattaaagaccattattgctaccaaatcaatgtgactatttcatatgcattttgcctttgttaattttaaacaaacaaagtatcattagtgatcagctagctaccttctactttccatttttcaagtggattgttctcttaatttgtatataacctgttgtctaaattttatgtacagtcttttataataaaccattctcctatatgaaattttggatactgttaaaatataactcatgtggacttcaatgcagacttcacatttttctgacctttactcctacggtaaatcaagacaaaccatttgaattttaacattggttatttatttgtgtaatggccttacatgtggatattaacagtgtaaacaataccacatataaccatcaagataccttgattataatttataggactagaatgacagattcaggtggtttattaattacatttaaaaagttttctgaaaaaacttttgcaataaaaaaaaataaattgcccatcaataa

SEQ ID NO: 70683 - DNA, 1356 bp, Artificial Sequence
  derived and/or modified sequence
atggccgagctgcagatgctgctggaggaggagatccccagcggcaagagagccctgatcgagagctaccagaacctgaccagagtggccgactactgcgagaacaactacatccaggccaccgacaagagaaaggccctggaggagaccaaggcctacaccacccagagcctggccagcgtggcctaccagatcaacgccctggccaacaacgtgctgcagctgctggacatccaggccagccagctgagaagaatggagagcagcatcaaccacatcagccagaccgtggacatccacaaggagaaggtggccagaagagagatcggcatcctgaccaccaacaagaacaccagcagaacccacaagatcatcgcccccgccaacatggagagacccgtgagatacatcagaaagcccatcgactacaccgtgctggacgacgtgggccacggcgtgaagtggctgaaggccaagcacggcaacaaccagcccgccagaaccggcaccctgagcagaaccaacccccccacccagaagccccccagcccccccatgagcggcagaggcaccctgggcagaaacaccccctacaagaccctggagcccgtgaagccccccaccgtgcccaacgactacatgaccagccccgccagactgggcagccagcacagccccggcagaaccgccagcctgaaccagagacccagaacccacagcggcagcagcggcggcagcggcagcagagagaacagcggcagcagcagcatcggcatccccatcgccgtgcccacccccagcccccccaccatcggccccgcccccggcagcgcccccggcagccagtacggcaccatgaccagacagatcagcagacacaacagcaccaccagcagcaccagcagcggcggctacagaagaacccccagcgtgaccgcccagttcagcgcccagccccacgtgaacggcggccccctgtacagccagaacagcatcgccgacagccccacccccccccccccccccccccccgacgacatccccatgttcgacgacagcccccccccccccccccccccccccgtggactacgaggacgaggaggccgccgtggtgcagtacaacgacccctacgccgacggcgaccccgcctgggcccccaagaactacatcgagaaggtggtggccatctacgactacaccaaggacaaggacgacgagctgagcttcatggagggcgccatcatctacgtgatcaagaagaacgacgacggctggtacgagggcgtgtgcaacagagtgaccggcctgttccccggcaactacgtggagagcatcatgcactacaccgactag

SEQ ID NO: 70684 - protein, 446 aa, Artificial Sequence
  derived and/or modified sequence
MAELQMLLEEEIPSGKRALIESYQNLTRVADYCENNYIQATDKRKALEETKAYTTQSLASVAYQINALANNVLQLLDIQASQLRRMESSINHISQTVDIHKEKVARREIGILTTNKNTSRTHKIIAPANMERPVRYIRKPIDYTVLDDVGHGVKHGNNQPARTGTLSRTNPPTQKPPSPPMSGRGTLGRNTPYKTLEPVKPPTVPNDYMTSPARLGSQHSPGRTASLNQRPRTHSGSSGGSGSRENSGSSSIGIPIAVPTPSPPTIGPAPGSAPGSQYGTMTRQISRHNSTTSSTSSGGYRRTPSVTAQFSAQPHVNGGPLYSQNSIADSPTPPPPPPPDDIPMFDDSPPPPPPPPVDYEDEEAAVVQYNDPYADGDPAWAPKNYIEKVVAIYDYTKDKDDELSFMEGAIIYVIKKNDDGWYEGVCNRVTGLFPGNYVESIMHYTD

SEQ ID NO: 70685 - DNA, 1341 bp, Artificial Sequence
  derived and/or modified sequence
atggcagagctgcaaatgctgctggaagaagagatcccgtcagggaaacgcgctctcatcgaaagttatcaaaatctaaccagagtggctgactattgtgaaaacaattatatccaagccacagacaagcggaaagccttagaggaaaccaaagcctatactactcagtccctagcttccgtagcatatcagataaacgccctggcgaataacgtgttacagctgctggacatccaggcgtctcaattaaggcgtatggaatcaagtatcaatcatatcagtcaaacagtggacatccataaagaaaaagtcgcccgcagagagatcggcatcttgactacaaataagaacacttcaaggacgcataaaataattgcgcctgccaacatggagcgccctgtcaggtacatccgcaaaccaatcgactacacagtattggatgacgttggacacggagtaaagcacggcaataatcagccagctcggacaggaaccctcagtaggaccaaccctcctacccagaaaccaccgtcacctccgatgagcggacgaggtaccctgggacgcaacaccccatataagactttggagcccgtcaagccaccaactgtgccaaacgactatatgacttccccggcccggctagggtcccagcattcacccggacgaacggccagccttaaccagcgacccaggacccactccgggagcagcgggggctcaggatccagggagaactcaggtagttctagtattggaatccctatcgcagtccccaccccttcaccgcctaccatcggcccagctcccggctctgctcctggctctcagtatggtacgatgacgaggcagatttccaggcacaactctacaaccagttccacgtcaagcgggggttacaggcgtacgccctccgtgactgcacaatttagcgcccagccccatgtgaacggcggtcccctttactctcagaactccattgccgacagccctacgcccccacccccccctcccccggatgatatcccaatgtttgatgatagccccccacctcccccgccgccaccggtggactatgaggatgaagaggcggcagttgttcagtataacgatccatacgcagacggggatccagcttgggcccctaagaattacattgagaaagtcgtggctatctacgactataccaaggacaaagacgacgagttgtcgtttatggaaggcgccattatctacgtcataaagaagaatgatgacgggtggtacgaaggagtgtgtaaccgcgtaaccggccttttccccggaaattatgtcgaaagcattatgcactacacggattag

SEQ ID NO: 70686 - DNA, 1341 bp, Artificial Sequence
  derived and/or modified sequence
atggccgagctgcagatgctgctggaggaggagatccccagcggcaagagggccctgattgagagctaccagaacctgaccagggtggccgactactgtgagaacaactacatccaggccacagacaagaggaaggccctggaggagaccaaggcctacaccacccagagcctggcctctgtggcctaccagatcaatgccctggccaacaacgtgctgcagctgctggacatccaggccagccagctgcggaggatggagagcagcatcaaccacatcagccagacagtggacatccacaaggagaaggtggcccggcgggagatcggcatcctgaccaccaacaagaacaccagcaggacccacaagatcatcgccccagccaacatggagaggcctgtgcgctacatcaggaagcccatcgactacacagtgctggatgatgtgggccatggagtgaagcacggcaacaaccagcctgccaggacaggcaccctgagcaggaccaacccccccacccagaagccacccagcccccccatgagcggccggggcaccctgggcaggaacaccccctacaagaccctggagcctgtgaagcccccaacagtgcccaatgactacatgaccagccctgcccggctgggcagccagcacagccctggccgcacagccagcctgaaccagaggcccaggacccacagcggcagcagcggcggcagcggcagcagagaaaattctggcagcagcagcatcggcatccccatcgctgtgcccacccccagcccccccaccatcggccctgcccctggcagcgcccctggcagccagtatggcaccatgacccggcagatcagccgccacaacagcaccaccagcagcaccagcagcggcggctacagaaggaccccatctgtgacagcccagttcagcgcccagccccacgtgaatggaggccccctgtacagccagaacagcattgctgacagccccaccccacctcctcctcctcctccagatgacatccccatgtttgatgacagccccccacctcctcctcctcctcctgtggactatgaagatgaggaggccgctgtggtgcagtacaatgacccctatgcagatggagaccctgcctgggcccccaagaactacatcgagaaggtggtggccatctatgactacaccaaggacaaggatgatgagctgtccttcatggagggcgccatcatctacgtgatcaagaagaatgatgatggctggtatgagggcgtgtgcaacagagtgacaggcctcttccctggcaactacgtggagagcatcatgcactacacagactag

SEQ ID NO: 70687 - DNA, 1341 bp, Artificial Sequence
  derived and/or modified sequence
atggccgagctgcagatgctgctggaggaggagatccccagcggcaaacgggctctgattgagtcataccagaacttaacacgggtcgccgattattgcgaaaataattacatccaagccacggacaagaggaaagcacttgaagagactaaggcctatactacacagtcccttgctagcgtcgcttaccaaatcaacgcactagctaataatgtgctccagttactcgatatccaggccagccagctgaggagaatggaatcaagtattaatcatatttcgcagaccgtggatatccataaagagaaagtggcaaggcgagagatcgggatactgaccacgaataagaatacatccaggactcacaaaattattgcgccagccaacatggagagacccgtgaggtacattcgtaaacctatcgattacaccgttcttgatgacgtgggacacggagtgaaacacggtaacaatcaaccagccagaacgggaaccctgagccgtacaaatcccccgacacagaaacccccatccccccctatgagcgggaggggaaccttggggcgaaatacaccttataaaacgctagagcccgtgaaacccccaactgtgcccaatgactatatgacctcgcctgctcgcctggggagtcagcacagccccgggcggaccgcttcattaaaccagagaccgagaacacactctggttcttccggaggctctgggtctcgcgaaaatagtgggtccagctccataggcatacctatcgccgtaccaacacccagcccccccaccattggtcctgctcccggttctgctcccgggtcgcagtacggcactatgacccgccagatttcccgccacaattccactacttcatctacatcaagcggagggtatcgccggacccccagcgtcacagcacagttttcggcccagccacacgttaacggcggaccactctattcgcagaactcgatcgctgattccccgacacccccgcctccacctcctcctgacgacatccctatgttcgacgattccccccccccccccccgcctccgcctgtagattatgaggacgaggaggccgctgtagtccagtacaatgatccctacgctgacggggatcctgcatgggcccccaaaaactatatcgagaaagtggtcgccatctatgactacacaaaggacaaagatgatgagcttagctttatggagggagccatcatttacgtgattaaaaagaacgacgatggatggtacgagggtgtttgcaaccgcgtcactggactgttccccggcaattacgtggaatctattatgcactacacggactag

SEQ ID NO: 70688 - DNA, 1341 bp, Artificial Sequence
  derived and/or modified sequence
atggccgaactgcaaatgctgctcgaggaagaaatacctagcgggaagcgggcactgatagaaagttaccaaaatctgacccgggtagcggattactgcgagaacaactacatccaggccaccgacaaacggaaggcactagaggaaacgaaagcctatacaactcagtctctggcatccgtagcttaccagattaacgctctggcgaacaacgtgcttcaactattggatatccaggcatcacaacttcgtagaatggaatctagtataaatcatatcagtcagaccgtcgatatccataaagaaaaagtcgcaagacgcgagatcggaatcctgaccaccaacaagaatacctctcgaacccataaaatcatcgctcctgcaaatatggagcgtccggtgcgctatattcgtaaacccatagactatacggtccttgatgatgtcggccatggtgtgaagcatggcaacaatcagcctgctagaacagggactctgtcccgaacgaacccacctacacaaaagccacccagccctcccatgtccggtcgcggaacgctcggaagaaacacgccctacaagaccttagagcccgttaagccgccaaccgttcctaacgattacatgacatcaccagccagactcgggtcacaacacagccccggtcggaccgctagcctgaaccagagacctcgtacccactccggatcttctggcggtagcggcagcagggaaaacagtgggagctcttccatcggcattccaatcgccgtgcccactcccagtccccctacaatcgggcctgccccaggctctgcccctgggtcccagtacggaacaatgactcgccagatctctcggcacaactcgacgacgtcctctacctctagcggaggttacagacgcacacccagtgtgactgcccagtttagcgctcaacctcacgtgaacggtgggcctttgtactcccagaactctatcgccgactcccctaccccccctcctcctcctcctcccgacgatataccaatgttcgacgattctcccccaccccctccacctccacccgtggattatgaggacgaagaggcagcagtcgtacaatacaacgacccttacgctgacggcgaccctgcctgggcaccaaagaactacattgagaaagtcgtcgccatctatgattataccaaggacaaagacgacgagctgtcattcatggagggcgctatcatatacgttattaaaaagaacgatgatggctggtacgaaggagtgtgcaacagagttactggactgttccctggaaactacgtggagtcaattatgcactacacggactag

SEQ ID NO: 70689 - DNA, 3441 bp, Artificial Sequence
  derived and/or modified sequence
acaataccaggcgggagggcgggtaggcggtttgtatccgggctgtgaggtgctcggagcctcggcggaccttgctgcctctgtctctttaacgcgagaggaagcgatgcagaggggtggaaaatggcagagctgcagatgttactagaggaggagatcccgtctggcaagagggcgctgatcgagagttaccagaacctgactcgggtggcagactactgtgaaaacaactacatacaggctacagacaagagaaaagctttagaggagaccaaagcctatacaacccaatctctagctagtgttgcttatcaaataaatgcattggccaacaatgtactccagttgctggatatccaagcctctcagcttcggagaatggagtcttccatcaatcatatctcacagactgtggatattcataaggagaaagtggcacgaagagagattggtattttgacaacaaataagaatacatcaagaactcacaaaataatagcacctgcgaatatggagcgccctgtaaggtatattcggaaacctatcgattacacagttctggatgatgtgggccatggtgtcaagcatggaaataaccagcctgcaagaactggcacactgtcgagaacaaatcctcctactcagaaaccgccaagtcctcccatgtcaggccggggaacactgggacggaatactccttataaaaccctggaacctgttaaacccccaacagttcctaatgactatatgaccagtcctgctaggcttggaagtcagcatagtccaggcaggacagcatctttaaatcagagaccaaggacacacagtggaagtagtggaggaagtggaagtcgagaaaacagtggtagcagtagtattggcattcccattgctgtgcctacaccttcgccacccactattggaccagccccgggctcagctcctggttcccagtatggcacaatgaccaggcagatatctcgacacaactctactacttcttcgacatcttctggtggatacagacgaactccctctgtgactgctcaattttctgctcagcctcatgttaatggaggtccactttattctcaaaattcaattgctgatagtccaactccaccgccaccacctccaccagatgacattcccatgtttgatgactctccacctcccccaccaccaccaccagtggattatgaagatgaggaggctgcagtagttcagtataatgatccatatgcagatggggatcctgcttgggcccccaagaattatattgagaaagttgttgcaatatatgattatacaaaagacaaggatgatgagctgtcatttatggagggtgcaatcatttatgttataaagaagaatgatgatggctggtatgaaggagtctgcaatcgagtgactggtctgttccctgggaactatgttgaatcaatcatgcactatactgattaatttttttttttcttttgaagtagattcttattactcagtcatactgtgggactattatggttaacagaactgtcttaatatgttttaaaatgtgcccatattttcagaacatgctgttttattggtaaattgaatgtctacctgtaagcataaatctttgaggcagtttatgtattgctgaatagcaatttatacaagaagctgtccataactgattatgcttatgtacttacttacacatttttaactttatgaccagcctaaatattctgggggaagtggggtataatatttaacgaatcatgattcagattgtaccattacatgtttcagtgcagcatggttactaacgctatgtcagactaatattaaaatcagaaaatttaaatgctggtgctggtcagactttttttgttagattctctcatttaaaaaaaatactgtttgtttaaagcatgcataaaaatttatgtattgaaatatacttaaaaattcaagatgcttcccatttgtgtaatatttacctggaggactcgtacttaggtgtcttaacgtgaattgagtctccaaggtctccatgtgaaacaagcaaaaagagaattatctgtaatgttgtaatttgtacctaagttttttaatgagtgaaatttgcattataaactttttccattcataaatacataagtgaaccaaaggtttttgtcctttccttcactgatttgctttaaaaaaaataaaagataatgatttattgcagaattatgattctattttctcaatatgttaacttggaaaaaaattttagccttatcttaatctgtcccaacagcaatgtgacggatttttgcagattcaaaatctgcaatggttatttacaagtcaatctactgaattccttttttaaataatcttttgaaactaagaaaatgtgtcaaattgtgtgcattcattctgtaggtaaaattcttaaggattgccatgtcagtccttcagttgtacagtgaactgttgtacactggttcaatgaaaggaagttaaaagtaccttttacatattgtaaaagtggatacagttgatttgtgagtaggcactctttaatccattacctggcactagcaacattagaattttaaaataaaataattgggaaagaaggtgggtcatgtattaatcagtgaacagagatttacctaaccaacagacttggattgtcttttgacataatcaaaatgcaacacatgcactttgtgtgtctcctcttaattgaagggagggctgagggatgttttctcttcttgtcttgtgtataattctctattgcttaggatattaaagtagagcactcaagtgtgggtttctgtgttattgaggatttgtttggaattcaaattacagttatgtactggatgctacagacttataacagcatagtgaatggtaagactagtgcaaaacagttatttctgaaaattaaagaccattattgctaccaaatcaatgtgactatttcatatgcattttgcctttgttaattttaaacaaacaaagtatcattagtgatcagctagctaccttctactttccatttttcaagtggattgttctcttaatttgtatataacctgttgtctaaattttatgtacagtcttttataataaaccattctcctatatgaaattttggatactgttaaaatataactcatgtggacttcaatgcagacttcacatttttctgacctttactcctacggtaaatcaagacaaaccatttgaattttaacattggttatttatttgtgtaatggccttacatgtggatattaacagtgtaaacaataccacatataaccatcaagataccttgattataatttataggactagaatgacagattcaggtggtttattaattacatttaaaaagttttctgaaaaaacttttgcaataaaaaaaaataaattgcccatcaataa

SEQ ID NO: 70690 - DNA, 1341 bp, Artificial Sequence
  derived and/or modified sequence
atggccgagctgcagatgctgctggaggaggagatccccagcggcaagagagccctgatcgagagctaccagaacctgaccagagtggccgactactgcgagaacaactacatccaggccaccgacaagagaaaggccctggaggagaccaaggcctacaccacccagagcctggccagcgtggcctaccagatcaacgccctggccaacaacgtgctgcagctgctggacatccaggccagccagctgagaagaatggagagcagcatcaaccacatcagccagaccgtggacatccacaaggagaaggtggccagaagagagatcggcatcctgaccaccaacaagaacaccagcagaacccacaagatcatcgcccccgccaacatggagagacccgtgagatacatcagaaagcccatcgactacaccgtgctggacgacgtgggccacggcgtgaagcacggcaacaaccagcccgccagaaccggcaccctgagcagaaccaacccccccacccagaagccccccagcccccccatgagcggcagaggcaccctgggcagaaacaccccctacaagaccctggagcccgtgaagccccccaccgtgcccaacgactacatgaccagccccgccagactgggcagccagcacagccccggcagaaccgccagcctgaaccagagacccagaacccacagcggcagcagcggcggcagcggcagcagagagaacagcggcagcagcagcatcggcatccccatcgccgtgcccacccccagcccccccaccatcggccccgcccccggcagcgcccccggcagccagtacggcaccatgaccagacagatcagcagacacaacagcaccaccagcagcaccagcagcggcggctacagaagaacccccagcgtgaccgcccagttcagcgcccagccccacgtgaacggcggccccctgtacagccagaacagcatcgccgacagccccacccccccccccccccccccccccgacgacatccccatgttcgacgacagcccccccccccccccccccccccccgtggactacgaggacgaggaggccgccgtggtgcagtacaacgacccctacgccgacggcgaccccgcctgggcccccaagaactacatcgagaaggtggtggccatctacgactacaccaaggacaaggacgacgagctgagcttcatggagggcgccatcatctacgtgatcaagaagaacgacgacggctggtacgagggcgtgtgcaacagagtgaccggcctgttccccggcaactacgtggagagcatcatgcactacaccgactag

SEQ ID NO: 70691 - protein, 423 aa, Artificial Sequence
  derived and/or modified sequence
MAELQMLLEEEIPSGKRALIESYQNLTRVADYCENNYIQATDKRKALEETKAYTTQSLASVAYQINALANNVLQLLDIQASQLRRMESSINHISQTVDIHKEKVARREIGILTTNKNTSRTHKIIAPANMERPVRYIRKPIDYTVLDDVGHGVKKWHKIIHGNNQPARTGTLSRTNPPTQKPPSPPMSGRGTLGRNTPYKTLEPVKPPTVPNDYMTSPARLGSQHSPGRTASLNQRPRTHSGSSGGSGSRENSGSSSIGIPIAVPTPSPPTIGPVSIAPPPPPMPQLTPQIPLTGFVARVQENIADSPTPPPPPPPDDIPMFDDSPPPPPPPPVDYEDEEAAVVQYNDPYADGDPAWAPKNYIEKVVAIYDYTKDKDDELSFMEGAIIYVIKKNDDGWYEGVCNRVTGLFPGNYVESIMHYTD

SEQ ID NO: 70692 - DNA, 1272 bp, Artificial Sequence
  derived and/or modified sequence
atggcagaactccagatgctgctggaggaggagatcccctccggaaaaagagccctcatcgagtcatatcagaatcttacacgggttgctgactactgcgagaataactatattcaggcgaccgacaagcggaaggcactagaagagactaaggcatacaccacccagtccttggccagcgtggcataccaaatcaacgccctggccaacaatgtgcttcagctgctcgacattcaagcatcacaactcagacggatggaaagctcaatcaatcacataagtcagacggtcgacattcataaagaaaaggttgccagacgcgagatcggtatcctgacaaccaataagaacaccagtagaacacataagattattgcaccggcgaacatggagcggccagtgaggtacatcaggaagccgatcgactacaccgtactcgatgacgtaggccatggagtgaaaaagtggcacaagattatccacgggaacaaccaacccgcccgcactgggaccttgtcccgcaccaacccccctacgcaaaagccaccatctcctcccatgagtgggcgcggtaccctagggagaaacacaccatataaaacacttgaaccagtgaaaccccccaccgttccgaacgactatatgacctcacccgctagacttggctcacagcattcgcccggtcgtactgctagcttgaaccagcgaccgcggacgcacagcggaagtagcgggggaagcgggtcaagagagaacagtggcagttctagcatcgggatcccaattgcggtgccaaccccaagccctccgaccattggtcccgtatcgattgctccaccccctccacccatgccccagctgacaccccaaattcctttgactggctttgtcgcaagagtccaagaaaatattgctgatagtccaactcctcctccccctcccccccctgatgacataccaatgtttgatgattctccgccccctccccccccacctccagtcgactacgaggacgaagaggccgccgtagttcaatacaacgacccatatgcagacggggatcccgcctgggctcctaagaactatattgagaaagtggtcgccatttatgattacacaaaggataaagatgatgagttgtcattcatggagggtgccatcatctacgtgatcaagaaaaacgatgatggctggtatgaaggcgtgtgtaaccgcgtcaccggactctttcctggcaactacgtagagtccatcatgcactatacagattag

SEQ ID NO: 70693 - DNA, 1272 bp, Artificial Sequence
  derived and/or modified sequence
atggccgagctgcagatgctgctggaggaggagatccccagcggcaagagggccctgattgagagctaccagaacctgaccagggtggccgactactgtgagaacaactacatccaggccacagacaagaggaaggccctggaggagaccaaggcctacaccacccagagcctggcctctgtggcctaccagatcaatgccctggccaacaacgtgctgcagctgctggacatccaggccagccagctgcggaggatggagagcagcatcaaccacatcagccagacagtggacatccacaaggagaaggtggcccggcgggagatcggcatcctgaccaccaacaagaacaccagcaggacccacaagatcatcgccccagccaacatggagaggcctgtgcgctacatcaggaagcccatcgactacacagtgctggatgatgtgggccatggagtgaagaagtggcacaagatcatccacggcaacaaccagcctgccaggacaggcaccctgagcaggaccaacccccccacccagaagccacccagcccccccatgagcggccggggcaccctgggcaggaacaccccctacaagaccctggagcctgtgaagcccccaacagtgcccaatgactacatgaccagccctgcccggctgggcagccagcacagccctggccgcacagccagcctgaaccagaggcccaggacccacagcggcagcagcggcggcagcggcagcagagaaaattctggcagcagcagcatcggcatccccatcgctgtgcccacccccagcccccccaccatcggccctgtgtccatcgcccctcctcctccacccatgccccagctgaccccccagatccccctgaccggctttgtggcccgggtgcaggagaacattgctgacagccccaccccacctcctcctcctcctccagatgacatccccatgtttgatgacagccccccacctcctcctcctcctcctgtggactatgaagatgaggaggccgctgtggtgcagtacaatgacccctatgcagatggagaccctgcctgggcccccaagaactacatcgagaaggtggtggccatctatgactacaccaaggacaaggatgatgagctgtccttcatggagggcgccatcatctacgtgatcaagaagaatgatgatggctggtatgaaggagtgtgcaacagagtgacaggcctcttccctggcaactacgtggagagcatcatgcactacacagactag

SEQ ID NO: 70694 - DNA, 1272 bp, Artificial Sequence
  derived and/or modified sequence
atggccgagctgcagatgctgctggaggaggagatccccagcggcaagcgcgctctgatagaatcttatcaaaacctcactcgtgtggccgactactgtgagaataattatatccaagctaccgacaagagaaaggctttagaggaaaccaaggcctacacgacccagtctttagcaagcgtggcataccagatcaacgctctcgccaataacgttttacagttgctcgatatccaggctagccagctcaggaggatggagagtagtatcaatcacatcagccagacagtagacatacacaaagaaaaagttgccaggcgcgaaattggcattctgaccaccaacaagaacacttctcggacacacaaaataattgcgcctgcaaatatggagaggcccgtgcgctatattaggaagcctatcgattacaccgttttggacgacgttggacacggcgtcaagaagtggcacaagatcatacacgggaataaccagccggcaagaacaggcaccctgtcaaggaccaatccccccacccagaagccacctagtccccctatgtccggccggggcactttaggacgcaataccccttataaaactctagagcctgtaaaaccgcctacagtgcccaatgattacatgacctctccagctagattaggaagccaacacagccccgggagaaccgcatctctgaatcagcggccaaggacccatagcgggtcctccggcggctcaggctcaagggagaactcgggctcctcctcaatcggaattccgatcgccgtccccacccccagtcctcccaccatcggcccagtgagtatcgcacctcctcccccacctatgccccagctcaccccgcagatcccactcacaggattcgtcgcaagggtacaggagaacattgcagacagccctacacctcctcctccccctccccctgacgacattccaatgtttgacgactccccaccaccacctcctcctccaccagttgactatgaggacgaagaagccgcagtcgttcagtataacgatccttatgccgacggggatcctgcatgggcaccaaaaaactacatcgagaaagtggtggccatttacgattatacaaaagataaggatgacgagctgtcttttatggagggcgctatcatctacgtcataaagaagaatgatgacgggtggtacgaaggagtctgtaatagagtgaccgggctgttcccaggcaactatgtggagagcattatgcactatactgattag

SEQ ID NO: 70695 - DNA, 1272 bp, Artificial Sequence
  derived and/or modified sequence
atggccgaactccagatgctcctggaagaggagattccatctggaaagcgggcacttatcgaatcctatcagaacttgacgagagttgcagactactgcgaaaataattatatccaggccacggataaacggaaggcccttgaagaaacaaaggcttatactacccagtccctcgccagcgtggcttatcagatcaatgccctggctaacaatgtgctgcagttgctggatatccaggctagtcagctgcgtaggatggagtcaagcataaaccatatcagccagactgtggacatccataaagagaaagtcgcaagacgtgaaattggcatcttgacaactaacaaaaatacctccaggacacacaagattatcgcccctgccaatatggagcgaccggtgagatatattcgcaaaccgatcgattacaccgttttggatgacgtgggccacggcgtcaagaaatggcacaagattatccatggcaacaatcagcccgcacgtacaggtaccttgtcccgtacgaacccccctacccagaaaccacctagcccaccgatgagtggaaggggaactctgggaaggaacactccatataagactttggagcccgttaagcctccaactgttcccaacgattatatgacttcccctgcccgactcgggtcccagcatagtcctgggaggacggcctccttgaaccaaagaccaaggactcactcaggcagcagcggtggcagcggctccagggaaaacagcgggagttcgagcatcggaatcccaattgcagtaccaacaccctctcctcccacaattggtcctgtcagcatagctccacctcccccacccatgcctcaattaactcctcaaataccactcacaggatttgtagccagggtacaggaaaacatcgctgattccccaaccccgcctccaccaccccctccagacgatatcccaatgttcgatgatagccccccaccacctcccccacccccagtcgactatgaggatgaggaagctgctgtcgttcagtacaacgacccatacgcagacggggatcccgcatgggcaccgaaaaattacatcgagaaggtggtggcaatttacgactatactaaggacaaggacgacgaactgtcttttatggagggcgctatcatttatgtgatcaagaagaatgatgacggctggtatgagggggtgtgcaaccgagtaactgggctctttccgggtaattacgtcgagtcgatcatgcactataccgactag

SEQ ID NO: 70696 - DNA, 3470 bp, Artificial Sequence
  derived and/or modified sequence
gagaaataaacgctcgcgagagaacgaggttcaggcggctgcacgaagggggtggaggggggctggagagagtgaggaggaaggggaggaggtgccgtcccacaataccaggcgggagggcgggtaggcggtttgtatccgggctgtgaggtgctcggagcctcggcggaccttgctgcctctgtctctttaacgcgagaggaagcgatgcagaggggtggaaaatggcagagctgcagatgttactagaggaggagatcccgtctggcaagagggcgctgatcgagagttaccagaacctgactcgggtggcagactactgtgaaaacaactacatacaggctacagacaagagaaaagctttagaggagaccaaagcctatacaacccaatctctagctagtgttgcttatcaaataaatgcattggccaacaatgtactccagttgctggatatccaagcctctcagcttcggagaatggagtcttccatcaatcatatctcacagactgtggatattcataaggagaaagtggcacgaagagagattggtattttgacaacaaataagaatacatcaagaactcacaaaataatagcacctgcgaatatggagcgccctgtaaggtatattcggaaacctatcgattacacagttctggatgatgtgggccatggtgtcaagaaatggcataaaataatacatggaaataaccagcctgcaagaactggcacactgtcgagaacaaatcctcctactcagaaaccgccaagtcctcccatgtcaggccggggaacactgggacggaatactccttataaaaccctggaacctgttaaacccccaacagttcctaatgactatatgaccagtcctgctaggcttggaagtcagcatagtccaggcaggacagcatctttaaatcagagaccaaggacacacagtggaagtagtggaggaagtggaagtcgagaaaacagtggtagcagtagtattggcattcccattgctgtgcctacaccttcgccacccactattggaccagtttctattgctccaccccctccccctatgcctcagttgactccacagatacctctcacaggcttcgtggccagggtgcaggaaaacattgctgatagtccaactccaccgccaccacctccaccagatgacattcccatgtttgatgactctccacctcccccaccaccaccaccagtggattatgaagatgaggaggctgcagtagttcagtataatgatccatatgcagatggggatcctgcttgggcccccaagaattatattgagaaagttgttgcaatatatgattatacaaaagacaaggatgatgagctgtcatttatggagggtgcaatcatttatgttataaagaagaatgatgatggctggtatgaaggagtctgcaatcgagtgactggtctgttccctgggaactatgttgaatcaatcatgcactatactgattaatttttttttttcttttgaagtagattcttattactcagtcatactgtgggactattatggttaacagaactgtcttaatatgttttaaaatgtgcccatattttcagaacatgctgttttattggtaaattgaatgtctacctgtaagcataaatctttgaggcagtttatgtattgctgaatagcaatttatacaagaagctgtccataactgattatgcttatgtacttacttacacatttttaactttatgaccagcctaaatattctgggggaagtggggtataatatttaacgaatcatgattcagattgtaccattacatgtttcagtgcagcatggttactaacgctatgtcagactaatattaaaatcagaaaatttaaatgctggtgctggtcagactttttttgttagattctctcatttaaaaaaaatactgtttgtttaaagcatgcataaaaatttatgtattgaaatatacttaaaaattcaagatgcttcccatttgtgtaatatttacctggaggactcgtacttaggtgtcttaacgtgaattgagtctccaaggtctccatgtgaaacaagcaaaaagagaattatctgtaatgttgtaatttgtacctaagttttttaatgagtgaaatttgcattataaactttttccattcataaatacataagtgaaccaaaggtttttgtcctttccttcactgatttgctttaaaaaaaataaaagataatgatttattgcagaattatgattctattttctcaatatgttaacttggaaaaaaattttagccttatcttaatctgtcccaacagcaatgtgacggatttttgcagattcaaaatctgcaatggttatttacaagtcaatctactgaattccttttttaaataatcttttgaaactaagaaaatgtgtcaaattgtgtgcattcattctgtaggtaaaattcttaaggattgccatgtcagtccttcagttgtacagtgaactgttgtacactggttcaatgaaaggaagttaaaagtaccttttacatattgtaaaagtggatacagttgatttgtgagtaggcactctttaatccattacctggcactagcaacattagaattttaaaataaaataattgggaaagaaggtgggtcatgtattaatcagtgaacagagatttacctaaccaacagacttggattgtcttttgacataatcaaaatgcaacacatgcactttgtgtgtctcctcttaattgaagggagggctgagggatgttttctcttcttgtcttgtgtataattctctattgcttaggatattaaagtagagcactcaagtgtgggtttctgtgttattgaggatttgtttggaattcaaattacagttatgtactggatgctacagacttataacagcatagtgaatggtaagactagtgcaaaacagttatttctgaaaattaaagaccattattgctaccaaatcaatgtgactatttcatatgcattttgcctttgttaattttaaacaaacaaagtatcattagtgatcagctagctaccttctactttccatttttcaagtggattgttctcttaatttgtatataacctgttgtctaaattttatgtacagtcttttataataaaccattctcctatatgaaattttggatactgttaaaatataactcatgtggacttcaatgcagacttcacatttttctgacctttactcctacggtaaatcaagacaaaccatttgaattttaacattggttatttatttgtgtaatggccttacatgtggatattaacagtgtaaacaataccacatataaccatcaagataccttgattataatttataggactagaatgacagattcaggtggtttattaattacatttaaaaagttttctgaaaaaacttttgcaataaaaaaaaataaattgcccatcaa

SEQ ID NO: 70697 - DNA, 1272 bp, Artificial Sequence
  derived and/or modified sequence
atggccgagctgcagatgctgctggaggaggagatccccagcggcaagagagccctgatcgagagctaccagaacctgaccagagtggccgactactgcgagaacaactacatccaggccaccgacaagagaaaggccctggaggagaccaaggcctacaccacccagagcctggccagcgtggcctaccagatcaacgccctggccaacaacgtgctgcagctgctggacatccaggccagccagctgagaagaatggagagcagcatcaaccacatcagccagaccgtggacatccacaaggagaaggtggccagaagagagatcggcatcctgaccaccaacaagaacaccagcagaacccacaagatcatcgcccccgccaacatggagagacccgtgagatacatcagaaagcccatcgactacaccgtgctggacgacgtgggccacggcgtgaagaagtggcacaagatcatccacggcaacaaccagcccgccagaaccggcaccctgagcagaaccaacccccccacccagaagccccccagcccccccatgagcggcagaggcaccctgggcagaaacaccccctacaagaccctggagcccgtgaagccccccaccgtgcccaacgactacatgaccagccccgccagactgggcagccagcacagccccggcagaaccgccagcctgaaccagagacccagaacccacagcggcagcagcggcggcagcggcagcagagagaacagcggcagcagcagcatcggcatccccatcgccgtgcccacccccagcccccccaccatcggccccgtgagcatcgcccccccccccccccccatgccccagctgaccccccagatccccctgaccggcttcgtggccagagtgcaggagaacatcgccgacagccccacccccccccccccccccccccccgacgacatccccatgttcgacgacagcccccccccccccccccccccccccgtggactacgaggacgaggaggccgccgtggtgcagtacaacgacccctacgccgacggcgaccccgcctgggcccccaagaactacatcgagaaggtggtggccatctacgactacaccaaggacaaggacgacgagctgagcttcatggagggcgccatcatctacgtgatcaagaagaacgacgacggctggtacgagggcgtgtgcaacagagtgaccggcctgttccccggcaactacgtggagagcatcatgcactacaccgactag

SEQ ID NO: 70698 - protein, 394 aa, Artificial Sequence
  derived and/or modified sequence
MAELQMLLEEEIPSGKRALIESYQNLTRVADYCENNYIQATDKRKALEETKAYTTQSLASVAYQINALANNVLQLLDIQASQLRRMESSINHISQTVDIHKEKVARREIGILTTNKNTSRTHKIIAPANMERPVRYIRKPIDYTVLDDVGHGVKKWHKIIHGNNQPARTGTLSRTNPPTQKPPSPPMSGRGTLGRNTPYKTLEPVKPPTVPNDYMTSPARLGSQHSPGRTASLNQRPRTHSGSSGGSGSRENSGSSSIGIPIAVPTPSPPTIGPVADSPTPPPPPPPDDIPMFDDSPPPPPPPPVDYEDEEAAVVQYNDPYADGDPAWAPKNYIEKVVAIYDYTKDKDDELSFMEGAIIYVIKKNDDGWYEGVCNRVTGLFPGNYVESIMHYTD

SEQ ID NO: 70699 - DNA, 1185 bp, Artificial Sequence
  derived and/or modified sequence
atggccgagctacagatgcttctagaggaagaaatcccttcgggcaagagagcattaattgaatcctaccagaacctgactagggtcgctgactactgtgagaacaattatatacaggccaccgataagcgtaaagcacttgaggagactaaggcatatacgacacagagcttggcgtcagttgcctaccagataaacgccctcgcaaataacgttctgcaattacttgacatccaagcttcacaattgcgcagaatggagagcagcatcaatcatattagccagacagtggatatccataaggagaaagtggcaaggcgggagatagggatactgaccactaacaaaaatacctcgagaacccataagataatcgcaccagccaatatggaacgacccgtgcgttatatcaggaaacccatagattacactgtgctggacgacgtggggcacggtgtaaagaagtggcataaaattattcacggaaataaccagccagctcgcacaggtacactgagtagaacaaatccacccacccaaaagcccccatctcctcctatgagtggacgtggtaccttgggacggaatactccttacaaaacacttgagccagttaaaccaccgacagtgcccaacgattacatgacatcccctgctcggttagggtcccagcacagtcccggaaggaccgcctcccttaaccagcggccccgcacccattcgggaagttccggcggtagcgggtctagagagaactcaggctctagcagcattggaatccctatagcggtgcccacaccaagcccgcccaccatcggccctgtcgcagatagcccgactcctccacctccccccccacccgacgacatcccaatgttcgatgactccccccccccgccaccaccaccccccgtggattacgaggatgaggaggcagccgtagtccagtataatgacccctacgctgacggggacccagcgtgggcacctaagaactacatagaaaaggtggtcgcgatatacgactatacaaaagacaaagacgacgagctttcattcatggaaggtgccataatctacgtgattaagaaaaatgacgacgggtggtacgagggggtttgcaatcgagtgacgggcttgttcccgggcaactacgtcgaatctattatgcattacaccgattag

SEQ ID NO: 70700 - DNA, 1185 bp, Artificial Sequence
  derived and/or modified sequence
atggccgagctgcagatgctgctggaggaggagatccccagcggcaagagggccctgattgagagctaccagaacctgaccagggtggccgactactgtgagaacaactacatccaggccacagacaagaggaaggccctggaggagaccaaggcctacaccacccagagcctggcctctgtggcctaccagatcaatgccctggccaacaacgtgctgcagctgctggacatccaggccagccagctgcggaggatggagagcagcatcaaccacatcagccagacagtggacatccacaaggagaaggtggcccggcgggagatcggcatcctgaccaccaacaagaacaccagcaggacccacaagatcatcgccccagccaacatggagaggcctgtgcgctacatcaggaagcccatcgactacacagtgctggatgatgtgggccatggagtgaagaagtggcacaagatcatccacggcaacaaccagcctgccaggacaggcaccctgagcaggaccaacccccccacccagaagccacccagcccccccatgagcggccggggcaccctgggcaggaacaccccctacaagaccctggagcctgtgaagcccccaacagtgcccaatgactacatgaccagccctgcccggctgggcagccagcacagccctggccgcacagccagcctgaaccagaggcccaggacccacagcggcagcagcggcggcagcggcagcagagaaaattctggcagcagcagcatcggcatccccatcgctgtgcccacccccagcccccccaccatcggccctgtggccgacagccccaccccacctcctcctcctcctccagatgacatccccatgtttgatgacagccccccacctcctcctcctcctcctgtggactatgaagatgaggaggccgctgtggtgcagtacaatgacccctatgcagatggagaccctgcctgggcccccaagaactacatcgagaaggtggtggccatctatgactacaccaaggacaaggatgatgagctgtccttcatggagggcgccatcatctacgtgatcaagaagaatgatgatggctggtatgagggcgtgtgcaacagagtgacaggcctcttccctggcaactacgtggagagcatcatgcactacacagactag

SEQ ID NO: 70701 - DNA, 1185 bp, Artificial Sequence
  derived and/or modified sequence
atggccgagctgcagatgctgctggaggaggagatccccagcggcaagcgggcgttgatcgaatcataccagaatttaaccagagtagctgattactgtgaaaataactatatccaggctaccgacaagaggaaagccctggaagaaacgaaagcatacacaacccagtctctggcctcagtggcgtaccaaattaacgccttggcgaataatgtactccagctgctggacattcaggcgtcccagctgcgcagaatggagtcttcaataaatcacatttcacagacagtggacatacacaaagaaaaggtggcaaggagagaaatcggcatcctgaccactaacaagaacacttcgagaacacacaagattatcgctcctgccaacatggaaaggccagtgaggtacatccgaaagccgattgactatacagtgctggatgacgtgggtcatggagtgaaaaagtggcacaagatcattcacggcaacaatcagccagcaaggaccgggacgctgagcagaaccaatcctccaactcagaaaccaccttctccccccatgagcggccgcggcaccctcgggcggaacaccccctacaagactctggaacccgtgaaaccccctacggtacccaacgattacatgacttccccagccaggttgggaagtcagcactcaccaggcaggacggccagtctgaaccagcggccccgcacccactctggttcctcagggggtagtgggtcccgggagaactctggcagcagttctataggaatccccatcgctgtaccaacccctagccctcctacgattgggcccgtggcagacagcccaacccccccacccccgccccctcccgacgatattcccatgtttgacgattccccaccgccccctccaccgcccccagtggattatgaggatgaggaggctgccgttgtgcagtacaacgacccatatgccgacggagacccagcctgggcccccaaaaattacatcgagaaagttgtggccatttatgattacactaaggacaaggacgacgagcttagcttcatggagggggctattatctacgtgatcaagaaaaacgacgacggatggtacgagggcgtgtgcaatagggtaacgggattatttccagggaattacgtcgaaagtattatgcactatactgattag

SEQ ID NO: 70702 - DNA, 1185 bp, Artificial Sequence
  derived and/or modified sequence
atggcagaattgcagatgctactagaggaagagatcccttctggtaagcgggcactgatcgagtcataccagaacctgactagggtggccgactattgcgagaataattatatacaggccacggataaaaggaaagctttggaggagaccaaagcttacacaacacaatccctggcctcagtggcctaccagatcaatgccctggctaacaacgtcctgcagctgctggacatccaggcatcccagctgaggcggatggagagttctattaaccacatatctcagacagtcgatatccacaaggaaaaggtggctcgtcgcgagatcggaattctgaccacgaataagaacacttccagaacccacaaaattattgccccagctaacatggagcgaccggtgagatatatcagaaagcctattgactacaccgtgctggatgacgtgggccacggtgttaaaaaatggcacaaaataatacatggtaacaaccagcctgcaagaactgggaccctaagcaggacgaacccacctactcaaaagcccccaagccctcctatgagtggccgaggaacgttgggcagaaataccccgtataagaccctcgagccggtaaagcctccaaccgtccccaacgactacatgacctcccccgctaggctggggtcccagcattctcctgggcgaactgccagtctgaatcagcggcctcgcacccatagcggatcttcaggaggaagcggcagtcgtgaaaactcaggaagttccagcattggaatccccatcgccgtacccacacctagccctcctacaataggcccagtcgctgactcccctaccccacctcctccgcctcctcctgacgacatacccatgttcgatgactcacctcccccaccgcctcccccacccgtggactacgaagacgaagaagccgctgtggtccagtacaatgatccctacgcggatggcgacccagcatgggcgccaaagaattacatagagaaagtggtggcgatttacgactatacgaaggacaaggatgacgagctgtcattcatggaaggcgcaatcatctatgtgataaaaaagaatgacgatggttggtacgagggggtgtgtaacagggtgaccggcctgttcccgggaaactatgttgagtccatcatgcactataccgattag

SEQ ID NO: 70703 - DNA, 3383 bp, Artificial Sequence
  derived and/or modified sequence
gagaaataaacgctcgcgagagaacgaggttcaggcggctgcacgaagggggtggaggggggctggagagagtgaggaggaaggggaggaggtgccgtcccacaataccaggcgggagggcgggtaggcggtttgtatccgggctgtgaggtgctcggagcctcggcggaccttgctgcctctgtctctttaacgcgagaggaagcgatgcagaggggtggaaaatggcagagctgcagatgttactagaggaggagatcccgtctggcaagagggcgctgatcgagagttaccagaacctgactcgggtggcagactactgtgaaaacaactacatacaggctacagacaagagaaaagctttagaggagaccaaagcctatacaacccaatctctagctagtgttgcttatcaaataaatgcattggccaacaatgtactccagttgctggatatccaagcctctcagcttcggagaatggagtcttccatcaatcatatctcacagactgtggatattcataaggagaaagtggcacgaagagagattggtattttgacaacaaataagaatacatcaagaactcacaaaataatagcacctgcgaatatggagcgccctgtaaggtatattcggaaacctatcgattacacagttctggatgatgtgggccatggtgtcaagaaatggcataaaataatacatggaaataaccagcctgcaagaactggcacactgtcgagaacaaatcctcctactcagaaaccgccaagtcctcccatgtcaggccggggaacactgggacggaatactccttataaaaccctggaacctgttaaacccccaacagttcctaatgactatatgaccagtcctgctaggcttggaagtcagcatagtccaggcaggacagcatctttaaatcagagaccaaggacacacagtggaagtagtggaggaagtggaagtcgagaaaacagtggtagcagtagtattggcattcccattgctgtgcctacaccttcgccacccactattggaccagttgctgatagtccaactccaccgccaccacctccaccagatgacattcccatgtttgatgactctccacctcccccaccaccaccaccagtggattatgaagatgaggaggctgcagtagttcagtataatgatccatatgcagatggggatcctgcttgggcccccaagaattatattgagaaagttgttgcaatatatgattatacaaaagacaaggatgatgagctgtcatttatggagggtgcaatcatttatgttataaagaagaatgatgatggctggtatgaaggagtctgcaatcgagtgactggtctgttccctgggaactatgttgaatcaatcatgcactatactgattaatttttttttttcttttgaagtagattcttattactcagtcatactgtgggactattatggttaacagaactgtcttaatatgttttaaaatgtgcccatattttcagaacatgctgttttattggtaaattgaatgtctacctgtaagcataaatctttgaggcagtttatgtattgctgaatagcaatttatacaagaagctgtccataactgattatgcttatgtacttacttacacatttttaactttatgaccagcctaaatattctgggggaagtggggtataatatttaacgaatcatgattcagattgtaccattacatgtttcagtgcagcatggttactaacgctatgtcagactaatattaaaatcagaaaatttaaatgctggtgctggtcagactttttttgttagattctctcatttaaaaaaaatactgtttgtttaaagcatgcataaaaatttatgtattgaaatatacttaaaaattcaagatgcttcccatttgtgtaatatttacctggaggactcgtacttaggtgtcttaacgtgaattgagtctccaaggtctccatgtgaaacaagcaaaaagagaattatctgtaatgttgtaatttgtacctaagttttttaatgagtgaaatttgcattataaactttttccattcataaatacataagtgaaccaaaggtttttgtcctttccttcactgatttgctttaaaaaaaataaaagataatgatttattgcagaattatgattctattttctcaatatgttaacttggaaaaaaattttagccttatcttaatctgtcccaacagcaatgtgacggatttttgcagattcaaaatctgcaatggttatttacaagtcaatctactgaattccttttttaaataatcttttgaaactaagaaaatgtgtcaaattgtgtgcattcattctgtaggtaaaattcttaaggattgccatgtcagtccttcagttgtacagtgaactgttgtacactggttcaatgaaaggaagttaaaagtaccttttacatattgtaaaagtggatacagttgatttgtgagtaggcactctttaatccattacctggcactagcaacattagaattttaaaataaaataattgggaaagaaggtgggtcatgtattaatcagtgaacagagatttacctaaccaacagacttggattgtcttttgacataatcaaaatgcaacacatgcactttgtgtgtctcctcttaattgaagggagggctgagggatgttttctcttcttgtcttgtgtataattctctattgcttaggatattaaagtagagcactcaagtgtgggtttctgtgttattgaggatttgtttggaattcaaattacagttatgtactggatgctacagacttataacagcatagtgaatggtaagactagtgcaaaacagttatttctgaaaattaaagaccattattgctaccaaatcaatgtgactatttcatatgcattttgcctttgttaattttaaacaaacaaagtatcattagtgatcagctagctaccttctactttccatttttcaagtggattgttctcttaatttgtatataacctgttgtctaaattttatgtacagtcttttataataaaccattctcctatatgaaattttggatactgttaaaatataactcatgtggacttcaatgcagacttcacatttttctgacctttactcctacggtaaatcaagacaaaccatttgaattttaacattggttatttatttgtgtaatggccttacatgtggatattaacagtgtaaacaataccacatataaccatcaagataccttgattataatttataggactagaatgacagattcaggtggtttattaattacatttaaaaagttttctgaaaaaacttttgcaataaaaaaaaataaattgcccatcaa

SEQ ID NO: 70704 - DNA, 1185 bp, Artificial Sequence
  derived and/or modified sequence
atggccgagctgcagatgctgctggaggaggagatccccagcggcaagagagccctgatcgagagctaccagaacctgaccagagtggccgactactgcgagaacaactacatccaggccaccgacaagagaaaggccctggaggagaccaaggcctacaccacccagagcctggccagcgtggcctaccagatcaacgccctggccaacaacgtgctgcagctgctggacatccaggccagccagctgagaagaatggagagcagcatcaaccacatcagccagaccgtggacatccacaaggagaaggtggccagaagagagatcggcatcctgaccaccaacaagaacaccagcagaacccacaagatcatcgcccccgccaacatggagagacccgtgagatacatcagaaagcccatcgactacaccgtgctggacgacgtgggccacggcgtgaagaagtggcacaagatcatccacggcaacaaccagcccgccagaaccggcaccctgagcagaaccaacccccccacccagaagccccccagcccccccatgagcggcagaggcaccctgggcagaaacaccccctacaagaccctggagcccgtgaagccccccaccgtgcccaacgactacatgaccagccccgccagactgggcagccagcacagccccggcagaaccgccagcctgaaccagagacccagaacccacagcggcagcagcggcggcagcggcagcagagagaacagcggcagcagcagcatcggcatccccatcgccgtgcccacccccagcccccccaccatcggccccgtggccgacagccccacccccccccccccccccccccccgacgacatccccatgttcgacgacagcccccccccccccccccccccccccgtggactacgaggacgaggaggccgccgtggtgcagtacaacgacccctacgccgacggcgaccccgcctgggcccccaagaactacatcgagaaggtggtggccatctacgactacaccaaggacaaggacgacgagctgagcttcatggagggcgccatcatctacgtgatcaagaagaacgacgacggctggtacgagggcgtgtgcaacagagtgaccggcctgttccccggcaactacgtggagagcatcatgcactacaccgactag

SEQ ID NO: 70705 - protein, 329 aa, Artificial Sequence
  derived and/or modified sequence
MAELQMLLEEEIPSGKRALIESYQNLTRVADYCENNYIQATDKRKALEETKAYTTQSLASVAYQINALANNVLQLLDIQASQLRRMESSINHISQHGNNQPARTGTLSRTNPPTQKPPSPPMSGRGTLGRNTPYKTLEPVKPPTVPNDYMTSPARLGSQHSPGRTASLNQRPRTHSGSSGGSGSRENSGSSSIGIPIAVPTPSPPTIGPVADSPTPPPPPPPDDIPMFDDSPPPPPPPPVDYEDEEAAVVQYNDPYADGDPAWAPKNYIEKVVAIYDYTKDKDDELSFMEGAIIYVIKKNDDGWYEGVCNRVTGLFPGNYVESIMHYTD

SEQ ID NO: 70706 - DNA, 990 bp, Artificial Sequence
  derived and/or modified sequence
atggcagagctacaaatgttgctggaggaagagatcccatctgggaagagagcacttatcgagtcctaccagaacctgaccagagttgctgattattgcgaaaacaattatatccaggcaactgacaagcggaaggctttggaggagaccaaagcttatactacccagagtctggcttccgttgcctaccagatcaatgccctcgctaataatgtgttgcagctccttgatatccaggctagtcagcttcgccgaatggagagctccatcaatcatatcagccagcacggaaataaccaaccagcaaggacagggactctttcacggacaaacccacctactcagaagcctccttcaccacccatgtcagggcggggaactcttggtaggaataccccctataagacccttgaacccgtgaagccacctaccgtacctaacgactacatgacctcgccagctcgattagggtcccagcactcaccaggacgaaccgcaagcctgaaccagaggcccaggactcattctggaagcagtggtggatccgggtccagagagaattcaggcagctcctccattggtatccccatcgctgtgccgaccccctcccctccaacaattggaccggttgcagactctccaacgccacccccaccaccccctcccgatgatatccccatgtttgacgacagccctccaccgcctcccccaccacctgtggactatgaagacgaggaagccgccgtcgtccagtacaacgatccctacgctgacggggatcccgcctgggcccctaaaaattatatcgagaaagtggtggcaatctacgactacactaaggacaaagacgacgagttgagttttatggaaggagccatcatatacgttatcaagaaaaatgatgacggttggtatgagggcgtctgcaatagagtgaccggtctgttcccaggtaactacgtcgagtcaatcatgcactacacagattag

SEQ ID NO: 70707 - DNA, 990 bp, Artificial Sequence
  derived and/or modified sequence
atggccgagctgcagatgctgctggaggaggagatccccagcggcaagagggccctgattgagagctaccagaacctgaccagggtggccgactactgtgagaacaactacatccaggccacagacaagaggaaggccctggaggagaccaaggcctacaccacccagagcctggcctctgtggcctaccagatcaatgccctggccaacaacgtgctgcagctgctggacatccaggccagccagctgcggaggatggagagcagcatcaaccacatcagccagcacggcaacaaccagcctgccaggacaggcaccctgagcaggaccaacccccccacccagaagccacccagcccccccatgagcggccggggcaccctgggcaggaacaccccctacaagaccctggagcctgtgaagccacccaccgtgcccaatgactacatgaccagccctgcccggctgggcagccagcacagccctggccgcacagccagcctgaaccagaggcccaggacccacagcggcagcagcggcggcagcggcagccgggagaacagcggcagcagcagcatcggcatccccatcgctgtgcccacccccagcccccccaccatcggccctgtggccgacagccccaccccacctcctcctcctcctccagatgacatccccatgtttgatgacagccccccacctcctcctcctcctcctgtggactatgaagatgaggaggccgctgtggtgcagtacaatgacccctatgcagatggagaccctgcctgggcccccaagaactacatcgagaaggtggtggccatctatgactacaccaaggacaaggatgatgagctgtccttcatggagggcgccatcatctacgtgatcaagaagaatgatgatggctggtatgaaggagtgtgcaacagagtgacaggcctcttccctggcaactacgtggagagcatcatgcactacacagactag

SEQ ID NO: 70708 - DNA, 990 bp, Artificial Sequence
  derived and/or modified sequence
atggccgagctgcagatgctgctggaggaggagatccccagcggcaaacgcgcactgatcgagtcgtatcagaatctgaccagagtggctgactactgtgaaaacaactatatccaggccacggacaaacgaaaagcactggaggagactaaggcttatacaacccagtcgctcgcttctgtcgcatatcagattaacgccctggctaataatgtcctgcagttacttgacattcaggcgtcccagcttagacggatggagtcctctattaatcacatctctcagcacggtaataaccagcccgcccgcaccgggaccctctctcggacaaacccccccacacagaaaccaccatctcctccgatgagtggcagagggactctggggcgcaataccccatataaaacactggagccagtgaagccccctacggtgcctaacgactatatgacatctcctgctcgtttgggctcgcaacactccccaggccgaacggccagtctgaatcagagaccaagaacgcattctggctcgagtggtggaagcggttctagagaaaattctggatcctcatcaatcggcatcccgatcgctgtgcccactccttcaccccccaccattgggcctgtggccgatagcccaacaccccctcccccccccccacccgatgatatacccatgtttgatgattcccctcccccccctcccccacctcccgtcgattatgaggatgaagaggcagcagtagtgcagtataacgacccatatgctgatggcgatcctgcctgggcccccaagaattatatagagaaagtggtcgccatctacgactacacaaaggataaggatgacgaactgtccttcatggaaggagctattatctacgttattaaaaagaatgatgatggttggtatgagggagtttgcaatcgggtgacggggctgtttcctgggaattacgttgaatcaattatgcattatacagattag

SEQ ID NO: 70709 - DNA, 990 bp, Artificial Sequence
  derived and/or modified sequence
atggccgagctgcagatgttacttgaggaagagatcccttccggtaagagagctctgatcgagagctatcaaaatctgactagagtggccgattattgcgagaataactatattcaagctacggataagcggaaggctctggaagaaacgaaggcctacaccacacagagtctcgcgagcgttgcttatcagatcaatgcacttgccaataacgtactgcaactgcttgatatacaggcttcacaactgagaagaatggagtcctccataaatcatatatcccagcatggcaacaaccagcccgcacgcaccgggacactgagccgtacgaatccccctacccagaagcccccaagcccacccatgtcaggaagagggactctcggcagaaataccccctataaaacactggaaccggtgaaacctcctacggtgcctaacgattacatgacctctccagctcggctgggctcccaacactccccaggtaggacagctagcctcaatcaaaggcccaggacccattcgggatcctctgggggatccggaagtcgcgagaattctgggtctagctcgatcggcattcccattgccgttccgactcccagtccgccaactatagggcctgtagctgacagccctacgccccctcctccaccccctcccgatgatatcccaatgttcgacgattctcctcccccaccgcctccaccgcctgtcgactatgaggacgaagaggcagccgttgtgcagtataatgacccatacgccgatggcgaccctgcatgggcacccaagaattacattgagaaggtcgtagccatctacgattacaccaaggacaaagatgatgagctatcgtttatggagggcgctattatttacgtgattaagaaaaacgacgatgggtggtacgagggcgtgtgtaaccgagttactggcttgtttcccggtaattacgtcgagagtattatgcattataccgactag

SEQ ID NO: 70710 - DNA, 3188 bp, Artificial Sequence
  derived and/or modified sequence
gagaaataaacgctcgcgagagaacgaggttcaggcggctgcacgaagggggtggaggggggctggagagagtgaggaggaaggggaggaggtgccgtcccacaataccaggcgggagggcgggtaggcggtttgtatccgggctgtgaggtgctcggagcctcggcggaccttgctgcctctgtctctttaacgcgagaggaagcgatgcagaggggtggaaaatggcagagctgcagatgttactagaggaggagatcccgtctggcaagagggcgctgatcgagagttaccagaacctgactcgggtggcagactactgtgaaaacaactacatacaggctacagacaagagaaaagctttagaggagaccaaagcctatacaacccaatctctagctagtgttgcttatcaaataaatgcattggccaacaatgtactccagttgctggatatccaagcctctcagcttcggagaatggagtcttccatcaatcatatctcacagcatggaaataaccagcctgcaagaactggcacactgtcgagaacaaatcctcctactcagaaaccgccaagtcctcccatgtcaggccggggaacactgggacggaatactccttataaaaccctggaacctgttaaacccccaacagttcctaatgactatatgaccagtcctgctaggcttggaagtcagcatagtccaggcaggacagcatctttaaatcagagaccaaggacacacagtggaagtagtggaggaagtggaagtcgagaaaacagtggtagcagtagtattggcattcccattgctgtgcctacaccttcgccacccactattggaccagttgctgatagtccaactccaccgccaccacctccaccagatgacattcccatgtttgatgactctccacctcccccaccaccaccaccagtggattatgaagatgaggaggctgcagtagttcagtataatgatccatatgcagatggggatcctgcttgggcccccaagaattatattgagaaagttgttgcaatatatgattatacaaaagacaaggatgatgagctgtcatttatggagggtgcaatcatttatgttataaagaagaatgatgatggctggtatgaaggagtctgcaatcgagtgactggtctgttccctgggaactatgttgaatcaatcatgcactatactgattaatttttttttttcttttgaagtagattcttattactcagtcatactgtgggactattatggttaacagaactgtcttaatatgttttaaaatgtgcccatattttcagaacatgctgttttattggtaaattgaatgtctacctgtaagcataaatctttgaggcagtttatgtattgctgaatagcaatttatacaagaagctgtccataactgattatgcttatgtacttacttacacatttttaactttatgaccagcctaaatattctgggggaagtggggtataatatttaacgaatcatgattcagattgtaccattacatgtttcagtgcagcatggttactaacgctatgtcagactaatattaaaatcagaaaatttaaatgctggtgctggtcagactttttttgttagattctctcatttaaaaaaaatactgtttgtttaaagcatgcataaaaatttatgtattgaaatatacttaaaaattcaagatgcttcccatttgtgtaatatttacctggaggactcgtacttaggtgtcttaacgtgaattgagtctccaaggtctccatgtgaaacaagcaaaaagagaattatctgtaatgttgtaatttgtacctaagttttttaatgagtgaaatttgcattataaactttttccattcataaatacataagtgaaccaaaggtttttgtcctttccttcactgatttgctttaaaaaaaataaaagataatgatttattgcagaattatgattctattttctcaatatgttaacttggaaaaaaattttagccttatcttaatctgtcccaacagcaatgtgacggatttttgcagattcaaaatctgcaatggttatttacaagtcaatctactgaattccttttttaaataatcttttgaaactaagaaaatgtgtcaaattgtgtgcattcattctgtaggtaaaattcttaaggattgccatgtcagtccttcagttgtacagtgaactgttgtacactggttcaatgaaaggaagttaaaagtaccttttacatattgtaaaagtggatacagttgatttgtgagtaggcactctttaatccattacctggcactagcaacattagaattttaaaataaaataattgggaaagaaggtgggtcatgtattaatcagtgaacagagatttacctaaccaacagacttggattgtcttttgacataatcaaaatgcaacacatgcactttgtgtgtctcctcttaattgaagggagggctgagggatgttttctcttcttgtcttgtgtataattctctattgcttaggatattaaagtagagcactcaagtgtgggtttctgtgttattgaggatttgtttggaattcaaattacagttatgtactggatgctacagacttataacagcatagtgaatggtaagactagtgcaaaacagttatttctgaaaattaaagaccattattgctaccaaatcaatgtgactatttcatatgcattttgcctttgttaattttaaacaaacaaagtatcattagtgatcagctagctaccttctactttccatttttcaagtggattgttctcttaatttgtatataacctgttgtctaaattttatgtacagtcttttataataaaccattctcctatatgaaattttggatactgttaaaatataactcatgtggacttcaatgcagacttcacatttttctgacctttactcctacggtaaatcaagacaaaccatttgaattttaacattggttatttatttgtgtaatggccttacatgtggatattaacagtgtaaacaataccacatataaccatcaagataccttgattataatttataggactagaatgacagattcaggtggtttattaattacatttaaaaagttttctgaaaaaacttttgcaataaaaaaaaataaattgcccatcaa

SEQ ID NO: 70711 - DNA, 990 bp, Artificial Sequence
  derived and/or modified sequence
atggccgagctgcagatgctgctggaggaggagatccccagcggcaagagagccctgatcgagagctaccagaacctgaccagagtggccgactactgcgagaacaactacatccaggccaccgacaagagaaaggccctggaggagaccaaggcctacaccacccagagcctggccagcgtggcctaccagatcaacgccctggccaacaacgtgctgcagctgctggacatccaggccagccagctgagaagaatggagagcagcatcaaccacatcagccagcacggcaacaaccagcccgccagaaccggcaccctgagcagaaccaacccccccacccagaagccccccagcccccccatgagcggcagaggcaccctgggcagaaacaccccctacaagaccctggagcccgtgaagccccccaccgtgcccaacgactacatgaccagccccgccagactgggcagccagcacagccccggcagaaccgccagcctgaaccagagacccagaacccacagcggcagcagcggcggcagcggcagcagagagaacagcggcagcagcagcatcggcatccccatcgccgtgcccacccccagcccccccaccatcggccccgtggccgacagccccacccccccccccccccccccccccgacgacatccccatgttcgacgacagcccccccccccccccccccccccccgtggactacgaggacgaggaggccgccgtggtgcagtacaacgacccctacgccgacggcgaccccgcctgggcccccaagaactacatcgagaaggtggtggccatctacgactacaccaaggacaaggacgacgagctgagcttcatggagggcgccatcatctacgtgatcaagaagaacgacgacggctggtacgagggcgtgtgcaacagagtgaccggcctgttccccggcaactacgtggagagcatcatgcactacaccgactag

SEQ ID NO: 70712 - DNA, 2148 bp, Artificial Sequence
  derived and/or modified sequence
atgcttttggacgaatatcaagaaagattgttcgtaggcgggcgcgacttagtgtatagtctgtccctcgaacgcataagcgatgggtacaaggagattcattggccttccacggccctgaaaatggaggagtgtatcatgaaaggcaaagatgcaggcgagtgtgcaaactatgtgagagttctgcaccattataaccggactcacttactcacctgcggcaccggcgcttttgacccagtgtgcgcttttattagagtcgggtaccacctcgaagatcccttgttccaccttgagtcccctcggtccgagcgtgggcggggaaggtgcccttttgaccccagttccagcttcatcagcacccttatcgggtcagagctgttcgcaggcctgtactcagactactggtcgcgagatgctgctatttttagaagcatgggaagactcgcccacataagaaccgaacacgatgatgaacggttgctgaaagaacctaagtttgtggggtcttacatgatcccagacaacgaagaccgcgatgacaataaggtgtattttttctttacggaaaaggctctggaggcagaaaataacgcacatgccatttatacgcgggtgggccggctctgcgtcaacgatgtcgggggtcagaggatactggtcaataagtggtctacatttctcaaggccaggctcgtctgctcagtgcccggaatgaacgggatagacacttatttcgatgaactcgaggacgtgtttttactgccaaccagagaccacaaaaaccctgtaattttcgggctttttaatactaccagcaatatcttccggggccatgcaatctgcgtgtatcatatgtcttcgatccgcgctgctttcaatggcccatatgcacataaagaaggtcccgaataccattggagcgtctatgaagggaaggtcccctatccacgaccggggtcatgcgcctctaaagtcaacggcggccgctatggcacaactaaagactacccagatgatgccatccgattcgcgaggtcccatcccttaatgtaccaagctatcaagccagctcacaaaaaaccaattctggtaaagactgacgggaagtacaatctaaaacagattgccgtcgatcgcgtagaagctgaggacgggcaatacgacgttttgtttatcgggactgacaacggaatcgttttaaaagtcataactatctataaccaggaaatggaatccatggaggaggtaatcctcgaggagctgcagattttcaaggaccccgtgccgataatatctatggaaatttcaagcaagaggcaacaactctatatcggttctgcctcggccgtcgcccaggtcaggtttcatcactgcgatatgtacggatccgcatgcgccgactgttgcctggcacgagacccgtactgcgcctgggacggcatttcctgcagtcgttactaccctaccgggacccatgcaaagagacgcttccgacgacaggacgtccgccacggcaacgcggcccagcagtgcttcggtcagcagtttgtcggagatgccctggacaaaacagaggaacaccttgcttatgggatcgagaacaattccactcttctggaatgcacaccccgttccctgcaggctaaagtgatctggtttgtgcagaaagggcgggagactcgtaaggaagaggtaaagacagatgaccgcgtcgtcaaaatggacctgggtcttctcttcttgcggctgcataaatcagatgctggtacctatttctgccagactgtggaacatagctttgtccacacagtgagaaagatcacccttgaggtggtggaagaagagaaggtggaagatatgttcaacaaggatgatgaggaggatcgtcaccatcgtatgccatgtcctgcacaaagtagcatttctcagggcgccaaaccctggtacaaagagttcctgcagctcatcgggtactctaactttcagcgcgtggaagaatattgtgagaaagtctggtgcaccgaccgcaaacgcaagaagctcaaaatgagtccttctaagtggaagtatgcaaacccgcaagaaaaaaagctgagatctaaacctgagcattatcgactgcccaggcacacactcgactcctag

SEQ ID NO: 70713 - DNA, 2148 bp, Artificial Sequence
  derived and/or modified sequence
atgctgctggatgagtaccaggagcggctgtttgtgggcggccgggacctggtgtacagcctgagcctggagcgcatcagtgatggctacaaggagatccactggcccagcacagccctgaagatggaggagtgcatcatgaagggcaaggatgctggggagtgtgccaactacgtgcgggtgctgcaccactacaacagaacccacctgctgacctgtggcactggagcctttgatcctgtgtgtgccttcatccgggtgggctaccacctggaggaccccctcttccacctggagagccccaggtctgagcggggccggggccgctgcccctttgaccccagcagcagcttcatcagcaccctgattggcagcgagctgtttgctggcctgtacagcgactactggagcagagatgctgccatcttccgctccatgggccgcctggcccacatcagaacagaacatgatgatgagcggctgctgaaggagcccaagtttgtgggcagctacatgatcccagacaatgaagatagagatgacaacaaggtgtacttcttcttcacagagaaggccctggaggccgagaacaatgcccacgccatctacaccagggtgggccgcctgtgtgtgaatgatgtgggcggccagaggatcctggtgaacaagtggagcaccttcctgaaggcccggctggtgtgcagcgtgcccggcatgaatggcatcgacacctactttgatgagctggaggatgtgttcctgctgcccacccgggaccacaagaaccctgtgatcttcggcctcttcaacaccaccagcaacatcttccggggccacgccatctgtgtgtaccacatgagcagcatccgggccgccttcaacggcccctatgcccacaaggagggccctgagtaccactggagcgtgtatgagggcaaggtgccctaccccaggcctggcagctgtgccagcaaggtgaatggaggccgctatggcaccaccaaggactacccagatgatgccatccgctttgcccggagccaccccctgatgtaccaggccatcaagccagcccacaagaagcccatcctggtgaagacagatggcaagtacaacctgaagcagattgctgtggacagagtggaggccgaggatggccagtatgatgtgctcttcatcggcacagacaatggaattgtgctgaaggtgatcaccatctacaaccaggagatggagagcatggaggaggtgatcctggaggagctgcagatcttcaaggaccctgtgcccatcatctccatggagatcagcagcaagaggcagcagctgtacatcggcagcgccagcgctgtggcccaggtgcgcttccaccactgtgacatgtatggcagcgcctgtgccgactgctgcctggcccgggacccctactgtgcctgggatggcatcagctgcagccgctactaccccaccggcacccacgccaagaggcgcttccggcggcaggatgtgagacatggaaatgctgcccagcagtgcttcggccagcagtttgtgggagatgccctggacaagacagaggagcacctggcctatggaattgagaacaacagcaccctgctggagtgcacccccaggagcctgcaggccaaggtgatctggtttgtgcagaagggccgggagaccaggaaggaggaggtgaagacagatgacagagtggtgaagatggacctgggcctgctcttcctgcggctgcacaagagtgatgctggcacctacttctgccagacagtggagcacagctttgtgcacacagtgaggaagatcaccctggaggtggtggaggaggagaaggtggaggacatgttcaacaaggatgatgaggaggacagacaccacaggatgccctgcccagcccagagcagcatcagccagggcgccaagccctggtacaaggagttcctgcagctgattggctacagcaacttccagagggtggaggagtactgtgagaaggtgtggtgcacagacaggaagaggaagaagctgaagatgagccccagcaagtggaagtatgccaacccccaggagaagaagctgcggagcaagccagagcactaccgcctgcccaggcacaccctggacagctag

SEQ ID NO: 70714 - DNA, 2148 bp, Artificial Sequence
  derived and/or modified sequence
atgctgctggacgagtaccaggagcggctgttcgtgggcggccgggacttagtatattccctgagtttagagaggatatctgatggctataaagagatccactggccaagcaccgcgcttaaaatggaggagtgcattatgaagggtaaagatgcgggcgaatgtgctaattacgtgcgcgttctgcatcattataataggacccacctgttaacatgtggaaccggtgcattcgaccctgtgtgcgcattcatccgggtgggataccacctggaggatcccttatttcatcttgagtcaccgcggagtgagaggggccggggaagatgcccattcgacccaagctctagcttcatctcaactctgattggcagcgagctcttcgccggtttatactcggactactggtcgcgggatgccgctattttccggtctatgggaagattggctcacatccgaacagaacacgatgacgaaagacttcttaaggagcccaagtttgttggatcctacatgataccagataacgaagatagggacgacaataaggtgtatttctttttcacagagaaggctctggaggccgaaaacaatgcgcatgccatatataccagagtgggaagattgtgcgtaaacgacgtgggcggacaaagaattttggtaaacaaatggtctacgttcctgaaagcgagactcgtttgctcagtgcctgggatgaatggtatcgatacttactttgatgagttggaggatgtgttcttactccctacccgtgaccacaagaatcccgtgatcttcggcctcttcaataccacatctaacatttttcggggccacgcgatttgtgtctaccacatgtccagcatcagagctgctttcaacggcccatacgcccacaaggaagggcctgaataccattggagcgtatacgaggggaaagtgccataccctcgtccaggttcttgcgcttctaaggtgaacggcggcagatatggcaccactaaagactaccctgacgacgcaatcaggttcgctcgtagccatcccttaatgtaccaggcgatcaagccggcccataagaagccaatcctggtgaaaaccgacggaaaatataacctgaaacaaatcgcggtggatcgggttgaggctgaagatggccagtatgatgtgttattcatcgggacagacaacggtattgtgctgaaggtgataacaatctataatcaggagatggaaagtatggaggaagtgatcctggaggaactgcagatctttaaggatcccgtgcccataatctcaatggagataagctcaaagcgtcaacagctttacattggctccgcctcagctgtagcccaggtgcgctttcaccattgcgatatgtacggatccgcttgcgccgattgctgcttagcccgggatccctattgcgcatgggacggaataagctgtagcaggtactatccaacaggcacccatgctaagaggcgctttaggcgacaggacgtgcgacacgggaacgccgctcagcagtgcttcggacaacagttcgtgggcgacgctctggacaagacagaagaacatttggcctacggaatagagaataacagtacattgcttgagtgtactccaaggagcctgcaggctaaggttatctggttcgtgcagaaaggaagagaaactcggaaggaagaggtcaaaactgacgacagggtcgttaagatggacctgggacttctgttcctaaggctgcataaatctgacgccggtacctacttttgccagaccgtcgagcatagttttgtacacaccgtcaggaaaataacattagaggtggtcgaggaggagaaagttgaggacatgtttaacaaagatgacgaagaagacagacatcaccggatgccctgtcctgcacagagttcgatttcacagggagctaaaccttggtataaagaatttctgcaactgattggttactcaaacttccagcgagttgaggagtactgtgaaaaagtgtggtgtaccgatcgaaagcggaaaaagctcaagatgagtccaagcaagtggaagtacgccaatccccaggagaagaagttacggtctaagcctgagcattaccgcctgcccaggcacacactcgatagttag

SEQ ID NO: 70715 - DNA, 2148 bp, Artificial Sequence
  derived and/or modified sequence
atgttgttggacgagtaccaggaacgcctgttcgtgggcggacgggatcttgtatatagcctttcattggagcggatctcagacggatataaggagatacactggcccagtaccgccttaaagatggaggaatgcattatgaagggtaaggacgccggagaatgtgccaattatgtgcgagtactgcaccattacaaccgaactcatttactcacttgcggtaccggagccttcgatcccgtgtgcgcgttcattcgtgttgggtatcatctggaagatccgctgttccacctggaatcacctagatcagaacgaggccgtggcaggtgccctttcgatcccagctcatcattcatcagcactttgatcggcagcgagctgtttgcaggcctgtacagtgattattggtctagagacgcagctatctttaggtcaatggggagattggcccatatacggactgaacacgacgacgagaggctacttaaggaacccaaatttgtaggatcatacatgattcccgataatgaagatagagatgataacaaagtgtacttcttctttacagaaaaggccctcgaagctgaaaataatgcacacgcgatatacacaagggtcggcaggctctgtgtcaatgacgttggaggacagagaatcctggtcaacaaatggagcacctttcttaaggctcgcttggtgtgctctgtgccaggaatgaacgggattgacacatacttcgacgagctcgaagacgtgttcttgctgcctacccgagaccataaaaacccagtgatctttggcctgtttaacacaacctctaacatttttagaggccacgcgatctgtgtttaccatatgagctcaataagagctgcgtttaacgggccttacgcacataaagaggggccagagtaccattggagcgtctatgagggaaaagtgccatacccacggcctggctcatgcgcatctaaagtaaacgggggtcggtatggaactacaaaggattatcccgatgacgctattcggtttgccagatctcacccattgatgtatcaggctatcaagcctgctcataaaaagccgatcctggtgaagaccgacgggaaatataatttgaagcagatcgccgtcgacagagttgaagccgaggatggtcagtacgatgtcctgttcatcgggactgataatggcatcgtcctcaaggtcattactatctataatcaggaaatggaaagcatggaagaagtcattctagaggaactgcagatcttcaaagaccctgtccccattatcagtatggaaattagcagtaagcgccagcagctctatatcggcagtgccagcgcggtagcccaagtgcggtttcatcactgtgacatgtatggcagcgcctgcgccgattgttgtttagcgcgagatccatactgtgcgtgggacggcatcagctgcagtcgttattacccaacaggaacccacgccaagcgcagatttagaaggcaagatgtaagacacggaaatgctgcccagcagtgcttcggacaacaatttgtgggtgacgctctggacaaaacagaggagcacctggcctatggaatcgaaaataactctactctgttggaatgtaccccgagaagcttgcaagccaaggtgatctggtttgtacagaaagggagagaaacacgcaaggaagaggtcaagacagacgatcgtgttgtgaaaatggacctggggctcctgtttcttcgtttacacaaatcagatgctggtacatacttctgccaaactgtggaacactcgttcgttcacactgtgaggaagattaccttagaagtcgtagaagaggaaaaagtagaagatatgttcaataaggacgatgaggaggacagacaccacagaatgccatgcccagcccagtctagcatctcgcagggcgctaagccctggtacaaagagttcttgcagctgataggttactctaacttccagagggtagaggagtactgcgaaaaggtgtggtgtacagatagaaagcgaaagaagctgaaaatgagtccctctaagtggaagtacgcgaacccccaggaaaaaaagcttagatcaaagcctgagcactatagattaccacgacacacactggatagttag

SEQ ID NO: 70716 - DNA, 2148 bp, Artificial Sequence
  derived and/or modified sequence
atgctgctggacgagtaccaggagagactgttcgtgggcggcagagacctggtgtacagcctgagcctggagagaatcagcgacggctacaaggagatccactggcccagcaccgccctgaagatggaggagtgcatcatgaagggcaaggacgccggcgagtgcgccaactacgtgagagtgctgcaccactacaacagaacccacctgctgacctgcggcaccggcgccttcgaccccgtgtgcgccttcatcagagtgggctaccacctggaggaccccctgttccacctggagagccccagaagcgagagaggcagaggcagatgccccttcgaccccagcagcagcttcatcagcaccctgatcggcagcgagctgttcgccggcctgtacagcgactactggagcagagacgccgccatcttcagaagcatgggcagactggcccacatcagaaccgagcacgacgacgagagactgctgaaggagcccaagttcgtgggcagctacatgatccccgacaacgaggacagagacgacaacaaggtgtacttcttcttcaccgagaaggccctggaggccgagaacaacgcccacgccatctacaccagagtgggcagactgtgcgtgaacgacgtgggcggccagagaatcctggtgaacaagtggagcaccttcctgaaggccagactggtgtgcagcgtgcccggcatgaacggcatcgacacctacttcgacgagctggaggacgtgttcctgctgcccaccagagaccacaagaaccccgtgatcttcggcctgttcaacaccaccagcaacatcttcagaggccacgccatctgcgtgtaccacatgagcagcatcagagccgccttcaacggcccctacgcccacaaggagggccccgagtaccactggagcgtgtacgagggcaaggtgccctaccccagacccggcagctgcgccagcaaggtgaacggcggcagatacggcaccaccaaggactaccccgacgacgccatcagattcgccagaagccaccccctgatgtaccaggccatcaagcccgcccacaagaagcccatcctggtgaagaccgacggcaagtacaacctgaagcagatcgccgtggacagagtggaggccgaggacggccagtacgacgtgctgttcatcggcaccgacaacggcatcgtgctgaaggtgatcaccatctacaaccaggagatggagagcatggaggaggtgatcctggaggagctgcagatcttcaaggaccccgtgcccatcatcagcatggagatcagcagcaagagacagcagctgtacatcggcagcgccagcgccgtggcccaggtgagattccaccactgcgacatgtacggcagcgcctgcgccgactgctgcctggccagagacccctactgcgcctgggacggcatcagctgcagcagatactaccccaccggcacccacgccaagagaagattcagaagacaggacgtgagacacggcaacgccgcccagcagtgcttcggccagcagttcgtgggcgacgccctggacaagaccgaggagcacctggcctacggcatcgagaacaacagcaccctgctggagtgcacccccagaagcctgcaggccaaggtgatctggttcgtgcagaagggcagagagaccagaaaggaggaggtgaagaccgacgacagagtggtgaagatggacctgggcctgctgttcctgagactgcacaagagcgacgccggcacctacttctgccagaccgtggagcacagcttcgtgcacaccgtgagaaagatcaccctggaggtggtggaggaggagaaggtggaggacatgttcaacaaggacgacgaggaggacagacaccacagaatgccctgccccgcccagagcagcatcagccagggcgccaagccctggtacaaggagttcctgcagctgatcggctacagcaacttccagagagtggaggagtactgcgagaaggtgtggtgcaccgacagaaagagaaagaagctgaagatgagccccagcaagtggaagtacgccaacccccaggagaagaagctgagaagcaagcccgagcactacagactgcccagacacaccctggacagctag

SEQ ID NO: 70717 - protein, 1166 aa, Artificial Sequence
  derived and/or modified sequence
MLLTLIILLPVVSKFSFVSLSAPQHWSCPEGTLAGNGNSTCVGPAPFLIFSHGNSIFRIDTEGTNYEQLVVDAGVSVIMDFHYNEKRIYWVDLERQLLQRVFLNGSRQERVCNIEKNVSGMAINWINEEVIWSNQQEGIITVTDMKGNNSHILLSALKYPANVAVDPVERFIFWSSEVAGSLYRADLDGVGVKALLETSEKITAVSLDVLDKRLFWIQYNREGSNSLICSCDYDGGSVHISKHPTQHNLFAMSLFGDRIFYSTWKMKTIWIANKHTGKDMVRINLHSSFVPLGELKVVHPLAQPKAEDDTWEPEQKLCKLRKGNCSSTVCGQDLQSHLCMCAEGYALSRDRKYCEDVNECAFWNHGCTLGCKNTPGSYYCTCPVGFVLLPDGKRCHQLVSCPRNVSECSHDCVLTSEGPLCFCPEGSVLERDGKTCSGCSSPDNGGCSQLCVPLSPVSWECDCFPGYDLQLDEKSCAASGPQPFLLFANSQDIRHMHFDGTDYGTLLSQQMGMVYALDHDPVENKIYFAHTALKWIERANMDGSQRERLIEEGVDVPEGLAVDWIGRRFYWTDRGKSLIGRSDLNGKRSKIITKENISQPRGIAVHPMAKRLFWTDTGINPRIESSSLQGLGRLVIASSDLIWPSGITIDFLTDKLYWCDAKQSVIEMANLDGSKRRRLTQNDVGHPFAVAVFEDYVWFSDWAMPSVMRVNKRTGKDRVRLQGSMLKPSSLVVVHPLAKPGADPCLYQNGGCEHICKKRLGTAWCSCREGFMKASDGKTCLALDGHQLLAGGEVDLKNQVTPLDILSKTRVSEDNITESQHMLVAEIMVSDQDDCAPVGCSMYARCISEGEDATCQCLKGFAGDGKLCSDIDECEMGVPVCPPASSKCINTEGGYVCRCSEGYQGDGIHCLDSTPPPHLREDDHHYSVRNSDSECPLSHDGYCLHDGVCMYIEALDKYACNCVVGYIGERCQYRDLKWWELRHAGHGQQQKVIVVAVCVVVLVMLLLLSLWGAHYYRTQKLLSKNPKNPYEESSRDVRSRRPADTEDGMSSCPQPWFVVIKEHQDLKNGGQPVAGEDGQAADGSMQPTSWRQEPQLCGMGTEQGCWIPVSSDKGSCPQVMERSFHMPSYGTQTLEGGVEKPHSLLSANPLWQQRALDPPHQMELTQ

SEQ ID NO: 70718 - DNA, 5477 bp, Artificial Sequence
  derived and/or modified sequence
aaaaagagaaactgttgggagaggaatcgtatctccatatttcttctttcagccccaatccaagggttgtagctggaactttccatcagttcttcctttctttttcctctctaagcctttgccttgctctgtcacagtgaagtcagccagagcagggctgttaaactctgtgaaatttgtcataagggtgtcaggtatttcttactggcttccaaagaaacatagataaagaaatctttcctgtggcttcccttggcaggctgcattcagaaggtctctcagttgaagaaagagcttggaggacaacagcacaacaggagagtaaaagatgccccagggctgaggcctccgctcaggcagccgcatctggggtcaatcatactcaccttgcccgggccatgctccagcaaaatcaagctgttttcttttgaaagttcaaactcatcaagattatgctgctcactcttatcattctgttgccagtagtttcaaaatttagttttgttagtctctcagcaccgcagcactggagctgtcctgaaggtactctcgcaggaaatgggaattctacttgtgtgggtcctgcacccttcttaattttctcccatggaaatagtatctttaggattgacacagaaggaaccaattatgagcaattggtggtggatgctggtgtctcagtgatcatggattttcattataatgagaaaagaatctattgggtggatttagaaagacaacttttgcaaagagtttttctgaatgggtcaaggcaagagagagtatgtaatatagagaaaaatgtttctggaatggcaataaattggataaatgaagaagttatttggtcaaatcaacaggaaggaatcattacagtaacagatatgaaaggaaataattcccacattcttttaagtgctttaaaatatcctgcaaatgtagcagttgatccagtagaaaggtttatattttggtcttcagaggtggctggaagcctttatagagcagatctcgatggtgtgggagtgaaggctctgttggagacatcagagaaaataacagctgtgtcattggatgtgcttgataagcggctgttttggattcagtacaacagagaaggaagcaattctcttatttgctcctgtgattatgatggaggttctgtccacattagtaaacatccaacacagcataatttgtttgcaatgtccctttttggtgaccgtatcttctattcaacatggaaaatgaagacaatttggatagccaacaaacacactggaaaggacatggttagaattaacctccattcatcatttgtaccacttggtgaactgaaagtagtgcatccacttgcacaacccaaggcagaagatgacacttgggagcctgagcagaaactttgcaaattgaggaaaggaaactgcagcagcactgtgtgtgggcaagacctccagtcacacttgtgcatgtgtgcagagggatacgccctaagtcgagaccggaagtactgtgaagatgttaatgaatgtgctttttggaatcatggctgtactcttgggtgtaaaaacacccctggatcctattactgcacgtgccctgtaggatttgttctgcttcctgatgggaaacgatgtcatcaacttgtttcctgtccacgcaatgtgtctgaatgcagccatgactgtgttctgacatcagaaggtcccttatgtttctgtcctgaaggctcagtgcttgagagagatgggaaaacatgtagcggttgttcctcacccgataatggtggatgtagccagctctgcgttcctcttagcccagtatcctgggaatgtgattgctttcctgggtatgacctacaactggatgaaaaaagctgtgcagcttcaggaccacaaccatttttgctgtttgccaattctcaagatattcgacacatgcattttgatggaacagactatggaactctgctcagccagcagatgggaatggtttatgccctagatcatgaccctgtggaaaataagatatactttgcccatacagccctgaagtggatagagagagctaatatggatggttcccagcgagaaaggcttattgaggaaggagtagatgtgccagaaggtcttgctgtggactggattggccgtagattctattggacagacagagggaaatctctgattggaaggagtgatttaaatgggaaacgttccaaaataatcactaaggagaacatctctcaaccacgaggaattgctgttcatccaatggccaagagattattctggactgatacagggattaatccacgaattgaaagttcttccctccaaggccttggccgtctggttatagccagctctgatctaatctggcccagtggaataacgattgacttcttaactgacaagttgtactggtgcgatgccaagcagtctgtgattgaaatggccaatctggatggttcaaaacgccgaagacttacccagaatgatgtaggtcacccatttgctgtagcagtgtttgaggattatgtgtggttctcagattgggctatgccatcagtaatgagagtaaacaagaggactggcaaagatagagtacgtctccaaggcagcatgctgaagccctcatcactggttgtggttcatccattggcaaaaccaggagcagatccctgcttatatcaaaacggaggctgtgaacatatttgcaaaaagaggcttggaactgcttggtgttcgtgtcgtgaaggttttatgaaagcctcagatgggaaaacgtgtctggctctggatggtcatcagctgttggcaggtggtgaagttgatctaaagaaccaagtaacaccattggacatcttgtccaagactagagtgtcagaagataacattacagaatctcaacacatgctagtggctgaaatcatggtgtcagatcaagatgactgtgctcctgtgggatgcagcatgtatgctcggtgtatttcagagggagaggatgccacatgtcagtgtttgaaaggatttgctggggatggaaaactatgttctgatatagatgaatgtgagatgggtgtcccagtgtgcccccctgcctcctccaagtgcatcaacaccgaaggtggttatgtctgccggtgctcagaaggctaccaaggagatgggattcactgtcttgactctactccaccccctcacctcagggaagatgaccaccactattccgtaagaaatagtgactctgaatgtcccctgtcccacgatgggtactgcctccatgatggtgtgtgcatgtatattgaagcattggacaagtatgcatgcaactgtgttgttggctacatcggggagcgatgtcagtaccgagacctgaagtggtgggaactgcgccacgctggccacgggcagcagcagaaggtcatcgtggtggctgtctgcgtggtggtgcttgtcatgctgctcctcctgagcctgtggggggcccactactacaggactcagaagctgctatcgaaaaacccaaagaatccttatgaggagtcgagcagagatgtgaggagtcgcaggcctgctgacactgaggatgggatgtcctcttgccctcaaccttggtttgtggttataaaagaacaccaagacctcaagaatgggggtcaaccagtggctggtgaggatggccaggcagcagatgggtcaatgcaaccaacttcatggaggcaggagccccagttatgtggaatgggcacagagcaaggctgctggattccagtatccagtgataagggctcctgtccccaggtaatggagcgaagctttcatatgccctcctatgggacacagacccttgaagggggtgtcgagaagccccattctctcctatcagctaacccattatggcaacaaagggccctggacccaccacaccaaatggagctgactcagtgaaaactggaattaaaaggaaagtcaagaagaatgaactatgtcgatgcacagtatcttttctttcaaaagtagagcaaaactataggttttggttccacaatctctacgactaatcacctactcaatgcctggagacagatacgtagttgtgcttttgtttgctcttttaagcagtctcactgcagtcttatttccaagtaagagtactgggagaatcactaggtaacttattagaaacccaaattgggacaacagtgctttgtaaattgtgttgtcttcagcagtcaatacaaatagatttttgtttttgttgttcctgcagccccagaagaaattaggggttaaagcagacagtcacactggtttggtcagttacaaagtaatttctttgatctggacagaacatttatatcagtttcatgaaatgattggaatattacaataccgttaagatacagtgtaggcatttaactcctcattggcgtggtccatgctgatgattttgcaaaatgagttgtgatgaatcaatgaaaaatgtaatttagaaactgatttcttcagaattagatggcttattttttaaaatatttgaatgaaaacattttatttttaaaatattacacaggaggcttcggagtttcttagtcattactgtccttttcccctacagaattttccctcttggtgtgattgcacagaatttgtatgtattttcagttacaagattgtaagtaaattgcctgatttgttttcattatagacaacgatgaatttcttctaattatttaaataaaatcaccaaaaacataaacattttattgtatgcctgattaagtagttaattatagtctaaggcagtactagagttgaaccaaaatgatttgtcaagcttgctgatgtttctgtttttcgttttttttttttttccggagagaggataggatctcactctgttatccaggctggagtgtgcaatggcacaatcatagctcagtgcagcctcaaactcctgggctcaagcaatcctcctgcctcagcctcccgagtaactaggaccacaggcacaggccaccatgcctggctaaggtttttatttttattttttgtagacatggggatcacacaatgttgcccaggctggtcttgaactcctggcctcaagcaaggtcgtgctggtaattttgcaaaatgaattgtgattgactttcagcctcccaacgtattagattataggcattagccatggtgcccagccttgtaacttttaaaaaaattttttaatctacaactctgtagattaaaatttcacatggtgttctaattaaatatttttcttgcagccaagatattgttactacagataacacaacctgatatggtaactttaaattttgggggctttgaatcattcagtttatgcattaactagtccctttgtttatctttcatttctcaaccccttgtactttggtgataccagacatcagaataaaaagaaattgaagtaaaaaaaaaaaaaaaaaa

SEQ ID NO: 70719 - DNA, 3501 bp, Artificial Sequence
  derived and/or modified sequence
atgctgctgaccctgatcatcctgctgcccgtggtgagcaagttcagcttcgtgagcctgagcgccccccagcactggagctgccccgagggcaccctggccggcaacggcaacagcacctgcgtgggccccgcccccttcctgatcttcagccacggcaacagcatcttcagaatcgacaccgagggcaccaactacgagcagctggtggtggacgccggcgtgagcgtgatcatggacttccactacaacgagaagagaatctactgggtggacctggagagacagctgctgcagagagtgttcctgaacggcagcagacaggagagagtgtgcaacatcgagaagaacgtgagcggcatggccatcaactggatcaacgaggaggtgatctggagcaaccagcaggagggcatcatcaccgtgaccgacatgaagggcaacaacagccacatcctgctgagcgccctgaagtaccccgccaacgtggccgtggaccccgtggagagattcatcttctggagcagcgaggtggccggcagcctgtacagagccgacctggacggcgtgggcgtgaaggccctgctggagaccagcgagaagatcaccgccgtgagcctggacgtgctggacaagagactgttctggatccagtacaacagagagggcagcaacagcctgatctgcagctgcgactacgacggcggcagcgtgcacatcagcaagcaccccacccagcacaacctgttcgccatgagcctgttcggcgacagaatcttctacagcacctggaagatgaagaccatctggatcgccaacaagcacaccggcaaggacatggtgagaatcaacctgcacagcagcttcgtgcccctgggcgagctgaaggtggtgcaccccctggcccagcccaaggccgaggacgacacctgggagcccgagcagaagctgtgcaagctgagaaagggcaactgcagcagcaccgtgtgcggccaggacctgcagagccacctgtgcatgtgcgccgagggctacgccctgagcagagacagaaagtactgcgaggacgtgaacgagtgcgccttctggaaccacggctgcaccctgggctgcaagaacacccccggcagctactactgcacctgccccgtgggcttcgtgctgctgcccgacggcaagagatgccaccagctggtgagctgccccagaaacgtgagcgagtgcagccacgactgcgtgctgaccagcgagggccccctgtgcttctgccccgagggcagcgtgctggagagagacggcaagacctgcagcggctgcagcagccccgacaacggcggctgcagccagctgtgcgtgcccctgagccccgtgagctgggagtgcgactgcttccccggctacgacctgcagctggacgagaagagctgcgccgccagcggcccccagcccttcctgctgttcgccaacagccaggacatcagacacatgcacttcgacggcaccgactacggcaccctgctgagccagcagatgggcatggtgtacgccctggaccacgaccccgtggagaacaagatctacttcgcccacaccgccctgaagtggatcgagagagccaacatggacggcagccagagagagagactgatcgaggagggcgtggacgtgcccgagggcctggccgtggactggatcggcagaagattctactggaccgacagaggcaagagcctgatcggcagaagcgacctgaacggcaagagaagcaagatcatcaccaaggagaacatcagccagcccagaggcatcgccgtgcaccccatggccaagagactgttctggaccgacaccggcatcaaccccagaatcgagagcagcagcctgcagggcctgggcagactggtgatcgccagcagcgacctgatctggcccagcggcatcaccatcgacttcctgaccgacaagctgtactggtgcgacgccaagcagagcgtgatcgagatggccaacctggacggcagcaagagaagaagactgacccagaacgacgtgggccaccccttcgccgtggccgtgttcgaggactacgtgtggttcagcgactgggccatgcccagcgtgatgagagtgaacaagagaaccggcaaggacagagtgagactgcagggcagcatgctgaagcccagcagcctggtggtggtgcaccccctggccaagcccggcgccgacccctgcctgtaccagaacggcggctgcgagcacatctgcaagaagagactgggcaccgcctggtgcagctgcagagagggcttcatgaaggccagcgacggcaagacctgcctggccctggacggccaccagctgctggccggcggcgaggtggacctgaagaaccaggtgacccccctggacatcctgagcaagaccagagtgagcgaggacaacatcaccgagagccagcacatgctggtggccgagatcatggtgagcgaccaggacgactgcgcccccgtgggctgcagcatgtacgccagatgcatcagcgagggcgaggacgccacctgccagtgcctgaagggcttcgccggcgacggcaagctgtgcagcgacatcgacgagtgcgagatgggcgtgcccgtgtgcccccccgccagcagcaagtgcatcaacaccgagggcggctacgtgtgcagatgcagcgagggctaccagggcgacggcatccactgcctggacagcaccccccccccccacctgagagaggacgaccaccactacagcgtgagaaacagcgacagcgagtgccccctgagccacgacggctactgcctgcacgacggcgtgtgcatgtacatcgaggccctggacaagtacgcctgcaactgcgtggtgggctacatcggcgagagatgccagtacagagacctgaagtggtgggagctgagacacgccggccacggccagcagcagaaggtgatcgtggtggccgtgtgcgtggtggtgctggtgatgctgctgctgctgagcctgtggggcgcccactactacagaacccagaagctgctgagcaagaaccccaagaacccctacgaggagagcagcagagacgtgagaagcagaagacccgccgacaccgaggacggcatgagcagctgcccccagccctggttcgtggtgatcaaggagcaccaggacctgaagaacggcggccagcccgtggccggcgaggacggccaggccgccgacggcagcatgcagcccaccagctggagacaggagccccagctgtgcggcatgggcaccgagcagggctgctggatccccgtgagcagcgacaagggcagctgcccccaggtgatggagagaagcttccacatgcccagctacggcacccagaccctggagggcggcgtggagaagccccacagcctgctgagcgccaaccccctgtggcagcagagagccctggaccccccccaccagatggagctgacccagtag

SEQ ID NO: 70720 - DNA, 3642 bp, Artificial Sequence
  derived and/or modified sequence
cagccgcatctggggtcaatcatactcaccttgcccgggccatgctccagcaaaatcaagctgttttcttttgaaagttcaaactcatcaagattatgctgctcactcttatcattctgttgccagtagtttcaaaatttagttttgttagtctctcagcaccgcagcactggagctgtcctgaaggtactctcgcaggaaatgggaattctacttgtgtgggtcctgcacccttcttaattttctcccatggaaatagtatctttaggattgacacagaaggaaccaattatgagcaattggtggtggatgctggtgtctcagtgatcatggattttcattataatgagaaaagaatctattgggtggatttagaaagacaacttttgcaaagagtttttctgaatgggtcaaggcaagagagagtatgtaatatagagaaaaatgtttctggaatggcaataaattggataaatgaagaagttatttggtcaaatcaacaggaaggaatcattacagtaacagatatgaaaggaaataattcccacattcttttaagtgctttaaaatatcctgcaaatgtagcagttgatccagtagaaaggtttatattttggtcttcagaggtggctggaagcctttatagagcagatctcgatggtgtgggagtgaaggctctgttggagacatcagagaaaataacagctgtgtcattggatgtgcttgataagcggctgttttggattcagtacaacagagaaggaagcaattctcttatttgctcctgtgattatgatggaggttctgtccacattagtaaacatccaacacagcataatttgtttgcaatgtccctttttggtgaccgtatcttctattcaacatggaaaatgaagacaatttggatagccaacaaacacactggaaaggacatggttagaattaacctccattcatcatttgtaccacttggtgaactgaaagtagtgcatccacttgcacaacccaaggcagaagatgacacttgggagcctgagcagaaactttgcaaattgaggaaaggaaactgcagcagcactgtgtgtgggcaagacctccagtcacacttgtgcatgtgtgcagagggatacgccctaagtcgagaccggaagtactgtgaagatgttaatgaatgtgctttttggaatcatggctgtactcttgggtgtaaaaacacccctggatcctattactgcacgtgccctgtaggatttgttctgcttcctgatgggaaacgatgtcatcaacttgtttcctgtccacgcaatgtgtctgaatgcagccatgactgtgttctgacatcagaaggtcccttatgtttctgtcctgaaggctcagtgcttgagagagatgggaaaacatgtagcggttgttcctcacccgataatggtggatgtagccagctctgcgttcctcttagcccagtatcctgggaatgtgattgctttcctgggtatgacctacaactggatgaaaaaagctgtgcagcttcaggaccacaaccatttttgctgtttgccaattctcaagatattcgacacatgcattttgatggaacagactatggaactctgctcagccagcagatgggaatggtttatgccctagatcatgaccctgtggaaaataagatatactttgcccatacagccctgaagtggatagagagagctaatatggatggttcccagcgagaaaggcttattgaggaaggagtagatgtgccagaaggtcttgctgtggactggattggccgtagattctattggacagacagagggaaatctctgattggaaggagtgatttaaatgggaaacgttccaaaataatcactaaggagaacatctctcaaccacgaggaattgctgttcatccaatggccaagagattattctggactgatacagggattaatccacgaattgaaagttcttccctccaaggccttggccgtctggttatagccagctctgatctaatctggcccagtggaataacgattgacttcttaactgacaagttgtactggtgcgatgccaagcagtctgtgattgaaatggccaatctggatggttcaaaacgccgaagacttacccagaatgatgtaggtcacccatttgctgtagcagtgtttgaggattatgtgtggttctcagattgggctatgccatcagtaatgagagtaaacaagaggactggcaaagatagagtacgtctccaaggcagcatgctgaagccctcatcactggttgtggttcatccattggcaaaaccaggagcagatccctgcttatatcaaaacggaggctgtgaacatatttgcaaaaagaggcttggaactgcttggtgttcgtgtcgtgaaggttttatgaaagcctcagatgggaaaacgtgtctggctctggatggtcatcagctgttggcaggtggtgaagttgatctaaagaaccaagtaacaccattggacatcttgtccaagactagagtgtcagaagataacattacagaatctcaacacatgctagtggctgaaatcatggtgtcagatcaagatgactgtgctcctgtgggatgcagcatgtatgctcggtgtatttcagagggagaggatgccacatgtcagtgtttgaaaggatttgctggggatggaaaactatgttctgatatagatgaatgtgagatgggtgtcccagtgtgcccccctgcctcctccaagtgcatcaacaccgaaggtggttatgtctgccggtgctcagaaggctaccaaggagatgggattcactgtcttgactctactccaccccctcacctcagggaagatgaccaccactattccgtaagaaatagtgactctgaatgtcccctgtcccacgatgggtactgcctccatgatggtgtgtgcatgtatattgaagcattggacaagtatgcatgcaactgtgttgttggctacatcggggagcgatgtcagtaccgagacctgaagtggtgggaactgcgccacgctggccacgggcagcagcagaaggtcatcgtggtggctgtctgcgtggtggtgcttgtcatgctgctcctcctgagcctgtggggggcccactactacaggactcagaagctgctatcgaaaaacccaaagaatccttatgaggagtcgagcagagatgtgaggagtcgcaggcctgctgacactgaggatgggatgtcctcttgccctcaaccttggtttgtggttataaaagaacaccaagacctcaagaatgggggtcaaccagtggctggtgaggatggccaggcagcagatgggtcaatgcaaccaacttcatggaggcaggagccccagttatgtggaatgggcacagagcaaggctgctggattccagtatccagtgataagggctcctgtccccaggtaatggagcgaagctttcatatgccctcctatgggacacagacccttgaagggggtgtcgagaagccccattctctcctatcagctaacccattatggcaacaaagggccctggacccaccacaccaaatggagctgactcagtgaaaactggaattaaaaggaaagtcaagaagaatgaactatgtcgatg

SEQ ID NO: 70721 - DNA, 3501 bp, Artificial Sequence
  derived and/or modified sequence
atgctcttgacgctaatcatcctgttgcctgtggtgtcaaagtttagttttgtcagcctgtcagccccccaacattggagctgccccgagggaaccttagcgggtaatggcaatagcacgtgtgtagggcccgcaccctttctcatcttctcacacggtaattcaattttcaggatcgacaccgaagggaccaactacgaacagctagttgtggatgccggcgtcagcgtgattatggacttccactacaacgaaaagcggatatattgggtagatctggaacggcaactgctgcagcgggtttttctgaacggaagccgccaagagcgggtgtgcaacatcgaaaagaatgtatcaggtatggcaataaactggattaacgaggaagtgatttggagtaaccagcaggaaggcatcattacagtgaccgatatgaaaggaaacaacagccatatccttttatcagctttgaaatatcccgctaatgtggcagttgatccagtggaacgctttatcttctggagttcagaagtggccggcagtctctatagggcagatctcgacggggtgggtgtgaaagcactcctcgaaacctcagagaaaatcactgctgtgagtctggatgttctcgataagcggctgttctggatccagtataatagagagggttctaacagtcttatctgctcctgtgactacgacggcggatccgttcatatcagtaaacatccaacccaacacaacctattcgcgatgagcttgttcggtgacagaattttttacagtacctggaaaatgaaaacaatttggatagccaataaacacactggcaaagacatggtaagaatcaacctccatagttcttttgttcccctgggagaactcaaggtcgtccatcctctcgctcaaccaaaggccgaggacgacacgtgggaaccagaacagaaactgtgcaagctaaggaagggcaactgcagctccaccgtgtgcggccaagacctgcagtcacatttgtgcatgtgcgcagaaggctacgcgctgtctcgagatagaaagtattgcgaagacgtaaatgagtgcgccttttggaatcatgggtgcactctgggctgtaaaaatacccccggatcatattactgtacctgccctgtcggcttcgtgctcctgcctgacggaaaacgctgtcaccagttggtctcttgcccaaggaacgtgagtgaatgcagtcatgattgcgtgttgacatccgagggtcccctatgtttctgcccggagggatctgtccttgagagggacggcaaaacttgctctggttgctcttcgccagataatggcgggtgctcccaactgtgcgtccccctgagccctgtgagctgggaatgtgactgcttcccaggatacgatctccaacttgatgaaaagagctgtgcggcctccggtccacagccattcctcctgtttgcgaactcccaggatatccgacacatgcactttgatggaactgactatgggaccttgttatcccaacagatgggaatggtatacgctctagatcatgatcccgtggagaataagatatattttgctcatacggctctgaaatggattgagcgtgcgaacatggatggcagccaaagagagcgtctgatcgaagagggtgttgacgtccccgaaggcttggccgtggattggattggcaggagattctactggacagatcgaggaaaatccttaataggaagaagcgacctgaatggaaagcgatctaaaatcattaccaaagagaacatcagtcaaccacggggaatcgcagtccatcccatggccaaacgacttttttggaccgatacgggcatcaacccacgcattgagtcctcatctcttcagggactcggtcgcctcgtcattgcttcctcagatctcatctggcccagcgggattacaatcgatttcctgacggataagctgtattggtgtgacgccaagcagtcagtaatcgagatggctaacttggacggatctaaacgcagacgcctgacacagaacgacgtgggccacccattcgccgttgcagtgttcgaagactacgtttggttttccgattgggccatgccctccgttatgagagtgaacaaaagaacggggaaggatagagtgcgccttcagggcagtatgttaaaaccaagttcactcgtggtggtccatcccttggccaagcctggagccgatccctgtctgtatcagaatggcggctgcgagcacatttgcaaaaaaagattgggaaccgcctggtgctcatgtagagaaggttttatgaaggcatccgacggcaaaacgtgcttggccctggacggtcaccagcttctggcaggaggggaagttgaccttaaaaaccaggtgaccccgttggacatcctttctaagacaagggtctccgaggacaatattactgaaagccagcacatgctggtggcagaaattatggtctccgaccaggatgactgcgcaccagtgggatgttctatgtacgcccgctgcatatcagaaggcgaagacgccacatgtcagtgcctgaaaggattcgcaggagacggcaagctatgctcagacatagacgagtgtgagatgggagtacctgtgtgcccaccggcttctagcaagtgcattaataccgaaggcggctacgtgtgtcgctgttccgaagggtatcagggagatgggatccactgtctcgatagcacacctccgcctcatctacgagaggatgatcatcactactccgtcagaaactcagattctgaatgtcctctgagccatgacggatactgtctccatgacggagtatgtatgtatatcgaagccctagacaaatatgcttgcaattgtgttgtcgggtatatcggcgagcgctgccaatatagagatctcaagtggtgggagctccgtcacgcgggccatggacaacagcagaaggtcattgtggtggccgtttgtgtggtagtcttggtgatgttacttctgctctcactgtggggtgctcattattaccggacacagaagctactaagtaagaacccaaagaacccctacgaagagagctctcgcgacgttaggagccgaaggcccgccgatacagaggatggcatgtcttcttgtccgcagccatggttcgtggtgataaaggagcaccaggacctcaagaatggtggtcagcctgtagctggggaggacggtcaggccgctgatggaagtatgcagcccacgagctggagacaggagccacagctctgcggcatgggcaccgaacagggctgctggattccagtgagctctgataaggggagctgcccccaggtgatggagaggagttttcacatgcctagttacgggacccaaacgctggagggcggagtggaaaagccccactcactgctgtccgccaatccactgtggcaacaaagggccctggatcctcctcatcagatggaattgacacagtag

SEQ ID NO: 70722 - DNA, 3501 bp, Artificial Sequence
  derived and/or modified sequence
atgctgctgaccctcatcatcctgctgcctgtggtgtccaagttctcctttgtgtccctgagcgccccccagcactggagctgcccagagggcaccctggccggaaatggaaacagcacctgtgtgggccctgcccccttcctgatcttcagccacggcaacagcatcttcagaattgacacagagggcaccaactatgagcagctggtggtggatgctggggtgtctgtcatcatggacttccactacaatgagaagaggatctactgggtggacctggagcggcagctgctgcagagggtcttcctgaatggcagccggcaggagcgggtgtgcaacatcgagaagaatgtgtctggcatggccatcaactggatcaatgaggaggtgatctggagcaaccagcaggagggcatcatcaccgtgacagacatgaagggcaacaacagccacatcctgctgagcgccctgaagtacccagccaacgtggccgtggaccctgtggagcgcttcatcttctggagcagcgaggtggccggcagcctgtacagagctgacctggatggagtgggcgtgaaggccctgctggagaccagcgagaagatcacagctgtgtccctggatgtgctggacaagaggctcttctggatccagtacaaccgggagggcagcaacagcctcatctgcagctgtgactatgatggcggctctgtgcacatcagcaagcaccccacccagcacaacctgtttgccatgagcctgtttggagaccgcatcttctacagcacctggaagatgaagaccatctggatcgccaacaagcacacaggcaaggacatggtgcgcatcaacctgcacagcagctttgtgcccctgggggagctgaaggtggtgcaccccctggcccagcccaaggcagaagatgacacctgggagcctgagcagaagctgtgcaagctgaggaagggcaactgcagcagcacagtgtgtggccaggacctgcagagccacctgtgcatgtgtgccgagggctacgccctgagccgggacaggaagtactgtgaagatgtgaatgaatgtgccttctggaaccacggctgcaccctgggctgcaagaacaccccaggcagctactactgcacctgccctgtgggctttgtgctgctgcctgatggcaagcgctgccaccagctggtgtcctgccccagaaatgtgtctgaatgttctcatgactgtgtgctgaccagcgagggccccctgtgcttctgcccagagggctctgtgctggagagagatggcaagacctgcagcggctgcagcagcccagacaatggaggctgcagccagctgtgtgtgcccctgagccctgtgtcctgggagtgtgactgcttccctggctatgacctgcagctggatgagaagagctgtgccgccagcggcccccagcccttcctgctgtttgccaacagccaggacatccgccacatgcactttgatggaacagattatggcaccctgctgagccagcagatgggcatggtgtatgccctggaccatgaccctgtggagaacaagatctactttgcccacacagccctgaagtggattgaaagagccaacatggatggcagccagcgggagcggctcatcgaggagggcgtggatgtgcctgagggcctggccgtggactggattggaagacgcttctactggacagaccggggcaagagcctgattggccgcagtgacctgaatggcaagaggagcaagatcatcaccaaggagaacatcagccagccccggggcattgctgtgcaccccatggccaagaggctcttctggacagacaccggcatcaaccccagaattgagagcagcagcctgcagggcctgggccgcctggtgattgccagcagtgacctgatctggcccagcggcatcaccatcgacttcctgacagacaagctgtactggtgtgatgccaagcagagcgtcatcgagatggccaacctggatggcagcaagagaagaaggctgacccagaatgatgtgggccacccctttgctgtggccgtgtttgaggactatgtgtggttcagtgactgggccatgcccagcgtgatgagggtgaacaagaggacaggcaaggacagagtgcggctgcagggctccatgctgaagcccagcagcctggtggtggtgcaccccctggccaagccaggagctgacccctgcctgtaccagaatggaggctgtgagcacatctgcaagaagaggctgggcacagcctggtgcagctgccgggagggcttcatgaaggccagtgatggcaagacctgcctggccctggatggccaccagctgctggccggcggggaggtggacctgaagaaccaggtgacccccctggacatcctgagcaagaccagggtgtctgaggacaacatcacagagagccagcacatgctggtggccgagatcatggtgtctgaccaggatgactgtgcccctgtgggctgcagcatgtatgcccgctgcatcagtgaaggagaagatgccacctgccagtgcctgaagggctttgctggagatggcaagctgtgcagcgacattgatgaatgtgagatgggcgtgcctgtgtgccccccagccagcagcaagtgcatcaacacagaaggaggctacgtgtgccgctgcagcgagggctaccagggagatggcatccactgcctggacagcaccccaccaccccacctgagagaagatgaccaccactacagcgtgaggaacagcgacagcgagtgccccctgagccatgatggctactgcctgcatgatggagtgtgcatgtacatcgaggccctggacaagtatgcctgcaactgtgtggtgggctacatcggggagcgctgccagtacagagacctgaagtggtgggagctgcggcatgctggccacggccagcagcagaaggtgattgtggtggccgtgtgtgtggtggtgctggtgatgctgctgctgctgagcctgtggggcgcccactactaccgcacccagaagctgctgagcaagaaccccaagaacccctatgaggagagcagcagagatgtgcgcagccggcggcctgctgacacagaagatggcatgagcagctgcccccagccctggtttgtggtgatcaaggagcaccaggacctgaagaatggaggccagcctgtggccggggaggatggccaggccgcagatggctccatgcagcccacctcctggaggcaggagccccagctgtgtggcatgggcacagagcagggctgctggatccctgtgtccagtgacaagggcagctgcccccaggtgatggagaggagcttccacatgcccagctatggcacccagaccctggagggcggcgtggagaagccccacagcctgctgagcgccaaccccctgtggcagcagagggccctggaccccccccaccagatggagctgacccagtag

SEQ ID NO: 70723 - DNA, 3501 bp, Artificial Sequence
  derived and/or modified sequence
atgctgctgaccctgatcatcctgctgcccgtggtgagcaagttctcattcgtatctctgagcgccccccagcactggtcatgccccgaagggaccctagcaggaaacggcaacagcacctgcgttggacctgccccattcctgatttttagccatggtaacagcatcttccgcatcgacacagaggggaccaactacgagcagcttgttgtcgatgccggtgtgagcgtcatcatggacttccactataacgagaagcggatatattgggtcgaccttgaacgccagttgctgcaacgggtgttcttaaacggaagtcgtcaggaacgcgtgtgcaatatcgagaagaatgtaagtggcatggccatcaattggatcaatgaagaagtgatctggtcaaatcaacaggagggcatcataacagtgacagacatgaagggtaataatagccatatattgctttcagccctcaaatatccagcaaacgtcgctgtcgatcctgtagaacgatttatcttctggagttcagaagttgccgggtctctgtatagagccgacttagacggcgtcggggtgaaggctctcctggagacatctgaaaagatcactgccgtgtctttggacgtgctggataaacgtttgttttggatccagtataacagagaggggtcaaacagtctgatttgctcctgcgactatgatgggggatctgttcacatctcgaaacatcctacccagcacaacctgttcgctatgagcctgtttggtgaccgaatcttctactctacgtggaaaatgaagaccatctggatcgcaaacaaacacaccggcaaggatatggtgcgcattaaccttcattccagttttgttccactgggtgaactcaaggtcgttcacccattagcccaaccaaaagctgaggacgatacatgggagccagagcagaagctctgcaagctgcggaagggaaactgcagctccactgtttgtgggcaagacctgcagtcacacctgtgtatgtgcgcagagggctatgcgctgtcccgagatcgcaaatactgtgaagacgttaacgaatgtgcgttctggaaccatggatgtactttgggctgtaaaaacaccccgggttcttactattgtacctgtccagtagggttcgttctgctgccagatggcaagcggtgtcaccagcttgtgagctgtcctcggaacgtgtccgagtgctcacatgactgcgtgcttacttccgagggtccattatgtttttgcccagaggggtcagtgcttgagagggacggaaaaacatgttctggatgtagcagccctgataatggggggtgctcccaattgtgcgtgcccctgtctccagttagctgggaatgtgactgttttcccggctatgacctacaactggatgaaaagagctgcgctgcctctggacctcagccctttctgttgtttgctaatagccaggacattcgccacatgcactttgacggcaccgattatggcactcttttatcacagcagatgggaatggtctacgcgttggatcatgaccccgtcgagaacaagatctactttgcacatactgcgctgaaatggattgagcgcgctaacatggatggaagtcaacgagagcgcctcatcgaggaaggagtagacgtgcccgaaggccttgcagtcgactggataggccgccggttttactggactgatcgaggaaagagtctgatcggcaggtctgacttaaatggcaaaaggtccaagatcatcacaaaggagaatatctcgcagcctcggggtattgctgtacaccctatggcgaaacgtctcttctggacagacacaggcataaacccgagaatcgagtcatccagcctgcagggcttagggcgactggttattgcttcctctgatctgatctggccaagcgggattactatcgactttctcacagataagctgtactggtgtgatgcaaagcagagcgtcattgagatggcaaatctcgacgggtccaagcggcggcgcctcacccagaacgacgttgggcacccctttgccgtcgccgttttcgaggactatgtctggttctccgattgggctatgccatccgtgatgcgggtcaacaaacgtacaggaaaagatcgggttcgcctgcagggtagcatgctgaagccctcaagcctcgtggttgtgcatccactggcaaagcccggggctgacccctgtttatatcaaaacggaggctgcgaacacatatgcaaaaagcggttgggcacagcttggtgtagctgccgggaggggttcatgaaagcctccgacgggaagacttgtttggcactagacggtcaccagctgctcgccggcggagaggtggacctcaagaatcaggtcacaccactagacatcttatctaagaccagagtcagcgaagataacatcaccgagagtcagcatatgctcgtggccgagatcatggtaagcgatcaggacgattgcgccccagttgggtgctctatgtatgcacgctgtatcagcgagggagaggacgctacctgccagtgtctcaaaggcttcgccggggatgggaaactgtgttcagacatcgatgaatgtgagatgggtgtgcccgtgtgccctcccgcttctagtaagtgtataaacactgaggggggttacgtgtgtcgatgctccgaagggtaccaaggagatggcatacattgcttagattccacacctccacctcatctgcgcgaagacgaccaccattactcagtgcgtaatagcgactcagaatgtccactcagtcacgatgggtattgtcttcatgatggcgtgtgtatgtatatcgaagctctcgacaaatacgcgtgtaattgtgtggtgggctacattggggagcgttgccaataccgggacctcaaatggtgggagttaagacacgccggccacggtcagcagcagaaggtgatagtggtcgctgtgtgcgtcgttgtgctagtgatgctcttacttctttctttgtggggcgcgcattattataggacgcagaagctcctctccaagaaccctaagaacccctatgaggagtcctctagggatgtgcggtccaggaggccagcggatacagaggacgggatgagttcctgcccccaaccatggtttgttgtgattaaagagcaccaagacctcaagaatggagggcagccagtggcaggcgaagacgggcaggcggccgacggtagtatgcagcccacgtcctggcgacaggagcctcagctgtgcgggatgggtacagaacaaggctgctggatccccgtgtcttctgacaaaggctcctgcccacaggtcatggaacggagttttcacatgcccagctatgggacacagacactggaggggggagtcgagaaaccacacagccttctcagcgcaaatccactgtggcaacagcgcgccctggatccccctcatcagatggagctcacacaatag

SEQ ID NO: 70724 - DNA, 3501 bp, Artificial Sequence
  derived and/or modified sequence
atgctgttgactctcataattctgctaccggttgtgtctaaattttcctttgtcagcctgtcagctccacagcattggtcctgtccggagggaacccttgctggtaacggcaattctacatgtgtgggcccagccccatttcttatctttagccacggaaatagtatcttccgaatagacaccgagggtacgaactatgagcaactagtcgtggacgcgggtgtcagtgttatcatggactttcactataacgaaaagaggatctattgggttgacctggagcggcagctgctgcagcgcgtgtttttgaatgggtccaggcaggagcgagtttgcaatatagagaagaatgtttcggggatggccatcaattggatcaatgaagaggtgatatggtctaatcagcaagagggaattatcacagtgactgatatgaagggcaataatagtcatatcttgctgtccgccctgaaatacccggctaacgtagccgttgacccggtagaaaggttcatcttctggagctcagaagtcgccggatctttgtatagagcagatctcgacggggtcggtgtaaaagcgttgttggagactagcgagaagatcacagctgtttctctcgatgtcctggataagcgcctcttctggatacaatacaatagggagggctccaattccctcatctgcagttgcgactacgacgggggtagcgttcacatatcaaaacacccaacacaacataatctctttgctatgagtttgttcggagatcgcattttctactccacttggaaaatgaagaccatctggatagctaataagcatactggtaaagatatggttaggattaacctacacagctctttcgtaccattgggagaactgaaagtggttcaccctctcgctcagcccaaagctgaggacgacacgtgggagcctgaacaaaagctgtgtaagcttaggaaaggaaactgcagcagcacggtttgcggtcaagacttgcagagccacctctgcatgtgcgctgagggttacgccctcagccgtgatcggaaatactgcgaggatgttaacgaatgtgctttctggaatcatggatgtactctcggctgtaagaacacaccgggttcatactattgcacgtgccccgtggggttcgtgctccttccagacggtaaaaggtgccatcagctggtgtcgtgccccaggaacgttagcgaatgcagccacgattgcgttctgacttctgaaggaccactttgcttttgtcccgaggggagcgttttagaaagggatggtaagacatgcagcgggtgctccagtcccgataatgggggatgtagtcagctctgcgttcccctgtccccggtctcatgggaatgcgattgtttccccggatatgacctgcagctagatgagaaatcgtgtgcggcttctgggccacagcccttcctgttattcgctaactcacaggacataaggcacatgcatttcgatgggactgattacggtaccttactgagccaacaaatgggcatggtgtatgccctggaccacgaccctgtggagaataaaatctattttgcacacaccgcattgaagtggatcgagcgcgctaacatggatggaagtcagcgggagagactcatcgaggaaggggtggatgtgcctgaggggttggcagtcgattggatagggcgacgattctactggaccgaccgcggaaaaagcctgatcggcaggtcagacctgaatgggaaacgatctaagatcataacgaaggagaacattagccagccacggggaattgctgtgcaccccatggccaagaggcttttctggacggacacaggcatcaacccacgtattgagagcagctccctacagggactgggcagacttgtgatcgccagttccgacctcatctggccttccggaattactatcgatttcctgactgataaattgtactggtgcgacgcaaagcaatccgtaatagaaatggccaatctcgatgggtccaagaggcgcagactcacccaaaatgacgtcggccatccttttgccgttgccgtcttcgaagattacgtatggttctccgattgggcaatgccctcagtgatgagggttaataagagaactggtaaggacagggtccgcctgcaggggagcatgctcaaacccagctccctcgtcgttgtgcacccgcttgcaaagcctggggcagatccatgcttataccagaatggcggttgtgaacacatctgcaaaaagcgcctgggaacggcctggtgcagctgtcgtgagggatttatgaaggcttcagatggaaagacctgcctggccctggacggacaccagctgctcgctggcggtgaggtagacctgaagaaccaggtaactccactggatatactatcaaaaacgagagtgtcagaggataacatcacggaatcacaacacatgttagtggctgaaatcatggtgtccgatcaggacgactgcgccccagtggggtgctcaatgtatgcgagatgtatctccgaaggcgaggacgctacctgtcaatgcctgaaaggattcgctggcgacggcaagctgtgctcagacatcgacgaatgcgagatgggcgtaccagtttgtccacctgcctcttcaaagtgtatcaataccgagggaggctacgtgtgtcggtgttctgagggttaccagggtgatggtatccactgtctagattctacgcctcccccacacctgagggaggatgatcaccattactccgtgagaaactctgactcagagtgtccactttcacatgacggctactgcttacacgacggagtgtgtatgtacattgaggctctagacaagtacgcctgtaattgtgtcgtggggtacattggagagcgctgccagtatagggacttaaaatggtgggagctgcggcacgcaggccatggacagcagcagaaggtgatcgtcgtggccgtgtgcgtggtggtcctggtgatgcttctgctgttatccctctggggagcccattattatcggactcagaagctcttatcaaagaacccaaaaaatccttatgaggagtcctcacgggacgtgagaagccggaggcctgccgatacggaagatggaatgtccagttgtccacaaccttggtttgtcgtgatcaaagagcatcaggatctgaaaaatggcggacagcccgtcgctggcgaagatggccaggctgcagatggctctatgcaaccaacatcatggaggcaggagccacaactatgtggcatgggtacagaacaaggctgttggatcccggtcagttctgataaaggaagctgcccacaggtcatggagcgctcatttcatatgccaagttatggcacacagactcttgaaggtggagtcgagaagcctcactccctgctaagcgctaaccctctgtggcagcagcgagctttagacccacctcaccaaatggaactcacgcagtag

SEQ ID NO: 70725 - protein, 1165 aa, Artificial Sequence
  derived and/or modified sequence
MLLTLIILLPVVSKFSFVSLSAPQHWSCPEGTLAGNGNSTCVGPAPFLIFSHGNSIFRIDTEGTNYEQLVVDAGVSVIMDFHYNEKRIYWVDLERQLLQRVFLNGSRQERVCNIEKNVSGMAINWINEEVIWSNQQEGIITVTDMKGNNSHILLSALKYPANVAVDPVERFIFWSSEVAGSLYRADLDGVGVKALLETSEKITAVSLDVLDKRLFWIQYNREGSNSLICSCDYDGGSVHISKHPTQHNLFAMSLFGDRIFYSTWKMKTIWIANKHTGKDMVRINLHSSFVPLGELKVVHPLAQPKAEDDTWEPDVNECAFWNHGCTLGCKNTPGSYYCTCPVGFVLLPDGKRCHQLVSCPRNVSECSHDCVLTSEGPLCFCPEGSVLERDGKTCSGCSSPDNGGCSQLCVPLSPVSWECDCFPGYDLQLDEKSCAASGPQPFLLFANSQDIRHMHFDGTDYGTLLSQQMGMVYALDHDPVENKIYFAHTALKWIERANMDGSQRERLIEEGVDVPEGLAVDWIGRRFYWTDRGKSLIGRSDLNGKRSKIITKENISQPRGIAVHPMAKRLFWTDTGINPRIESSSLQGLGRLVIASSDLIWPSGITIDFLTDKLYWCDAKQSVIEMANLDGSKRRRLTQNDVGHPFAVAVFEDYVWFSDWAMPSVMRVNKRTGKDRVRLQGSMLKPSSLVVVHPLAKPGADPCLYQNGGCEHICKKRLGTAWCSCREGFMKASDGKTCLALDGHQLLAGGEVDLKNQVTPLDILSKTRVSEDNITESQHMLVAEIMVSDQDDCAPVGCSMYARCISEGEDATCQCLKGFAGDGKLCSDIDECEMGVPVCPPASSKCINTEGGYVCRCSEGYQGDGIHCLDIDECQLGEHSCGENASCTNTEGGYTCMCAGRLSEPGLICPDSTPPPHLREDDHHYSVRNSDSECPLSHDGYCLHDGVCMYIEALDKYACNCVVGYIGERCQYRDLKWWELRHAGHGQQQKVIVVAVCVVVLVMLLLLSLWGAHYYRTQKLLSKNPKNPYEESSRDVRSRRPADTEDGMSSCPQPWFVVIKEHQDLKNGGQPVAGEDGQAADGSMQPTSWRQEPQLCGMGTEQGCWIPVSSDKGSCPQVMERSFHMPSYGTQTLEGGVEKPHSLLSANPLWQQRALDPPHQMELTQ

SEQ ID NO: 70726 - DNA, 5474 bp, Artificial Sequence
  derived and/or modified sequence
aaaaagagaaactgttgggagaggaatcgtatctccatatttcttctttcagccccaatccaagggttgtagctggaactttccatcagttcttcctttctttttcctctctaagcctttgccttgctctgtcacagtgaagtcagccagagcagggctgttaaactctgtgaaatttgtcataagggtgtcaggtatttcttactggcttccaaagaaacatagataaagaaatctttcctgtggcttcccttggcaggctgcattcagaaggtctctcagttgaagaaagagcttggaggacaacagcacaacaggagagtaaaagatgccccagggctgaggcctccgctcaggcagccgcatctggggtcaatcatactcaccttgcccgggccatgctccagcaaaatcaagctgttttcttttgaaagttcaaactcatcaagattatgctgctcactcttatcattctgttgccagtagtttcaaaatttagttttgttagtctctcagcaccgcagcactggagctgtcctgaaggtactctcgcaggaaatgggaattctacttgtgtgggtcctgcacccttcttaattttctcccatggaaatagtatctttaggattgacacagaaggaaccaattatgagcaattggtggtggatgctggtgtctcagtgatcatggattttcattataatgagaaaagaatctattgggtggatttagaaagacaacttttgcaaagagtttttctgaatgggtcaaggcaagagagagtatgtaatatagagaaaaatgtttctggaatggcaataaattggataaatgaagaagttatttggtcaaatcaacaggaaggaatcattacagtaacagatatgaaaggaaataattcccacattcttttaagtgctttaaaatatcctgcaaatgtagcagttgatccagtagaaaggtttatattttggtcttcagaggtggctggaagcctttatagagcagatctcgatggtgtgggagtgaaggctctgttggagacatcagagaaaataacagctgtgtcattggatgtgcttgataagcggctgttttggattcagtacaacagagaaggaagcaattctcttatttgctcctgtgattatgatggaggttctgtccacattagtaaacatccaacacagcataatttgtttgcaatgtccctttttggtgaccgtatcttctattcaacatggaaaatgaagacaatttggatagccaacaaacacactggaaaggacatggttagaattaacctccattcatcatttgtaccacttggtgaactgaaagtagtgcatccacttgcacaacccaaggcagaagatgacacttgggagcctgatgttaatgaatgtgctttttggaatcatggctgtactcttgggtgtaaaaacacccctggatcctattactgcacgtgccctgtaggatttgttctgcttcctgatgggaaacgatgtcatcaacttgtttcctgtccacgcaatgtgtctgaatgcagccatgactgtgttctgacatcagaaggtcccttatgtttctgtcctgaaggctcagtgcttgagagagatgggaaaacatgtagcggttgttcctcacccgataatggtggatgtagccagctctgcgttcctcttagcccagtatcctgggaatgtgattgctttcctgggtatgacctacaactggatgaaaaaagctgtgcagcttcaggaccacaaccatttttgctgtttgccaattctcaagatattcgacacatgcattttgatggaacagactatggaactctgctcagccagcagatgggaatggtttatgccctagatcatgaccctgtggaaaataagatatactttgcccatacagccctgaagtggatagagagagctaatatggatggttcccagcgagaaaggcttattgaggaaggagtagatgtgccagaaggtcttgctgtggactggattggccgtagattctattggacagacagagggaaatctctgattggaaggagtgatttaaatgggaaacgttccaaaataatcactaaggagaacatctctcaaccacgaggaattgctgttcatccaatggccaagagattattctggactgatacagggattaatccacgaattgaaagttcttccctccaaggccttggccgtctggttatagccagctctgatctaatctggcccagtggaataacgattgacttcttaactgacaagttgtactggtgcgatgccaagcagtctgtgattgaaatggccaatctggatggttcaaaacgccgaagacttacccagaatgatgtaggtcacccatttgctgtagcagtgtttgaggattatgtgtggttctcagattgggctatgccatcagtaatgagagtaaacaagaggactggcaaagatagagtacgtctccaaggcagcatgctgaagccctcatcactggttgtggttcatccattggcaaaaccaggagcagatccctgcttatatcaaaacggaggctgtgaacatatttgcaaaaagaggcttggaactgcttggtgttcgtgtcgtgaaggttttatgaaagcctcagatgggaaaacgtgtctggctctggatggtcatcagctgttggcaggtggtgaagttgatctaaagaaccaagtaacaccattggacatcttgtccaagactagagtgtcagaagataacattacagaatctcaacacatgctagtggctgaaatcatggtgtcagatcaagatgactgtgctcctgtgggatgcagcatgtatgctcggtgtatttcagagggagaggatgccacatgtcagtgtttgaaaggatttgctggggatggaaaactatgttctgatatagatgaatgtgagatgggtgtcccagtgtgcccccctgcctcctccaagtgcatcaacaccgaaggtggttatgtctgccggtgctcagaaggctaccaaggagatgggattcactgtcttgatattgatgagtgccaactgggggagcacagctgtggagagaatgccagctgcacaaatacagagggaggctatacctgcatgtgtgctggacgcctgtctgaaccaggactgatttgccctgactctactccaccccctcacctcagggaagatgaccaccactattccgtaagaaatagtgactctgaatgtcccctgtcccacgatgggtactgcctccatgatggtgtgtgcatgtatattgaagcattggacaagtatgcatgcaactgtgttgttggctacatcggggagcgatgtcagtaccgagacctgaagtggtgggaactgcgccacgctggccacgggcagcagcagaaggtcatcgtggtggctgtctgcgtggtggtgcttgtcatgctgctcctcctgagcctgtggggggcccactactacaggactcagaagctgctatcgaaaaacccaaagaatccttatgaggagtcgagcagagatgtgaggagtcgcaggcctgctgacactgaggatgggatgtcctcttgccctcaaccttggtttgtggttataaaagaacaccaagacctcaagaatgggggtcaaccagtggctggtgaggatggccaggcagcagatgggtcaatgcaaccaacttcatggaggcaggagccccagttatgtggaatgggcacagagcaaggctgctggattccagtatccagtgataagggctcctgtccccaggtaatggagcgaagctttcatatgccctcctatgggacacagacccttgaagggggtgtcgagaagccccattctctcctatcagctaacccattatggcaacaaagggccctggacccaccacaccaaatggagctgactcagtgaaaactggaattaaaaggaaagtcaagaagaatgaactatgtcgatgcacagtatcttttctttcaaaagtagagcaaaactataggttttggttccacaatctctacgactaatcacctactcaatgcctggagacagatacgtagttgtgcttttgtttgctcttttaagcagtctcactgcagtcttatttccaagtaagagtactgggagaatcactaggtaacttattagaaacccaaattgggacaacagtgctttgtaaattgtgttgtcttcagcagtcaatacaaatagatttttgtttttgttgttcctgcagccccagaagaaattaggggttaaagcagacagtcacactggtttggtcagttacaaagtaatttctttgatctggacagaacatttatatcagtttcatgaaatgattggaatattacaataccgttaagatacagtgtaggcatttaactcctcattggcgtggtccatgctgatgattttgcaaaatgagttgtgatgaatcaatgaaaaatgtaatttagaaactgatttcttcagaattagatggcttattttttaaaatatttgaatgaaaacattttatttttaaaatattacacaggaggcttcggagtttcttagtcattactgtccttttcccctacagaattttccctcttggtgtgattgcacagaatttgtatgtattttcagttacaagattgtaagtaaattgcctgatttgttttcattatagacaacgatgaatttcttctaattatttaaataaaatcaccaaaaacataaacattttattgtatgcctgattaagtagttaattatagtctaaggcagtactagagttgaaccaaaatgatttgtcaagcttgctgatgtttctgtttttcgttttttttttttttccggagagaggataggatctcactctgttatccaggctggagtgtgcaatggcacaatcatagctcagtgcagcctcaaactcctgggctcaagcaatcctcctgcctcagcctcccgagtaactaggaccacaggcacaggccaccatgcctggctaaggtttttatttttattttttgtagacatggggatcacacaatgttgcccaggctggtcttgaactcctggcctcaagcaaggtcgtgctggtaattttgcaaaatgaattgtgattgactttcagcctcccaacgtattagattataggcattagccatggtgcccagccttgtaacttttaaaaaaattttttaatctacaactctgtagattaaaatttcacatggtgttctaattaaatatttttcttgcagccaagatattgttactacagataacacaacctgatatggtaactttaaattttgggggctttgaatcattcagtttatgcattaactagtccctttgtttatctttcatttctcaaccccttgtactttggtgataccagacatcagaataaaaagaaattgaagtaaaaaaaaaaaaaaaaaa

SEQ ID NO: 70727 - DNA, 3498 bp, Artificial Sequence
  derived and/or modified sequence
atgctgctgaccctgatcatcctgctgcccgtggtgagcaagttcagcttcgtgagcctgagcgccccccagcactggagctgccccgagggcaccctggccggcaacggcaacagcacctgcgtgggccccgcccccttcctgatcttcagccacggcaacagcatcttcagaatcgacaccgagggcaccaactacgagcagctggtggtggacgccggcgtgagcgtgatcatggacttccactacaacgagaagagaatctactgggtggacctggagagacagctgctgcagagagtgttcctgaacggcagcagacaggagagagtgtgcaacatcgagaagaacgtgagcggcatggccatcaactggatcaacgaggaggtgatctggagcaaccagcaggagggcatcatcaccgtgaccgacatgaagggcaacaacagccacatcctgctgagcgccctgaagtaccccgccaacgtggccgtggaccccgtggagagattcatcttctggagcagcgaggtggccggcagcctgtacagagccgacctggacggcgtgggcgtgaaggccctgctggagaccagcgagaagatcaccgccgtgagcctggacgtgctggacaagagactgttctggatccagtacaacagagagggcagcaacagcctgatctgcagctgcgactacgacggcggcagcgtgcacatcagcaagcaccccacccagcacaacctgttcgccatgagcctgttcggcgacagaatcttctacagcacctggaagatgaagaccatctggatcgccaacaagcacaccggcaaggacatggtgagaatcaacctgcacagcagcttcgtgcccctgggcgagctgaaggtggtgcaccccctggcccagcccaaggccgaggacgacacctgggagcccgacgtgaacgagtgcgccttctggaaccacggctgcaccctgggctgcaagaacacccccggcagctactactgcacctgccccgtgggcttcgtgctgctgcccgacggcaagagatgccaccagctggtgagctgccccagaaacgtgagcgagtgcagccacgactgcgtgctgaccagcgagggccccctgtgcttctgccccgagggcagcgtgctggagagagacggcaagacctgcagcggctgcagcagccccgacaacggcggctgcagccagctgtgcgtgcccctgagccccgtgagctgggagtgcgactgcttccccggctacgacctgcagctggacgagaagagctgcgccgccagcggcccccagcccttcctgctgttcgccaacagccaggacatcagacacatgcacttcgacggcaccgactacggcaccctgctgagccagcagatgggcatggtgtacgccctggaccacgaccccgtggagaacaagatctacttcgcccacaccgccctgaagtggatcgagagagccaacatggacggcagccagagagagagactgatcgaggagggcgtggacgtgcccgagggcctggccgtggactggatcggcagaagattctactggaccgacagaggcaagagcctgatcggcagaagcgacctgaacggcaagagaagcaagatcatcaccaaggagaacatcagccagcccagaggcatcgccgtgcaccccatggccaagagactgttctggaccgacaccggcatcaaccccagaatcgagagcagcagcctgcagggcctgggcagactggtgatcgccagcagcgacctgatctggcccagcggcatcaccatcgacttcctgaccgacaagctgtactggtgcgacgccaagcagagcgtgatcgagatggccaacctggacggcagcaagagaagaagactgacccagaacgacgtgggccaccccttcgccgtggccgtgttcgaggactacgtgtggttcagcgactgggccatgcccagcgtgatgagagtgaacaagagaaccggcaaggacagagtgagactgcagggcagcatgctgaagcccagcagcctggtggtggtgcaccccctggccaagcccggcgccgacccctgcctgtaccagaacggcggctgcgagcacatctgcaagaagagactgggcaccgcctggtgcagctgcagagagggcttcatgaaggccagcgacggcaagacctgcctggccctggacggccaccagctgctggccggcggcgaggtggacctgaagaaccaggtgacccccctggacatcctgagcaagaccagagtgagcgaggacaacatcaccgagagccagcacatgctggtggccgagatcatggtgagcgaccaggacgactgcgcccccgtgggctgcagcatgtacgccagatgcatcagcgagggcgaggacgccacctgccagtgcctgaagggcttcgccggcgacggcaagctgtgcagcgacatcgacgagtgcgagatgggcgtgcccgtgtgcccccccgccagcagcaagtgcatcaacaccgagggcggctacgtgtgcagatgcagcgagggctaccagggcgacggcatccactgcctggacatcgacgagtgccagctgggcgagcacagctgcggcgagaacgccagctgcaccaacaccgagggcggctacacctgcatgtgcgccggcagactgagcgagcccggcctgatctgccccgacagcaccccccccccccacctgagagaggacgaccaccactacagcgtgagaaacagcgacagcgagtgccccctgagccacgacggctactgcctgcacgacggcgtgtgcatgtacatcgaggccctggacaagtacgcctgcaactgcgtggtgggctacatcggcgagagatgccagtacagagacctgaagtggtgggagctgagacacgccggccacggccagcagcagaaggtgatcgtggtggccgtgtgcgtggtggtgctggtgatgctgctgctgctgagcctgtggggcgcccactactacagaacccagaagctgctgagcaagaaccccaagaacccctacgaggagagcagcagagacgtgagaagcagaagacccgccgacaccgaggacggcatgagcagctgcccccagccctggttcgtggtgatcaaggagcaccaggacctgaagaacggcggccagcccgtggccggcgaggacggccaggccgccgacggcagcatgcagcccaccagctggagacaggagccccagctgtgcggcatgggcaccgagcagggctgctggatccccgtgagcagcgacaagggcagctgcccccaggtgatggagagaagcttccacatgcccagctacggcacccagaccctggagggcggcgtggagaagccccacagcctgctgagcgccaaccccctgtggcagcagagagccctggaccccccccaccagatggagctgacccagtag

SEQ ID NO: 70728 - DNA, 4489 bp, Artificial Sequence
  derived and/or modified sequence
aaaaagagaaactgttgggagaggaatcgtatctccatatttcttctttcagccccaatccaagggttgtagctggaactttccatcagttcttcctttctttttcctctctaagcctttgccttgctctgtcacagtgaagtcagccagagcagggctgttaaactctgtgaaatttgtcataagggtgtcaggtatttcttactggcttccaaagaaacatagataaagaaatctttcctgtggcttcccttggcaggctgcattcagaaggtctctcagttgaagaaagagcttggaggacaacagcacaacaggagagtaaaagatgccccagggctgaggcctccgctcaggcagccgcatctggggtcaatcatactcaccttgcccgggccatgctccagcaaaatcaagctgttttcttttgaaagttcaaactcatcaagattatgctgctcactcttatcattctgttgccagtagtttcaaaatttagttttgttagtctctcagcaccgcagcactggagctgtcctgaaggtactctcgcaggaaatgggaattctacttgtgtgggtcctgcacccttcttaattttctcccatggaaatagtatctttaggattgacacagaaggaaccaattatgagcaattggtggtggatgctggtgtctcagtgatcatggattttcattataatgagaaaagaatctattgggtggatttagaaagacaacttttgcaaagagtttttctgaatgggtcaaggcaagagagagtatgtaatatagagaaaaatgtttctggaatggcaataaattggataaatgaagaagttatttggtcaaatcaacaggaaggaatcattacagtaacagatatgaaaggaaataattcccacattcttttaagtgctttaaaatatcctgcaaatgtagcagttgatccagtagaaaggtttatattttggtcttcagaggtggctggaagcctttatagagcagatctcgatggtgtgggagtgaaggctctgttggagacatcagagaaaataacagctgtgtcattggatgtgcttgataagcggctgttttggattcagtacaacagagaaggaagcaattctcttatttgctcctgtgattatgatggaggttctgtccacattagtaaacatccaacacagcataatttgtttgcaatgtccctttttggtgaccgtatcttctattcaacatggaaaatgaagacaatttggatagccaacaaacacactggaaaggacatggttagaattaacctccattcatcatttgtaccacttggtgaactgaaagtagtgcatccacttgcacaacccaaggcagaagatgacacttgggagcctgatgttaatgaatgtgctttttggaatcatggctgtactcttgggtgtaaaaacacccctggatcctattactgcacgtgccctgtaggatttgttctgcttcctgatgggaaacgatgtcatcaacttgtttcctgtccacgcaatgtgtctgaatgcagccatgactgtgttctgacatcagaaggtcccttatgtttctgtcctgaaggctcagtgcttgagagagatgggaaaacatgtagcggttgttcctcacccgataatggtggatgtagccagctctgcgttcctcttagcccagtatcctgggaatgtgattgctttcctgggtatgacctacaactggatgaaaaaagctgtgcagcttcaggaccacaaccatttttgctgtttgccaattctcaagatattcgacacatgcattttgatggaacagactatggaactctgctcagccagcagatgggaatggtttatgccctagatcatgaccctgtggaaaataagatatactttgcccatacagccctgaagtggatagagagagctaatatggatggttcccagcgagaaaggcttattgaggaaggagtagatgtgccagaaggtcttgctgtggactggattggccgtagattctattggacagacagagggaaatctctgattggaaggagtgatttaaatgggaaacgttccaaaataatcactaaggagaacatctctcaaccacgaggaattgctgttcatccaatggccaagagattattctggactgatacagggattaatccacgaattgaaagttcttccctccaaggccttggccgtctggttatagccagctctgatctaatctggcccagtggaataacgattgacttcttaactgacaagttgtactggtgcgatgccaagcagtctgtgattgaaatggccaatctggatggttcaaaacgccgaagacttacccagaatgatgtaggtcacccatttgctgtagcagtgtttgaggattatgtgtggttctcagattgggctatgccatcagtaatgagagtaaacaagaggactggcaaagatagagtacgtctccaaggcagcatgctgaagccctcatcactggttgtggttcatccattggcaaaaccaggagcagatccctgcttatatcaaaacggaggctgtgaacatatttgcaaaaagaggcttggaactgcttggtgttcgtgtcgtgaaggttttatgaaagcctcagatgggaaaacgtgtctggctctggatggtcatcagctgttggcaggtggtgaagttgatctaaagaaccaagtaacaccattggacatcttgtccaagactagagtgtcagaagataacattacagaatctcaacacatgctagtggctgaaatcatggtgtcagatcaagatgactgtgctcctgtgggatgcagcatgtatgctcggtgtatttcagagggagaggatgccacatgtcagtgtttgaaaggatttgctggggatggaaaactatgttctgatatagatgaatgtgagatgggtgtcccagtgtgcccccctgcctcctccaagtgcatcaacaccgaaggtggttatgtctgccggtgctcagaaggctaccaaggagatgggattcactgtcttgatattgatgagtgccaactgggggagcacagctgtggagagaatgccagctgcacaaatacagagggaggctatacctgcatgtgtgctggacgcctgtctgaaccaggactgatttgccctgactctactccaccccctcacctcagggaagatgaccaccactattccgtaagaaatagtgactctgaatgtcccctgtcccacgatgggtactgcctccatgatggtgtgtgcatgtatattgaagcattggacaagtatgcatgcaactgtgttgttggctacatcggggagcgatgtcagtaccgagacctgaagtggtgggaactgcgccacgctggccacgggcagcagcagaaggtcatcgtggtggctgtctgcgtggtggtgcttgtcatgctgctcctcctgagcctgtggggggcccactactacaggactcagaagctgctatcgaaaaacccaaagaatccttatgaggagtcgagcagagatgtgaggagtcgcaggcctgctgacactgaggatgggatgtcctcttgccctcaaccttggtttgtggttataaaagaacaccaagacctcaagaatgggggtcaaccagtggctggtgaggatggccaggcagcagatgggtcaatgcaaccaacttcatggaggcaggagccccagttatgtggaatgggcacagagcaaggctgctggattccagtatccagtgataagggctcctgtccccaggtaatggagcgaagctttcatatgccctcctatgggacacagacccttgaagggggtgtcgagaagccccattctctcctatcagctaacccattatggcaacaaagggccctggacccaccacaccaaatggagctgactcagtgaaaactggaattaaaaggaaagtcaagaagaatgaactatgtcgatgcacagtatcttttctttcaaaagtagagcaaaactataggttttggttccacaatctctacgactaatcacctactcaatgcctggagacagatacgtagttgtgcttttgtttgctcttttaagcagtctcactgcagtcttatttccaagtaagagtactgggagaatcactaggtaacttattagaaacccaaattgggacaacagtgctttgtaaattgtgttgtcttcagcagtcaatacaaatagatttttgtttttgttgttcctgcagccccagaagaaattaggggttaaagcagacagtcacactggtttggtcagttacaaagtaatttctttgatctggacagaacatttatatcagtttcatgaaatgattggaatattacaataccgttaagatacagtgtaggcatttaactcctcattggcgtggtccatgctgatgattttgcaaaatgagttgtgatgaatcaatgaaaaatgta

SEQ ID NO: 70729 - DNA, 3498 bp, Artificial Sequence
  derived and/or modified sequence
atgctgctgacattaatcattctgttacctgtggtctccaagtttagttttgtgagcctgtctgccccccagcactggagctgtcccgaaggcaccctcgctgggaatggcaactcgacctgcgtcggccctgcaccttttttgatatttagccatggtaattctatttttcgcattgacaccgagggcaccaattacgaacagcttgttgtggatgcgggagtttccgtgatcatggattttcattacaatgaaaagagaatttactgggtagacctggagcggcagctcctgcagagggttttcctcaatggttcaaggcaggagcgcgtgtgcaacatcgaaaagaacgtgagtgggatggcaattaattggattaacgaggaggtgatatggtcaaatcagcaggagggaatcattaccgtcacagacatgaagggaaacaatagtcacatcctgctgagtgctctgaagtatcccgccaatgttgccgtagatcccgtggaaagatttattttctggtcgagtgaagtcgccggatccctgtaccgggccgaccttgatggggtgggggtgaaagctctgctggagaccagcgagaaaatcacagccgtttcactggatgtcctcgacaagaggctgttttggatccaatataatcgggagggcagcaactcgttaatttgctcctgtgactacgatgggggctccgtgcacatcagcaagcaccctacccaacataatctgttcgctatgagcctgtttggggatcgaatcttttactccacttggaaaatgaagacaatttggatagcaaataaacacaccgggaaagatatggtgcgcattaatctgcattcttcctttgtgcctctgggagagctcaaggtggtgcaccctcttgcacaaccgaaagctgaggatgatacctgggaacctgacgtgaatgaatgtgcattttggaaccatggatgcaccctgggctgtaaaaacaccccaggctcctattattgtacatgcccagtgggattcgtgcttctgcccgatggcaaaagatgccaccagttggtgagctgcccccggaacgtatcggagtgttcccacgactgcgtgctaacctccgaaggtccactgtgtttttgccccgagggtagcgtcctggagagagacggcaagacctgctccggatgctcaagtcccgataacggggggtgtagtcagctgtgcgtgccactcagccccgtgtcttgggagtgcgactgtttccccggctacgacctgcagttagatgaaaaatcctgcgctgctagcggcccccaaccgttccttctgttcgctaacagccaagacattaggcacatgcacttcgatggcaccgactacggcacactgctcagccaacagatggggatggtatacgctctggatcatgatccagtcgagaacaaaatttacttcgcccataccgcccttaaatggatagagcgggcaaacatggacgggtcacaacgggagcggctcatagaggagggtgtcgacgtcccagaaggcctggccgttgactggatagggagaaggttctactggacggatagaggcaagtctcttattggccgttctgatctgaatgggaaacgttcaaagatcattactaaagaaaatatatcccagccacggggaattgcagtgcatcctatggctaagcgactgttttggacagatacagggatcaatccccggatcgagtccagcagcctccagggtctggggcggctcgtgattgctagcagcgatttaatatggccttctggcataaccatcgactttttaaccgataagttatattggtgcgacgctaaacagagtgttattgaaatggcgaaccttgacgggtctaagcgacgccggcttacccagaacgatgttggccacccatttgccgttgccgtgttcgaggattacgtgtggttctctgactgggcgatgcccagcgtcatgcgcgttaacaagcggacgggaaaggatcgggtacggctgcagggaagcatgctgaaaccttccagcttggtcgttgtgcatcccttggccaagcctggcgctgatccctgcctttatcagaacggcggttgcgaacatatttgcaagaagcggctgggcactgcatggtgctcctgccgagagggcttcatgaaggcaagcgatggcaaaacctgcttggccttggatggccaccaactcttggctggaggggaggtggatctgaagaatcaggtcactcccctagacatcctgagtaagacccgggtgtccgaggacaacatcacagagagccagcacatgctggttgccgagatcatggtctccgatcaggatgattgcgctcctgtgggctgttcgatgtatgccagatgtatcagcgaaggcgaggacgccacctgtcagtgcttgaaagggtttgcaggagacggtaaactgtgttcggatattgatgagtgcgagatgggggtgcctgtgtgtccacctgcctctagtaaatgtatcaacactgaaggaggatatgtgtgtcgatgttccgaaggctaccagggagacggtattcactgcctagacattgatgagtgtcagttaggggagcattcttgcggcgagaatgcttcttgcacaaacacggaggggggttatacttgtatgtgcgccggcaggctgagcgagcctggactaatttgccctgacagtacccctccaccgcatctacgcgaagatgaccaccattacagcgtccggaactctgacagtgagtgccccctatcacatgatggttattgcttacatgacggagtatgtatgtacattgaagcccttgacaaatacgcttgcaactgtgtggtcggctatattggagaacgctgccagtaccgggatcttaaatggtgggagctacgacacgcaggtcacggtcagcaacagaaggtaattgtcgtcgcggtgtgcgtggtcgttttggtaatgctgcttctgttgtcactatggggcgcacattactatcggacccagaagctactctcaaagaatcccaaaaacccctacgaggaatcctcaagagatgtgaggtccaggaggcccgcagataccgaagatggcatgtcaagctgcccccagccttggttcgtagtgattaaagaacaccaggaccttaagaatggcggccagcctgtggccggtgaagatggacaggccgctgatggatccatgcagcccacaagttggcgccaagagccacagctgtgtgggatgggtactgaacagggctgttggatacccgtgagttctgacaagggctcttgcccacaagtgatggagcgctcatttcatatgccttcctatggtactcagacactggaggggggcgtcgagaagcctcattccctgcttagtgccaacccactttggcagcagagagctttagatccccctcaccagatggagctgacccagtag

SEQ ID NO: 70730 - DNA, 3498 bp, Artificial Sequence
  derived and/or modified sequence
atgctgctgaccctcatcatcctgctgcctgtggtgtccaagttctcctttgtgtccctgagcgccccccagcactggagctgcccagagggcaccctggccggaaatggaaacagcacctgtgtgggccctgcccccttcctgatcttcagccacggcaacagcatcttcagaattgacacagagggcaccaactatgagcagctggtggtggatgctggggtgtctgtcatcatggacttccactacaatgagaagaggatctactgggtggacctggagcggcagctgctgcagagggtcttcctgaatggcagccggcaggagcgggtgtgcaacatcgagaagaatgtgtctggcatggccatcaactggatcaatgaggaggtgatctggagcaaccagcaggagggcatcatcaccgtgacagacatgaagggcaacaacagccacatcctgctgagcgccctgaagtacccagccaacgtggccgtggaccctgtggagcgcttcatcttctggagcagcgaggtggccggcagcctgtacagagctgacctggatggagtgggcgtgaaggccctgctggagaccagcgagaagatcacagctgtgtccctggatgtgctggacaagaggctcttctggatccagtacaaccgggagggcagcaacagcctcatctgcagctgtgactatgatggcggctctgtgcacatcagcaagcaccccacccagcacaacctgtttgccatgagcctgtttggagaccgcatcttctacagcacctggaagatgaagaccatctggatcgccaacaagcacacaggcaaggacatggtgcgcatcaacctgcacagcagctttgtgcccctgggggagctgaaggtggtgcaccccctggcccagcccaaggcagaagatgacacctgggagccagatgtgaatgaatgtgccttctggaaccacggctgcaccctgggctgcaagaacaccccaggcagctactactgcacctgccctgtgggctttgtgctgctgcctgatggcaagcgctgccaccagctggtgtcctgccccagaaatgtgtctgaatgttctcatgactgtgtgctgaccagcgagggccccctgtgcttctgcccagagggctctgtgctggagagagatggcaagacctgcagcggctgcagcagcccagacaatggaggctgcagccagctgtgtgtgcccctgagccctgtgtcctgggagtgtgactgcttccctggctatgacctgcagctggatgagaagagctgtgccgccagcggcccccagcccttcctgctgtttgccaacagccaggacatccgccacatgcactttgatggaacagattatggcaccctgctgagccagcagatgggcatggtgtatgccctggaccatgaccctgtggagaacaagatctactttgcccacacagccctgaagtggattgaaagagccaacatggatggcagccagcgggagcggctcatcgaggagggcgtggatgtgcctgagggcctggccgtggactggattggaagacgcttctactggacagaccggggcaagagcctgattggccgcagtgacctgaatggcaagaggagcaagatcatcaccaaggagaacatcagccagccccggggcattgctgtgcaccccatggccaagaggctcttctggacagacaccggcatcaaccccagaattgagagcagcagcctgcagggcctgggccgcctggtgattgccagcagtgacctgatctggcccagcggcatcaccatcgacttcctgacagacaagctgtactggtgtgatgccaagcagagcgtcatcgagatggccaacctggatggcagcaagagaagaaggctgacccagaatgatgtgggccacccctttgctgtggccgtgtttgaggactatgtgtggttcagtgactgggccatgcccagcgtgatgagggtgaacaagaggacaggcaaggacagagtgcggctgcagggctccatgctgaagcccagcagcctggtggtggtgcaccccctggccaagccaggagctgacccctgcctgtaccagaatggaggctgtgagcacatctgcaagaagaggctgggcacagcctggtgcagctgccgggagggcttcatgaaggccagtgatggcaagacctgcctggccctggatggccaccagctgctggccggcggggaggtggacctgaagaaccaggtgacccccctggacatcctgagcaagaccagggtgtctgaggacaacatcacagagagccagcacatgctggtggccgagatcatggtgtctgaccaggatgactgtgcccctgtgggctgcagcatgtatgcccgctgcatcagtgaaggagaagatgccacctgccagtgcctgaagggctttgctggagatggcaagctgtgcagcgacattgatgaatgtgagatgggcgtgcctgtgtgccccccagccagcagcaagtgcatcaacacagaaggaggctacgtgtgccgctgcagcgagggctaccagggagatggcatccactgcctggacattgatgagtgccagctgggggagcacagctgtggagaaaatgccagctgcaccaacacagagggcggctacacctgcatgtgtgccggccgcctgtctgagcccggcctcatctgcccagacagcaccccaccaccccacctgcgggaggatgaccaccactacagcgtgaggaacagcgacagtgaatgtcccctgagccatgatggctactgcctgcatgatggagtgtgcatgtacatcgaggccctggacaagtatgcctgcaactgtgtggtgggctacatcggggagcgctgccagtacagagacctgaagtggtgggagctgcggcatgctggccacggccagcagcagaaggtgattgtggtggccgtgtgtgtggtggtgctggtgatgctgctgctgctgagcctgtggggcgcccactactaccgcacccagaagctgctgagcaagaaccccaagaacccctatgaggagagcagcagagatgtgcgcagcagaagacctgctgacacagaagatggcatgagcagctgcccccagccctggtttgtggtgatcaaggagcaccaggacctgaagaatggaggccagcctgtggccggagaagatggccaggccgcagatggctccatgcagcccacctcctggaggcaggagccccagctgtgtggcatgggcacagagcagggctgctggatccctgtgtccagtgacaagggcagctgcccccaggtgatggagaggagcttccacatgcccagctatggcacccagaccctggagggcggcgtggagaagccccacagcctgctgagcgccaaccccctgtggcagcagagggccctggaccccccccaccagatggagctgacccagtag

SEQ ID NO: 70731 - DNA, 3498 bp, Artificial Sequence
  derived and/or modified sequence
atgctgctgaccctgatcatcctgctgcccgtggtgagcaagttctctttcgtgagcttgtctgcgccacagcactggagctgccccgaggggacgttggcagggaacggtaattctacctgcgtgggacctgcaccctttttgattttctctcacggcaacagtattttcaggatcgacactgaaggcaccaactatgagcaacttgtagtcgacgcaggcgtctcagtgatcatggattttcactacaatgagaaacgcatttactgggtggacctcgaacggcagctcctgcaaagagtgttcctcaatggttcgcgacaggagagagtgtgcaacatcgagaagaatgtcagcggaatggcaatcaattggataaatgaggaagtgatctggtctaaccagcaggagggcataataacagtaacagatatgaaaggcaataactcccacatccttctctcagctctgaaataccccgcaaatgttgctgtagacccggtggaacgcttcatcttttggtctagcgaagtggccggttccctatacagagctgatctcgatggtgtgggcgtgaaagccctgttagaaacctcagaaaagattaccgccgtgtccctggacgttttggacaagcgactgttctggatacagtataatagagaaggttccaactccctcatttgctcctgtgactacgatggtggttccgtccacattagcaaacaccctacccagcacaatctgttcgcaatgtctctgtttggtgaccgtattttctacagtacatggaagatgaagaccatctggatcgctaataagcacacagggaaagacatggtgcgtattaacctgcacagcagttttgtcccgctgggagaactgaaggtcgtgcatcccttggcacagccaaaggcagaagacgacacctgggagcccgatgtcaacgagtgcgccttctggaaccacggttgcaccttgggatgcaagaatactccagggagctactactgcacgtgtccagtgggatttgttctgctgcccgacggcaaacgatgccaccaactcgtgagctgccccaggaacgtttcggagtgtagccacgattgtgtgttgacatctgaaggtcctctgtgcttttgtcccgaaggctctgtgcttgaaagagatggtaaaacttgctctgggtgctccagtccagataacgggggctgctcacaattgtgtgtgccactttccccagtaagctgggaatgcgattgcttccccggctacgaccttcagttggatgaaaaaagttgcgccgcaagtggaccccagccttttctgttattcgctaattcccaggatatcagacatatgcattttgatggaacagattacggtacactgttgtctcagcagatgggaatggtctatgcacttgaccacgaccccgtcgagaataagatctacttcgctcatacagcactgaagtggatcgagcgtgcaaacatggatggcagccagagagagcgattgatcgaagagggagttgatgtgcctgaaggcctggcagtggactggatcggtaggaggttttattggacggatcggggaaagtccctcattggcagatcagatttgaacggcaagcgctctaaaataatcaccaaagagaacattagccagccgcggggaatcgcagtgcaccccatggccaagcggctgttctggacagatacaggtattaatccaagaatcgaaagcagcagtttgcagggcttaggtagactggtgattgcctcctctgatctgatctggcctagcggcattacaatcgatttcctcacagataaactatattggtgcgacgccaaacaatcagtaatagaaatggctaatctggacgggtcaaagaggcgtcgactgacccagaatgacgtgggccacccattcgcggtggcggtgtttgaagactacgtgtggttttctgactgggcgatgccttctgtgatgagggtcaacaagcgcaccggaaaggatcgcgtgaggctccagggctccatgttgaaaccgagctccctggtggttgtgcatcctctcgcaaagcctggggccgatccctgtctttaccagaacggaggctgcgagcacatttgcaagaagcggttgggaacagcatggtgtagttgtagagaggggtttatgaaggccagcgatggaaagacgtgcttggccttggatggacatcagctcctggctggaggagaagtagacctgaaaaaccaggtaacacctctggacatcctttcgaagacacgcgtctccgaagacaatataacagagtcccagcacatgctcgttgccgagatcatggtgtccgatcaggatgattgcgcccccgtgggatgttccatgtatgcccggtgcattagtgaaggagaggacgccacttgccagtgtctgaagggattcgcaggtgacggaaaactgtgttcagatattgacgagtgcgaaatgggagtccctgtttgcccgccggcgagctcaaagtgcattaacactgaaggggggtatgtctgcaggtgcagcgagggttaccaaggcgatggaatccattgtttagacatcgatgagtgccagctcggcgagcactcttgcggcgagaatgcatcttgtactaatactgagggagggtatacctgcatgtgcgccgggcggctgagtgagcctggcttaatatgccccgatagcacccctccgccccaccttcgggaagatgatcaccactattcagtgcgcaatagcgattctgagtgtccactcagccatgacggatactgcctgcatgacggggtctgcatgtacatagaggccttggataagtacgcttgtaattgcgtggttggttacattggcgaaaggtgtcagtatcgcgatcttaagtggtgggagctccggcacgcgggccacggccaacagcaaaaagtgatcgtggtcgccgtgtgtgtcgtcgtactggtgatgttgctgctgctgtcattgtggggtgcacactattatcgcacgcaaaagttgctgagtaagaacccgaagaatccatatgaagaatcaagcagagacgtccgaagtaggcgcccagcagatactgaggacgggatgagcagctgtcctcaaccttggttcgtggtgatcaaggagcatcaggacctaaagaatggcgggcagcccgtggccggagaggacggccaagcggccgatggtagcatgcagccaaccagttggcgacaggagccgcagctgtgtggaatggggaccgaacaggggtgttggattcctgtttcttccgataaggggagctgccctcaggtgatggaacgctcttttcacatgccaagctacggaacacagaccctggagggaggcgtggaaaaaccccacagcctcctgagcgccaatccactctggcagcagcgcgcgttagacccgccccatcagatggagctgacccagtag

SEQ ID NO: 70732 - DNA, 3498 bp, Artificial Sequence
  derived and/or modified sequence
atgctcctgaccctgatcatattattaccagtggtgagtaagtttagctttgtgagtctttcagcaccccagcactggtcttgccctgaggggacgcttgcaggtaatggaaattcaacttgtgttggccctgccccttttcttatatttagccatggaaattcaattttccgaattgatacggaaggcactaactacgaacagctagtcgttgatgccggtgtatccgtaatcatggattttcactataacgagaaaagaatttattgggtggacttagagcggcagctcctgcagcgcgtgttcctcaatggtagcaggcaggagcgtgtgtgcaacatagagaaaaacgtttcgggcatggctattaattggataaatgaggaggtaatctggagcaaccagcaagaagggatcatcactgtcaccgatatgaaaggcaacaattctcatattctcctttcagctctaaaatatccagctaacgtcgcagtggaccctgtcgagagattcatcttctggagttccgaagttgccggttcattgtatagggccgacctggatggcgtgggcgtcaaagcactgctcgagactagcgagaagatcacagcagtcagcttggacgtactggataaaagactcttttggatccagtataatcgggaaggtagtaacagcttaatttgttcatgtgactacgatgggggttccgttcacattagtaagcacccaacacagcataatctttttgcaatgtcactgtttggggatagaatcttttacagcacttggaaaatgaaaactatttggatcgccaacaaacatacaggaaaggacatggtgcgaattaatctgcactcctcttttgttccactgggagaactgaaagtcgtgcacccgcttgcccaaccaaaggcagaggacgatacctgggagcccgacgtcaacgaatgcgccttttggaatcacggatgtacactggggtgcaagaatacaccgggtagttattactgtacgtgccccgtgggctttgtgttgctgcccgatggtaagcggtgccatcagttggtatcctgtccacgaaatgtatctgaatgctctcatgactgtgtgttaacctctgaggggccactttgtttctgcccagaaggaagcgttctggagcgggacgggaaaacgtgttccgggtgcagtagtccggataacggtggatgcagccaattgtgcgtgcctctgagcccagtctcttgggagtgcgattgctttcctggatatgaccttcagctggatgaaaaatcttgtgctgcaagtggacctcaacccttcttactgtttgccaattctcaggacatacggcatatgcattttgacggtaccgactatggtaccctgctgagccagcagatgggaatggtctacgccctggaccacgaccctgtggagaataagatatactttgcgcatacagcactgaagtggatagagagggccaatatggacggctcacagagagaacgccttatagaggagggggtggacgtcccagagggtctcgcagtggactggattggcaggagattttattggaccgaccggggaaagagcctcattggcagaagcgatctgaatggcaagcgctccaagatcattaccaaggagaacatcagtcagccaagggggatcgccgtgcaccccatggctaaacggcttttttggacagacaccggaataaatcctaggatagaaagctccagcttgcagggcctgggcagattggtaatagctagcagcgatctgatatggccatcgggaattacgatcgatttcttgacagacaagctttattggtgtgatgccaaacagtcagtcattgaaatggctaatcttgatggtagtaagcgccgtaggctgactcaaaacgacgtagggcaccccttcgcagtagcagtcttcgaggactacgtgtggttttctgattgggccatgccatctgtcatgagggtgaataagcggactggcaaggatcgcgtacggctccaaggctccatgctcaagccttctagcctggtcgtagtccacccactagccaagcccggtgctgatccatgcctttatcagaatgggggatgtgagcacatttgcaagaaaagattggggacggcttggtgtagctgccgcgaagggtttatgaaggcctctgatggaaaaacatgtctggccctcgacgggcaccagttattggcaggtggtgaagtggatcttaaaaatcaggtaaccccccttgacatattgtccaagaccagagtatccgaggataacatcacagagtctcaacacatgctcgtggccgaaattatggtgagcgaccaagacgattgcgcacctgtaggctgctccatgtacgcccgttgcatctccgagggcgaagacgccacatgccaatgcctcaagggcttcgccggagacgggaaactgtgttcagatatcgacgagtgcgagatgggcgtacctgtgtgcccgcctgcctcttctaaatgcatcaacacggagggagggtacgtctgcagatgcagcgagggttatcagggagatggcattcattgtctggatattgacgaatgtcagttgggagagcattcatgtggcgaaaacgctagctgtacaaatactgagggcggatatacttgcatgtgcgcaggacgcctctctgagcctggactcatttgccctgactccacgcctcccccacacctgagagaagacgaccaccattactctgtcagaaattctgacagcgagtgtccgctgtcgcacgatgggtattgcctgcacgatggagtctgcatgtacatagaagccctcgacaagtacgcctgcaactgtgttgtcggatatatcggtgagcggtgtcagtacagggatctcaaatggtgggaattgagacacgccggacatggccagcagcagaaggtgatagttgtcgccgtgtgtgtcgtggttctggtgatgctgttactcttgtctctgtggggcgctcattactataggacacagaagttattgagtaaaaaccctaagaacccgtatgaggaaagctcacgggacgtcaggagtaggcgcccagctgacactgaggacgggatgtcctcttgcccgcagccttggtttgtggtgatcaaggagcaccaggacttgaagaatggcggtcagcctgtggccggagaggatggacaggctgccgacgggagtatgcaaccaaccagctggaggcaagaaccccagttgtgcggtatgggaaccgagcaaggctgctggattcccgtgagttcggataaaggctcttgtccacaggtaatggaacggtccttccatatgccaagctatggtacacagacattagagggcggagttgagaaacctcattctctactgagcgctaatccactgtggcagcaaagggcattagaccccccacatcagatggagctgacccagtag

SEQ ID NO: 70733 - DNA, 1302 bp, Artificial Sequence
  derived and/or modified sequence
atggccgagctgagacccagcggcgcccccggccccaccgccccccccgcccccggccccaccgccccccccgccttcgccagcctgttcccccccggcctgcacgccatctacggcgagtgcagaagactgtaccccgaccagcccaaccccctgcaggtgaccgccatcgtgaagtactggctgggcggccccgaccccctggactacgtgagcatgtacagaaacgtgggcagccccagcgccaacatccccgagcactggcactacatcagcttcggcctgagcgacctgtacggcgacaacagagtgcacgagttcaccggcaccgacggccccagcggcttcggcttcgagctgaccttcagactgaagagagagaccggcgagagcgccccccccacctggcccgccgagctgatgcagggcctggccagatacgtgttccagagcgagaacaccttctgcagcggcgaccacgtgagctggcacagccccctggacaacagcgagagcagaatccagcacatgctgctgaccgaggacccccagatgcagcccgtgcagacccccttcggcgtggtgaccttcctgcagatcgtgggcgtgtgcaccgaggagctgcacagcgcccagcagtggaacggccagggcatcctggagctgctgagaaccgtgcccatcgccggcggcccctggctgatcaccgacatgagaagaggcgagaccatcttcgagatcgacccccacctgcaggagagagtggacaagggcatcgagaccgacggcagcaacctgagcggcgtgagcgccaagtgcgcctgggacgacctgagcagaccccccgaggacgacgaggacagcagaagcatctgcatcggcacccagcccagaagactgagcggcaaggacaccgagcagatcagagagaccctgagaagaggcctggagatcaacagcaagcccgtgctgccccccatcaacccccagagacagaacggcctggcccacgacagagcccccagcagaaaggacagcctggagagcgacagcagcaccgccatcatcccccacgagctgatcagaaccagacagctggagagcgtgcacctgaagttcaaccaggagagcggcgccctgatccccctgtgcctgagaggcagactgctgcacggcagacacttcacctacaagagcatcaccggcgacatggccatcaccttcgtgagcaccggcgtggagggcgccttcgccaccgaggagcacccctacgccgcccacggcccctggctgcagctgtag

SEQ ID NO: 70734 - DNA, 1302 bp, Artificial Sequence
  derived and/or modified sequence
atggccgaactccggccctctggtgctcccggtccgaccgcgcctcccgcccctggcccaacagcccctccagccttcgcctcacttttcccacctggtttgcacgcgatctatggggagtgccgaaggctttatcctgaccagcccaacccattacaagtcactgccattgtcaaatactggcttgggggtcccgacccacttgattacgtatccatgtatcgcaacgtggggagtccaagtgcgaacattcctgaacattggcattacatctctttcgggctgagcgacctctacggcgataatcgggtgcatgagtttaccggaacagacgggccttctgggttcggatttgaactgacattccgcctaaagagggagaccggagagtcagcgccccctacctggccagccgaattgatgcaaggcctggctagatacgtgttccagagtgaaaacacattttgctcaggcgatcatgttagctggcactcacccctcgacaacagtgaatcacgcatccagcacatgctgcttaccgaggacccgcagatgcagcccgttcagactccattcggtgtggtcacatttttgcagatagttggggtctgtacagaggagttgcacagcgctcagcagtggaatgggcagggaatactagagcttctgcgaacggtaccaatcgctggcggcccctggctgattactgacatgcggcggggagaaactatctttgaaattgacccacatctgcaagagagagtggataaaggtatcgagaccgatggctctaacctaagtggcgtatctgctaagtgcgcttgggacgacctcagcagacctcctgaagacgatgaggactctcgcagtatctgtatcggcacgcagccacggcgtctctccggaaaggatacggaacagattcgggagacgctgaggaggggtttagagatcaacagtaaaccggtgctgccccctatcaaccctcaaagacagaatggactcgcacacgatagggcaccctcgagaaaggactcactggaatccgacagctccactgcgattatccctcacgaacttatacgcaccagacagcttgaatccgtgcatctcaaattcaatcaggagagcggcgccctgattccactttgtctacgtggacgtctgctacacggccgccactttacatacaagtccattactggagatatggcaataactttcgtctccactggcgttgaaggtgcctttgccacagaggagcacccgtacgccgcacacggcccttggctccagttatag

SEQ ID NO: 70735 - DNA, 1302 bp, Artificial Sequence
  derived and/or modified sequence
atggccgagctgcggcccagcggggcccctggccccacagcccccccagcccctggccccacagcccccccagcctttgccagcctcttccccccaggcctgcacgccatctacggggagtgccggcggctgtacccagaccagcccaaccccctgcaggtgacagccatcgtgaagtactggctgggcggccctgaccccctggactatgtgtccatgtacagaaatgtgggcagccccagcgccaacatccctgagcactggcactacatcagctttggcctgagtgacctgtatggagacaacagagtgcatgagttcaccggcacagatggccccagcggcttcggctttgagctgaccttccggctgaagcgggagaccggggagagcgccccacccacctggccagctgagctgatgcagggcctggcccgctacgtgttccagagcgagaacaccttctgcagcggggaccacgtgtcctggcacagccccctggacaacagcgagagccgcatccagcacatgctgctgacagaggacccccagatgcagcctgtgcagacccccttcggcgtggtgaccttcctgcagatcgtgggcgtgtgcacagaggagctgcacagcgcccagcagtggaatggccagggcatcctggagctgctgaggacagtgcccatcgccggcggcccctggctgatcacagacatgagaagaggagagaccatctttgaaattgacccccacctgcaggagcgggtggacaagggcattgaaacagatggcagcaacctgtctggagtgtctgccaagtgtgcctgggatgacctgagccggcccccagaagatgatgaggacagccgcagcatctgcatcggcacccagccccggcggctgagcggcaaggacacagagcagatccgggagaccctgcggcggggcctggagatcaacagcaagcctgtgctgccccccatcaacccccagaggcagaatggcctggcccatgaccgggcccccagcaggaaggacagcctggagagtgacagcagcacagccatcatcccccatgagctgatccgcacccggcagctggagagcgtgcacctgaagttcaaccaggagagcggggccctgatccccctgtgcctgcggggccgcctgctgcacggccgccacttcacctacaagagcatcactggagacatggccatcacctttgtgtccactggagtggagggcgcctttgccacagaggagcacccctatgctgcccacggcccctggctgcagctgtag

SEQ ID NO: 70736 - DNA, 1302 bp, Artificial Sequence
  derived and/or modified sequence
atggccgagctgcggcccagcggcgcccccggccccaccgcccccccagcaccgggccccacagctccgcctgcatttgcctccctgtttcctccgggtctacacgccatttatggagagtgtcgcaggctgtacccggaccagccgaatccgttacaggtgactgccatcgtaaagtactggctgggcggacctgatcccctcgactacgtcagtatgtacaggaacgtgggcagcccttctgccaatatcccggaacattggcattatataagcttcggattaagtgacctgtatggtgataatcgggtccatgaatttaccggtacagatggccccagcggctttggctttgagctgacctttagattaaaacgtgaaacaggtgagtctgctcccccaacgtggccagccgaactgatgcagggtctggctcgatacgtcttccaaagtgagaacacgttttgttctggcgatcacgtatcatggcactcgccattggacaactccgagagccggatccaacatatgctcctgaccgaagacccgcaaatgcagcctgtgcagactccgtttggagttgtcacctttcttcagattgtgggagtgtgcacagaggagctacattctgcacagcagtggaacgggcagggcatcctggaactgttaagaacagtccccatcgctggtggcccatggctcattacagatatgagacgcggcgagacgatatttgagattgacccacatctgcaggagagggtggataagggaatcgagaccgacggcagtaatctgagcggcgtctcggcaaaatgcgcatgggatgacctatctcgacccccggaggatgacgaggattcacgttccatctgtattggtacacaaccgcggcgactgtcgggcaaagacacagaacagatccgcgaaacccttaggcggggattggagatcaactccaaacccgtgctcccgcccataaatccccagaggcagaatggactggcacacgacagggccccctcccggaaggacagtcttgagtccgattcaagtacggccatcatccctcatgagctgatacggacacgacagttggagagcgtgcacctcaaatttaatcaggaatctggcgcactgatcccactgtgcctgagggggagacttttgcatggaagacacttcacctacaagagcattacaggtgacatggcgattaccttcgtttccactggggttgagggtgccttcgccaccgaggaacatccgtacgctgcacatggcccctggctacagctctag

SEQ ID NO: 70737 - DNA, 1302 bp, Artificial Sequence
  derived and/or modified sequence
atggctgagctgagaccttccggtgctcctggcccaacggcaccacccgctcccggtccgacagccccacccgcattcgcttcactgtttccccctggtcttcacgctatctatggcgagtgtaggcgattgtacccagaccagccaaacccactgcaggtgacagctattgtgaagtattggctgggaggcccagatcctctggactatgtctccatgtataggaacgtcggaagcccaagtgcaaacatccccgagcattggcactacatcagctttggcctgtcagacctgtatggagataatagagttcacgaattcacaggcaccgacggcccttcaggttttgggttcgaacttacctttcggcttaaacgcgagactggagaaagcgcccctccgacatggcctgccgagttaatgcagggtctggccagatatgtgttccagagcgagaacaccttttgctctggggatcatgtgagctggcatagccccctcgataatagtgagagcagaatccagcacatgttgctaacggaggatcctcagatgcagcctgtgcagaccccatttggcgtggtcaccttcttgcaaattgttggggtgtgcaccgaagaactgcactccgcccagcaatggaacggccaggggatcctggagcttcttagaacagtgcctattgctgggggaccttggctgatcacggacatgcgcagaggtgagacaattttcgagattgacccgcatttgcaagagagggtagacaaggggattgaaacagatgggtcgaatctatctggggtgtccgccaaatgcgcctgggacgacctgagtagacccccagaagatgatgaagattctcgtagcatctgtatcggtacccagcctcgacggctgtccggcaaggacaccgagcagattcgagagaccctacggaggggcctggagataaactctaaaccggtgctaccccctatcaacccacagcggcaaaacggcctggcacacgatcgtgcaccttcccgcaaagatagcctcgaatccgactcttccacagccattattccacatgaattaatccgtacaagacaattggagtcagtccatttaaagtttaaccaggagtctggcgctctaatccctctgtgtctgcgaggacgcctactccacggtagacattttacatataagtcaattaccggcgacatggctatcacgttcgtgagcaccggagtggagggggctttcgcaacagaagaacacccatatgctgcccacgggccttggcttcagctttag

SEQ ID NO: 70738 - DNA, 1839 bp, Artificial Sequence
  derived and/or modified sequence
cgccgtgcgcaggcgcggagctagacctcgctgcagcccccatcgcctcggggagtctcacccaccgagtccgcccgctggcccgtcagtgctctccccgtcgtttgccctctccagttcccccagtgcctgccctacgcaccccgatggcggagctgcggcctagcggcgcccccggccccaccgcgcccccggcccctggcccgactgcccccccggccttcgcttcgctctttcccccgggactgcacgccatctacggagagtgccgccgcctttaccctgaccagccgaacccgctccaggttaccgctatcgtcaagtactggttgggtggcccagaccccttggactatgttagcatgtacaggaatgtggggagcccttctgctaacatccccgagcactggcactacatcagcttcggcctgagtgatctctatggtgacaacagagtccatgagtttacaggaacagatggacctagtggttttggctttgagttgacctttcgtctgaagagagaaactggggagtctgccccaccaacatggcccgcagagttaatgcagggcttggcacgatacgtgttccagtcagagaacaccttctgcagtggggaccatgtgtcctggcacagccctttggataacagtgagtcaagaattcagcacatgctgctgacagaggacccacagatgcagcccgtgcagacaccctttggggtagttaccttcctccagatcgttggtgtctgcactgaagagctacactcagcccagcagtggaacgggcagggcatcctggagctgctgcggacagtgcctattgctggcggcccctggctgataactgacatgcggaggggagagaccatatttgagatcgatccacacctgcaagagagagttgacaaaggcatcgagacagatggctccaacctgagtggtgtcagtgccaagtgtgcctgggatgacctgagccggccccccgaggatgacgaggacagccggagcatctgcatcggcacacagccccggcgactctctggcaaagacacagagcagatccgggagaccctgaggagaggactcgagatcaacagcaaacctgtccttccaccaatcaaccctcagcggcagaatggcctcgcccacgaccgggccccgagccgcaaagacagcctggaaagtgacagctccacggccatcattccccatgagctgattcgcacgcggcagcttgagagcgtacatctgaaattcaaccaggagtccggagccctcattcctctctgcctaaggggcaggctcctgcatggacggcactttacatataaaagtatcacaggtgacatggccatcacgtttgtctccacgggagtggaaggcgcctttgccactgaggagcatccttacgcggctcatggaccctggttacaactctgaacctatcctcggagctctgccctcccgtcctggaacgtctttctgccctgaggagagggtagtcagcatctccaattttcagcagctcaagaaccttggcccccacaggacttcgcagatgtcacattgcccctcagtcccctgaatgcccttcggacccaaccccaattccccaagcccctgaccccctagctgccggggttcccactcccagtgccacaaccccctcacctccctggcagcccctcagcgagcctgaggcccagcacccgctggctccccagcacatggtcccctcccatgggctgttgcccagggaaccggggcgcggtgggaacgagctgctggcctcggcatgtttcaataaagttgctgtgctgggagctactca

SEQ ID NO: 70739 - protein, 140 aa, Artificial Sequence
  derived and/or modified sequence
MNAKVVVVLVLVLTALCLSDGKPVSLSYRCPCRFFESHVARANVKHLKILNTPNCALQIVARLKNNNRQVCIDPKLKWIQEYLEKALNNLISAAPAGKRVIAGARALHPSPPRACPTARALCEIRLWPPPEWSWPSPGDV

SEQ ID NO: 70740 - DNA, 423 bp, Artificial Sequence
  derived and/or modified sequence
atgaacgccaaggtggtggtggtgctggtgctggtgctgaccgccctgtgcctgagcgacggcaagcccgtgagcctgagctacagatgcccctgcagattcttcgagagccacgtggccagagccaacgtgaagcacctgaagatcctgaacacccccaactgcgccctgcagatcgtggccagactgaagaacaacaacagacaggtgtgcatcgaccccaagctgaagtggatccaggagtacctggagaaggccctgaacaacctgatcagcgccgcccccgccggcaagagagtgatcgccggcgccagagccctgcaccccagcccccccagagcctgccccaccgccagagccctgtgcgagatcagactgtggcccccccccgagtggagctggcccagccccggcgacgtgtag

SEQ ID NO: 70741 - DNA, 273 bp, Artificial Sequence
  derived and/or modified sequence
atgaacgccaaggtggtggtggtgctggtgctggtgctgaccgccctgtgcctgagcgacggcaagcccgtgagcctgagctacagatgcccctgcagattcttcgagagccacgtggccagagccaacgtgaagcacctgaagatcctgaacacccccaactgcgccctgcagatcgtggccagactgaagaacaacaacagacaggtgtgcatcgaccccaagctgaagtggatccaggagtacctggagaaggccctgaacaactgctag

SEQ ID NO: 70742 - DNA, 1052 bp, Artificial Sequence
  derived and/or modified sequence
ccccgacccgcgctcgtccgcccgcccgcccgcccgcccgcgccatgaacgccaaggtcgtggtcgtgctggtcctcgtgctgaccgcgctctgcctcagcgacgggaagcccgtcagcctgagctacagatgcccatgccgattcttcgaaagccatgttgccagagccaacgtcaagcatctcaaaattctcaacactccaaactgtgcccttcagattgtagcccggctgaagaacaacaacagacaagtgtgcattgacccgaagctaaagtggattcaggagtacctggagaaagctttaaacaacctgatcagcgccgcaccagccgggaagagggtgattgctggggctcgtgccctgcatccctctcctcccagggcctgccccacagctcgggccctctgtgagatccgtctttggcctcctccagaatggagctggccctctcctggggatgtgtaatggtccccctgcttacccgcaaaagacaagtctttacagaatcaaatgcaattttaaatctgagagctcgctttgagtgactgggttttgtgattgcctctgaagcctatgtatgccatggaggcactaacaaactctgaggtttccgaaatcagaagcgaaaaaatcagtgaataaaccatcatcttgccactaccccctcctgaagccacagcagggtttcaggttccaatcagaactgttggcaaggtgacatttccatgcataaatgcgatccacagaaggtcctggtggtatttgtaactttttgcaaggcatttttttatatatatttttgtgcacatttttttttacgtttctttagaaaacaaatgtatttcaaaatatatttatagtcgaacaattcatatatttgaagtggagccatatgaatgtcagtagtttatacttctctattatctcaaactactggcaatttgtaaagaaatatatatgatatataaatgtgattgcagcttttcaatgttagccacagtgtattttttcacttgtactaaaattgtatcaaatgtgacattatatgca

SEQ ID NO: 70743 - DNA, 618 bp, Artificial Sequence
  derived and/or modified sequence
ccccgacccgcgctcgtccgcccgcccgcccgcccgcccgcgccatgaacgccaaggtcgtggtcgtgctggtcctcgtgctgaccgcgctctgcctcagcgacgggaagcccgtcagcctgagctacagatgcccatgccgattcttcgaaagccatgttgccagagccaacgtcaagcatctcaaaattctcaacactccaaactgtgcccttcagattgtagcccggctgaagaacaacaacagacaagtgtgcattgacccgaagctaaagtggattcaggagtacctggagaaagctttaaacaattgctagaatatggctgtacggcaatgctgagacatcacgctgagcgagagtggacatcctcattttattcctacccttaccgtggatctctcctgtgcttcaccactcagtataatgctggctgagctcttctgacaaataccttccaagatgtgaggaaaacacacgtaggtgcagttgttgaattgtatgatctgccactgaagtaattagtgtgataattacttggattttctcctttaacaaattattgttataaattatattaatatatgtcatgctaataaattatttccatattcctagg

SEQ ID NO: 70744 - DNA, 423 bp, Artificial Sequence
  derived and/or modified sequence
atgaatgcaaaagtcgtggtagtcctggtcctggtgctgaccgctttatgtctatccgatggcaagcctgtttcccttagctacagatgtccttgccgattttttgagagccacgtagcacgcgctaatgtcaagcacctgaagatactaaataccccaaactgcgcactgcagattgtggctcgtctcaaaaacaataatcggcaagtgtgcatagatccaaagttaaaatggatccaggaatacctcgaaaaggcccttaacaatctgatttcggctgctcctgcaggcaaacgtgtcattgcaggtgcacgggccttgcaccctagtcccccccgggcatgtccaacggccagagctctgtgcgagatacgcctttggccccccccggagtggtcttggccatcccccggagacgtctag

SEQ ID NO: 70745 - DNA, 273 bp, Artificial Sequence
  derived and/or modified sequence
atgaatgctaaagttgttgtggttctggtcctcgttttgacagccctatgcctgtcagatggaaaaccagtatcactgagttatagatgtccatgccgcttctttgagtctcacgttgcaagggccaacgtcaagcacctgaaaatcctaaacactccgaattgcgcccttcagatcgttgcccggctgaaaaataataacaggcaggtttgtatagacccgaagctcaagtggatccaggaatacctagagaaagcgctaaataactgttag

SEQ ID NO: 70746 - DNA, 423 bp, Artificial Sequence
  derived and/or modified sequence
atgaatgccaaggtggtggtggtgctggtgctggtgctgacagccctgtgcctgagtgatggcaagcctgtgtccctgagctaccgctgcccctgccgcttctttgagagccacgtggcccgggccaacgtgaagcacctgaagatcctgaacacccccaactgtgccctgcagatcgtggcccggctgaagaacaacaaccggcaggtgtgcatcgaccccaagctgaagtggatccaggagtacctggagaaggccctgaacaacctgatctctgctgccccagctgggaagagggtgattgctggggcccgggccctgcaccccagccccccccgggcctgccccacagcccgggccctgtgtgagatccggctgtggcccccacctgagtggagctggcccagccctggagatgtgtag

SEQ ID NO: 70747 - DNA, 273 bp, Artificial Sequence
  derived and/or modified sequence
atgaatgccaaggtggtggtggtgctggtgctggtgctgacagccctgtgcctgagtgatggcaagcctgtgtccctgagctaccgctgcccctgccgcttctttgagagccacgtggcccgggccaacgtgaagcacctgaagatcctgaacacccccaactgtgccctgcagatcgtggcccggctgaagaacaacaaccggcaggtgtgcatcgaccccaagctgaagtggatccaggagtacctggagaaggccctgaacaactgctag

SEQ ID NO: 70748 - DNA, 423 bp, Artificial Sequence
  derived and/or modified sequence
atgaacgccaaggtggtggtggtgctggtgctggtgctgaccgccctgtgcctgagtgacgggaaaccggtcagtctctcttataggtgcccctgtagatttttcgaaagtcatgtggctcgggcgaatgttaaacatttaaaaatcttaaacactcccaactgtgctctccagatcgtagcccgcttaaagaacaacaaccggcaggtctgcatcgaccctaagctcaagtggattcaggaataccttgagaaagctctcaacaatttaatctccgcagctcccgcaggaaagagggtcatagccggagctagagcgctgcatccaagtccgccacgcgcctgccctacagccagggccctgtgcgaaattagattgtggcctccgcctgagtggtcctggccatcaccgggcgacgtgtag

SEQ ID NO: 70749 - DNA, 273 bp, Artificial Sequence
  derived and/or modified sequence
atgaacgccaaggtggtggtggtgctggtgctggtgctgaccgccttatgcctgtccgatggtaagcccgtaagtctgtcatatcgctgtccctgtagattctttgaatcccacgtagcccgggccaacgtgaagcatcttaagatcctcaatacaccaaattgtgctctccagatcgtggctaggctgaaaaataacaaccgccaggtttgcatcgaccctaagcttaagtggatccaagaataccttgagaaggcactgaacaactgctag

SEQ ID NO: 70750 - DNA, 423 bp, Artificial Sequence
  derived and/or modified sequence
atgaatgctaaggtcgttgtcgtgttggtactagtcctcacggccctgtgtctgagcgatggcaaacctgtcagcctgtcctaccggtgcccgtgtcggttctttgagagccatgttgcgagggccaacgtgaagcacctgaagattcttaatacacctaattgtgctctgcagatcgtggcaaggttaaagaacaataacagacaagtgtgcattgatcctaaactcaagtggattcaggagtatcttgaaaaagctctgaacaaccttatctctgcagcaccagctgggaagcgggtcattgcaggggcacgggctctgcacccaagccctccaagagcttgcccaactgcacgcgctctctgtgaaatccgtctgtggccgccacctgaatggagctggccctctccaggcgacgtttag

SEQ ID NO: 70751 - DNA, 273 bp, Artificial Sequence
  derived and/or modified sequence
atgaatgccaaggtggtggtggttttagtccttgtgctcacagctctgtgcctgagcgatggtaagcccgtcagtctgtcctaccgttgcccttgtcgcttcttcgagagtcacgtggcgagggccaacgtgaaacacttgaagatactgaatacaccgaactgtgccctccaaatagtagcacgcctaaaaaacaacaacagacaggtctgcatcgatcctaaactgaagtggatacaggaatatttggagaaggctctaaacaactgctag

SEQ ID NO: 70752 - DNA, 423 bp, Artificial Sequence
  derived and/or modified sequence
atgaacgctaaggttgttgtggtcctcgttcttgttctaaccgccctttgtctctcagatggtaagcctgtttcccttagttaccgctgtccatgtagattctttgagtcccatgtagcccgagccaacgtcaaacatctgaaaatacttaacaccccaaactgcgcccttcagatagttgctagacttaagaataataatcgccaagtttgtattgatccaaagctgaaatggatacaagaatatctcgagaaagccctcaataatctcatcagcgcggcacctgctggaaagcgtgttatcgctggagcaagggcattgcatcctagtccccccagagcgtgtccaacggcaagggctctgtgcgagattcgattgtggcccccaccagaatggtcctggccatctccaggtgatgtctag

SEQ ID NO: 70753 - DNA, 273 bp, Artificial Sequence
  derived and/or modified sequence
atgaacgccaaagtcgtggtcgtgctagtgctggtcctcaccgctctttgtctttctgacggtaaaccagtctccctttcgtatcggtgcccttgcagattcttcgagagccacgtcgcacgagccaatgttaaacacctgaagatcctaaacaccccgaattgcgccttacaaatagtggccaggttaaaaaataataacagacaggtttgtatcgatccaaaattgaaatggatccaagaatatttggaaaaggccctgaacaactgctag

SEQ ID NO: 70754 - DNA, 423 bp, Artificial Sequence
  derived and/or modified sequence
atgaacgctaaggttgttgtggtcctcgttcttgttctaaccgccctttgtctctcagatggtaagcctgtttcccttagttaccgctgtccatgtagattctttgagtcccatgtagcccgagccaacgtcaaacatctgaaaatacttaacaccccaaactgcgcccttcagatagttgctagacttaagaataataatcgccaagtttgtattgatccaaagctgaaatggatacaagaatatctcgagaaagccctcaataatctcatcagcgcggcacctgctggaaagcgtgttatcgcaggcgcccgcgcactccatccctcccctccccgcgcatgtccaaccgcccgggcactttgcgaaataaggttatggcccccaccagagtggtcttggccctcacccggcgacgtttag

SEQ ID NO: 70755 - RNA, 423 nt, Artificial Sequence
  derived and/or modified sequence
augaacgcuaagguuguugugguccucguucuuguucuaaccgcccuuugucucucagaugguaagccuguuucccuuaguuaccgcuguccauguagauucuuugagucccauguagcccgagccaacgucaaacaucugaaaauacuuaacaccccaaacugcgcccuucagauaguugcuagacuuaagaauaauaaucgccaaguuuguauugauccaaagcugaaauggauacaagaauaucucgagaaagcccucaauaaucucaucagcgcggcaccugcuggaaagcguguuaucgcuggagcaagggcauugcauccuaguccccccagagcguguccaacggcaagggcucugugcgagauucgauuguggcccccaccagaaugguccuggccaucuccaggugaugucuag

SEQ ID NO: 70756 - RNA, 273 nt, Artificial Sequence
  derived and/or modified sequence
augaacgccaaagucguggucgugcuagugcugguccucaccgcucuuugucuuucugacgguaaaccagucucccuuucguaucggugcccuugcagauucuucgagagccacgucgcacgagccaauguuaaacaccugaagauccuaaacaccccgaauugcgccuuacaaauaguggccagguuaaaaaauaauaacagacagguuuguaucgauccaaaauugaaauggauccaagaauauuuggaaaaggcccugaacaacugcuag

SEQ ID NO: 70757 - RNA, 423 nt, Artificial Sequence
  derived and/or modified sequence
augaacgcuaagguuguugugguccucguucuuguucuaaccgcccuuugucucucagaugguaagccuguuucccuuaguuaccgcuguccauguagauucuuugagucccauguagcccgagccaacgucaaacaucugaaaauacuuaacaccccaaacugcgcccuucagauaguugcuagacuuaagaauaauaaucgccaaguuuguauugauccaaagcugaaauggauacaagaauaucucgagaaagcccucaauaaucucaucagcgcggcaccugcuggaaagcguguuaucgcaggcgcccgcgcacuccaucccuccccuccccgcgcauguccaaccgcccgggcacuuugcgaaauaagguuauggcccccaccagaguggucuuggcccucacccggcgacguuuag

SEQ ID NO: 70758 - protein, 208 aa, Artificial Sequence
  derived and/or modified sequence
MAAPPQPVTHLIFDMDGLLLDTERLYSVVFQEICNRYDKKYSWDVKSLVMGKKALEAAQIIIDVLQLPMSKEELVEESQTKLKEVFPTAALMPGAEKLIIHLRKHGIPFALATSSGSASFDMKTSRHKEFFSLFSHIVLGDDPEVQHGKPDPDIFLACAKRFSPPPAMEKSSIHRPRLLTAQKCQGCRDPFSALLLLCNQLLLCSDDT

SEQ ID NO: 70759 - DNA, 627 bp, Artificial Sequence
  derived and/or modified sequence
atggccgcccccccccagcccgtgacccacctgatcttcgacatggacggcctgctgctggacaccgagagactgtacagcgtggtgttccaggagatctgcaacagatacgacaagaagtacagctgggacgtgaagagcctggtgatgggcaagaaggccctggaggccgcccagatcatcatcgacgtgctgcagctgcccatgagcaaggaggagctggtggaggagagccagaccaagctgaaggaggtgttccccaccgccgccctgatgcccggcgccgagaagctgatcatccacctgagaaagcacggcatccccttcgccctggccaccagcagcggcagcgccagcttcgacatgaagaccagcagacacaaggagttcttcagcctgttcagccacatcgtgctgggcgacgaccccgaggtgcagcacggcaagcccgaccccgacatcttcctggcctgcgccaagagattcagccccccccccgccatggagaagagcagcatccacagacccagactgctgaccgcccagaagtgccagggctgcagagaccccttcagcgccctgctgctgctgtgcaaccagctgctgctgtgcagcgacgacacctag

SEQ ID NO: 70760 - DNA, 627 bp, Artificial Sequence
  derived and/or modified sequence
atggctgcacccccgcaaccagtgacacacctgatcttcgatatggatggcctcttgcttgacacagaacggttatactctgtggtctttcaggagatatgcaatcggtacgacaagaaatattcatgggatgtgaaaagtctggtgatgggcaaaaaggcactggaggccgctcagattatcattgacgtgctccaactccccatgagtaaagaggagcttgttgaagaaagccagaccaagctcaaagaggtcttccctactgccgcattgatgcccggcgctgagaaactcataattcacctgcgcaaacacggaattccatttgccctggccacctctagcgggagcgctagtttcgatatgaagacttcaaggcacaaggagttcttttcgttattctctcatatagtccttggcgatgaccctgaagtgcagcatgggaagcccgatccagacatattcctcgcgtgcgctaagaggttctctccaccaccggcgatggaaaagtctagtattcatcgcccccggttattaacggcacaaaagtgtcaaggttgccgcgatcctttttccgcccttctgctgttgtgtaatcagttgctgttgtgctctgacgatacttag

SEQ ID NO: 70761 - DNA, 627 bp, Artificial Sequence
  derived and/or modified sequence
atggccgccccaccccagcctgtgacccacctgatctttgacatggatggcctgctgctggacacagagcggctgtacagcgtggtgttccaggagatctgcaacagatatgacaagaagtacagctgggatgtgaagagcctggtgatgggcaagaaggccctggaggccgcccagatcatcattgatgtgctgcagctgcccatgagcaaggaggagctggtggaggagagccagaccaagctgaaggaggtgttccccacagctgccctgatgcctggagctgagaagctgatcatccacctgaggaagcacggcatcccctttgccctggccaccagcagcggcagcgccagctttgacatgaagaccagccgccacaaggagttcttcagcctcttcagccacatcgtgctgggagatgatcctgaggtgcagcacggcaagccagaccctgacatcttcctggcctgtgccaagcgcttcagccccccaccagccatggagaagagcagcatccaccggccccggctgctgacagcccagaagtgccagggctgccgggaccccttcagcgccctgctgctgctgtgcaaccagctgctgctgtgcagtgatgacacctag

SEQ ID NO: 70762 - DNA, 825 bp, Artificial Sequence
  derived and/or modified sequence
ctcagtgcgcgtgcgcggggcgggcgggtgcgcgcgcacttcctcctcgcccccacccagacccagaaggcgccaccatggcggcgcccccgcagcccgtcacccacctcatctttgacatggacggacttcttctggatactgaacggctgtattcagtggtgtttcaagaaatatgtaatcgctatgacaagaaatacagctgggatgtaaagtccctggttatgggtaagaaggcattagaggcggcacagattataatagacgtcttgcagctcccgatgtccaaagaggagctggtggaagaaagccaaacgaagttaaaggaagtgttccccacggctgcgctcatgccaggggcggagaaactcatcatccacctgcggaaacatggcatcccctttgcactggccaccagctcggggtccgcgtcgttcgatatgaagacaagccgccacaaggagttcttcagcttgttttcccacattgtgctgggagatgaccccgaagtgcagcatggcaagccagacccggacatcttcctagcttgtgccaagaggttctctccccctcctgctatggagaagagctccatccatagacctcgtctgctcaccgcacagaaatgccagggctgccgggatcccttctcagcgctcctccttctgtgtaatcaactgcttctctgctctgatgacacctgaccgcacctccagctcacagccacagtgcatggagaccccgagccttctacttgggtgtcccacgatggcctcaaacccaacttgtcacaaaagctacctctccttcctgccaccaaaatgg

SEQ ID NO: 70763 - DNA, 627 bp, Artificial Sequence
  derived and/or modified sequence
atggccgcccccccccagcccgtgacccacctgatcttcgacatggacgggttactcctcgataccgaacgattgtactccgttgtgtttcaggagatctgtaataggtacgataagaaatactcctgggacgttaaatcactcgtaatgggaaagaaggctctggaggcagcccagatcataatcgacgttctgcagctgcccatgtctaaggaagaactagtcgaagagtctcagaccaagcttaaggaggtgttccctacagccgccttgatgccaggggcggagaaactgatcatccacctgaggaagcacggtattcctttcgcccttgcgacaagttcaggctcagcctcctttgacatgaagaccagtaggcataaggaatttttttccctcttcagtcacatcgtgctgggagacgatcctgaggtgcagcacggcaaacccgaccccgacatctttctcgcttgtgctaagagattctctcctccccccgccatggagaagtcttcaatccaccgacccaggctgctgactgcccagaagtgccaaggttgccgcgatcctttttccgcattgttgctcctctgcaaccagttgctcctttgttccgatgacacatag

SEQ ID NO: 70764 - DNA, 627 bp, Artificial Sequence
  derived and/or modified sequence
atggcagcaccgcctcaaccagtaacacacctcattttcgacatggacgggctgctgctggataccgagcggctgtattcagtcgtctttcaggagatttgcaatagatacgataaaaagtactcatgggacgtcaagagcctggtcatggggaagaaagcactcgaagcagcacaaatcattatcgatgtcctgcagctgcccatgtcaaaggaagagcttgttgaggaatcccaaacaaaacttaaagaagtgtttcctacagctgcccttatgccaggagccgagaaactgatcatccaccttcggaaacatgggattccctttgcactggcgacttcatcaggttctgcgtctttcgacatgaagacatcccggcacaaggaattcttttcactgttttcccacatcgtgctcggggatgacccagaggttcagcacgggaaaccggaccccgatatctttctcgcttgcgctaagaggttctcgccaccacctgccatggaaaaatcctctattcaccgacctaggctgctaaccgcccaaaaatgtcagggatgccgtgaccctttttcagctctgcttttactctgtaaccagcttctgctgtgctcggacgatacctag

SEQ ID NO: 70765 - protein, 185 aa, Artificial Sequence
  derived and/or modified sequence
MAAPPQPVTHLIFDMDGLLLDTERLYSVVFQEICNRYDKKYSWDVKSLVMGAEKLIIHLRKHGIPFALATSSGSASFDMKTSRHKEFFSLFSHIVLGDDPEVQHGKPDPDIFLACAKRFSPPPAMEKCLVFEDAPNGVEAALAAGMQVVMVPDGNLSRDLTTKATLVLNSLQDFQPELFGLPSYE

SEQ ID NO: 70766 - DNA, 558 bp, Artificial Sequence
  derived and/or modified sequence
atggccgcccccccccagcccgtgacccacctgatcttcgacatggacggcctgctgctggacaccgagagactgtacagcgtggtgttccaggagatctgcaacagatacgacaagaagtacagctgggacgtgaagagcctggtgatgggcgccgagaagctgatcatccacctgagaaagcacggcatccccttcgccctggccaccagcagcggcagcgccagcttcgacatgaagaccagcagacacaaggagttcttcagcctgttcagccacatcgtgctgggcgacgaccccgaggtgcagcacggcaagcccgaccccgacatcttcctggcctgcgccaagagattcagccccccccccgccatggagaagtgcctggtgttcgaggacgcccccaacggcgtggaggccgccctggccgccggcatgcaggtggtgatggtgcccgacggcaacctgagcagagacctgaccaccaaggccaccctggtgctgaacagcctgcaggacttccagcccgagctgttcggcctgcccagctacgagtag

SEQ ID NO: 70767 - DNA, 558 bp, Artificial Sequence
  derived and/or modified sequence
atggcggctcctccccagccagtgactcatctgatcttcgatatggatggcctgctgttggatactgagcggctgtactcagtggtgtttcaggagatctgtaaccggtatgataagaagtattcttgggatgtcaagtccttggtgatgggcgccgaaaaacttattatacacctgcgtaagcatgggattccttttgccctggctacctcatctggcagcgcttctttcgatatgaagacgtcccgccacaaagaatttttctccttgtttagtcacatagtgttgggcgatgacccagaagttcaacacggtaaacccgacccagatatcttcctggcctgtgcgaaaaggtttagtccaccgccagccatggaaaagtgcttagtgtttgaagatgctcccaacggagtggaagccgcgttagccgccggcatgcaggtggttatggtgcccgacggcaacctgagccgcgatctgacaactaaggctacactcgtcctcaattcgctccaagacttccagccagaattatttgggctcccgagctatgagtag

SEQ ID NO: 70768 - DNA, 558 bp, Artificial Sequence
  derived and/or modified sequence
atggccgccccaccccagcctgtgacccacctgatctttgacatggatggcctgctgctggacacagagcggctgtacagcgtggtgttccaggagatctgcaacagatatgacaagaagtacagctgggatgtgaagagcctggtgatgggcgctgagaagctgatcatccacctgaggaagcacggcatcccctttgccctggccaccagcagcggcagcgccagctttgacatgaagaccagccgccacaaggagttcttcagcctcttcagccacatcgtgctgggagatgatcctgaggtgcagcacggcaagccagaccctgacatcttcctggcctgtgccaagcgcttcagccccccaccagccatggagaagtgcctggtgtttgaagatgcccccaacggggtggaggccgccctggccgccggcatgcaggtggtgatggtgcctgatggcaacctgagccgggacctgaccaccaaggccaccctggtgctgaacagcctgcaggacttccagcctgagctgtttggcctgcccagctatgaatag

SEQ ID NO: 70769 - DNA, 1376 bp, Artificial Sequence
  derived and/or modified sequence
acttcctcctcgcccccacccagacccagaaggcgccaccatggcggcgcccccgcagcccgtcacccacctcatctttgacatggacggacttcttctggatactgaacggctgtattcagtggtgtttcaagaaatatgtaatcgctatgacaagaaatacagctgggatgtaaagtccctggttatgggggcggagaaactcatcatccacctgcggaaacatggcatcccctttgcactggccaccagctcggggtccgcgtcgttcgatatgaagacaagccgccacaaggagttcttcagcttgttttcccacattgtgctgggagatgaccccgaagtgcagcatggcaagccagacccggacatcttcctagcttgtgccaagaggttctctccccctcctgctatggagaagtgccttgtctttgaagatgctcccaatggggtggaggcggccctggcagctgggatgcaggtggtcatggttcctgacggaaacttgagccgagatctgacaacaaaggccaccctggtgctgaattccctgcaggacttccagcccgagctgtttggtttgccctcctatgagtgagagggagggcctcagtcttccgcccccagcccactctcatggtccacactgctgggggaaagggaaaggaaatcagcaactcttcaatcccaacctgcgctgtgattttagcctcctgagattggagtttccatcccatgttggtttgtcccagtctaacgtgttgataaaatgtgacttgacggttgagacaaaaaatacagtagagacagaaacgaagcccagaacaaagatgaaacttgaattaccatctcagaagtcaagctgatggagtatgtgataaagtgaatgtacatgtatatacacacacacctccatatatacatgtgtgtatcagtttggtaatatgcaggtaggcattacatgcatatgtatgtagacatatgcatgcatgtatatgtaaaatatatacttttccaagacaaaatggaacatcacttctctcttctagtttttctgaacactggctgggaaatgtaaactgtgtatgcatataagtatatgctttatgtatgcatatgtatgtagatatgtttatatctatcgtctgcatcactctcctcagtgttgatgtcaacatgcaatgacaactgataaagcgagatggtagttctgcctggtttgcagtctgagtgggaaagtcctgtttttgatgagcactccttgttagctaacatttaaattctttttgtgacctcagaatgtctctggatctttcctcattgactgactctgtgccacgtcatccatagtttattgttagtatgaacacaactgt

SEQ ID NO: 70770 - DNA, 558 bp, Artificial Sequence
  derived and/or modified sequence
atggccgcccccccccagcccgtgacccacctgatcttcgacatggatggcttgctgcttgacactgagagattatactccgttgtttttcaggagatctgcaacagatacgataagaaatactcatgggatgtgaaaagcctagttatgggtgctgagaagctgataattcatctgagaaaacacgggatacctttcgctttagctaccagctccgggtcagccagctttgacatgaaaacatcaaggcacaaggagtttttcagtttgttttcacatatagtgctgggcgacgatcctgaagtccagcacggcaaacccgacccagatatctttctggcctgtgccaaacgtttttctcccccacctgctatggaaaagtgtctggttttcgaggatgcccctaacggggtggaggccgccttagccgccggaatgcaagtggtgatggtgcctgatggcaatctgtcacgcgacttaacgaccaaagcgacgctggtgctgaactcactgcaggactttcagccggaactgtttgggttgcctagctacgagtag

SEQ ID NO: 70771 - DNA, 558 bp, Artificial Sequence
  derived and/or modified sequence
atggccgcaccgccacagcctgttacacatctcatctttgacatggatgggctccttctcgatacagaaaggttgtatagcgtagtatttcaggaaatttgtaaccggtacgacaaaaaatacagttgggacgtgaaatcgctggtgatgggagcagagaagcttatcatccacctccgcaagcacggcatcccgtttgcccttgccacctcctctggctcggcaagttttgatatgaaaacgtccagacataaggaattcttttccctgttcagtcacatagtcctcggagacgaccccgaagtacagcacggaaagcccgatccagatatcttcctggcttgcgctaagcgatttagcccccctcctgctatggaaaaatgcctcgtcttcgaggacgcgcctaatggtgtcgaagccgcactggcggctggtatgcaggtggtgatggtcccagacggcaatttgtcaagagacctgaccacaaaagcgaccttggtccttaactccctgcaggattttcagcccgagttgttcggcttgccatcctacgaatag

SEQ ID NO: 70772 - protein, 684 aa, Artificial Sequence
  derived and/or modified sequence
MQDDLLMDKSKTQPQPQQQQRQQQQPQPESSVSEAPSTPLSSETPKPEENSAVPALSPAAAPPAPNGPDKMQMESPLLPGLSFHQPPQQPPPPQEPAAPGASLSPSFGSTWSTGTTNAVEDSFFQGITPVNGTMLFQNFPHHVNPVFGGTFSPQIGLAQTQHHQQPPPPAPAPQPAQPAQPPQAQPPQQRRSPASPSQAPYAQRSAAAAYGHQPIMTSKPSSSSAVAAAAAAAAASSASSSWNTHQSVNAAWSAPSNPWGGLQAGRDPRRAVGVGVGVGVGVPSPLNPISPLKKPFSSNVIAPPKFPRAAPLTSKSWMEDNAFRTDNGNNLLPFQDRSRPYDTFNLHSLENSLMDMIRTDHEPLKGRMGINFHHPGTDNIMALNSRSSLFPFEDAFLDDSHGDQALSSGLSSPTRCQNGERVERYSRKVFVGGLPPDIDEDEITASFRRFGPLVVDWPHKAESKSYFPPKGYAFLLFQEESSVQALIDACLEEDGKLYLCVSSPTIKDKPVQIRPWNLSDSDFVMDGSQPLDPRKTIFVGGVPRPLRAVELAMIMDRLYGGVCYAGIDTDPELKYPKGAGRVAFSNQQSYIAAISARFVQLQHNDIDKRVEVKPYVLDDQMCDECQGTRCGGKFAPFFCANVTCLQYYCEYCWASIHSRAGREFHKPLVKEGGDRPRHVPFRWS

SEQ ID NO: 70773 - DNA, 2055 bp, Artificial Sequence
  derived and/or modified sequence
atgcaggacgacctgctgatggataagagtaaaacccaaccacagccacagcagcaacagcgacagcagcagcagccccaacccgagtccagcgtgtcagaggcaccatctacccccctgtcttccgagacccctaagccagaagagaattcagcagttcctgcgctgtcccccgcggctgcaccccctgcacccaacggacctgacaagatgcagatggagtctccattgttacccggcctgagttttcatcagcccccccagcagccacctcctccacaagaaccagccgcacctggcgcatcactctccccttcctttgggagcacttggagtactggcaccacaaacgcagtagaggactcattttttcaggggattacccctgtgaacggcacaatgctgtttcagaacttcccccatcacgtcaaccccgtctttggtggtactttctcccctcagataggactcgcacaaactcagcatcatcagcaaccgcccccgccagcaccagccccacaacctgcgcaaccagcccagccgccccaggcccagcctcctcagcagcgaagaagccctgcttcccccagccaggctccttacgcccagaggtctgccgcggcagcctatggccaccagccaatcatgactagcaaaccatcttcttccagcgcagtggccgctgcagcggccgccgctgccgcaagttctgctagttcaagttggaacacccatcagagtgtgaatgccgcgtggagtgctccgtccaacccttgggggggtctccaagccgggagggacccacgccgcgcagtgggggtgggggtcggtgtcggagtgggagtaccaagcccattgaatccgatctccccattaaagaagcctttctcctccaatgtgattgcaccccctaagtttcccagagctgccccattaacaagtaaatcctggatggaagacaatgcctttcggacagacaatgggaataatttactcccttttcaggacagatcacgcccatatgacactttcaatctgcattcactggagaatagtctgatggatatgattaggacagaccatgaaccgctaaagggacggatgggtattaactttcaccaccctggaaccgacaacatcatggccctcaacagcagatcctcactcttcccgttcgaggatgccttcttagatgatagccatggcgatcaggccttgtccagcgggctgagtagtcctacccggtgtcagaacggcgagcgagttgagcgctactcacgtaaggtattcgtgggtgggctgcccccggacatcgatgaggatgagatcacggcctcatttcgtcggttcggacctttagtggtggattggcctcacaaggctgagagcaagtcctatttccccccaaaggggtacgctttcctcctctttcaggaggagagctcagtgcaggcgctgatagacgcttgcctggaggaggatggaaagctttatctctgtgttagcagtccgaccattaaggataagccagtacagattagaccctggaacttatcggattccgactttgtgatggatggtagccaacccttggaccccaggaaaacaatcttcgttggcggagtccctcgcccactgagggcagtcgagctcgccatgatcatggacagactgtatgggggcgtgtgctacgccggaattgacacagaccctgagcttaaataccctaagggtgcagggagagttgcctttagcaaccagcagtcctacattgcagcaatttccgctcgattcgtgcagctgcagcacaatgacattgataagagagtcgaagtcaaaccctatgttctagacgaccagatgtgcgatgagtgtcagggaactaggtgcggcggcaagtttgcaccttttttctgtgcaaacgtgacttgcctgcagtattattgcgaatattgctgggcatctatccactcgcgtgccgggcgggagtttcacaagcccttagtcaaagaagggggggatcgacctcggcacgtaccctttagatggagctag

SEQ ID NO: 70774 - DNA, 2055 bp, Artificial Sequence
  derived and/or modified sequence
atgcaagacgatctcctgatggacaaaagcaagacacagccccagccgcagcagcagcaacgtcagcagcagcagccccagcccgaatcatcggtgagcgaagcgccgtctacaccattaagtagcgagaccccaaagcctgaggagaatagcgctgtaccagccttgagcccagccgctgctccaccagctccaaatggtcccgacaaaatgcagatggaatcgccactcttgccaggcctctcgttccaccagccaccacagcagccgcctcctcctcaggaacccgctgcacccggagcctcactcagtccaagctttggatcaacctggagcacaggcacaacgaatgcagttgaagattcctttttccagggaatcactcctgtgaatggaacaatgttgttccaaaatttcccacatcacgtgaacccagtgttcggaggaacattttccccacagataggcctggcccagacccagcaccaccagcaaccccccccccccgccccagcaccccagcctgcccagccagcacagcctcctcaagcccagcccccacagcagcgccgtagccccgcctctcccagccaggccccatacgcccagcggagcgcagcggccgcctacgggcaccagcctattatgaccagcaagccttcttcctcttctgctgtcgctgcggcagcagccgctgccgctgccagctctgccagttcatcttggaacactcaccagagtgtgaatgcggcatggagcgctcctagtaacccctggggcgggttacaggctgggcgtgacccacggcgagctgtcggagtcggagtaggggtaggagtcggggtgccgagcccccttaacccgatttccccgctcaagaaaccattttcttctaacgtgattgcaccgccgaaattccctcgcgctgcacccctgacttcaaagagttggatggaagataacgccttccggacagacaatgggaataacttgcttccattccaggataggagcaggccatacgatacttttaacttgcactccttagagaattccttgatggatatgattcggactgatcacgagccactgaagggacggatgggcattaatttccaccacccaggcacagataacatcatggcgctgaactcaaggtctagcttattcccctttgaggatgctttcctggacgattctcatggagaccaggccttgtcttcaggactctcttcccctacccgctgccagaacggggagcgggtcgagcgctacagtagaaaagtttttgtaggcggtctgccacctgatatcgacgaagacgagattactgcgtcgttcaggcgatttggacccctggttgttgattggcctcacaaggctgagagcaaatcctactttcctccgaagggttatgctttcttgctgttccaggaagagagctccgtgcaggcactcatagacgcctgcctggaggaggacggaaaactttacctgtgtgttagtagcccaactatcaaggataaaccagtgcagattcggccgtggaatctgtccgattctgacttcgtcatggacggttcacaacccttggaccccaggaagacgatattcgtggggggagtccccagacctttgagggccgtagaattggctatgataatggacaggctttacggtggtgtctgttacgctggcatcgacactgatcccgaactgaagtatcctaaaggggccggacgagtagcattttctaatcaacagtcctacattgccgctatttctgctcgcttcgtgcagcttcagcacaatgatatcgataagagggtggaggtgaagccctacgtactggacgatcagatgtgtgatgagtgccaggggaccaggtgcggaggcaagttcgctcccttcttctgcgctaacgtcacatgcctacagtactactgtgagtattgttgggcttcaatacatagcagagccgggcgtgagttccacaagcctctggttaaggagggaggagataggcctcgacacgtcccttttagatggagttag

SEQ ID NO: 70775 - DNA, 2055 bp, Artificial Sequence
  derived and/or modified sequence
atgcaggatgacctgctgatggacaagagcaagacccagccccagccccagcagcagcagaggcagcagcagcagccccagcctgagagctctgtgtctgaggcccccagcacccccctgagcagcgagacccccaagccagaagaaaattctgctgtgcctgccctgagccctgctgctgcccccccagcccccaacggccctgacaagatgcagatggagagccccctgctgcccggcctgtccttccaccagcccccccagcagcccccaccaccccaggagcctgctgcccctggggccagcctgagccccagctttggcagcacctggagcacaggcaccaccaatgctgtggaggacagcttcttccagggcatcacccctgtgaatggcaccatgctgttccagaacttcccccaccacgtgaaccctgtgtttggaggcaccttcagcccccagatcggcctggcccagacccagcaccaccagcagcccccacctccagccccagccccccagcctgcccagcctgcccagcccccccaggcccagcccccccagcagaggaggagccctgccagccccagccaggccccctatgcccagaggtctgctgctgctgcctacggccaccagcccatcatgaccagcaagcccagcagcagcagcgctgtggccgctgctgctgctgctgctgctgccagcagcgccagcagctcctggaacacccaccagagcgtgaatgctgcctggagcgcccccagcaacccctggggcggcctgcaggccggccgggaccccaggagagctgtgggcgtgggcgtgggcgtgggcgtgggcgtgcccagccccctgaaccccatcagccccctgaagaagcccttcagcagcaatgtgattgccccacccaagttccccagggctgcccccctgaccagcaagtcctggatggaggacaatgccttcagaacagacaatggaaacaacctgctgcccttccaggacaggagccggccctatgacaccttcaacctgcacagcctggagaacagcctgatggacatgatcagaacagaccacgagcccctgaagggccgcatgggcatcaacttccaccaccctggaacagacaacatcatggccctgaacagccgcagcagcctcttcccctttgaagatgccttcctggatgacagccatggagaccaggccctgagcagcggcctgagcagccccacccgctgccagaatggagagcgggtggagcgctacagcaggaaggtgtttgtgggcggcctgcccccagacattgatgaagatgagatcacagccagcttccgccgcttcggccccctggtggtggactggccccacaaggccgagagcaagagctacttcccccccaagggctacgccttcctgctcttccaggaggagagctctgtgcaggccctgattgatgcctgcctggaggaggatggcaagctgtacctgtgtgtgagcagccccaccatcaaggacaagcctgtgcagatccggccctggaacctgagtgacagcgactttgtgatggatggcagccagcccctggaccccaggaagaccatctttgtgggcggcgtgccccggcccctgcgggctgtggagctggccatgatcatggaccggctgtatggaggagtgtgctacgccggcatcgacacagatcctgagctgaagtaccccaagggagctggccgggtggccttcagcaaccagcagagctacatcgccgccatcagcgccaggtttgtgcagctgcagcacaatgacatcgacaagagggtggaggtgaagccctacgtgctggatgaccagatgtgtgatgagtgccagggcacccgctgtggcggcaagtttgcccccttcttctgtgccaacgtgacctgcctgcagtactactgtgagtactgctgggccagcatccacagccgggccggccgggagttccacaagcccctggtgaaggagggcggggaccggcccaggcatgtgcccttccgctggagctag

SEQ ID NO: 70776 - DNA, 2055 bp, Artificial Sequence
  derived and/or modified sequence
atgcaggacgacctgctgatggacaagagcaagacccagccccagcctcagcagcagcagcggcagcagcaacagcctcagcccgaatcctctgtctccgaggcgccctcaacaccgctatcttcagagacacccaagccggaagagaacagtgctgtgccagcgctgtcacctgcggcggcgcccccggcacctaacggacctgacaagatgcagatggaatcccccttgttgccaggcctgagcttccaccagccccctcagcagcctccacctcctcaggaacctgcagcccctggcgcatctctctcaccctcctttggcagtacgtggtctaccgggactacaaacgcggtggaagattccttctttcaggggattacacctgtaaacgggaccatgctctttcagaactttcctcaccacgtgaatcccgtttttggggggaccttctccccccagataggcctggctcagactcagcatcatcagcagccacctccacccgctcctgccccccagccggcacagcctgcccagccccctcaggcgcagcctccccagcagcgacggagccccgcctccccttcccaggccccttatgcccagagatccgccgccgctgcgtatggccaccagcccatcatgacgagtaagccgagctcaagctctgcagttgccgctgcggcggcagctgccgccgccagttctgcatcatcctcgtggaacactcaccagtccgttaacgctgcgtggtccgctccttcaaacccatggggaggtctgcaagccggaagggatccgagacgcgctgtcggcgtgggggtcggagtgggcgtgggcgtcccttcacccctgaatcccatttcccctctcaagaagccattctcttcaaatgtaatcgccccaccaaaatttccgcgggccgctccgcttacaagcaagagttggatggaggacaacgccttccggaccgacaatggcaacaatctcctgccctttcaggacaggtctcgaccatatgacaccttcaacctccacagtcttgagaattcgctgatggacatgatcagaaccgatcatgagccgcttaagggacgcatgggtataaacttccaccatcctgggaccgataacatcatggcactgaactccaggtccagcttatttccctttgaggatgccttcctcgatgacagccacggggatcaggcattgtcttcgggcctgagctctcccactcggtgccagaatggtgagcgggttgaacgctactctcgcaaagtgtttgttggggggctaccccccgacatcgatgaggacgaaatcactgcaagcttcagaaggttcggtcctctggtggtcgactggccccataaagcagagagcaagagttactttcctccaaaagggtatgctttcctcctgttccaagaggagagttctgttcaagctttgattgatgcatgtttggaggaggatggtaagctgtatctgtgcgtgtctagtccgacaattaaggacaaacccgtgcagataaggccctggaatctgtccgacagcgattttgtgatggatggctcacagcctctagatccaaggaaaactatcttcgttggcggcgtaccaagacctctcagggccgttgaacttgccatgatcatggacaggctgtacggtggcgtctgttacgccggcatcgacacagatcctgagcttaagtacccaaagggagccggacgggtggcattcagcaaccagcaatcatacatagcagctatctctgcccggttcgtgcagttacaacacaacgacatcgacaaacgcgtggaggttaaaccctatgtcctggatgaccaaatgtgtgatgaatgccagggcacccggtgtggtggcaagttcgcacccttcttctgtgcaaatgtgacctgtctgcagtactactgcgagtactgctgggcgtctattcattctcgggccggaagggagtttcacaagccacttgtgaaggagggcggcgatcggccacggcatgtgccatttcgctggtcctag

SEQ ID NO: 70777 - DNA, 2055 bp, Artificial Sequence
  derived and/or modified sequence
atgcaggacgacctgctgatggacaagagcaagacccagccccagccccagcagcagcaacgccagcagcagcagccgcaaccagaatcaagcgtttccgaagcgccaagtacacccctgagcagcgagaccccgaagcccgaagagaactcagccgtgcccgctcttagtcctgccgcagccccccccgcccccaatgggcccgataagatgcagatggagtcaccactcttgcctggtctctcctttcatcagcctccccagcagccccctcccccccaggaaccagctgcacccggtgcctctctgtctccatcctttgggtctacatggtcgacggggacaactaatgccgtggaggattccttcttccagggaataacaccagttaacggcaccatgctgttccagaatttcccccatcatgttaaccctgtttttggcggcacctttagtccccagatcggcctggcccagactcaacatcaccagcagcctcccccccctgccccggccccacaacccgcccagcccgcccaacccccccaggcacagccaccccaacagagaagatctcccgccagtccatcacaggccccctacgcccagagatccgcagcagccgcttacggccaccagccgattatgactagtaagccaagttcaagcagtgctgtcgccgccgcggccgcagcggccgctgcatccagcgcgtcgagcagctggaacactcaccagagcgtcaacgccgcctggagtgcaccatcgaacccttggggcggcctgcaggcaggccgggatcccagacgcgcagtcggcgttggcgtaggtgtcggggtaggagtgccttcgcctctgaacccaataagtcctcttaagaaacctttctcatccaacgtcattgcgccacctaagttccccagggccgctccacttacatcgaaatcctggatggaggataatgcctttcgtaccgataatggtaacaacttgctgccattccaagacagaagcagaccgtacgacactttcaacctacacagtctcgaaaacagtctcatggacatgattcgcactgatcacgagcccctgaagggtcgaatggggatcaactttcaccacccggggacagacaacatcatggcattgaattccaggagctccctatttcctttcgaggacgcgttcctggacgacagtcacggcgatcaggccctgtctagtggattatcatcaccgacccggtgccagaatggcgagcgcgtggaaagatacagcagaaaagttttcgtgggaggcctgccccccgatatcgacgaggatgaaatcacagcatcctttagaaggtttgggccactggtggtcgattggcctcacaaagctgagtctaagagctactttccaccgaagggctacgctttcctcctgttccaggaagagtctagtgtgcaagccctgatcgacgcttgtctggaggaggacggtaagctttatttgtgcgtatccagtcccactattaaggacaagccagtccaaatccgtccctggaacttgagcgattcagatttcgtgatggatgggtcccaacccctcgaccctcgtaagaccatttttgttggtggagtgccacgtcccctgcgggctgtagagctggctatgatcatggacaggctatatggtggggtctgctacgcagggattgatacagacccggagttgaaataccctaagggcgccgggcgagtggctttctctaaccaacagagttacatagctgctatcagtgcgcgcttcgtccagctacaacataatgacatcgacaagcgggtagaggttaaaccgtatgttctcgatgatcagatgtgtgacgaatgccaaggtaccaggtgcggtggtaagttcgccccatttttttgcgccaatgtgacatgcttgcagtactactgtgagtattgctgggcctccatacatagtcgcgcaggccgcgagtttcataagccgctggtgaaagaaggaggcgatcgacccagacacgttccattccgctggtcctag

SEQ ID NO: 70778 - DNA, 2055 bp, Artificial Sequence
  derived and/or modified sequence
atgcaggatgaccttctcatggataaatctaagacccagccccagccacagcagcagcagagacaacagcagcagccgcagcccgaatccagtgtgagcgaggccccaagtactcctctgtcgtctgagacgccaaagcccgaggaaaactccgccgtgcccgctctcagccccgctgctgccccaccagcccctaatggccctgataaaatgcagatggaatcccctcttcttcctggtctgagttttcaccaacctccacagcagccaccaccgccacaggaacctgccgctccaggcgctagcctcagtccaagttttggctccacctggtccaccggcacaactaacgctgtggaggatagcttcttccaagggataaccccagtcaacggtacaatgctgtttcagaattttcctcatcacgttaaccccgtcttcgggggtacgtttagtcctcagataggtctagctcagacccagcaccatcagcaaccacccccacccgcacccgctcctcaacccgctcagccggcacaaccgcctcaggctcagccccctcagcagcgtagaagcccagcctctccatcccaagcaccatacgcccagaggtctgccgcagcagcttatggccaccagccgatcatgacctctaagccgtcaagcagtagcgcagtggccgcagccgcagcggctgccgctgcttcaagcgcctcctcttcttggaatactcatcagtctgttaatgccgcttggagcgccccatcaaatccttggggagggttacaggctggcagagatccccgacgggctgtgggcgtcggcgtgggggttggtgtgggcgtcccctctccactcaatcccattagcccgttgaaaaagcccttctccagcaatgtgatcgcgccaccaaagtttccgagggcagcgccactcacttcaaagtcttggatggaggataacgcctttcgaaccgataacggtaacaacctgctgcctttccaggataggtccaggccctacgacacgtttaacctacattctttagaaaattctctcatggacatgataagaacagatcatgagcctttgaaaggccgaatggggatcaattttcatcatcctggcacagataatataatggccctgaattcccgctccagcctctttccatttgaggatgcttttcttgacgacagccatggcgaccaggcactgagcagtgggctgtccagccccacacggtgtcaaaacggggagcgagttgagcgctactctaggaaggttttcgtggggggactgccccctgatatcgacgaggacgaaattaccgccagcttccggagattcggacccctggtagtggactggccccataaggcagagtctaagagctatttccctcccaaaggctatgcttttctgctcttccaggaggaaagctccgtgcaggctttgatagacgcatgtctggaggaggacggcaagctctatctttgcgtgtcctcccctactattaaggacaagcccgtgcagattcgcccttggaatctctccgactccgactttgtcatggatggctcacagcctctagacccgagaaaaaccatctttgtgggcggagtaccacggcctctccgcgctgtggaactcgccatgatcatggaccgtctctatgggggtgtctgctatgccggaatcgacacggatcctgaacttaagtacccaaagggagcaggacgagtggcattctctaatcagcaatcctatatcgccgcaataagcgcacgctttgtgcagttgcagcacaacgacatagacaaaagagttgaggtcaagccatacgtcctagacgaccaaatgtgcgacgagtgccaggggaccaggtgtggcggaaagtttgcaccttttttctgcgccaacgtgacttgcctgcagtactattgcgaatactgctgggccagtattcattcacgcgctggcagagaatttcataaacccctggtcaaagagggcggtgaccgacccaggcatgtaccctttcgttggagttag

SEQ ID NO: 70779 - DNA, 2055 bp, Artificial Sequence
  derived and/or modified sequence
atgcaagatgatctgctaatggacaagagcaaaactcagccgcagccacagcagcagcaacgccagcagcagcaaccccagcctgagagttctgtcagcgaagccccatcaacccccctgagttccgaaactccaaaacctgaggaaaattccgccgtccccgcattgagtccagcagccgctcccccagctcctaacgggcctgataagatgcagatggagtcccccttgctccccggtctcagcttccatcagcctccacagcagccacccccaccccaggagcccgcagccccaggcgcttcactatccccatcattcggcagcacatggtccaccggtactaccaatgctgtggaagactccttcttccaaggcatcacaccagtgaatgggacgatgttatttcagaactttccacatcatgttaaccccgtattcggaggcactttttctcctcagattggtctcgctcaaactcagcaccaccagcagcctccccctccggcacccgcacctcagcccgcacagcccgctcagccgcctcaagcccagcctcctcaacagagacgttcccccgcaagcccctcgcaggctccctacgcacagcgatcggcagctgccgcttacggacaccagccaattatgacgtctaagccgtcctcctcatcggcggtcgccgctgctgccgcagcagcagcggctagttctgcctcttcctcttggaacacccaccagtccgttaacgcggcatggtccgccccatcaaacccctggggaggccttcaagccggacgggatccgaggagagcagtcggcgttggagttggggtgggggtgggtgtgccctccccacttaaccccatctcgcccttaaagaaaccatttagtagcaatgttattgccccaccaaagtttcccagagccgctcctctcacaagcaaatcttggatggaggacaacgcctttcgtaccgataatggcaacaatttgttgccttttcaggacaggtctcgcccatacgatacatttaacctgcattcactggagaactccctaatggatatgattaggaccgaccatgagcccctaaagggaaggatggggatcaattttcaccaccccggaacagacaatattatggcactcaattccagatcctcgctttttcccttcgaagacgcttttctggacgacagtcacggcgatcaagcactgtctagcggtctttcctcgcccacgcgctgtcagaatggggaaagggtggaacgctactctagaaaagtgtttgtgggtggcttacctcctgatatcgatgaggacgaaatcaccgcttcctttcgacgcttcggcccactcgtggtcgattggcctcacaaagccgagtcaaaaagctacttccctccaaaagggtacgcatttctgctcttccaagaggaatcctccgtccaggctctgatcgatgcatgcctggaggaggatgggaaactgtacctctgtgtgagcagccctacaattaaggataagccagtccagataagaccttggaacctgagcgattcagacttcgtgatggatggctcccagccacttgacccccgtaaaaccattttcgtcgggggagtgccccgtcctctgcgggctgtggagctggctatgattatggataggttatatgggggagtgtgctatgcaggcatcgacaccgaccctgagctcaaataccccaagggagccggtagggtggctttctccaaccagcaaagttacatcgccgcaatttccgcccgtttcgtgcagcttcagcacaatgatatcgataaacgggtggaggtgaaaccctatgtccttgacgatcagatgtgtgatgagtgtcagggaactaggtgtgggggtaagtttgcccctttcttctgtgctaatgtgacttgtctccaatattactgcgaatactgctgggcctcaatccatagccgagccggacgtgaatttcataaaccattggtgaaggaggggggagacagaccgagacacgtgccgtttagatggtcctag

SEQ ID NO: 70780 - DNA, 5876 bp, Artificial Sequence
  derived and/or modified sequence
gtctccactagaggctgcacagcccgcccggaccaacgcctccgcgcctgccgccgtctggccggcgccctcccgtttccttcctccagggggaaaaaatgtctttcgggccgctttccaggaagcagcaggatgcgccgctccactgtcggtagcaacaagcataatcaacctgaaagaagaaaataaatactgtatacttttaaattttatcgattcttaaaaactggacactcaaagctgcgcaaaccatgcaggatgatttactgatggacaaaagcaaaacccagccccagccccagcagcagcagcggcagcagcagcagccccaacctgagtccagcgtatccgaagccccgtccacgcccctctcctcagagacccccaagccggaggaaaacagcgcagtgccggccctcagcccagccgctgcccccccggcccccaacggcccggacaagatgcagatggaatcaccgctcctgccaggcttgagtttccatcagcctcctcagcagccgccgccgcctcaggagcccgcggcaccgggcgcgtcgctgtcgccgtccttcggcagcacctggtccacgggcaccaccaacgcggtagaggacagcttcttccaggggatcaccccagtcaacgggaccatgctcttccagaacttcccgcaccatgtcaacccagtcttcggaggcactttctccccgcagatcggcctggcgcagacccagcaccaccagcagccgccgccgcctgcgcccgcgccgcagccggcacagccagcgcagccaccacaggcgcagcccccgcagcagcgccgctcacccgccagccccagccaggcgccctacgcgcagaggagcgccgccgcggcgtacggccaccagcccatcatgaccagcaagccgtcctcgtcttcggcggttgcagccgctgctgccgcagccgccgcctcgtcggcctcgtccagctggaacacgcaccaaagcgtgaatgcagcctggagcgcaccgtccaacccctggggcggcctgcaggcgggccgggaccctcgccgggcggtcggtgtgggcgtgggtgtgggtgtcggggtgccttccccgctcaaccccatctcgccgctcaaaaagcccttctccagcaacgtgatcgcgccgcccaagttccctcgcgcggcccctctcacttccaagtcctggatggaggataacgctttccggaccgataatggtaacaatctgttgccatttcaggaccggagtaggccctatgatacttttaacttgcactcgttggagaactccttaatggatatgataaggactgatcatgaacctctgaaaggacgcatggggataaatttccatcatccaggaacagataatattatggcacttaacagtcgatcttctctctttccctttgaagatgccttcctggatgatagccatggtgatcaagccttgtcatctggcttaagttctcccactcgctgtcaaaatggggaacgagtagaacgctactctagaaaggtgtttgttggaggacttcctcctgatattgatgaagatgagatcactgccagctttcgcaggtttggacctctcgtagtagactggcctcacaaagctgaaagcaagtcttattttcctcctaaaggctatgcctttctgctgttccaagaggaaagctcagtacaagctttgatagatgcctgcctagaagaagatgggaaactctacctgtgtgtgtcaagccccaccatcaaggacaagccagtgcaaattcgaccatggaacctaagtgacagtgactttgtaatggatggttctcagcctttggaccccagaaaaactatctttgttgggggagttccacgaccccttcgagctgttgaactggcaatgatcatggaccgtttgtatggtggtgtctgctatgctggcattgatacggacccagagctgaagtaccccaaaggtgctggccgcgtggcattctccaatcagcagagttacattgcagccatcagcgctcgttttgtgcagcttcagcacaatgacattgacaaacgggttgaagtaaagccatatgtgctggatgatcagatgtgtgatgagtgccagggcacacgctgtggtgggaagtttgccccgttcttctgtgccaacgtcacctgtctgcagtattactgtgaatactgctgggcgagcatacattcccgagccgggcgggagttccacaaaccgctggtgaaggagggaggcgaccgccctcgtcacgtcccgttccgctggagctgagccacgggccgacccagccacaagtactggagtagataacaaggagggaaaagagagggcactgcctcagggcttacagtgttctggaaatctgtgcattcgttctcgatttttaaagaagaattgggtctttttattattattattattatttacagtcatattactgaactcagtgtccagtataatgcagaattgcagagtgtagaatggtactgatttgcactttgattcacacctttgtctgcttggtaccttaattttttatacctgatttgtcactcgtgacagtatgtagactgccattctcatcagcggccgtcaggctactgtctgtgattcttttgtttgttgttgtggtgttgttctgattgttttgaactggagcatgcacttattttcagaaacttagagagttgcccctaggacaagacttaccaaaggtaatactcgtgagtaggtggcagatgtagcaaaaacttcacaacaattcagcaatcattagctcgggtcacttagagtaaggataacccttcatgaaaataagcctttagttgctctctattttgacttgtaaggatacctcataagctggatcttttatttttccttcatgtttgatttttgttttgccgaggattttggttagatcttttagtattatgtaaatttatgctgcaatagcttttgctgctattaaaatggtattattaataccataatactctattcaggctaggatatcaattaaacacaaaaacccaacaacacacttttgtgattttagggatagagtcagctgccgaacggagatcagaatagacttcagaaagcttcggtggaaggtcactatttctgactgcatgtttacttaatcaggttgctgcatgcaataaattttatatccaatgtctagtataaaacgttcccacaatgcacaaattaagaatctatataagctataaaaatactcattttttaaaaaaagtttttttcattcaaagaattggtaattgaccggaggaaggcatgcctcaataaatggaatgctctgaatgggaagagcccataacagaatgacctatattacaaccgatataaaacctaggtgtaggatattcttcaagcaaatttgtggatggtagatgaagtactttgcggtgctctgttatatattgtgaaatttattttatatagtaaagtgattatgtctaactgtgatcaaacttaactgtttaaagcctctgtcagacattaatgaacttgacagttcataactgatatattataaactaacacatgagctcttagttacaatctcttagtgcttgcaccattttacatagcttcagaccttgtccagaaaaccaaagagctcatcttagcttacaaacactaagaatatatacaggatatagagataagttgtcagattgacaaactaggcacatttttaagaaagttgtgtaatggtgatgctaaagaaatgtctgtacaaaataagatggcctgggcagagttggttgtctgagtgagaaactaactacttaattccctggatttatcctgttaagcttgagtagaatgaaggcctgctagcactagcgtggtctagaatgaaggcctgctagcactagcgtggacatttttctagcattcacccttgggctgcagatagtaatatataaacacacacaatgattgcaagactatgtaaatctttttttaatcttcttcctatgttttggaattctggggacaatctgactggatatgacactgcagaatagatttaagtcgctgtgttttctgtgctgtgatgtccttgtactgtcttaagttagtgttgcttgtttttgttttgttctcccatgtttagttgcaattactggctctcaagctatagtttgttttcaaaaaggaaaaacaaaatagttttttactggattaaaaatgcttattttagaatcctcccctttttgaggctttttggtaataattgcttttttccagcccaggtgtggttttgtttgtttttttctatgtttgtgggttttttttcatctgtacaagaaattttgttatgcactactactttttgtattctagacagttttcaaaagttggcagatttttttttttgtttttaaggaaaaaggcatgctttctgactgacatgatcttttgcaatacctcaattttgaaatataggaaagaaaatgatattttctaagtaagtttattcagaaaaatatatattaatttaattctgcaagaaaatgatttaacagatgggtaactttatttttttcatgcttatttgtgttttttgaaaatgaagaagttagagctttataactataatattaaagatcatatctaacctacagaaatctacctaattatgtgaaagaagcaaaactttttgaagaagcacccctctttcatgtattaaaataacactgagatttttttaaaagctggaagattgtacagcataaagctaaagtgaaggcaaaaaacattgtcctgaagaataggttacaaaaaataaactccatttggtgctgaaagttgtgaatagatggtggaaactactttcccttaatttgtatatttctaatcaagtgttgattgtgcgcgactgaccaggattgtgaaagagttcttctgtttgtatttttttaaagagaacttttttagtttattaaattataacatgttcccttttgttttgtaaataaatgtgcccccaagttgttaatgttatattaaaagagagggtccttcaaaaaaattattttttaaaacacagaggtgttctgacctgcaacttgactgggaagcccctgggtaacacaggtcctgctgtggcctttccttggtgtgacacttgaactagtcgattttttgaaggctataacctaacctcgactatttgttgttatgtgcaatactgtttgtactgtttgtataaaaaatagaaaaaaaaaagaaaagaaaaaaggcataaatctttattgcagatttattttcattgcaaactttagacattgtgattcactgaaatcatttttctactgtcaaatatgtaccttttcttcatgctggtattttttcaatagtaatgtagcctttgtactgagacaaattttcattgttatttttagaaagattttttgctaagaaaaaaattaaacatatttacatatttttcattttatttcgtattttctttaaggagtgctttctcaatcattaatagagttgtttctgggagggactttcatatctggtcaatgtcataatattattttgtatttttattggaataaattaattttatgatgctaattctttaaaagtttatttttttcattttcagttatttttgaagctaaaacctttgtaatattgttactaaagtgtctagttttttgaaatgcaaagctttatgtattaacttgctgatgtggtttacaatagtgtgacaacgatgaaaatgcttggttatgtaaagtgattggaaatgtaatggataattgggtaataaaatgacagaatgagcag

SEQ ID NO: 70781 - DNA, 5745 bp, Artificial Sequence
  derived and/or modified sequence
acagttgtcaaagtgcttttgccagagcggtcacataatcaacctgaaagaagaaaataaatactgtatacttttaaattttatcgattcttaaaaactggacactcaaagctgcgcaaaccatgcaggatgatttactgatggacaaaagcaaaacccagccccagccccagcagcagcagcggcagcagcagcagccccaacctgagtccagcgtatccgaagccccgtccacgcccctctcctcagagacccccaagccggaggaaaacagcgcagtgccggccctcagcccagccgctgcccccccggcccccaacggcccggacaagatgcagatggaatcaccgctcctgccaggcttgagtttccatcagcctcctcagcagccgccgccgcctcaggagcccgcggcaccgggcgcgtcgctgtcgccgtccttcggcagcacctggtccacgggcaccaccaacgcggtagaggacagcttcttccaggggatcaccccagtcaacgggaccatgctcttccagaacttcccgcaccatgtcaacccagtcttcggaggcactttctccccgcagatcggcctggcgcagacccagcaccaccagcagccgccgccgcctgcgcccgcgccgcagccggcacagccagcgcagccaccacaggcgcagcccccgcagcagcgccgctcacccgccagccccagccaggcgccctacgcgcagaggagcgccgccgcggcgtacggccaccagcccatcatgaccagcaagccgtcctcgtcttcggcggttgcagccgctgctgccgcagccgccgcctcgtcggcctcgtccagctggaacacgcaccaaagcgtgaatgcagcctggagcgcaccgtccaacccctggggcggcctgcaggcgggccgggaccctcgccgggcggtcggtgtgggcgtgggtgtgggtgtcggggtgccttccccgctcaaccccatctcgccgctcaaaaagcccttctccagcaacgtgatcgcgccgcccaagttccctcgcgcggcccctctcacttccaagtcctggatggaggataacgctttccggaccgataatggtaacaatctgttgccatttcaggaccggagtaggccctatgatacttttaacttgcactcgttggagaactccttaatggatatgataaggactgatcatgaacctctgaaaggacgcatggggataaatttccatcatccaggaacagataatattatggcacttaacagtcgatcttctctctttccctttgaagatgccttcctggatgatagccatggtgatcaagccttgtcatctggcttaagttctcccactcgctgtcaaaatggggaacgagtagaacgctactctagaaaggtgtttgttggaggacttcctcctgatattgatgaagatgagatcactgccagctttcgcaggtttggacctctcgtagtagactggcctcacaaagctgaaagcaagtcttattttcctcctaaaggctatgcctttctgctgttccaagaggaaagctcagtacaagctttgatagatgcctgcctagaagaagatgggaaactctacctgtgtgtgtcaagccccaccatcaaggacaagccagtgcaaattcgaccatggaacctaagtgacagtgactttgtaatggatggttctcagcctttggaccccagaaaaactatctttgttgggggagttccacgaccccttcgagctgttgaactggcaatgatcatggaccgtttgtatggtggtgtctgctatgctggcattgatacggacccagagctgaagtaccccaaaggtgctggccgcgtggcattctccaatcagcagagttacattgcagccatcagcgctcgttttgtgcagcttcagcacaatgacattgacaaacgggttgaagtaaagccatatgtgctggatgatcagatgtgtgatgagtgccagggcacacgctgtggtgggaagtttgccccgttcttctgtgccaacgtcacctgtctgcagtattactgtgaatactgctgggcgagcatacattcccgagccgggcgggagttccacaaaccgctggtgaaggagggaggcgaccgccctcgtcacgtcccgttccgctggagctgagccacgggccgacccagccacaagtactggagtagataacaaggagggaaaagagagggcactgcctcagggcttacagtgttctggaaatctgtgcattcgttctcgatttttaaagaagaattgggtctttttattattattattattatttacagtcatattactgaactcagtgtccagtataatgcagaattgcagagtgtagaatggtactgatttgcactttgattcacacctttgtctgcttggtaccttaattttttatacctgatttgtcactcgtgacagtatgtagactgccattctcatcagcggccgtcaggctactgtctgtgattcttttgtttgttgttgtggtgttgttctgattgttttgaactggagcatgcacttattttcagaaacttagagagttgcccctaggacaagacttaccaaaggtaatactcgtgagtaggtggcagatgtagcaaaaacttcacaacaattcagcaatcattagctcgggtcacttagagtaaggataacccttcatgaaaataagcctttagttgctctctattttgacttgtaaggatacctcataagctggatcttttatttttccttcatgtttgatttttgttttgccgaggattttggttagatcttttagtattatgtaaatttatgctgcaatagcttttgctgctattaaaatggtattattaataccataatactctattcaggctaggatatcaattaaacacaaaaacccaacaacacacttttgtgattttagggatagagtcagctgccgaacggagatcagaatagacttcagaaagcttcggtggaaggtcactatttctgactgcatgtttacttaatcaggttgctgcatgcaataaattttatatccaatgtctagtataaaacgttcccacaatgcacaaattaagaatctatataagctataaaaatactcattttttaaaaaaagtttttttcattcaaagaattggtaattgaccggaggaaggcatgcctcaataaatggaatgctctgaatgggaagagcccataacagaatgacctatattacaaccgatataaaacctaggtgtaggatattcttcaagcaaatttgtggatggtagatgaagtactttgcggtgctctgttatatattgtgaaatttattttatatagtaaagtgattatgtctaactgtgatcaaacttaactgtttaaagcctctgtcagacattaatgaacttgacagttcataactgatatattataaactaacacatgagctcttagttacaatctcttagtgcttgcaccattttacatagcttcagaccttgtccagaaaaccaaagagctcatcttagcttacaaacactaagaatatatacaggatatagagataagttgtcagattgacaaactaggcacatttttaagaaagttgtgtaatggtgatgctaaagaaatgtctgtacaaaataagatggcctgggcagagttggttgtctgagtgagaaactaactacttaattccctggatttatcctgttaagcttgagtagaatgaaggcctgctagcactagcgtggtctagaatgaaggcctgctagcactagcgtggacatttttctagcattcacccttgggctgcagatagtaatatataaacacacacaatgattgcaagactatgtaaatctttttttaatcttcttcctatgttttggaattctggggacaatctgactggatatgacactgcagaatagatttaagtcgctgtgttttctgtgctgtgatgtccttgtactgtcttaagttagtgttgcttgtttttgttttgttctcccatgtttagttgcaattactggctctcaagctatagtttgttttcaaaaaggaaaaacaaaatagttttttactggattaaaaatgcttattttagaatcctcccctttttgaggctttttggtaataattgcttttttccagcccaggtgtggttttgtttgtttttttctatgtttgtgggttttttttcatctgtacaagaaattttgttatgcactactactttttgtattctagacagttttcaaaagttggcagatttttttttttgtttttaaggaaaaaggcatgctttctgactgacatgatcttttgcaatacctcaattttgaaatataggaaagaaaatgatattttctaagtaagtttattcagaaaaatatatattaatttaattctgcaagaaaatgatttaacagatgggtaactttatttttttcatgcttatttgtgttttttgaaaatgaagaagttagagctttataactataatattaaagatcatatctaacctacagaaatctacctaattatgtgaaagaagcaaaactttttgaagaagcacccctctttcatgtattaaaataacactgagatttttttaaaagctggaagattgtacagcataaagctaaagtgaaggcaaaaaacattgtcctgaagaataggttacaaaaaataaactccatttggtgctgaaagttgtgaatagatggtggaaactactttcccttaatttgtatatttctaatcaagtgttgattgtgcgcgactgaccaggattgtgaaagagttcttctgtttgtatttttttaaagagaacttttttagtttattaaattataacatgttcccttttgttttgtaaataaatgtgcccccaagttgttaatgttatattaaaagagagggtccttcaaaaaaattattttttaaaacacagaggtgttctgacctgcaacttgactgggaagcccctgggtaacacaggtcctgctgtggcctttccttggtgtgacacttgaactagtcgattttttgaaggctataacctaacctcgactatttgttgttatgtgcaatactgtttgtactgtttgtataaaaaatagaaaaaaaaaagaaaagaaaaaaggcataaatctttattgcagatttattttcattgcaaactttagacattgtgattcactgaaatcatttttctactgtcaaatatgtaccttttcttcatgctggtattttttcaatagtaatgtagcctttgtactgagacaaattttcattgttatttttagaaagattttttgctaagaaaaaaattaaacatatttacatatttttcattttatttcgtattttctttaaggagtgctttctcaatcattaatagagttgtttctgggagggactttcatatctggtcaatgtcataatattattttgtatttttattggaataaattaattttatgatgctaattctttaaaagtttatttttttcattttcagttatttttgaagctaaaacctttgtaatattgttactaaagtgtctagttttttgaaatgcaaagctttatgtattaacttgctgatgtggtttacaatagtgtgacaacgatgaaaatgcttggttatgtaaagtgattggaaatgtaatggataattgggtaataaaatgacagaatgagc

SEQ ID NO: 70782 - DNA, 2055 bp, Artificial Sequence
  derived and/or modified sequence
atgcaggacgacctgctgatggacaagagcaagacccagccccagccccagcagcagcagagacagcagcagcagccccagcccgagagcagcgtgagcgaggcccccagcacccccctgagcagcgagacccccaagcccgaggagaacagcgccgtgcccgccctgagccccgccgccgccccccccgcccccaacggccccgacaagatgcagatggagagccccctgctgcccggcctgagcttccaccagcccccccagcagcccccccccccccaggagcccgccgcccccggcgccagcctgagccccagcttcggcagcacctggagcaccggcaccaccaacgccgtggaggacagcttcttccagggcatcacccccgtgaacggcaccatgctgttccagaacttcccccaccacgtgaaccccgtgttcggcggcaccttcagcccccagatcggcctggcccagacccagcaccaccagcagccccccccccccgcccccgccccccagcccgcccagcccgcccagcccccccaggcccagcccccccagcagagaagaagccccgccagccccagccaggccccctacgcccagagaagcgccgccgccgcctacggccaccagcccatcatgaccagcaagcccagcagcagcagcgccgtggccgccgccgccgccgccgccgccgccagcagcgccagcagcagctggaacacccaccagagcgtgaacgccgcctggagcgcccccagcaacccctggggcggcctgcaggccggcagagaccccagaagagccgtgggcgtgggcgtgggcgtgggcgtgggcgtgcccagccccctgaaccccatcagccccctgaagaagcccttcagcagcaacgtgatcgccccccccaagttccccagagccgcccccctgaccagcaagagctggatggaggacaacgccttcagaaccgacaacggcaacaacctgctgcccttccaggacagaagcagaccctacgacaccttcaacctgcacagcctggagaacagcctgatggacatgatcagaaccgaccacgagcccctgaagggcagaatgggcatcaacttccaccaccccggcaccgacaacatcatggccctgaacagcagaagcagcctgttccccttcgaggacgccttcctggacgacagccacggcgaccaggccctgagcagcggcctgagcagccccaccagatgccagaacggcgagagagtggagagatacagcagaaaggtgttcgtgggcggcctgccccccgacatcgacgaggacgagatcaccgccagcttcagaagattcggccccctggtggtggactggccccacaaggccgagagcaagagctacttcccccccaagggctacgccttcctgctgttccaggaggagagcagcgtgcaggccctgatcgacgcctgcctggaggaggacggcaagctgtacctgtgcgtgagcagccccaccatcaaggacaagcccgtgcagatcagaccctggaacctgagcgacagcgacttcgtgatggacggcagccagcccctggaccccagaaagaccatcttcgtgggcggcgtgcccagacccctgagagccgtggagctggccatgatcatggacagactgtacggcggcgtgtgctacgccggcatcgacaccgaccccgagctgaagtaccccaagggcgccggcagagtggccttcagcaaccagcagagctacatcgccgccatcagcgccagattcgtgcagctgcagcacaacgacatcgacaagagagtggaggtgaagccctacgtgctggacgaccagatgtgcgacgagtgccagggcaccagatgcggcggcaagttcgcccccttcttctgcgccaacgtgacctgcctgcagtactactgcgagtactgctgggccagcatccacagcagagccggcagagagttccacaagcccctggtgaaggagggcggcgacagacccagacacgtgcccttcagatggagctag

SEQ ID NO: 70783 - protein, 46 aa, Artificial Sequence
  derived and/or modified sequence
MIISTPQRLTSSGSVLIGSPYTPAPAMVTQTHIAEATGWVPGDRKR

SEQ ID NO: 70784 - protein, 89 aa, Artificial Sequence
  derived and/or modified sequence
MIISTPQRLTSSGSVLIGSPYTPAPAMVTQTHIAEATGWVPGDRKRARKFIDSDFSESKRSKKGDKNGKGLRHFSMKVCEKVQRKGTTS

SEQ ID NO: 70785 - protein, 27 aa, Artificial Sequence
  derived and/or modified sequence
MIISTPQRLTSSGSVLIGSPYTPAPAM

SEQ ID NO: 70786 - DNA, 1161 bp, Artificial Sequence
  derived and/or modified sequence
atgatcatcagcaccccccagagactgaccagcagcggcagcgtgctgatcggcagcccctacacccccgcccccgccatggtgacccagacccacatcgccgaggccaccggctgggtgcccggcgacagaaagagagccagaaagttcatcgacagcgacttcagcgagagcaagagaagcaagaagggcgacaagaacggcaagggcctgagacacttcagcatgaaggtgtgcgagaaggtgcagagaaagggcaccaccagctacaacgaggtggccgacgagctggtgagcgagttcaccaacagcaacaaccacctggccgccgacagccaggcctacgaccagaagaacatcagaagaagagtgtacgacgccctgaacgtgctgatggccatgaacatcatcagcaaggagaagaaggagatcaagtggatcggcctgcccaccaacagcgcccaggagtgccagaacctggagatcgagaagcagagaagaatcgagagaatcaagcagaagagagcccagctgcaggagctgctgctgcagcagatcgccttcaagaacctggtgcagagaaacagacagaacgagcagcagaaccagggcccccccgccctgaacagcaccatccagctgcccttcatcatcatcaacaccagcagaaagaccgtgatcgactgcagcatcagcagcgacaagttcgagtacctgttcaacttcgacaacaccttcgagatccacgacgacatcgaggtgctgaagagaatgggcatgagcttcggcctggagagcggcaagtgcagcctggaggacctgaagctggccaagagcctggtgcccaaggccctggagggctacatcaccgacatcagcaccggccccagctggctgaaccagggcctgctgctgaacagcacccagagcgtgagcaacctggacctgaccaccggcgccaccctgccccagagcagcgtgaaccagggcctgtgcctggacgccgaggtggccctggccaccggccagttcctggcccccaacagccaccagagcagcagcgccgccagccactgcagcgagagcagaggcgagaccccctgcagcttcaacgacgaggacgaggaggacgacgaggaggacagcagcagccccgagtag

SEQ ID NO: 70787 - DNA, 1113 bp, Artificial Sequence
  derived and/or modified sequence
atgatcatcagcaccccccagagactgaccagcagcggcagcgtgctgatcggcagcccctacacccccgcccccgccatggtgacccagacccacatcgccgaggccaccggctgggtgcccggcaagagaagcaagaagggcgacaagaacggcaagggcctgagacacttcagcatgaaggtgtgcgagaaggtgcagagaaagggcaccaccagctacaacgaggtggccgacgagctggtgagcgagttcaccaacagcaacaaccacctggccgccgacagccaggcctacgaccagaagaacatcagaagaagagtgtacgacgccctgaacgtgctgatggccatgaacatcatcagcaaggagaagaaggagatcaagtggatcggcctgcccaccaacagcgcccaggagtgccagaacctggagatcgagaagcagagaagaatcgagagaatcaagcagaagagagcccagctgcaggagctgctgctgcagcagatcgccttcaagaacctggtgcagagaaacagacagaacgagcagcagaaccagggcccccccgccctgaacagcaccatccagctgcccttcatcatcatcaacaccagcagaaagaccgtgatcgactgcagcatcagcagcgacaagttcgagtacctgttcaacttcgacaacaccttcgagatccacgacgacatcgaggtgctgaagagaatgggcatgagcttcggcctggagagcggcaagtgcagcctggaggacctgaagctggccaagagcctggtgcccaaggccctggagggctacatcaccgacatcagcaccggccccagctggctgaaccagggcctgctgctgaacagcacccagagcgtgagcaacctggacctgaccaccggcgccaccctgccccagagcagcgtgaaccagggcctgtgcctggacgccgaggtggccctggccaccggccagttcctggcccccaacagccaccagagcagcagcgccgccagccactgcagcgagagcagaggcgagaccccctgcagcttcaacgacgaggacgaggaggacgacgaggaggacagcagcagccccgagtag

SEQ ID NO: 70788 - DNA, 1161 bp, Artificial Sequence
  derived and/or modified sequence
atgatcattagcaccccccaacgcttaacgagttctggctccgtgctcattgggtccccctatacccccgctcctgcaatggtgactcagacacatattgccgaggccacaggatgggtgcctggcgatagaaagagagccaggaagttcattgactcagatttcagcgaatctaagaggtcaaaaaaaggcgacaagaacgggaaagggctgagacactttagcatgaaggtgtgtgagaaggtgcagcgcaaaggcacaaccagttacaacgaggtcgcagacgaattggtgtcagagtttaccaactccaacaaccacctcgcagcagacagccaagcttacgaccagaagaatatccgccgccgcgtctacgacgccctcaatgtgctgatggctatgaacatcatttctaaagagaaaaaggaaatcaagtggattggtcttccaactaattcagcccaggagtgtcagaacctggaaatcgaaaagcagcggagaattgagcgaataaagcagaaaagagctcaattgcaggagttgttactgcagcagatcgccttcaagaatctggtccagagaaaccgccagaatgagcaacagaatcaagggccgcccgctctcaatagcactatccagctgccctttatcattatcaacacatcgaggaagaccgttatagactgttccatctcctcggacaagtttgagtatttattcaacttcgacaatacctttgagatccacgatgatattgaagtgttgaaaagaatgggtatgagctttgggctcgagtccgggaagtgctcgctggaagatcttaaactcgccaaaagtctggtgcctaaggccctggaggggtatatcaccgacatttctaccgggcccagttggctgaatcaagggctactcctgaacagcacccagagcgtgtcaaatctggatctaaccactggcgcgacacttccacagtcctccgttaatcaaggactttgtctggatgcagaggtggccctggccacaggccagttccttgctcctaactctcatcagagcagttccgccgcatcccattgcagcgaaagtagaggggagaccccttgctctttcaatgacgaggatgaagaggatgatgaggaagattccagcagtccagagtag

SEQ ID NO: 70789 - DNA, 1113 bp, Artificial Sequence
  derived and/or modified sequence
atgatcatcagcacacctcagcgcctcacctcttctggatccgtgctgataggctcaccatacacccccgctccggctatggtcacccagactcacattgctgaagccacagggtgggtgccaggcaagaggtccaaaaaaggagacaaaaatggcaaaggcctgcggcacttctccatgaaggtctgtgaaaaggtgcagaggaagggtacgacctcctataacgaggtcgccgacgaactggtgtctgaattcacgaacagtaacaatcacctcgcagcagattcacaggcatatgatcagaagaatattagaagacgagtttacgatgcccttaatgtgttgatggctatgaacataatttctaaggagaaaaaagaaatcaaatggatcggcctgcccacgaacagtgcacaggaatgtcagaatctggaaattgagaagcagaggaggattgaaaggattaagcagaaacgcgcccaactccaggaacttcttctgcaacaaattgccttcaaaaacctcgtccagcgaaatcggcagaacgaacagcagaatcagggacctcccgctctgaacagtaccatccagcttccatttatcataataaacaccagccgtaaaaccgtgattgattgttccataagctcagacaaattcgagtatctatttaatttcgataacacattcgagatccacgacgatatcgaagtactgaagaggatgggtatgtctttcggactcgaatcagggaaatgttcacttgaggatctgaagctggctaagtctctggtgccgaaggccctggaaggttacattactgatatttctactggcccttcatggttaaaccagggtctactgttaaattcaactcaatccgttagcaacctggatcttacaaccggcgctaccctgccccagtcttccgtgaatcagggcctttgccttgacgccgaggtggctctggccacgggtcagtttctcgctccgaacagccaccagtctagcagcgcggctagccactgcagcgagagtcggggagaaaccccctgtagcttcaacgatgaggacgaggaggacgacgaagaagactcttcttctccggaatag

SEQ ID NO: 70790 - DNA, 1161 bp, Artificial Sequence
  derived and/or modified sequence
atgattattagcaccccccagaggctcacctcctctggctctgtgcttattggatctccctatacaccagcgccagccatggtcactcagacccacattgccgaggctacgggctgggtccctggggatagaaaacgcgctagaaaattcatagatagcgatttctccgagtcaaagcgatctaaaaaaggcgataagaacgggaagggcctccggcatttctcgatgaaggtgtgtgagaaggtccagaggaaaggaaccacctcctacaacgaggtggccgacgaactcgtgtcagagtttacgaacagcaacaatcacctggcagccgattcacaggcctatgatcagaaaaacatccgccggagagtatacgacgcactgaatgttttgatggcaatgaatatcataagcaaagagaagaaggaaatcaaatggatcggcttgcctacaaactctgcccaggagtgtcagaacctcgagattgaaaaacaacggcggattgagcgaatcaagcagaagcgcgcacaacttcaggaacttctgctgcaacaaattgcttttaaaaacctcgtccagcgcaatagacaaaatgaacaacagaatcaggggcctcccgccctgaatagcaccatccagcttcccttcatcataatcaacacatcaagaaagaccgtgatcgactgcagtatcagttccgacaaatttgagtacctctttaatttcgacaatacctttgaaattcacgatgatatcgaggttctgaaaagaatggggatgtccttcggattggagtctggaaaatgttccctcgaggaccttaagttagctaagtcactggtgccgaaagccttagagggatatatcaccgatatctcgacaggtccttcatggcttaaccaagggctcctgctgaattctacacagtctgtaagcaacttggacctaaccactggcgcgaccctcccccaaagttctgtaaatcagggactatgtctggatgccgaggtggcgttagctacaggccagttcctcgcacctaacagtcatcagtcaagctcagcagcctcccactgctctgagtctaggggagagaccccctgctcgtttaatgatgaggatgaggaagatgatgaagaagattcatccagcccagagtag

SEQ ID NO: 70791 - DNA, 1161 bp, Artificial Sequence
  derived and/or modified sequence
atgataatatcaacgccacagcggctgaccagttctgggagtgtgctcattggcagcccctacacccccgccccagcgatggtgactcagacccatatcgctgaggccaccggctgggtgcccggagatagaaagcgagcccgcaaatttatagatagcgacttttctgaaagcaaacgtagtaagaaaggagataagaacgggaagggccttcgacatttctccatgaaggtgtgtgaaaaagtacagcgcaagggcactacatcctacaacgaggttgctgacgagctggtaagcgaatttaccaattccaacaaccacctcgccgctgattcacaggcctacgatcaaaagaacattcgccggcgggtctacgatgccttgaatgtgcttatggccatgaatatcattagtaaagagaagaaggagatcaagtggatcgggcttcccactaattccgctcaggagtgtcagaatcttgaaatcgaaaagcagcgccggatcgaacgcatcaagcaaaagagagcccagctgcaagaattgttactccagcagatagcttttaaaaatctcgtgcagcgtaataggcagaatgagcagcagaaccaaggccctcctgcgcttaacagtacaattcagctgccttttattatcataaacacgtccaggaaaacagtgatcgactgctcaatcagcagtgataaatttgagtaccttttcaatttcgataatactttcgaaatacacgatgatattgaggttctcaagcggatgggtatgtccttcggtttggaatctggtaaatgttctctggaggacttgaagctggcaaagagtctcgttcccaaggcacttgagggctacatcacggacatctccaccggtccttcctggctgaatcaaggccttctattgaactccacccagagcgtttccaatcttgatttgacaaccggagctacactgccacaatcatcggtgaaccagggcctctgcctggacgccgaggtggcccttgctactgggcagtttctagctcccaactcacaccagtcgtcgtccgctgcttctcactgctctgagagccggggagagacgccttgcagttttaacgatgaagatgaagaagacgatgaggaagatagttcatcccctgagtag

SEQ ID NO: 70792 - DNA, 1161 bp, Artificial Sequence
  derived and/or modified sequence
atgatcatcagcaccccccagaggctgaccagcagcggctctgtgctgattggcagcccctacaccccagccccagccatggtgacccagacccacatcgccgaggccaccggctgggtgcctggggacaggaagagggccaggaagttcatcgacagcgacttcagcgagagcaagaggagcaagaagggggacaagaatggcaagggcctgcggcacttctccatgaaggtgtgtgagaaggtgcagaggaagggcaccaccagctacaatgaggtggctgatgagctggtgtctgagttcaccaacagcaacaaccacctggccgctgacagccaggcctatgaccagaagaacatcagaagaagagtgtatgatgccctgaatgtgctgatggccatgaacatcatcagcaaggagaagaaggagatcaagtggattggcctgcccaccaacagcgcccaggagtgccagaacctggagattgagaagcagaggcgcatcgagcgcatcaagcagaagagggcccagctgcaggagctgctgctgcagcagatcgccttcaagaacctggtgcagaggaaccggcagaatgagcagcagaaccagggccccccagccctgaacagcaccatccagctgcccttcatcatcatcaacaccagcaggaagacagtgattgactgcagcatcagcagtgacaagtttgagtacctgttcaactttgacaacacctttgagatccatgatgacatcgaggtgctgaagaggatgggcatgagctttggcctggagagcggcaagtgcagcctggaggacctgaagctggccaagagcctggtgcccaaggccctggagggctacatcacagacatcagcacaggccccagctggctgaaccagggcctgctgctgaacagcacccagagcgtgagcaacctggacctgaccaccggggccaccctgccccagagctctgtgaaccagggcctgtgcctggatgctgaggtggccctggccaccggccagttcctggcccccaacagccaccagagcagcagcgctgccagccactgcagcgagagcagaggagagaccccctgcagcttcaatgatgaagatgaggaggatgatgaggaggacagcagcagccctgagtag

SEQ ID NO: 70793 - DNA, 1113 bp, Artificial Sequence
  derived and/or modified sequence
atgatcatcagcaccccccagaggctgaccagcagcggctctgtgctgattggcagcccctacaccccagccccagccatggtgacccagacccacatcgccgaggccaccggctgggtgcctgggaagaggagcaagaagggggacaagaatggcaagggcctgcggcacttctccatgaaggtgtgtgagaaggtgcagaggaagggcaccaccagctacaatgaggtggctgatgagctggtgtctgagttcaccaacagcaacaaccacctggccgctgacagccaggcctatgaccagaagaacatcagaagaagagtgtatgatgccctgaatgtgctgatggccatgaacatcatcagcaaggagaagaaggagatcaagtggattggcctgcccaccaacagcgcccaggagtgccagaacctggagattgagaagcagaggcgcatcgagcgcatcaagcagaagagggcccagctgcaggagctgctgctgcagcagatcgccttcaagaacctggtgcagaggaaccggcagaatgagcagcagaaccagggccccccagccctgaacagcaccatccagctgcccttcatcatcatcaacaccagcaggaagacagtgattgactgcagcatcagcagtgacaagtttgagtacctgttcaactttgacaacacctttgagatccatgatgacatcgaggtgctgaagaggatgggcatgagctttggcctggagagcggcaagtgcagcctggaggacctgaagctggccaagagcctggtgcccaaggccctggagggctacatcacagacatcagcacaggccccagctggctgaaccagggcctgctgctgaacagcacccagagcgtgagcaacctggacctgaccaccggggccaccctgccccagagctctgtgaaccagggcctgtgcctggatgctgaggtggccctggccaccggccagttcctggcccccaacagccaccagagcagcagcgctgccagccactgcagcgagagcagaggagagaccccctgcagcttcaatgatgaagatgaggaggatgatgaggaggacagcagcagccctgagtag

SEQ ID NO: 70794 - DNA, 1161 bp, Artificial Sequence
  derived and/or modified sequence
atgatcatcagcaccccccagcggctgaccagcagcggcagcgtgctcataggaagcccctatacaccagccccagctatggtgacacagacccatattgcagaggcaacggggtgggtaccaggcgacagaaaacgcgctcgtaaattcattgattccgacttctctgaaagtaagagatcaaagaagggggacaagaatgggaagggcctcagacacttctccatgaaagtctgcgagaaggtgcaacggaaagggaccactagttacaacgaggttgcggacgagttggtgtctgaattcacaaattctaacaaccatttggcagccgattcccaggcctatgaccagaagaacattcggagaagggtctacgacgccttgaatgtgctcatggctatgaacatcatttctaaggaaaagaaggaaattaaatggattggacttcctactaactccgcacaggaatgtcagaatttggagattgagaagcagaggcgaattgagcggataaagcagaaacgggcccaactccaggagctgctccttcaacagattgcatttaagaacctcgtgcagcgcaacaggcaaaatgagcagcaaaaccagggtccaccagcattgaattccacaatccagctgcccttcattatcatcaatacgtctcgcaagacagttatagactgctccatctcatcagacaagttcgagtacctttttaattttgacaacacgttcgaaatccacgatgacattgaagtactgaagcggatggggatgtcgtttgggctggagtccggaaaatgcagcctggaggacttaaagttggcaaagtctctggtgccgaaagctctagagggttacattactgacatttccacgggtccctcctggctgaatcaggggctcctcctgaactccactcagagcgtctctaatctggatctgaccactggcgctacacttccacaatcttccgtcaaccagggcctgtgcctcgatgcagaggtcgctttggccaccggccaattcttagccccgaatagccaccaaagctcctcagcagccagccactgctctgaaagcaggggcgaaacaccctgctctttcaatgacgaggacgaagaggatgacgaagaggattcgtctagccccgagtag

SEQ ID NO: 70795 - DNA, 1113 bp, Artificial Sequence
  derived and/or modified sequence
atgatcatcagcaccccccagcggctgaccagcagcggcagcgtgctgattggaagtccatatacaccagcgcccgctatggtgacacaaacccacatcgccgaggccacgggctgggtcccaggcaaaaggagcaaaaagggagacaagaacggcaaaggtcttcggcacttctccatgaaagtatgcgaaaaagtccagcgaaaaggtaccacaagctacaacgaggtggctgatgagctcgtaagtgagtttaccaattctaataaccacttggcggccgattcccaagcctacgaccagaagaacattagaagaagggtgtacgacgcattaaatgttctgatggcgatgaatatcataagtaaggagaaaaaagaaatcaagtggatcggcttgcccaccaacagcgcccaggagtgtcagaacctggagatcgaaaaacagcgtcggatcgaacgtatcaagcaaaagcgggcccaattgcaggagctgttactgcagcaaattgcatttaagaacctcgtgcagagaaatcgacagaacgaacagcagaatcaagggcctccggccctgaatagtacaatccagcttccctttattattataaatacctccagaaagaccgtgatagactgctcaatctcctctgataagtttgaatacctgttcaatttcgacaacacattcgagatccacgatgatatcgaagtgctgaagagaatgggtatgtcattcgggcttgaatctggcaaatgctcactcgaggacctgaaactggccaagtctcttgtgcctaaggctctggaggggtatatcacagacatatcaaccggaccaagctggttaaaccaaggattgcttttaaattctacacaaagcgtctccaatcttgacctgactacgggagctaccctgcctcagtcgagtgtcaaccaggggctctgtctagacgccgaggtggccctggctacaggccagttcctcgcacccaattcgcaccaatcctcatcagccgcaagccactgttccgaatcacgcggcgaaacaccttgttcattcaatgacgaagacgaagaagacgatgaagaggattcttcatcacctgaatag

SEQ ID NO: 70796 - DNA, 1161 bp, Artificial Sequence
  derived and/or modified sequence
atgatcatcagcaccccccagcggctgaccagcagcggcagcgtgctgattggctcaccttacacacctgccccggctatggtcacgcagacccatatagcagaagcaacaggatgggtccccggtgatcgcaagcgagcccggaaattcatcgatagcgatttttctgagtccaagcgatctaagaaaggcgataagaacgggaaaggtctcagacactttagtatgaaggtgtgcgagaaggtgcagaggaagggcacaactagctacaatgaagtggccgacgaactagtttccgaattcacaaatagtaacaaccacttggcagcagatagtcaagcatacgatcagaagaacattaggcggagggtgtatgatgccctgaacgtgcttatggcgatgaatatcatctcaaaggagaaaaaagaaattaaatggatcggattgcccaccaacagcgcccaggaatgtcagaacctcgagatcgaaaagcagcgccgcattgaaaggatcaagcaaaagagagcccaacttcaagaactgttactgcagcagatcgccttcaagaacttggtacagcggaatcggcagaacgagcaacagaatcagggccctcctgcattgaactcaacaattcagcttcctttcatcattattaacacctctcggaagaccgttatcgactgttcaatcagctcggataaatttgagtatcttttcaacttcgacaataccttcgagatccatgatgacatcgaggtgctgaaacgcatgggtatgagtttcggcctcgaatcaggcaagtgctcgctcgaggatctcaaattggccaaatcacttgtacctaaggctctcgaaggttatattaccgatatctctaccggacctagttggttgaatcaggggttactcctaaactcgacccaaagcgtgtctaaccttgacctgactacgggggccacactcccccaaagctccgtaaaccagggcctgtgcttggatgccgaagtcgccctagccaccggccagtttctggcccccaatagccatcagtcgagttctgccgccagtcattgctcggaatcacgcggggagacaccatgcagctttaacgacgaagatgaggaggatgacgaagaagattcttctagtccagaatag

SEQ ID NO: 70797 - DNA, 1161 bp, Artificial Sequence
  derived and/or modified sequence
atgatcatcagcaccccccagcggctgaccagcagcggcagcgtgcttattgggtcaccttatacccctgcacctgctatggtaacccaaactcacattgccgaggcgaccggctgggtgcccggtgatcgcaagagagcccgaaagttcatcgactccgatttctctgagagcaagaggtctaagaagggtgataaaaacggtaagggcttacgacattttagcatgaaagtttgtgagaaagtgcagcggaagggaaccacatcatataatgaagttgctgatgaactggtctccgaatttacaaactccaacaatcatttagccgcagatagccaggcgtatgatcagaagaatatccgcagaagagtgtacgacgcactgaacgtgttgatggctatgaatatcatatcaaaagagaaaaaagaaatcaaatggatcggactgccgactaattcagcccaggaatgccagaatcttgaaattgaaaaacagcggaggattgagcggatcaaacagaagagagcacagctgcaggaactgctgctccagcagatcgcctttaagaacctagtgcaaagaaaccggcagaatgagcaacaaaaccagggccctccagctctgaattctaccatccagctgccctttataattattaatacttctcgaaagacagtgatagattgcagtatcagtagtgataagttcgagtatctgttcaacttcgataatacatttgagattcacgatgacattgaggtacttaagcgaatgggcatgagcttcggcctggagtcagggaagtgtagccttgaggaccttaagcttgccaagagtttagtcccaaaggccttggagggctacattacggacattagcaccggaccctcgtggcttaaccagggactgctcctcaattccacgcagagtgtgtccaatttggacctgactacaggcgcaacactgccccagtcatctgtcaaccagggcctttgtctcgatgctgaagtggctctggctactgggcagttcctggctcccaacagtcaccagtcatcctccgctgcctcccactgctccgaatcaaggggagagaccccctgctctttcaacgatgaagacgaggaggatgacgaagaggattcttccagccctgaatag

SEQ ID NO: 70798 - DNA, 1161 bp, Artificial Sequence
  derived and/or modified sequence
atgataatttctaccccacaacggctgacaagcagcggctcagtgttgatcggatccccttacactccagcgccagccatggtgacgcagacgcacatagcagaggccactggctgggtaccaggtgatcgcaagagagccagaaagttcattgacagcgatttcagtgaaagtaagcggtcaaaaaaaggcgacaagaatggtaagggtctgcggcatttcagtatgaaagtgtgcgaaaaagtgcagcggaaaggcacaacatcctataatgaggtcgctgacgaattagtgtcggagttcacgaacagcaacaatcatctggcggctgactcccaggcctatgaccagaagaatatcaggaggcgcgtctacgacgctcttaacgtgcttatggcaatgaatattatcagcaaggagaaaaaagaaattaagtggattggcctgcctacgaactccgctcaggagtgtcagaacctggaaatcgagaagcaaaggaggatagagaggatcaagcagaagcgcgctcagctgcaggaactgctgctgcagcagatcgccttcaagaatctggtgcagcggaaccgacagaacgaacagcaaaatcaagggccaccggcacttaacagtaccatacagctccccttcataatcattaacaccagccggaaaacagtgatcgactgcagcatcagtagcgacaaatttgaatatctgttcaacttcgataacacatttgagattcatgacgacattgaagtgctgaaacgcatgggaatgtcctttgggctcgagtccgggaaatgttcactggaggatcttaaactggccaagagccttgtgccaaaggcactcgaaggctacatcacagacatcagtactggcccaagctggctcaaccagggtcttttacttaatagtacacagtccgtgtccaacctggaccttaccacaggtgccacccttccccagtcttccgtcaatcaggggctgtgtctggatgcagaggtggcgcttgcgacgggccagttcctcgcccctaactcgcatcaatcttcttccgctgcgtctcattgctcagaaagccgaggagaaaccccatgcagctttaacgacgaggacgaggaggatgatgaggaggattcctcctcccccgaatag

SEQ ID NO: 70799 - DNA, 1113 bp, Artificial Sequence
  derived and/or modified sequence
atgatcatttcaaccccccagcgccttacttccagtggctccgttcttatcggttcaccttacactccagcccctgccatggttacacagacccatatcgctgaggcaaccgggtgggtgccagggaaacggtcaaagaaaggggacaagaacggtaaaggcctccgccattttagcatgaaggtctgtgagaaggtccaaagaaaggggacaacctcctacaatgaagtggctgatgagctggtcagtgagttcactaactctaacaaccacctggctgccgactcccaagcatacgatcagaagaacattaggcggagggtctacgatgctttgaacgtgctcatggccatgaacatcatctctaaggagaaaaaagagatcaagtggatcggcctgcccaccaactcagctcaagaatgtcagaacttggagattgaaaagcagcgcagaatcgagaggatcaaacagaaaagagctcagctgcaggagctactgctgcagcagatcgcatttaagaacctggtccagaggaaccgccaaaatgaacagcagaaccaaggcccaccagctctaaattccaccatccagttgccctttattattatcaatacgtccagaaagaccgtgattgactgctcgatcagctcggacaagttcgaatacttatttaacttcgacaacacctttgaaatacatgacgatattgaagtccttaagagaatggggatgagcttcggcttagaatcaggcaagtgttccctcgaggacctaaagcttgccaagtcccttgtgccgaaagccctggaggggtacattaccgacatatccaccggacccagctggctgaatcagggtcttctgctaaattccacacagtcagtgtctaacctcgatctgacaaccggcgctactctgcctcagtcttcagtcaaccaggggctgtgtttagacgccgaggtggccctggccaccggtcaatttcttgcccctaactcacatcagtccagcagtgcggctagccactgttctgagagtcggggagagaccccttgcagcttcaatgatgaagatgaggaagacgacgaagaggatagctctagcccggagtag

SEQ ID NO: 70800 - DNA, 1161 bp, Artificial Sequence
  derived and/or modified sequence
atgattatatcaaccccccagaggctgacctcatccggatctgtgctgatcggatccccctacacccctgcccctgcaatggtcacacagacacatattgcagaagcaacagggtgggtgccgggagaccgaaaaagggcccgtaagtttattgacagcgacttctctgagagcaaaaggagtaagaaaggtgacaagaatggtaaaggcctgagacacttcagcatgaaggtgtgcgagaaggtgcaaaggaaaggcaccacctcatacaacgaagtggctgacgagcttgtgtcagaattcaccaattctaacaatcacctggccgctgacagccaggcctatgaccagaaaaatattcgcaggagagtctatgatgcccttaatgtcctgatggccatgaacataatctctaaggagaagaaagagatcaaatggatcggcttacctacgaatagcgcccaggaatgtcagaacctggagattgaaaaacagcggagaatagagaggatcaagcagaagcgcgctcaacttcaagagctactcctccaacagattgcatttaagaacttggttcaaagaaataggcagaacgagcagcagaaccaaggcccaccagcccttaactctaccattcagctgccatttatcatcataaatacctccagaaagacagtgattgactgtagcattagcagcgataaattcgagtacctattcaattttgataatacatttgagatccacgacgacatagaggtcctgaagcgtatggggatgtcctttgggttggaatctggcaaatgttccctggaagatctgaagctagccaagtccctggtgcccaaagccctggagggctacatcaccgacatcagcacgggcccatcttggctgaatcagggtctgctcctgaactctacccagtcggtgtccaacctcgacctcaccaccggtgccaccttgccccaatcatctgtgaaccagggcctgtgcctcgatgccgaggtagccttagcaacgggccagttcctggcacccaactcacaccagagctcttctgcggcatcccactgcagtgaaagcagaggcgaaactccctgctcttttaacgacgaagatgaggaggacgatgaggaagactcgtctagcccagagtag

SEQ ID NO: 70801 - DNA, 1161 bp, Artificial Sequence
  derived and/or modified sequence
atgataatctctactcctcagagactcaccagcagcggtagcgtactcattgggagcccttatacacccgcacccgctatggtgacccaaacccacattgctgaggccaccggctgggttcccggtgacagaaaacgagctcgcaagttcatcgattcagacttttctgagagtaaacgatccaaaaagggtgataagaacggtaagggcctccgacacttctcaatgaaggtgtgcgaaaaagtgcaaaggaaggggaccacatcgtacaatgaggtggctgacgaactggtttcggagtttaccaacagtaacaaccatctggccgctgattcccaagcttatgaccagaaaaatatccgtcgtcgggtctatgacgccttgaatgtgctgatggccatgaacatcatctccaaagaaaagaaggagatcaagtggattggccttccgaccaactccgcacaggagtgccagaaccttgagatcgaaaaacagcgtcggatcgagcggatcaaacagaaacgcgcacaactgcaggaactgctgctacaacagattgcatttaagaatttggtgcagagaaatcgccagaacgagcagcagaatcaggggcctccggctttgaactccacaattcagctgcccttcattatcattaatactagccggaaaaccgtcattgactgttctatttcatccgacaagtttgagtacctgttcaacttcgacaacacctttgaaattcacgatgacatcgaggtccttaaacgcatgggcatgtcctttggcctggagtcaggcaaatgcagtctggaggacctcaagctggcgaagtctctggttccaaaggcgctcgagggctacataactgacattagcactggaccaagctggctgaaccagggcctgttacttaactctacccaatcggtgtctaacctggacctgaccaccggagcaaccctgcctcagagttccgtgaaccagggcctctgtcttgacgcagaggtcgctttggccactggccagttcctcgcaccaaactctcatcagtcctctagtgctgcttcccactgctccgagtctcgcggagaaaccccctgctcatttaatgacgaggacgaggaagatgacgaggaagacagcagttccccagagtag

SEQ ID NO: 70802 - protein, 385 aa, Artificial Sequence
  derived and/or modified sequence
MIISTPQRLTSSGSVLIGSPYTPAPAMVTQTHIAEATGWVPGDRKRARKFIDSDFSESKRSKKGDKNGKGLRHFSMKVCEKVQRKGTTSYNEVADELVSEFTNSNNHLAADSAYDQKNIRRRVYDALNVLMAMNIISKEKKEIKWIGLPTNSAQECQNLEIEKQRRIERIKQKRAQLQELLLQQIAFKNLVQRNRQNEQQNQGPPALNSTIQLPFIIINTSRKTVIDCSISSDKFEYLFNFDNTFEIHDDIEVLKRMGMSFGLESGKCSLEDLKLAKSLVPKALEGYITDISTGPSWLNQGLLLNSTQSVSNLDLTTGATLPQSSVNQGLCLDAEVALATGQFLAPNSHQSSSAASHCSESRGETPCSFNDEDEEDDEEDSSSPE

SEQ ID NO: 70803 - protein, 446 aa, Artificial Sequence
  derived and/or modified sequence
MTAKNVGLTSTNAEVRGFIDQNLSPTKGNISFVAFPVSNTNSPTKILPKTLGPINVNVGPQMIISTPQRLTSSGSVLIGSPYTPAPAMVTQTHIAEATGWVPGDRKRARKFIDSDFSESKRSKKGDKNGKGLRHFSMKVCEKVQRKGTTSYNEVADELVSEFTNSNNHLAADSAYDQKNIRRRVYDALNVLMAMNIISKEKKEIKWIGLPTNSAQECQNLEIEKQRRIERIKQKRAQLQELLLQQIAFKNLVQRNRQNEQQNQGPPALNSTIQLPFIIINTSRKTVIDCSISSDKFEYLFNFDNTFEIHDDIEVLKRMGMSFGLESGKCSLEDLKLAKSLVPKALEGYITDISTGPSWLNQGLLLNSTQSVSNLDLTTGATLPQSSVNQGLCLDAEVALATGQFLAPNSHQSSSAASHCSESRGETPCSFNDEDEEDDEEDSSSPE

SEQ ID NO: 70804 - protein, 220 aa, Artificial Sequence
  derived and/or modified sequence
MIISTPQRLTSSGSVLIGSPYTPAPAMVTQTHIAEATGWVPGDRKRARKFIDSDFSESKRSKKGDKNGKGLRHFSMKVCEKVQRKGTTSYNEVADELVSEFTNSNNHLAADSAYDQKNIRRRVYDALNVLMAMNIISKEKKEIKWIGLPTNSAQECQNLEIEKQRRIERIKQKRAQLQELLLQQIAFKNLVQRNRQNEQQNQGPPALNSTIQLPFIIINT

SEQ ID NO: 70805 - protein, 310 aa, Artificial Sequence
  derived and/or modified sequence
MKVCEKVQRKGTTSYNEVADELVSEFTNSNNHLAADSAYDQKNIRRRVYDALNVLMAMNIISKEKKEIKWIGLPTNSAQECQNLEIEKQRRIERIKQKRAQLQELLLQQIAFKNLVQRNRQNEQQNQGPPALNSTIQLPFIIINTSRKTVIDCSISSDKFEYLFNFDNTFEIHDDIEVLKRMGMSFGLESGKCSLEDLKLAKSLVPKALEGYITDISTGPSWLNQGLLLNSTQSVSNLDLTTGATLPQSSVNQGLCLDAEVALATGQFLAPNSHQSSSAASHCSESRGETPCSFNDEDEEDDEEDSSSPE

SEQ ID NO: 70806 - DNA, 1158 bp, Artificial Sequence
  derived and/or modified sequence
atgatcatcagcaccccccagagactgaccagcagcggcagcgtgctgatcggcagcccctacacccccgcccccgccatggtgacccagacccacatcgccgaggccaccggctgggtgcccggcgacagaaagagagccagaaagttcatcgacagcgacttcagcgagagcaagagaagcaagaagggcgacaagaacggcaagggcctgagacacttcagcatgaaggtgtgcgagaaggtgcagagaaagggcaccaccagctacaacgaggtggccgacgagctggtgagcgagttcaccaacagcaacaaccacctggccgccgacagcgcctacgaccagaagaacatcagaagaagagtgtacgacgccctgaacgtgctgatggccatgaacatcatcagcaaggagaagaaggagatcaagtggatcggcctgcccaccaacagcgcccaggagtgccagaacctggagatcgagaagcagagaagaatcgagagaatcaagcagaagagagcccagctgcaggagctgctgctgcagcagatcgccttcaagaacctggtgcagagaaacagacagaacgagcagcagaaccagggcccccccgccctgaacagcaccatccagctgcccttcatcatcatcaacaccagcagaaagaccgtgatcgactgcagcatcagcagcgacaagttcgagtacctgttcaacttcgacaacaccttcgagatccacgacgacatcgaggtgctgaagagaatgggcatgagcttcggcctggagagcggcaagtgcagcctggaggacctgaagctggccaagagcctggtgcccaaggccctggagggctacatcaccgacatcagcaccggccccagctggctgaaccagggcctgctgctgaacagcacccagagcgtgagcaacctggacctgaccaccggcgccaccctgccccagagcagcgtgaaccagggcctgtgcctggacgccgaggtggccctggccaccggccagttcctggcccccaacagccaccagagcagcagcgccgccagccactgcagcgagagcagaggcgagaccccctgcagcttcaacgacgaggacgaggaggacgacgaggaggacagcagcagccccgagtag

SEQ ID NO: 70807 - DNA, 1341 bp, Artificial Sequence
  derived and/or modified sequence
atgaccgccaagaacgtgggcctgaccagcaccaacgccgaggtgagaggcttcatcgaccagaacctgagccccaccaagggcaacatcagcttcgtggccttccccgtgagcaacaccaacagccccaccaagatcctgcccaagaccctgggccccatcaacgtgaacgtgggcccccagatgatcatcagcaccccccagagactgaccagcagcggcagcgtgctgatcggcagcccctacacccccgcccccgccatggtgacccagacccacatcgccgaggccaccggctgggtgcccggcgacagaaagagagccagaaagttcatcgacagcgacttcagcgagagcaagagaagcaagaagggcgacaagaacggcaagggcctgagacacttcagcatgaaggtgtgcgagaaggtgcagagaaagggcaccaccagctacaacgaggtggccgacgagctggtgagcgagttcaccaacagcaacaaccacctggccgccgacagcgcctacgaccagaagaacatcagaagaagagtgtacgacgccctgaacgtgctgatggccatgaacatcatcagcaaggagaagaaggagatcaagtggatcggcctgcccaccaacagcgcccaggagtgccagaacctggagatcgagaagcagagaagaatcgagagaatcaagcagaagagagcccagctgcaggagctgctgctgcagcagatcgccttcaagaacctggtgcagagaaacagacagaacgagcagcagaaccagggcccccccgccctgaacagcaccatccagctgcccttcatcatcatcaacaccagcagaaagaccgtgatcgactgcagcatcagcagcgacaagttcgagtacctgttcaacttcgacaacaccttcgagatccacgacgacatcgaggtgctgaagagaatgggcatgagcttcggcctggagagcggcaagtgcagcctggaggacctgaagctggccaagagcctggtgcccaaggccctggagggctacatcaccgacatcagcaccggccccagctggctgaaccagggcctgctgctgaacagcacccagagcgtgagcaacctggacctgaccaccggcgccaccctgccccagagcagcgtgaaccagggcctgtgcctggacgccgaggtggccctggccaccggccagttcctggcccccaacagccaccagagcagcagcgccgccagccactgcagcgagagcagaggcgagaccccctgcagcttcaacgacgaggacgaggaggacgacgaggaggacagcagcagccccgagtag

SEQ ID NO: 70808 - DNA, 663 bp, Artificial Sequence
  derived and/or modified sequence
atgatcatcagcaccccccagagactgaccagcagcggcagcgtgctgatcggcagcccctacacccccgcccccgccatggtgacccagacccacatcgccgaggccaccggctgggtgcccggcgacagaaagagagccagaaagttcatcgacagcgacttcagcgagagcaagagaagcaagaagggcgacaagaacggcaagggcctgagacacttcagcatgaaggtgtgcgagaaggtgcagagaaagggcaccaccagctacaacgaggtggccgacgagctggtgagcgagttcaccaacagcaacaaccacctggccgccgacagcgcctacgaccagaagaacatcagaagaagagtgtacgacgccctgaacgtgctgatggccatgaacatcatcagcaaggagaagaaggagatcaagtggatcggcctgcccaccaacagcgcccaggagtgccagaacctggagatcgagaagcagagaagaatcgagagaatcaagcagaagagagcccagctgcaggagctgctgctgcagcagatcgccttcaagaacctggtgcagagaaacagacagaacgagcagcagaaccagggcccccccgccctgaacagcaccatccagctgcccttcatcatcatcaacacctag

SEQ ID NO: 70809 - DNA, 1158 bp, Artificial Sequence
  derived and/or modified sequence
atgatcatcagtacaccccagcgcctgaccagctccggatctgtgctgataggatcaccctatactccagctcctgcaatggtaacccaaacacacattgctgaagcgaccgggtgggtaccaggcgatagaaagcgcgcccgcaaattcatagactctgacttttccgaatcaaagaggtccaagaaaggggataagaacggcaaaggacttcgacacttcagcatgaaggtgtgtgaaaaagtgcaaagaaagggtaccaccagttacaatgaagtagcagatgagctggtaagtgagtttactaatagcaacaaccacttggccgccgacagtgcctacgatcaaaaaaatatcaggcgacgggtatatgatgccctgaatgtcttgatggccatgaatatcatttcgaaagagaaaaaggagatcaagtggatcggcctgcccaccaatagcgctcaagagtgtcaaaacctcgaaatagaaaaacagcgtcggattgaacggattaaacagaagagggcccaacttcaagagctactacttcagcagattgcatttaagaacttagttcaaagaaacagacagaacgaacagcagaaccagggaccaccagccctcaattccacaatccaactcccttttataattatcaatacctccaggaagacagtgatcgactgttccatctcaagcgataaattcgagtacctcttcaacttcgacaatactttcgagatacatgatgatatagaagttctgaagcgaatgggcatgtccttcgggcttgagagcggtaagtgctcactggaagacttgaaacttgcaaaatcattagtgcctaaggctctcgaggggtatatcactgatatttctaccggcccgagctggctgaaccagggcctgttgcttaactccacacagagcgtatctaatctggatcttaccactggtgccaccttaccccagtcatctgttaaccaggggctgtgcctcgatgcagaagtggcactcgccacaggccaatttctcgctcctaactcccatcaaagctcatctgctgcatcacactgtagcgagtctcggggcgaaaccccatgctcttttaacgacgaggatgaggaagacgacgaggaagacagttcgtcccccgagtag

SEQ ID NO: 70810 - DNA, 1341 bp, Artificial Sequence
  derived and/or modified sequence
atgaccgccaagaatgtcggcctgacttctacaaatgcggaggtgagaggcttcattgatcaaaatctgagtccaaccaaaggtaatattagttttgtggcctttcctgtgtccaacacaaacagtcccactaaaatactcccaaaaaccctgggccccatcaacgtgaatgtgggaccccaaatgataatctccaccccacaacggttaactagctctgggtccgtcttgataggttccccctacaccccagcacccgcgatggttactcagacgcacattgctgaggcaactgggtgggtcccaggtgacaggaaaagggcccggaagttcattgattccgattttagtgaaagtaaaagaagcaagaaaggcgacaagaacggaaaagggttgcgacatttcagcatgaaggtttgtgaaaaggtacaacgtaaagggactacctcatataatgaggtggcagacgaactggtcagcgagttcaccaatagcaacaaccacctggctgctgactcggcctacgaccaaaagaatatcagacggagggtttacgacgccttgaacgtgctgatggctatgaatatcattagcaaggaaaaaaaggagatcaaatggatcggcttacccaccaatagtgcccaagagtgtcagaacctagaaatcgaaaaacagagaagaatagagcggatcaaacagaaacgggcgcagctgcaggagttgcttttacagcagatagccttcaagaacctcgtccagcgcaacaggcagaacgagcagcagaatcaggggccccccgcactcaactccaccatacagctgccgttcataatcatcaatactagccgcaaaaccgtgatcgactgctctatttcgagcgataagttcgagtatctctttaatttcgataacaccttcgagatccatgatgatattgaagtgcttaaaaggatggggatgtccttcggactggagagcgggaaatgctccctcgaggatttgaaactggccaagagtctagtccccaaagctttagaagggtatataacggacatcagcacagggccctcctggctaaaccagggacttctactgaactctactcagtctgtatccaatttggatctcaccaccggggccaccctgccccagagcagtgtcaaccaggggctctgcctggatgccgaagtagcgctggccactgggcagtttctcgctcctaattcgcaccagagctcaagtgccgcaagccattgtagtgaaagccggggagagactccctgttctttcaatgatgaggacgaagaagacgacgaagaagatagcagtagccctgaatag

SEQ ID NO: 70811 - DNA, 663 bp, Artificial Sequence
  derived and/or modified sequence
atgatcatttctacaccccagcggctgacttcatcagggtcagtgctaatcggatctccgtacactcctgctccagccatggtaactcagactcatattgcagaggccaccggatgggtgccaggagataggaaacgggctcggaagttcatcgactccgacttctcagaaagtaagcgctctaaaaagggggacaagaacggtaaaggcctgaggcacttttccatgaaggtatgtgaaaaggtgcagcgtaagggaacgacttcttataacgaggtggccgacgagttggtttcagagttcaccaattctaataatcacctggcagcagactcagcctacgaccagaagaatattcggaggagagtgtacgacgccttgaacgtcctgatggctatgaacatcattagcaaggaaaagaaagagatcaagtggatcggtttacccaccaattccgctcaggaatgccagaatctcgagatcgaaaaacaacgccggattgagagaataaagcaaaagcgagcgcagctgcaggaactgctgctgcagcagattgcattcaaaaacttggtgcagagaaacaggcagaacgagcagcagaatcagggccctcctgcactcaatagcacaattcagctgccgtttataatcatcaatacctag

SEQ ID NO: 70812 - DNA, 1158 bp, Artificial Sequence
  derived and/or modified sequence
atgatcatcagcaccccccagaggctgaccagcagcggctctgtgctgattggcagcccctacaccccagccccagccatggtgacccagacccacatcgccgaggccaccggctgggtgcctggggacaggaagagggccaggaagttcatcgacagcgacttcagcgagagcaagaggagcaagaagggggacaagaatggcaagggcctgcggcacttctccatgaaggtgtgtgagaaggtgcagaggaagggcaccaccagctacaatgaggtggctgatgagctggtgtctgagttcaccaacagcaacaaccacctggccgctgacagcgcctatgaccagaagaacatcagaagaagagtgtatgatgccctgaatgtgctgatggccatgaacatcatcagcaaggagaagaaggagatcaagtggattggcctgcccaccaacagcgcccaggagtgccagaacctggagattgagaagcagaggagaattgagcgcatcaagcagaagagggcccagctgcaggagctgctgctgcagcagatcgccttcaagaacctggtgcagaggaaccggcagaatgagcagcagaaccagggccccccagccctgaacagcaccatccagctgcccttcatcatcatcaacaccagcaggaagacagtcatcgactgcagcatcagcagtgacaagtttgagtacctgttcaactttgacaacacctttgagatccatgatgacatcgaggtgctgaagaggatgggcatgagctttggcctggagagcggcaagtgcagcctggaggacctgaagctggccaagagcctggtgcccaaggccctggagggctacatcacagacatcagcacaggccccagctggctgaaccagggcctgctgctgaacagcacccagagcgtgagcaacctggacctgaccactggagccaccctgccccagagctctgtgaaccagggcctgtgcctggatgctgaggtggccctggccaccggccagttcctggcccccaacagccaccagagcagcagcgctgccagccactgcagcgagagcagaggagagaccccctgcagcttcaatgatgaagatgaagaagatgatgaggaggacagcagcagccctgagtag

SEQ ID NO: 70813 - DNA, 1341 bp, Artificial Sequence
  derived and/or modified sequence
atgacagccaagaatgtgggcctgaccagcaccaatgctgaggtgcggggcttcatcgaccagaacctgagccccaccaagggcaacatcagctttgtggccttccctgtgagcaacaccaacagccccaccaagatcctgcccaagaccctgggccccatcaacgtgaatgtgggcccccagatgatcatcagcaccccccagaggctgaccagcagcggctctgtgctgattggcagcccctacaccccagccccagccatggtgacccagacccacatcgccgaggccaccggctgggtgcctggggacaggaagagggccaggaagttcatcgacagcgacttcagcgagagcaagaggagcaagaagggggacaagaatggcaagggcctgcggcacttctccatgaaggtgtgtgagaaggtgcagaggaagggcaccaccagctacaatgaggtggctgatgagctggtgtctgagttcaccaacagcaacaaccacctggccgctgacagcgcctatgaccagaagaacatcagaagaagagtgtatgatgccctgaatgtgctgatggccatgaacatcatcagcaaggagaagaaggagatcaagtggattggcctgcccaccaacagcgcccaggagtgccagaacctggagattgagaagcagaggcgcatcgagcgcatcaagcagaagagggcccagctgcaggagctgctgctgcagcagatcgccttcaagaacctggtgcagaggaaccggcagaatgagcagcagaaccagggccccccagccctgaacagcaccatccagctgcccttcatcatcatcaacaccagcaggaagacagtgattgactgcagcatcagcagtgacaagtttgagtacctgttcaactttgacaacacctttgagatccatgatgacatcgaggtgctgaagaggatgggcatgagctttggcctggagagcggcaagtgcagcctggaggacctgaagctggccaagagcctggtgcccaaggccctggagggctacatcacagacatcagcacaggccccagctggctgaaccagggcctgctgctgaacagcacccagagcgtgagcaacctggacctgaccaccggggccaccctgccccagagctctgtgaaccagggcctgtgcctggatgctgaggtggccctggccaccggccagttcctggcccccaacagccaccagagcagcagcgctgccagccactgcagcgagagcagaggagagaccccctgcagcttcaatgatgaagatgaggaggatgatgaggaggacagcagcagccctgagtag

SEQ ID NO: 70814 - DNA, 663 bp, Artificial Sequence
  derived and/or modified sequence
atgatcatcagcaccccccagaggctgaccagcagcggctctgtgctgattggcagcccctacaccccagccccagccatggtgacccagacccacatcgccgaggccaccggctgggtgcctggggacaggaagagggccaggaagttcatcgacagcgacttcagcgagagcaagaggagcaagaagggggacaagaatggcaagggcctgcggcacttctccatgaaggtgtgtgagaaggtgcagaggaagggcaccaccagctacaatgaggtggctgatgagctggtgtctgagttcaccaacagcaacaaccacctggccgctgacagcgcctatgaccagaagaacatcagaagaagagtgtatgatgccctgaatgtgctgatggccatgaacatcatcagcaaggagaagaaggagatcaagtggattggcctgcccaccaacagcgcccaggagtgccagaacctggagattgagaagcagaggagaattgagcgcatcaagcagaagagggcccagctgcaggagctgctgctgcagcagatcgccttcaagaacctggtgcagaggaaccggcagaatgagcagcagaaccagggccccccagccctgaacagcaccatccagctgcccttcatcatcatcaacacctag

SEQ ID NO: 70815 - DNA, 1158 bp, Artificial Sequence
  derived and/or modified sequence
atgatcatcagcaccccccagcggctgaccagcagcggcagcgtgctgatagggagcccctatactccagcaccggctatggtaacccagacacacatcgctgaggctaccggctgggtaccgggtgatcggaagcgagctagaaaattcatcgattccgactttagcgaatccaagcgaagcaaaaaaggtgacaaaaatggaaaggggttgcgccacttcagcatgaaggtctgtgaaaaggtccagcgcaagggtacaaccagttataatgaggttgccgatgaactggtcagtgaattcacaaactctaataatcacctggccgcagattccgcctacgatcagaagaatattaggcgaagggtttacgacgcactcaacgtgctcatggccatgaatattattagtaaagagaagaaagaaataaaatggataggactccccacgaactccgcacaggagtgccagaacctggagatcgagaagcagagacggattgaacgcattaagcagaaacgcgcccagcttcaggagcttctgctgcagcagattgcctttaaaaacctggtgcaacggaacaggcagaacgaacagcagaaccagggaccacccgccttgaattctacaatacagctgccattcattattattaataccagtcggaaaaccgttattgattgctctatttcaagtgataaattcgagtatctcttcaatttcgataatacttttgagatccacgacgatatcgaggtgctgaagcgcatgggcatgagtttcggactcgagtccgggaaatgctcattagaagatctgaaactggcaaagtccctggtaccaaaagcccttgagggttacatcactgatatctccacaggaccttcttggttgaatcagggccttctccttaattcgacccagtcagtctccaacctggatctgacaactggcgcaacactgccgcaatcatccgtcaatcagggcctttgcttagatgccgaagtagccctggcaacagggcagttcctcgccccaaattcacatcaaagctccagcgctgcatctcactgctccgagagtcgcggagaaacaccctgctccttcaacgacgaggatgaagaggacgacgaagaggattcctcttcacccgagtag

SEQ ID NO: 70816 - DNA, 1341 bp, Artificial Sequence
  derived and/or modified sequence
atgaccgccaagaacgtgggcctgaccagcaccaacgccgaggtgcggggattcatcgatcagaatctgagccctaccaaagggaacatctctttcgtagctttccctgtttccaacacaaattctccaactaagattctgcccaaaacactgggtcccattaacgtcaatgtgggccctcagatgattattagtaccccacagcgactgacgtcctccggctccgtcctgatcggctcaccctacacaccagctcccgccatggtaacccagacacacatcgcggaggcaacaggatgggtgcctggcgatcgtaagagggcgcgcaagttcatagatagcgatttcagtgagtccaagcgttcaaagaaaggggataaaaatggtaagggtctgcggcacttctcgatgaaggtgtgcgagaaggtccagaggaagggaaccacttcttataatgaagttgctgatgaattggtctctgagttcaccaacagtaacaaccacctcgcagccgacagtgcctatgatcagaagaacattcgcaggagggtgtacgacgccctgaatgtactcatggcaatgaatatcatctctaaagagaaaaaggaaatcaagtggatcggcttacccacaaattcagctcaagagtgtcaaaaccttgaaattgaaaaacagcgccgaatcgagcgcattaaacagaagagggctcagctgcaggagttgctccttcaacagatcgcctttaagaacctggtgcagcgcaaccgccagaatgaacagcagaatcaaggccctcctgcgcttaactcaaccattcagttaccctttattattataaacactagtagaaagacagttatcgactgttccattagctctgataaattcgagtacctgttcaacttcgacaatacgtttgaaatccacgatgatattgaggtcctgaagcgcatggggatgagttttggcttagagagtggaaagtgttcactggaggatctcaaactggcgaagtccctggttccaaaggcgttggaggggtacatcacagacatatccaccgggccaagttggctcaatcagggtctgctcctgaatagcacccagtcagtcagtaacctggatctcacaactggggctactctccctcagtcctcggtgaaccagggactctgcctcgacgccgaagttgccctcgccacaggccaattcctggcccccaattcacaccagtcatcttctgcagcctcgcattgctctgaaagccgcggcgagactccctgtagtttcaatgacgaggacgaggaggacgatgaagaggattcaagctccccagaatag

SEQ ID NO: 70817 - DNA, 663 bp, Artificial Sequence
  derived and/or modified sequence
atgatcatcagcaccccccagcggctgaccagcagcggcagcgtgctcatcggatccccttacacgcctgctcctgccatggtgactcaaactcacatcgccgaggccaccggatgggtccccggagatagaaaacgcgctcgcaagttcatcgacagcgatttctcagagagcaagcgttccaagaagggcgacaaaaacgggaaagggttgaggcactttagcatgaaagtttgcgaaaaggtgcagcgtaaaggcaccacgtcctacaatgaggtggcagatgagctcgtgagtgaatttaccaattctaataaccacctggccgctgattctgcatacgaccagaagaatatcagacggcgagtgtacgacgctttaaatgtattgatggccatgaatataatctcgaaagagaagaaggagattaagtggatagggctccccactaacagtgctcaggaatgtcagaatctggagatcgagaaacagcgacgcatcgagaggattaaacaaaagcgcgcccagctgcaagagcttctgcttcaacagattgcattcaaaaatctggtgcagaggaatcgccagaacgagcagcaaaatcaggggccacctgccctcaatagcacaatccagttgcccttcataatcatcaacacctag

SEQ ID NO: 70818 - DNA, 1158 bp, Artificial Sequence
  derived and/or modified sequence
atgataatcagcaccccacagcggttgacatcgagcggaagcgtactgatcggaagcccgtatacaccagccccagccatggtgacgcagacccacattgcggaagctaccggatgggtccctggggacaggaagagggcaagaaagtttatagactctgacttctctgagagcaaacgcagcaagaaaggcgacaagaacggcaaagggcttcgccacttttctatgaaggtgtgcgaaaaggtgcagaggaaaggcaccacttcgtacaatgaggtagcagacgaattggtgtcagagtttaccaattccaacaatcacctcgccgctgactctgcctatgatcaaaagaacattagaagaagggtgtatgacgcactgaatgtcctgatggcaatgaacataatctccaaggagaagaaggagataaaatggatcggcctgccgacaaacagtgcgcaagagtgccaaaacttagagattgagaagcagaggcgaatcgagcggattaaacagaaacgcgctcaactgcaggaactgctgctgcagcagattgcctttaaaaacttagtgcagcgtaaccgccagaatgagcaacagaaccagggaccaccagccctcaacagcaccatccagctcccctttattatcattaatacatctcgaaagactgtcatagactgttccatttcttccgataaattcgagtatctctttaatttcgataacacattcgagattcacgacgatatcgaagttctgaagagaatgggaatgtcgtttgggctcgaaagcggcaaatgttcccttgaggatctcaaactcgcaaagtccctggttcctaaggctctggaggggtatattacggacatctctacaggcccatcctggctaaatcagggcttgcttttaaatagcacacagagcgtctcaaatctggatcttactacaggagcaacactgcctcagtcttctgtgaaccaggggctgtgtctcgacgccgaagtggctctggccaccggccagttcttagctccgaattctcaccagagcagtagcgcagcatcgcactgctccgagtctcgaggcgagacaccctgtagctttaacgacgaagacgaggaagatgatgaagaggatagtagtagtcctgaatag

SEQ ID NO: 70819 - DNA, 1341 bp, Artificial Sequence
  derived and/or modified sequence
atgaccgccaagaacgtggggcttacaagcactaacgcagaggtcaggggcttcatcgaccagaatctgagtccaactaagggtaacatatcttttgtggcatttccagtgtctaacactaactctccaactaaaatcctgcccaaaacgctgggccctattaacgtgaatgtggggccacagatgatcattagtaccccacaacgacttacgagctcaggtagcgtgttgatagggtcaccctatacgcctgcacccgctatggtcacacaaacccacattgctgaggccaccggctgggtcccaggggataggaagagggccaggaaatttatagattctgatttttccgaaagtaagcgaagcaaaaaaggcgacaaaaacggcaaaggactgcgccacttctctatgaaagtttgtgaaaaggtacagcgaaaggggacaaccagctacaatgaagtggctgacgagctggtgtcagagtttacgaacagcaacaatcacctggcggctgacagcgcctacgaccagaaaaatatcagacggcgagtgtacgacgccctgaacgtcctgatggccatgaacataatatctaaagaaaagaaggagataaagtggatcgggctgcccacaaactcagcacaggagtgccagaacctcgaaattgaaaaacagagacgaattgagaggataaaacaaaagcgcgctcagctgcaggagcttcttttacagcagatcgcctttaagaacctggtgcaacgcaacaggcaaaatgaacagcagaaccagggcccaccggctctgaattctacaattcagttgccttttattatcatcaacacgagccgtaaaacggttatagactgcagcatctcaagcgataaattcgaatacctgtttaatttcgataatacatttgagatccatgatgacatcgaggtgctcaagagaatgggaatgtctttcgggctcgagagtggaaagtgcagcctcgaagacctaaaattagcgaagtccttggtgccaaaggctttggagggctatatcaccgacatctccacaggtccaagttggctgaaccagggccttctcctgaattccacccagagtgtaagcaatcttgacctgactactggggcaaccttgcctcagagctctgtaaaccagggcttatgcttagatgcagaggtggctctcgctaccggtcagttcctggctcctaatagtcatcagtcctcttccgctgcaagccattgcagcgagtcacggggagagaccccatgctcctttaacgatgaagacgaggaggacgacgaagaggatagttcgagccctgagtag

SEQ ID NO: 70820 - DNA, 663 bp, Artificial Sequence
  derived and/or modified sequence
atgatcatcagcacaccccagaggcttacctcctctggatccgtgctaataggctcaccttacacgccagctccagctatggtgactcagacacacatagctgaggccaccggatgggtgcccggagaccgaaaacgagcaaggaagttcatagatagcgactttagcgagtcaaagagatccaaaaagggtgacaaaaacggaaagggactacggcatttcagtatgaaagtgtgtgaaaaagttcagagaaagggcacaacctcttacaatgaggtggcagacgaattggtgtccgaatttaccaactctaataatcacctggcagctgattctgcctacgatcagaagaacattaggagaagggtctatgacgcactgaacgtgctgatggccatgaatatcataagcaaagaaaagaaggagattaagtggataggcctgcctacgaacagtgcccaggaatgccagaacctcgagatcgagaagcagcggagaattgaacggattaaacaaaagagggcacaactacaggaactgctgctgcaacagatagcctttaagaacctggttcaacgcaatcgtcaaaatgaacagcaaaaccagggtcccccagctttgaattccactatccagctgccattcatcattatcaacacatag

SEQ ID NO: 70821 - DNA, 1201 bp, Artificial Sequence
  derived and/or modified sequence
caataaatgtgaatgttggaccccaaatgattataagcacaccacagagactaaccagttcaggaagtgttctgattgggagtccatatacccctgcaccagcaatggttactcagacacacatagcagaagctactggctgggtccctggtgatagaaaacgggctagaaaatttatagactctgatttttcagaaagtaaacgaagcaaaaaaggagataaaaatgggaaaggcttgagacacttttcaatgaaagtgtgtgagaaagttcaacgaaaaggtacaacatcgtacaatgaagtcgctgatgagctggtgtcagagttcaccaattcaaataaccatttggctgctgattcggcttatgatcagaagaacattaggcgaagagtttatgatgctttaaatgtgctaatggcaatgaacataatttcaaaggaaaaaaaagaaatcaagtggattggcctgcctaccaattctgctcaggaatgtcagaatctggagatagagaagcagaggcggatagaacggataaagcagaagcgggcccagctgcaagaacttctcctacagcaaatcgctttcaaaaacctggtacagagaaatcgacaaaatgagcagcaaaaccagggcccgccggctctgaactctaccattcagctgccattcataatcatcaatacaagcagaaaaacagtcatagattgcagcatctccagtgacaagtttgagtatcttttcaattttgacaacacctttgagatccatgatgacatagaagtactaaagcggatgggaatgtcgtttggcctggagtcaggcaaatgctctctggaggatctgaaacttgcgaaatccctggtgccaaaggctttagaaggttatatcacagatatctccacaggaccttcttggttaaatcagggactacttctgaactctacccaatcagtttcaaatttagacctgaccactggtgccaccttaccccagtcaagtgtaaaccaagggttatgcttggatgcagaagtggccttagcaactgggcagttcctggccccaaacagtcaccagtccagcagtgcggcctctcactgctccgagtcccgaggcgagaccccctgttcgttcaatgatgaagatgaggaagatgatgaggaggattcctcctccccagaataaagacaagagaaagccta

SEQ ID NO: 70822 - DNA, 3138 bp, Artificial Sequence
  derived and/or modified sequence
aaagctcgcgcgggggaagcggggctgtagctgggcagggagagggcggacgaaatcggtagcgatctcggctgcggcgctgccgcagctgcccggcccgcggggcgcgccctgacccttcatctttgggcaggctcgagggcgcgcgcacggttggcgttctggggcctcaaactcctgggccttgaccgggcaggccgcgtctccccgggtgtgagtccaccgggacccggccgccgcctaagcgcgggcgccacagaagcggcggcgcccgaagacgcgctcctggctcggcccgacagcctcgcttggccgccagttcttctgcagccgaaggcggttgttcttttaaagaattattgaagacgaaggtttttttctttttatttttttaatggctttacagaatcttaaatagaatacagtttgacatgacggcaaaaaatgttggtttgacttccacaaatgcagaagtaagaggatttatagatcagaatctcagtccaacaaaaggcaacatttcatttgttgcatttccagtttccaataccaactcacctacaaagattttaccaaaaaccttaggaccaataaatgtgaatgttggaccccaaatgattataagcacaccacagagactaaccagttcaggaagtgttctgattgggagtccatatacccctgcaccagcaatggttactcagacacacatagcagaagctactggctgggtccctggtgatagaaaacgggctagaaaatttatagactctgatttttcagaaagtaaacgaagcaaaaaaggagataaaaatgggaaaggcttgagacacttttcaatgaaagtgtgtgagaaagttcaacgaaaaggtacaacatcgtacaatgaagtcgctgatgagctggtgtcagagttcaccaattcaaataaccatttggctgctgattcggcttatgatcagaagaacattaggcgaagagtttatgatgctttaaatgtgctaatggcaatgaacataatttcaaaggaaaaaaaagaaatcaagtggattggcctgcctaccaattctgctcaggaatgtcagaatctggagatagagaagcagaggcggatagaacggataaagcagaagcgggcccagctgcaagaacttctcctacagcaaatcgctttcaaaaacctggtacagagaaatcgacaaaatgagcagcaaaaccagggcccgccggctctgaactctaccattcagctgccattcataatcatcaatacaagcagaaaaacagtcatagattgcagcatctccagtgacaagtttgagtatcttttcaattttgacaacacctttgagatccatgatgacatagaagtactaaagcggatgggaatgtcgtttggcctggagtcaggcaaatgctctctggaggatctgaaacttgcgaaatccctggtgccaaaggctttagaaggttatatcacagatatctccacaggaccttcttggttaaatcagggactacttctgaactctacccaatcagtttcaaatttagacctgaccactggtgccaccttaccccagtcaagtgtaaaccaagggttatgcttggatgcagaagtggccttagcaactgggcagttcctggccccaaacagtcaccagtccagcagtgcggcctctcactgctccgagtcccgaggcgagaccccctgttcgttcaatgatgaagatgaggaagatgatgaggaggattcctcctccccagaataaagacaagagaaagcctacgtttcaatatgtgatgctcatgtgtgtttgtagtgtgagctcttgtttttgaaatgattgcttcagtctttgcctttgtttgcactgtgtgttcagtgaaaactagagaaacacaataagcaaatcacatgaaggctgagatgattgagatgaaagttaacatagtgtgaatgaaagtctggccaacagagcagtagatgatataacaaagaaagcatgctttctgaggagatagtggggataatccctgaagagttggcagtgtgagtgcaactcatttatcttctgtgaggtgggatttttgtgttcctcacacccatgtaattattcttagaattgagattgctacacggagcagtccttgacgatcgtgtttctgacgtttctcttccttgcctggactgcctttgacaaggcagaaatgaacatgaaaagtccccaggagaggggagctgtgtagtgagggatactgagggcagtcctgtggctgaggggcacagattgaactgctgaactagttggaggtctagatgaggtgctttacgcatcagctgccttagacagcttctagaaaggagcgagcgctacttcttaagtacttaagtgacatttagataatttatagtaaaactgaaattattattagccaatgcattggtgcatagaatttactagggctacttctggaagccaaaatagaatagcatttccatgtgcattaaatactttgccagcactgcctttgccagcatcctaaatctggagttttacaaagaaggaaactgtatctttaggttaatcaaagctatgcatttcatatagctttttcatttaaaacaagacaaagaaacaaattcctatgaccaaattgcttgcctacagttccctgcagtaattgtatgatctcacccagtgtgcaatttgtgaaaatgaaccaaatgtcattacttttgtcttaaagaaaagtctatttcaagaatatgaacagcagtgtttccttgtacatgtcaccttttttcacattttcattaatcagaatgaccttattgagcctactcctggggtcaattgcatttcaaactaatccaatatttagtgtttcacagaaacactagaaaacgttgaacactcctactgcctggatatatggtagtgcagttatgttgtttatggctcaagatgtcattagaaatactgcagtggtgtattcacagctgctccttctctgaatgaaagagtgtagggacacctgccaccatggccagaccctgactgaatttcacattaaggctttggaaaggagcaaataataatgggagaattaactccaaaactttgacctgaatca

SEQ ID NO: 70823 - DNA, 878 bp, Artificial Sequence
  derived and/or modified sequence
gaaactcgtggtgcttttgctctgctttcaagatgcattaagtctcctgctttgtgactgctttggagccagcagatactctgatatgtataattcaaattatgcaggtttcacgagcaacatttcatttgttgcatttccagtttccaataccaactcacctacaaagattttaccaaaaaccttaggaccaataaatgtgaatgttggaccccaaatgattataagcacaccacagagactaaccagttcaggaagtgttctgattgggagtccatatacccctgcaccagcaatggttactcagacacacatagcagaagctactggctgggtccctggtgatagaaaacgggctagaaaatttatagactctgatttttcagaaagtaaacgaagcaaaaaaggagataaaaatgggaaaggcttgagacacttttcaatgaaagtgtgtgagaaagttcaacgaaaaggtacaacatcgtacaatgaagtcgctgatgagctggtgtcagagttcaccaattcaaataaccatttggctgctgattcggcttatgatcagaagaacattaggcgaagagtttatgatgctttaaatgtgctaatggcaatgaacataatttcaaaggaaaaaaaagaaatcaagtggattggcctgcctaccaattctgctcaggaatgtcagaatctggagatagagaagcagaggcggatagaacggataaagcagaagcgggcccagctgcaagaacttctcctacagcaaatcgctttcaaaaacctggtacagagaaatcgacaaaatgagcagcaaaaccagggcccgccggctctgaactctaccattcagctgccattcataatcatcaatacaa

SEQ ID NO: 70824 - protein, 418 aa, Artificial Sequence
  derived and/or modified sequence
MQPEGIIFEAENKPSPGTESAGTFILDLSATSRTIISTPQRLTSSGSVLIGSPYTPAPAMVTQTHIAEATGWVPGDRKRARKFIDSDFSESKRSKKGDKNGKGLRHFSMKVCEKVQRKGTTSYNEVADELVSEFTNSNNHLAADSAYDQKNIRRRVYDALNVLMAMNIISKEKKEIKWIGLPTNSAQECQNLEIEKQRRIERIKQKRAQLQELLLQQIAFKNLVQRNRQNEQQNQGPPALNSTIQLPFIIINTSRKTVIDCSISSDKFEYLFNFDNTFEIHDDIEVLKRMGMSFGLESGKCSLEDLKLAKSLVPKALEGYITDISTGPSWLNQGLLLNSTQSVSNLDLTTGATLPQSSVNQGLCLDAEVALATGQFLAPNSHQSSSAASHCSESRGETPCSFNDEDEEDDEEDSSSPE

SEQ ID NO: 70825 - DNA, 1257 bp, Artificial Sequence
  derived and/or modified sequence
atgcagcccgagggcatcatcttcgaggccgagaacaagcccagccccggcaccgagagcgccggcaccttcatcctggacctgagcgccaccagcagaaccatcatcagcaccccccagagactgaccagcagcggcagcgtgctgatcggcagcccctacacccccgcccccgccatggtgacccagacccacatcgccgaggccaccggctgggtgcccggcgacagaaagagagccagaaagttcatcgacagcgacttcagcgagagcaagagaagcaagaagggcgacaagaacggcaagggcctgagacacttcagcatgaaggtgtgcgagaaggtgcagagaaagggcaccaccagctacaacgaggtggccgacgagctggtgagcgagttcaccaacagcaacaaccacctggccgccgacagcgcctacgaccagaagaacatcagaagaagagtgtacgacgccctgaacgtgctgatggccatgaacatcatcagcaaggagaagaaggagatcaagtggatcggcctgcccaccaacagcgcccaggagtgccagaacctggagatcgagaagcagagaagaatcgagagaatcaagcagaagagagcccagctgcaggagctgctgctgcagcagatcgccttcaagaacctggtgcagagaaacagacagaacgagcagcagaaccagggcccccccgccctgaacagcaccatccagctgcccttcatcatcatcaacaccagcagaaagaccgtgatcgactgcagcatcagcagcgacaagttcgagtacctgttcaacttcgacaacaccttcgagatccacgacgacatcgaggtgctgaagagaatgggcatgagcttcggcctggagagcggcaagtgcagcctggaggacctgaagctggccaagagcctggtgcccaaggccctggagggctacatcaccgacatcagcaccggccccagctggctgaaccagggcctgctgctgaacagcacccagagcgtgagcaacctggacctgaccaccggcgccaccctgccccagagcagcgtgaaccagggcctgtgcctggacgccgaggtggccctggccaccggccagttcctggcccccaacagccaccagagcagcagcgccgccagccactgcagcgagagcagaggcgagaccccctgcagcttcaacgacgaggacgaggaggacgacgaggaggacagcagcagccccgagtag

SEQ ID NO: 70826 - DNA, 1257 bp, Artificial Sequence
  derived and/or modified sequence
atgcaaccagaaggaattatttttgaagcggaaaacaaaccctccccaggaacggagtcagccggtacatttattttggatctttctgccactagtcggaccattatctcaactccccagaggttaactagtagcggcagcgtgttgatcggatccccctacacaccggctccggccatggtaacccagacacatatcgcagaggcaaccggctgggtcccgggcgatagaaagcgcgcacgcaaattcattgattcagactttagcgagtctaaacgctccaagaaaggggacaagaacggaaaaggactccgccacttcagcatgaaggtctgtgaaaaagtgcaacggaagggtacaacatcctacaatgaggtggcggacgaactcgttagcgagtttactaactctaataaccacctggccgcggacagcgcatatgaccagaagaatattcggcgacgggtgtatgacgccctcaatgtgctcatggctatgaacatcatctccaaggaaaagaaggagattaaatggattggcttgcctacgaactccgctcaggagtgccagaatttagagatcgagaagcagaggagaattgagcggatcaagcagaagcgggcccagctgcaggagctgctgttgcaacaaatcgcattcaagaatttggtacagcggaatcgacaaaacgagcagcagaatcaggggccacccgcattgaacagtacaattcaactccctttcattatcattaacaccagccgcaagaccgtcatcgactgctcgatctctagcgataagttcgagtacctgttcaatttcgacaacacgttcgagattcatgacgacatagaggtgttgaaaaggatggggatgtctttcggcttggaatcaggcaagtgttccctggaggacctgaagctggctaagtctctggtgcctaaagctcttgaagggtatattaccgacattagcaccggcccctcatggttaaatcagggactcctactgaacagcacgcagtccgtgtctaatctcgatctcaccacaggcgccacattaccccagtctagcgtgaaccaaggactctgccttgacgctgaggtcgctttggcaaccggacagttccttgcaccaaactcccaccaatcctctagtgctgctagccattgtagtgagagtcgtggggagaccccctgtagcttcaacgacgaggatgaggaggatgacgaggaagacagcagctcacctgagtag

SEQ ID NO: 70827 - DNA, 1257 bp, Artificial Sequence
  derived and/or modified sequence
atgcagcctgagggcatcatctttgaagctgagaacaagcccagccctggaacagagagcgctggcaccttcatcctggacctgagcgccaccagcaggaccatcatcagcaccccccagaggctgaccagcagcggctctgtgctgattggcagcccctacaccccagccccagccatggtgacccagacccacatcgccgaggccaccggctgggtgcctggggacaggaagagggccaggaagttcatcgacagcgacttcagcgagagcaagaggagcaagaagggggacaagaatggcaagggcctgcggcacttctccatgaaggtgtgtgagaaggtgcagaggaagggcaccaccagctacaatgaggtggctgatgagctggtgtctgagttcaccaacagcaacaaccacctggccgctgacagcgcctatgaccagaagaacatcagaagaagagtgtatgatgccctgaatgtgctgatggccatgaacatcatcagcaaggagaagaaggagatcaagtggattggcctgcccaccaacagcgcccaggagtgccagaacctggagattgagaagcagaggcgcatcgagcgcatcaagcagaagagggcccagctgcaggagctgctgctgcagcagatcgccttcaagaacctggtgcagaggaaccggcagaatgagcagcagaaccagggccccccagccctgaacagcaccatccagctgcccttcatcatcatcaacaccagcaggaagacagtgattgactgcagcatcagcagtgacaagtttgagtacctgttcaactttgacaacacctttgagatccatgatgacatcgaggtgctgaagaggatgggcatgagctttggcctggagagcggcaagtgcagcctggaggacctgaagctggccaagagcctggtgcccaaggccctggagggctacatcacagacatcagcacaggccccagctggctgaaccagggcctgctgctgaacagcacccagagcgtgagcaacctggacctgaccaccggggccaccctgccccagagctctgtgaaccagggcctgtgcctggatgctgaggtggccctggccaccggccagttcctggcccccaacagccaccagagcagcagcgctgccagccactgcagcgagagcagaggagagaccccctgcagcttcaatgatgaagatgaggaggatgatgaggaggacagcagcagccctgagtag

SEQ ID NO: 70828 - DNA, 1257 bp, Artificial Sequence
  derived and/or modified sequence
atgcagcccgagggcatcatcttcgaggccgagaacaagcccagcccaggcaccgaatcagcaggcacctttatcctcgaccttagcgcaacgagccggaccattatctcaactcctcagcgattgacttcctcaggcagtgttctcatcggtagcccttacacccctgcgccggcgatggtgacccagacccacattgccgaagctactggttgggttccgggcgatagaaagagggcccgtaagttcatcgattccgatttctcagaatccaagagatccaagaagggagacaagaatgggaaaggcctccgacacttctcaatgaaagtatgtgaaaaagtccagagaaaaggaaccacctcctacaatgaagtggcagatgaactcgtttcagagtttactaactctaacaaccacctggcggctgattcggcttacgaccaaaaaaacatccgccgtagggtgtacgatgccttgaatgtacttatggcgatgaatatcatcagcaaggaaaaaaaggagattaagtggatcggactgccaaccaatagcgcgcaggaatgccagaatctcgagatcgagaagcagcgcagaatcgaacgaattaaacagaaaagggcgcagctgcaggaactgcttctgcagcaaatcgcttttaaaaacctcgtccaacggaatcgccagaatgagcagcagaaccagggacctccggccttgaacagtaccatacagctccccttcatcatcataaatacaagccgtaaaaccgtgattgattgctccatttcatcagacaagttcgagtatctatttaacttcgacaacacttttgagatacatgatgatattgaagttttaaagcgcatgggaatgtctttcggactggagtctgggaaatgctcactggaggatttaaaactggcgaaatccctggtacccaaggcgctagagggctatataaccgacatctccacaggcccgagttggttaaaccagggcctactattgaattcaacccaaagcgtgagtaatctggatctcacaactggcgctactctaccccaatcaagcgttaatcaggggctgtgtttagacgctgaagtagcccttgctactgggcagttccttgctcctaattcccatcagtcaagctctgccgctagccactgttctgagtcgagaggcgaaaccccgtgctcattcaatgacgaggatgaggaggatgatgaagaagactccagttcccccgagtag

SEQ ID NO: 70829 - DNA, 1257 bp, Artificial Sequence
  derived and/or modified sequence
atgcagcccgaagggattatcttcgaagcagaaaataagccaagtcccggtactgagtccgctggcacctttatcctggatctgagcgctacctcaagaaccataatctccacccctcagcgcctgacttcatccggatctgtgctcatcggcagtccttatacacccgctccagccatggtgactcagacacacatcgcggaagccactggctgggtgccaggcgaccggaagcgcgctcgaaaattcatagactccgatttctccgaatccaagcggtctaaaaagggggataaaaatgggaaggggctcagacacttcagcatgaaggtgtgtgagaaggtccaaagaaagggaacaactagttataacgaagtagccgatgaacttgtgagcgagttcacaaattccaacaaccacctggccgcagatagcgcttatgatcagaaaaatatccgccgtcgggtgtacgatgctctcaatgttttgatggctatgaacattatcagcaaggaaaagaaggagattaagtggatcggcctccctactaactccgcgcaagagtgccaaaatctggaaatagagaaacagcggagaatagagcgtattaagcagaagcgggctcaattgcaggagctgctgctgcagcagatcgcttttaagaacctggtccagcgaaaccgccagaatgagcagcagaaccaggggccaccagcactgaattccactattcagttgcccttcattatcatcaacacgagtcggaagacagtgatcgactgttctataagcagtgataaattcgagtacctgttcaactttgataacacgttcgagatccatgatgacatagaagtcctgaaacgtatgggcatgtccttcgggctcgagagcggaaaatgctcactggaagatctgaaactcgccaagtcactagtacccaaagctttggaagggtatatcaccgatatctccaccgggccaagctggctaaaccagggcctgctactgaattccacccagtccgtctctaatctcgatctgaccaccggggctacactgccacagagtagtgtcaaccaaggcctctgcctggatgccgaagttgccctcgccactgggcagttcctggctcctaatagtcatcagtccagctccgctgcatcacattgttctgaatcccgcggagagacaccctgttcttttaatgacgaggatgaggaagacgacgaggaggatagctccagtccagagtag

SEQ ID NO: 70830 - DNA, 1267 bp, Artificial Sequence
  derived and/or modified sequence
atgcaaccagaaggcatcatctttgaagcagagaataaaccctcaccaggcactgaatctgccggcactttcattttggacctctcagcaacctccagaacaattataagcacaccacagagactaaccagttcaggaagtgttctgattgggagtccatatacccctgcaccagcaatggttactcagacacacatagcagaagctactggctgggtccctggtgatagaaaacgggctagaaaatttatagactctgatttttcagaaagtaaacgaagcaaaaaaggagataaaaatgggaaaggcttgagacacttttcaatgaaagtgtgtgagaaagttcaacgaaaaggtacaacatcgtacaatgaagtcgctgatgagctggtgtcagagttcaccaattcaaataaccatttggctgctgattcggcttatgatcagaagaacattaggcgaagagtttatgatgctttaaatgtgctaatggcaatgaacataatttcaaaggaaaaaaaagaaatcaagtggattggcctgcctaccaattctgctcaggaatgtcagaatctggagatagagaagcagaggcggatagaacggataaagcagaagcgggcccagctgcaagaacttctcctacagcaaatcgctttcaaaaacctggtacagagaaatcgacaaaatgagcagcaaaaccagggcccgccggctctgaactctaccattcagctgccattcataatcatcaatacaagcagaaaaacagtcatagattgcagcatctccagtgacaagtttgagtatcttttcaattttgacaacacctttgagatccatgatgacatagaagtactaaagcggatgggaatgtcgtttggcctggagtcaggcaaatgctctctggaggatctgaaacttgcgaaatccctggtgccaaaggctttagaaggttatatcacagatatctccacaggaccttcttggttaaatcagggactacttctgaactctacccaatcagtttcaaatttagacctgaccactggtgccaccttaccccagtcaagtgtaaaccaagggttatgcttggatgcagaagtggccttagcaactgggcagttcctggccccaaacagtcaccagtccagcagtgcggcctctcactgctccgagtcccgaggcgagaccccctgttcgttcaatgatgaagatgaggaagatgatgaggaggattcctcctccccagaataaagacaagaga

SEQ ID NO: 70831 - protein, 349 aa, Artificial Sequence
  derived and/or modified sequence
MLDPKCDRKRARKFIDSDFSESKRSKKGDKNGKGLRHFSMKVCEKVQRKGTTSYNEVADELVSEFTNSNNHLAADSAYDQKNIRRRVYDALNVLMAMNIISKEKKEIKWIGLPTNSAQECQNLEIEKQRRIERIKQKRAQLQELLLQQIAFKNLVQRNRQNEQQNQGPPALNSTIQLPFIIINTSRKTVIDCSISSDKFEYLFNFDNTFEIHDDIEVLKRMGMSFGLESGKCSLEDLKLAKSLVPKALEGYITDISTGPSWLNQGLLLNSTQSVSNLDLTTGATLPQSSVNQGLCLDAEVALATGQFLAPNSHQSSSAASHCSESRGETPCSFNDEDEEDDEEDSSSPE

SEQ ID NO: 70832 - DNA, 1050 bp, Artificial Sequence
  derived and/or modified sequence
atgctggaccccaagtgcgacagaaagagagccagaaagttcatcgacagcgacttcagcgagagcaagagaagcaagaagggcgacaagaacggcaagggcctgagacacttcagcatgaaggtgtgcgagaaggtgcagagaaagggcaccaccagctacaacgaggtggccgacgagctggtgagcgagttcaccaacagcaacaaccacctggccgccgacagcgcctacgaccagaagaacatcagaagaagagtgtacgacgccctgaacgtgctgatggccatgaacatcatcagcaaggagaagaaggagatcaagtggatcggcctgcccaccaacagcgcccaggagtgccagaacctggagatcgagaagcagagaagaatcgagagaatcaagcagaagagagcccagctgcaggagctgctgctgcagcagatcgccttcaagaacctggtgcagagaaacagacagaacgagcagcagaaccagggcccccccgccctgaacagcaccatccagctgcccttcatcatcatcaacaccagcagaaagaccgtgatcgactgcagcatcagcagcgacaagttcgagtacctgttcaacttcgacaacaccttcgagatccacgacgacatcgaggtgctgaagagaatgggcatgagcttcggcctggagagcggcaagtgcagcctggaggacctgaagctggccaagagcctggtgcccaaggccctggagggctacatcaccgacatcagcaccggccccagctggctgaaccagggcctgctgctgaacagcacccagagcgtgagcaacctggacctgaccaccggcgccaccctgccccagagcagcgtgaaccagggcctgtgcctggacgccgaggtggccctggccaccggccagttcctggcccccaacagccaccagagcagcagcgccgccagccactgcagcgagagcagaggcgagaccccctgcagcttcaacgacgaggacgaggaggacgacgaggaggacagcagcagccccgagtag

SEQ ID NO: 70833 - DNA, 1050 bp, Artificial Sequence
  derived and/or modified sequence
atgctcgatcccaagtgcgatcgcaagcgcgcacggaagtttattgattccgatttctcagagtcaaagcgcagtaagaagggtgataagaatggcaaggggctaagacacttctccatgaaggtgtgcgagaaagtccaacggaaaggcacaacgtcatacaacgaggtggcggatgagctggtgtccgagttcacgaactctaacaatcatcttgctgcagactctgcctacgaccaaaagaacattagacgcagagtgtacgatgctctgaatgtgctcatggccatgaatatcatcagtaaggaaaagaaagaaatcaagtggatcggattacccacgaacagcgctcaagaatgccagaacctggagattgagaaacagcggagaatcgaacgtattaagcagaagagggcccagctccaggagctgttgttgcagcagatagctttcaagaacctggttcagcggaacagacagaatgaacagcaaaatcaagggcctcctgcactgaattccaccattcagttgccattcatcatcatcaacacaagccgcaagaccgtaattgactgctcaatctcctctgataagtttgagtacctgttcaatttcgataatacgttcgagattcacgacgatattgaagtcttgaagaggatgggtatgagctttggactggaaagcgggaagtgcagtctcgaggatctgaaactggctaagagcctcgtcccgaaagccctcgagggctacataaccgacatttccaccggcccctcatggctcaatcagggcctgttgttaaactcgacacaatcagtgtcaaatctggacttgacaaccggtgccacgctgccccagagctccgtgaatcaaggactgtgtctggatgcagaggtcgcactggcaaccggacagttcctcgctccaaattctcaccagagcagttctgcggccagccattgctcggaatccaggggcgagacgccttgttctttcaacgacgaggatgaagaagatgacgaagaagactcctcttctcctgagtag

SEQ ID NO: 70834 - DNA, 1050 bp, Artificial Sequence
  derived and/or modified sequence
atgctggaccccaagtgtgacaggaagagggccaggaagttcatcgacagcgacttcagcgagagcaagaggagcaagaagggggacaagaatggcaagggcctgcggcacttctccatgaaggtgtgtgagaaggtgcagaggaagggcaccaccagctacaatgaggtggctgatgagctggtgtctgagttcaccaacagcaacaaccacctggccgctgacagcgcctatgaccagaagaacatcagaagaagagtgtatgatgccctgaatgtgctgatggccatgaacatcatcagcaaggagaagaaggagatcaagtggattggcctgcccaccaacagcgcccaggagtgccagaacctggagattgagaagcagaggagaattgagcgcatcaagcagaagagggcccagctgcaggagctgctgctgcagcagatcgccttcaagaacctggtgcagaggaaccggcagaatgagcagcagaaccagggccccccagccctgaacagcaccatccagctgcccttcatcatcatcaacaccagcaggaagacagtcatcgactgcagcatcagcagtgacaagtttgagtacctgttcaactttgacaacacctttgagatccatgatgacatcgaggtgctgaagaggatgggcatgagctttggcctggagagcggcaagtgcagcctggaggacctgaagctggccaagagcctggtgcccaaggccctggagggctacatcacagacatcagcacaggccccagctggctgaaccagggcctgctgctgaacagcacccagagcgtgagcaacctggacctgaccactggagccaccctgccccagagctctgtgaaccagggcctgtgcctggatgctgaggtggccctggccaccggccagttcctggcccccaacagccaccagagcagcagcgctgccagccactgcagcgagagcagaggagagaccccctgcagcttcaatgatgaagatgaagaagatgatgaggaggacagcagcagccctgagtag

SEQ ID NO: 70835 - DNA, 1050 bp, Artificial Sequence
  derived and/or modified sequence
atgctggaccccaagtgcgaccggaagcgggcccggaagttcatcgacagcgacttttccgagagcaagagaagcaagaagggcgacaagaatggcaaggggcttcggcacttctcaatgaaagtgtgtgagaaggtgcagcggaagggcaccacaagctataacgaggtcgccgacgaactggtgagtgagttcacgaatagcaataaccatttggcagcagactccgcatacgatcaaaaaaacatccggagacgtgtgtacgatgcactgaacgttttaatggccatgaacatcatttcaaaggaaaagaaggagattaagtggatcggacttcccactaactctgcccaggaatgccaaaacctcgagatcgagaagcagcgcaggattgaaagaattaaacagaagagagcccagctgcaagagttgcttctacagcagatagcttttaagaacttggttcagcgcaaccgtcagaacgagcaacaaaaccagggacctcccgccctaaattccaccattcagcttcccttcattattattaatacctctagaaagacagtgatcgattgctccataagctccgataagttcgaatatctctttaatttcgacaacacctttgagattcacgatgacatcgaagttctgaaaagaatgggtatgtctttcgggctggaaagcgggaaatgcagcctggaggatttgaagctggctaagtctctcgttccgaaagctcttgaggggtatatcacagacatcagtactgggccaagttggttgaatcaggggcttctcctaaatagtacccagagtgtctcaaacttagatctaactacaggcgcgactctgccccagagctctgtcaaccaggggttgtgtttggatgcggaagtagctctggccaccggtcagtttctggctcccaatagccaccagagttcgtctgctgcatcccattgttccgaaagccgaggtgagacaccttgttcttttaacgacgaagacgaggaagacgatgaggaagacagctcatcgcccgaatag

SEQ ID NO: 70836 - DNA, 1050 bp, Artificial Sequence
  derived and/or modified sequence
atgttagaccctaagtgtgacaggaaacgcgcacgcaagttcatcgattctgattttagcgagagcaagcgctctaagaaaggtgataagaacggtaaagggcttagacatttctctatgaaagtatgcgagaaagtccagaggaaaggtaccacctcgtacaatgaggtggccgacgaactagtctccgaatttaccaattcaaacaatcatcttgccgcagactctgcctacgatcagaaaaacatccgccgtcgcgtatacgacgctctgaacgtgctcatggcgatgaacatcatttctaaggaaaaaaaggagataaaatggatcgggctgccaaccaactctgcacaggagtgccagaacctcgaaatcgaaaagcagcgccgaatcgaaaggattaaacagaaaagagcgcaactccaagagcttcttctccagcagatcgccttcaaaaacctggttcagcgaaatcggcagaacgaacagcagaatcaggggccacccgcactgaacagcaccatacagttaccctttataatcatcaacacttcccggaagaccgtgatcgattgctcgatttcctcagataaattcgaatatctcttcaattttgacaatacctttgaaatccatgatgatatcgaggtgctcaagcggatgggaatgagctttggacttgagtctggaaagtgcagtctggaggatctgaagctagcgaagtcccttgtccccaaagccctcgaaggatatataaccgacatcagtactggcccatcatggctgaaccagggcctcctgctcaattctacacagtctgtgtctaacttagatctgaccaccggtgctaccctgccccagagctccgtcaatcagggcctgtgcctagacgctgaggtggcattagccaccggccagttccttgcaccaaacagccaccagagctcctccgctgcatcccactgcagtgaatcccggggagagaccccatgtagttttaatgacgaggatgaagaggacgacgaagaagactctagttcccctgagtag

SEQ ID NO: 70837 - DNA, 1442 bp, Artificial Sequence
  derived and/or modified sequence
actgaatggtaacaaagactgtagaatgttgttggtactgcagtgagaggcatgcttccttagaccaggcaacatttcatttgttgcatttccagtttccaataccaactcacctacaaagattttaccaaaaaccttaggaccaataaatgtgaatgttggaccccaaatgtgatagaaaacgggctagaaaatttatagactctgatttttcagaaagtaaacgaagcaaaaaaggagataaaaatgggaaaggcttgagacacttttcaatgaaagtgtgtgagaaagttcaacgaaaaggtacaacatcgtacaatgaagtcgctgatgagctggtgtcagagttcaccaattcaaataaccatttggctgctgattcggcttatgatcagaagaacattaggcgaagagtttatgatgctttaaatgtgctaatggcaatgaacataatttcaaaggaaaaaaaagaaatcaagtggattggcctgcctaccaattctgctcaggaatgtcagaatctggagatagagaagcagaggcggatagaacggataaagcagaagcgggcccagctgcaagaacttctcctacagcaaatcgctttcaaaaacctggtacagagaaatcgacaaaatgagcagcaaaaccagggcccgccggctctgaactctaccattcagctgccattcataatcatcaatacaagcagaaaaacagtcatagattgcagcatctccagtgacaagtttgagtatcttttcaattttgacaacacctttgagatccatgatgacatagaagtactaaagcggatgggaatgtcgtttggcctggagtcaggcaaatgctctctggaggatctgaaacttgcgaaatccctggtgccaaaggctttagaaggttatatcacagatatctccacaggaccttcttggttaaatcagggactacttctgaactctacccaatcagtttcaaatttagacctgaccactggtgccaccttaccccagtcaagtgtaaaccaagggttatgcttggatgcagaagtggccttagcaactgggcagttcctggccccaaacagtcaccagtccagcagtgcggcctctcactgctccgagtcccgaggcgagaccccctgttcgttcaatgatgaagatgaggaagatgatgaggaggattcctcctccccagaataaagacaagagaaagcctacgtttcaatatgtgatgctcatgtgtgtttgtagtgtgagctcttgtttttgaaatgattgcttcagtctttgcctttgtttgcactgtgtgttcagtgaaaactagagaaacacaataagcaaatcacatgaaggctgagatgattgagatgaaagttaacatagtgtgaatgaaagtctggccaacagagcagtagatgatataacaaagaaagcatg

SEQ ID NO: 70838 - DNA, 1403 bp, Artificial Sequence
  derived and/or modified sequence
gtagaatgttgttggtactgcagtgagaggcatgcttccttagaccagtaaacgaagcaaaaaaggagataaaaatgggaaaggcttgagacacttttcaatgaaagtgtgtgagaaagttcaacgaaaaggtacaacatcgtacaatgaagtcgctgatgagctggtgtcagagttcaccaattcaaataaccatttggctgctgattcggcttatgatcagaagaacattaggcgaagagtttatgatgctttaaatgtgctaatggcaatgaacataatttcaaaggaaaaaaaagaaatcaagtggattggcctgcctaccaattctgctcaggaatgtcagaatctggagatagagaagcagaggcggatagaacggataaagcagaagcgggcccagctgcaagaacttctcctacagcaaatcgctttcaaaaacctggtacagagaaatcgacaaaatgagcagcaaaaccagggcccgccggctctgaactctaccattcagctgccattcataatcatcaatacaagcagaaaaacagtcatagattgcagcatctccagtgacaagtttgagtatcttttcaattttgacaacacctttgagatccatgatgacatagaagtactaaagcggatgggaatgtcgtttggcctggagtcaggcaaatgctctctggaggatctgaaacttgcgaaatccctggtgccaaaggctttagaaggttatatcacagatatctccacaggaccttcttggttaaatcagggactacttctgaactctacccaatcagtttcaaatttagacctgaccactggtgccaccttaccccagtcaagtgtaaaccaagggttatgcttggatgcagaagtggccttagcaactgggcagttcctggccccaaacagtcaccagtccagcagtgcggcctctcactgctccgagtcccgaggcgagaccccctgttcgttcaatgatgaagatgaggaagatgatgaggaggattcctcctccccagaataaagacaagagaaagcctacgtttcaatatgtgatgctcatgtgtgtttgtagtgtgagctcttgtttttgaaatgattgcttcagtctttgcctttgtttgcactgtgtgttcagtgaaaactagagaaacacaataagcaaatcacatgaaggctgagatgattgagatgaaagttaacatagtgtgaatgaaagtctggccaacagagcagtagatgatataacaaagaaagcatgctttctgaggagatagtggggataatccctgaagagttggcagtgtgagtgcaactcatttatcttctgtgaggtgggatttttgtgttcctcacacccatgtaattattcttagaattgagattgctacacg

SEQ ID NO: 70839 - DNA, 933 bp, Artificial Sequence
  derived and/or modified sequence
atgaaggtgtgcgagaaggtgcagagaaagggcaccaccagctacaacgaggtggccgacgagctggtgagcgagttcaccaacagcaacaaccacctggccgccgacagcgcctacgaccagaagaacatcagaagaagagtgtacgacgccctgaacgtgctgatggccatgaacatcatcagcaaggagaagaaggagatcaagtggatcggcctgcccaccaacagcgcccaggagtgccagaacctggagatcgagaagcagagaagaatcgagagaatcaagcagaagagagcccagctgcaggagctgctgctgcagcagatcgccttcaagaacctggtgcagagaaacagacagaacgagcagcagaaccagggcccccccgccctgaacagcaccatccagctgcccttcatcatcatcaacaccagcagaaagaccgtgatcgactgcagcatcagcagcgacaagttcgagtacctgttcaacttcgacaacaccttcgagatccacgacgacatcgaggtgctgaagagaatgggcatgagcttcggcctggagagcggcaagtgcagcctggaggacctgaagctggccaagagcctggtgcccaaggccctggagggctacatcaccgacatcagcaccggccccagctggctgaaccagggcctgctgctgaacagcacccagagcgtgagcaacctggacctgaccaccggcgccaccctgccccagagcagcgtgaaccagggcctgtgcctggacgccgaggtggccctggccaccggccagttcctggcccccaacagccaccagagcagcagcgccgccagccactgcagcgagagcagaggcgagaccccctgcagcttcaacgacgaggacgaggaggacgacgaggaggacagcagcagccccgagtag

SEQ ID NO: 70840 - DNA, 933 bp, Artificial Sequence
  derived and/or modified sequence
atgaaagtatgtgaaaaagttcaacgcaagggcacaacaagctacaacgaggtggcagacgaactggtaagtgaattcactaactccaacaatcatttagcggctgactctgcatatgatcaaaagaatattaggcggcgcgtgtatgacgcgctcaacgtcctaatggcaatgaatattatcagtaaagagaagaaagagattaaatggatcggtctgcccaccaattccgctcaggaatgtcagaacctggagatcgagaagcagcgtagaatcgaaagaataaaacagaagcgcgcacaactgcaagagcttctattacagcagatcgcctttaaaaatttggtgcagagaaatagacaaaacgaacagcaaaatcaagggccacccgctcttaacagcacaatccagcttccattcataatcatcaacacgtcccgaaagaccgtcatcgactgctccatttccagtgacaaatttgaatatctctttaacttcgacaacacttttgagatccacgatgacatcgaggtgttaaaacggatggggatgagcttcggcctggagagcggaaaatgcagtctagaagacctcaagttggccaaaagcctggttcctaaggccttagagggctacatcaccgatatttcaacaggccccagctggctgaatcaaggcctgcttctgaactcaacacaaagtgtttctaatcttgatctcactacaggtgcaacattaccccagagttctgttaaccagggcctctgcctggacgctgaggtggctctggccaccggtcagttcctggctccaaacagccaccaatctagcagtgctgctagccactgcagcgaaagcaggggcgaaactccttgcagctttaacgatgaagacgaggaagacgatgaggaagatagcagtagcccggagtag

SEQ ID NO: 70841 - DNA, 933 bp, Artificial Sequence
  derived and/or modified sequence
atgaaggtgtgtgagaaggtgcagaggaagggcaccaccagctacaatgaggtggctgatgagctggtgtctgagttcaccaacagcaacaaccacctggccgctgacagcgcctatgaccagaagaacatcagaagaagagtgtatgatgccctgaatgtgctgatggccatgaacatcatcagcaaggagaagaaggagatcaagtggattggcctgcccaccaacagcgcccaggagtgccagaacctggagattgagaagcagaggcgcatcgagcgcatcaagcagaagagggcccagctgcaggagctgctgctgcagcagatcgccttcaagaacctggtgcagaggaaccggcagaatgagcagcagaaccagggccccccagccctgaacagcaccatccagctgcccttcatcatcatcaacaccagcaggaagacagtgattgactgcagcatcagcagtgacaagtttgagtacctgttcaactttgacaacacctttgagatccatgatgacatcgaggtgctgaagaggatgggcatgagctttggcctggagagcggcaagtgcagcctggaggacctgaagctggccaagagcctggtgcccaaggccctggagggctacatcacagacatcagcacaggccccagctggctgaaccagggcctgctgctgaacagcacccagagcgtgagcaacctggacctgaccaccggggccaccctgccccagagctctgtgaaccagggcctgtgcctggatgctgaggtggccctggccaccggccagttcctggcccccaacagccaccagagcagcagcgctgccagccactgcagcgagagcagaggagagaccccctgcagcttcaatgatgaagatgaggaggatgatgaggaggacagcagcagccctgagtag

SEQ ID NO: 70842 - DNA, 933 bp, Artificial Sequence
  derived and/or modified sequence
atgaaggtgtgcgagaaggtgcagcggaagggcaccaccagctacaatgaggtggctgacgaattggttagtgaatttactaatagcaacaatcacttggcagcggatagcgcctatgaccagaagaatattcggaggagggtgtatgatgctttgaatgttctcatggcaatgaacataatttcgaaggaaaagaaggagataaagtggattggcttgccgactaattccgcacaggaatgccagaacctggagattgagaagcagagacgcatcgaaaggatcaagcagaaacgcgctcagcttcaggaattgctgttgcagcagatcgcttttaaaaatctagtccagcgcaaccggcagaatgagcagcagaaccagggccctccagccctgaattccacgatccagttaccctttatcattattaatacgtcccggaagaccgtgatagattgctccatctcatcggacaagtttgagtacttgttcaacttcgataacactttcgagattcacgacgacatcgaggtacttaagcgcatgggtatgtctttcggacttgagagtggaaagtgcagtttggaggatcttaagcttgccaaatcgcttgtgcccaaggccctagagggctacatcaccgatatctccaccggcccttcctggctcaatcaaggactgctcctgaattccactcaaagcgtgtcaaatctcgatctgactactggcgccactctgccacagtccagtgtgaaccaagggctatgcttggacgcagaagtggctcttgctacgggccagttcctggcgcccaattcccaccagtcatcgagtgccgccagccactgttctgagagcagaggggagacaccctgctcttttaacgatgaagacgaggaggacgacgaagaggattccagcagtccagagtag

SEQ ID NO: 70843 - DNA, 933 bp, Artificial Sequence
  derived and/or modified sequence
atgaaggtgtgcgaaaaggtacagcgcaagggaacgacttcctacaacgaagtagcagacgaacttgtgagcgaattcactaattctaacaaccacttagctgccgatagtgcttacgaccagaaaaacattcgtagaagagtgtacgatgccttgaatgtgctgatggccatgaacatcattagcaaggaaaaaaaggagatcaagtggatcggtctacctaccaattccgcccaggaatgtcagaatctggaaatcgaaaagcagaggcggatcgagaggattaaacagaaacgcgcacaactgcaggagcttctgctgcagcagatagcctttaaaaatctggtgcagagaaaccggcagaacgagcagcagaaccaaggacctccagccctcaatagcaccattcagcttccgttcattatcattaatacaagtcgtaagaccgtaatagactgtagcattagttcagacaagttcgaatacctgttcaattttgacaacaccttcgaaatacacgatgacatagaagttctaaaacggatgggcatgagctttggcctggagagtggaaaatgtagtctggaagacctgaaactggcaaagagcctggttccaaaggctcttgaggggtacattacggatatctccactggcccaagctggctgaaccaggggctgctgctgaatagtacacaaagcgtctccaaccttgatttaaccaccggcgctactctgccccaaagttcggttaaccaaggcctctgtctcgacgcagaggtggctttagctaccggccagtttctcgctcccaacagccatcaaagctcaagtgctgcatctcactgctctgagtcaaggggggagaccccctgcagttttaatgatgaagatgaagaagacgatgaggaagatagctcatctcctgaatag

SEQ ID NO: 70844 - DNA, 1485 bp, Artificial Sequence
  derived and/or modified sequence
agtcgtggccccaggtaatttcctcccaggcctccatggggttatgtataaaggcccccctagagctgggccccaaaacagcccggagcctgcagcccagccccacccagacccatggctggacctgccacccagagccccatgaagctgatggccctgcagctgctgctgtggcacagtgcactctggacagtgcaggaagccacccccctgggccctgccagctccctgccccagagcttcctgctcaagtgcttagagcaagtgaggaagatccagggcgatggcgcagcgctccaggagaagctggcaggctgcttgagccaactccatagcggccttttcctctaccaggggctcctgcaggccctggaagggatctcccccgagttgggtcccaccttggacacactgcagctggacgtcgccgactttgccaccaccatctggcagcagatggaagaactgggaatggcccctgccctgcagcccacccagggtgccatgccggccttcgcctctgctttccagcgccgggcaggaggggtcctggttgcctcccatctgcagagcttcctggaggtgtcgtaccgcgttctacgccaccttgcccagccctgagccaagccctccccatcccatgtatttatctctatttaatatttatgtctatttaagcctcatatttaaagacagggaagagcagaacggagccccaggcctctgtgtccttccctgcatttctgagtttcattctcctgcctgtagcagtgagaaaaagctcctgtcctcccatcccctggactgggaggtagataggtaaataccaagtatttattactatgactgctccccagccctggctctgcaatgggcactgggatgagccgctgtgagcccctggtcctgagggtccccacctgggacccttgagagtatcaggtctcccacgtgggagacaagaaatccctgtttaatatttaaacagcagtgttccccatctgggtccttgcacccctcactctggcctcagccgactgcacagcggcccctgcatccccttggctgtgaggcccctggacaagcagaggtggccagagctgggaggcatggccctggggtcccacgaatttgctggggaatctcgtttttcttcttaagacttttgggacatggtttgactcccgaacatcaccgacgcgtctcctgtttttctgggtggcctcgggacacctgccctgcccccacgagggtcaggactgtgactctttttagggccaggcaggtgcctggacatttgccttgctggacggggactggggatgtgggagggagcagacaggaggaatcatgtcaggcctgtgtgtgaaaggaagctccactgtcaccctccacctcttcaccccccactcaccagtgtcccctccactgtcacattgtaactgaacttcaggataataaagtgtttgcctccaaaaaaaaaaa

SEQ ID NO: 70845 - DNA, 90 bp, Artificial Sequence
  derived and/or modified sequence
atggccggaccggcgactcagtcgcccatgaaactcatggccctgcagttgttgctttggcactcagccctctggaccgtccaagaggcg

SEQ ID NO: 70846 - DNA, 299 bp, Artificial Sequence
  derived and/or modified sequence
gggaaataagagagaaaagaagagtaagaagaaatataagagccaccatggccggacccgcgacgcagtcaccgatgaagctcatggctcttcagttgctcctctggcactcggcgctgtggacagtgcaagaggcaaaacttctcctgctgaagctccttctgttgaaattgttgcttctcaagttgcttttgctgaaataatgagctgccttctgcggggcttgccttctggccatgcccttcttctctcccttgcacctgtacctcttggtctttgaataaagcctgagtaggaag

SEQ ID NO: 70847 - DNA, 153 bp, Artificial Sequence
  derived and/or modified sequence
atggcaggccctgccacacaaagtcccatgaagttaatggccttacagctgttgctgtggcattctgcattatggaccgtgcaggaggcaaaactgttacttctgaagctattactgctgaagttgctcttactaaaactactgctgctgaaa

SEQ ID NO: 70848 - DNA, 153 bp, Artificial Sequence
  derived and/or modified sequence
atggccggccctgcaacccagagcccaatgaaactcatggcgctccaactgctgttgtggcactcggccctgtggacggtgcaggaagcaaagctgctgctgttgaaactgctgctgctgaaacttttgctgttgaagttgctgttgctcaaa

SEQ ID NO: 70849 - DNA, 153 bp, Artificial Sequence
  derived and/or modified sequence
atggccggtccggcgactcaaagccccatgaagctgatggcactgcagctcctgctgtggcactccgcgctctggaccgtgcaagaagctaagctcttgctcttgaagttgcttctcctgaaacttttgctgctcaagttgctgcttctgaaa

SEQ ID NO: 70850 - DNA, 153 bp, Artificial Sequence
  derived and/or modified sequence
atggccggtccagccacccagagcccaatgaagctgatggcgctgcagctcctgctctggcactcggcactgtggactgtgcaagaagcaaagctgttgttgttgaaactcctcctgcttaagttgctgcttctgaaacttctcctgctgaaa

SEQ ID NO: 70851 - DNA, 153 bp, Artificial Sequence
  derived and/or modified sequence
atggccggaccagccacccagagccctatgaagctgatggcgctgcaactcttgctttggcattccgccctttggactgtgcaagaggctaagttgctgctcctgaagctgctgctgctgaagctcctgttgttgaaactgctgctgctcaaa

SEQ ID NO: 70852 - DNA, 153 bp, Artificial Sequence
  derived and/or modified sequence
atggcgggacctgcaacccaatcccccatgaagctcatggcactccaactccttctctggcattcggccctttggactgtgcaggaagctaaactgcttctgcttaagttgctgcttcttaagctgttgcttctgaagctccttttgctcaag

SEQ ID NO: 70853 - DNA, 153 bp, Artificial Sequence
  derived and/or modified sequence
atggcgggaccagctactcagtctccgatgaaattgatggccctgcagctgctcctttggcactcggcgctgtggaccgtgcaagaggcaaagttgctgctcttgaagctcctcctgctgaaactgcttctcctcaagctgttgctgctgaag

SEQ ID NO: 70854 - DNA, 153 bp, Artificial Sequence
  derived and/or modified sequence
atggccgggccggccacccaaagtcctatgaagctgatggcactgcagttgctgctgtggcatagcgctttgtggaccgtgcaggaggccaaactcttattgctgaagctgctcctcctgaaactgctgttactgaaactgctgctccttaag

SEQ ID NO: 70855 - DNA, 153 bp, Artificial Sequence
  derived and/or modified sequence
atggccggacccgccactcagagcccaatgaaactgatggcccttcaactgctcctgtggcactcggccctgtggaccgtgcaggaagcaaagctcctccttctcaaactgctgctgctgaagttgctcctgttgaagctgcttctgctcaag

SEQ ID NO: 70856 - DNA, 153 bp, Artificial Sequence
  derived and/or modified sequence
atggctggaccagctacgcagtctcccatgaaacttatggctttacagctcttgttgtggcactcggctctgtggacagtgcaggaagctaaactcttacttttgaaacttttgcttttgaaacttttgcttttgaagctcctattgcttaag

SEQ ID NO: 70857 - DNA, 153 bp, Artificial Sequence
  derived and/or modified sequence
atggccggcccggccacacagagccctatgaagctgatggccttgcagctgcttctgtggcactcggctctctggactgtgcaggaagccaaattgttattgctaaaacttctgctcttgaaactgctccttctgaagttgctgcttctcaaa

SEQ ID NO: 70858 - DNA, 153 bp, Artificial Sequence
  derived and/or modified sequence
atggcaggccctgctacccaatctccaatgaagctaatggcactccaactgctgttgtggcattctgccttgtggaccgtccaggaggctaagctgcttttgcttaagctgctcctcctcaagctcctgctcttaaagctgctacttttgaaa

SEQ ID NO: 70859 - DNA, 153 bp, Artificial Sequence
  derived and/or modified sequence
atggctggacctgcgacccagagcccgatgaagctcatggcactccagttgctcctctggcactcggccctctggactgtgcaagaggcgaagttgctgctcctgaagttgttgctgctgaaactcctgctgctgaagctgctcctgctcaaa

SEQ ID NO: 70860 - DNA, 153 bp, Artificial Sequence
  derived and/or modified sequence
atggcaggccctgcgacccaatccccgatgaagctgatggccctccagctcctgctgtggcacagcgctttgtggactgtgcaggaagcgaagctcctgctcctgaagctgctgctcttgaaactgctgttgctgaaactgcttctgcttaag

SEQ ID NO: 70861 - DNA, 153 bp, Artificial Sequence
  derived and/or modified sequence
atggcgggccctgcgacccagtcccccatgaagctgatggcccttcagcttctgctctggcacagcgccctgtggacggtccaggaggcaaagctcttgctgctcaagctgcttctgctgaagctgctgctcctaaagctccttctgttaaag

SEQ ID NO: 70862 - DNA, 153 bp, Artificial Sequence
  derived and/or modified sequence
atggccgggcctgccacacagtccccaatgaagctcatggcactgcagctcctgctgtggcactcagcactttggaccgtccaggaggcgaagttgttgctgctcaagctactccttctgaagttgttacttctgaaactcctcctgttgaaa

SEQ ID NO: 70863 - DNA, 153 bp, Artificial Sequence
  derived and/or modified sequence
atggccggccctgcgacccagtcacccatgaagctgatggcacttcagctgctgctgtggcacagtgccctctggacagtgcaggaggccaagctgctattactgaagctgctactcctcaagctcttgctgctgaaacttctgcttttaaag

SEQ ID NO: 70864 - DNA, 153 bp, Artificial Sequence
  derived and/or modified sequence
atggcgggcccagcgacccagtccccaatgaaactaatggccctgcagttactcttatggcacagtgctctctggaccgtgcaggaagccaagttgttactgctgaagctgcttttacttaagcttctgctgctcaaactgctcctcctgaag

SEQ ID NO: 70865 - DNA, 153 bp, Artificial Sequence
  derived and/or modified sequence
atggcaggccccgctacacagagccccatgaaacttatggccctgcagctgctgctgtggcactctgccctgtggaccgtgcaggaagccaaacttctgttgctgaagctgctcctgcttaagctcctcctgctgaagcttctgctcctcaaa

SEQ ID NO: 70866 - DNA, 153 bp, Artificial Sequence
  derived and/or modified sequence
atggcaggcccagcgactcaatcccctatgaagttgatggcacttcagcttctcctttggcactccgccctctggaccgtccaggaagctaagctgctgcttctgaaacttcttttgctgaagctgcttctgctcaagctcctgctgctgaaa

SEQ ID NO: 70867 - DNA, 153 bp, Artificial Sequence
  derived and/or modified sequence
atggcaggtccagcaacgcaatcgcctatgaaactgatggcgctgcaactgctgctgtggcactccgctctttggaccgtgcaggaagcaaagctcctgcttcttaaacttcttcttctgaagctgctgcttctgaagttgctcctccttaag

SEQ ID NO: 70868 - DNA, 153 bp, Artificial Sequence
  derived and/or modified sequence
atggcaggaccggccacccagtcccctatgaaactcatggccttgcagctgctcctttggcacagcgcgctctggactgtgcaagaggctaagttgctgctgctcaaactcctgctcctgaaattgctgctcctcaagctgctcctgctgaaa

SEQ ID NO: 70869 - DNA, 153 bp, Artificial Sequence
  derived and/or modified sequence
atggcaggacctgcaacacaatcaccaatgaaacttatggcattacaacttcttttatggcactctgctctttggacagtacaagaagctaaacttcttttgttaaagttattattattaaaattacttcttttaaaattgttattacttaag

SEQ ID NO: 70870 - DNA, 153 bp, Artificial Sequence
  derived and/or modified sequence
atggctggtccagcgacgcaaagcccgatgaaactcatggcactgcagttgctactctggcactctgcactatggactgtgcaggaagctaaattactcctactgaaattacttcttcttaaactgctgcttctcaagttgctgctacttaaa

SEQ ID NO: 70871 - DNA, 153 bp, Artificial Sequence
  derived and/or modified sequence
atggcaggccccgcaacccagagccccatgaagctcatggcgctgcagcttctgctgtggcattcggccctgtggacagtgcaagaggccaaactgttgctactgaaactgcttctgcttaagcttctgttactgaagctcctgctcttgaag

SEQ ID NO: 70872 - DNA, 153 bp, Artificial Sequence
  derived and/or modified sequence
atggctggcccagctacccaaagtcccatgaagctgatggcccttcagctcttgctctggcactccgctttgtggacagtacaagaggctaagttgctcctgctgaaacttctgctgctgaagctgctgctcctcaagctgttgctgctgaag

SEQ ID NO: 70873 - DNA, 153 bp, Artificial Sequence
  derived and/or modified sequence
atggcaggtccagccacacagtcccctatgaaattgatggcccttcagttactattgtggcatagcgctctttggactgttcaagaagcgaaacttttacttttaaaactccttcttctcaaattacttctgcttaagctgctgttgctgaaa

SEQ ID NO: 70874 - DNA, 153 bp, Artificial Sequence
  derived and/or modified sequence
atggccgggccagcaactcagtctcccatgaagctgatggcgttgcaattgctcctttggcactctgccctgtggaccgtgcaggaggctaagctgctgcttctcaagcttttgttgctgaaactgctcctccttaagctgctgttgctgaag

SEQ ID NO: 70875 - DNA, 153 bp, Artificial Sequence
  derived and/or modified sequence
atggccggcccagcaacccaatcgccgatgaagctgatggcactccagctgctgctgtggcatagcgcactttggactgtgcaggaagcaaaactgctgctgttgaagctcctcctgctgaagctgcttcttctgaagttgctgcttctgaag

SEQ ID NO: 70876 - DNA, 153 bp, Artificial Sequence
  derived and/or modified sequence
atggccggccccgccacccagtccccaatgaaactcatggcgttgcagctgctcctgtggcactctgctttgtggacagtgcaggaggccaaactcctgctgcttaaacttctgctgctgaaacttcttttgctgaaactgctcttgttgaaa

SEQ ID NO: 70877 - DNA, 153 bp, Artificial Sequence
  derived and/or modified sequence
atggccgggccagctacccagagtcctatgaagctgatggccctgcagctgttgctgtggcatagcgctctatggaccgttcaggaggcgaagctgctgctcctcaagctgctgcttctgaagctgctgctcttgaaactcctgctgctgaaa

SEQ ID NO: 70878 - DNA, 153 bp, Artificial Sequence
  derived and/or modified sequence
atggcgggtcctgcgactcagtcgccgatgaagttgatggccctgcaacttcttctttggcattcagcactttggacggtgcaagaagcaaagctgttgctcctgaagctgcttcttcttaagctcctgttgctgaaactcctgcttcttaaa

SEQ ID NO: 70879 - DNA, 153 bp, Artificial Sequence
  derived and/or modified sequence
atggcgggacccgcaactcagagcccaatgaagttgatggcacttcaattgcttctgtggcactccgctctgtggacggtgcaggaggcaaaactcctgttgcttaaacttctgctgctgaagctgcttcttcttaaactcctcctgctgaaa

SEQ ID NO: 70880 - DNA, 153 bp, Artificial Sequence
  derived and/or modified sequence
atggctggacctgcgacccagtcgccgatgaagttgatggccttgcaacttttgctgtggcactccgccttgtggactgtgcaggaagcaaaattgctgctcctcaagctgttgctgcttaaactgctcctgctcaagctcctcctgctgaag

SEQ ID NO: 70881 - DNA, 153 bp, Artificial Sequence
  derived and/or modified sequence
atggccgggccagcaactcagtctcctatgaaactcatggcactgcagttactgctctggcactctgctctctggactgtgcaggaagcaaaactgctgttactgaaattgctcctcctgaaattgcttctgctcaaactattgctcctgaaa

SEQ ID NO: 70882 - DNA, 153 bp, Artificial Sequence
  derived and/or modified sequence
atggcaggccccgcgacgcagtcgccgatgaagctgatggccctgcagctgctgctgtggcactccgccttgtggaccgtgcaagaagcgaaactcctccttcttaagctgctgctgctcaaactgctgctgctgaaactgctgcttctgaag

SEQ ID NO: 70883 - DNA, 153 bp, Artificial Sequence
  derived and/or modified sequence
atggctggccctgccacccagagccccatgaagctcatggccctgcagctcctgttgtggcactcggccctctggaccgtgcaagaggccaagttgctgctcctgaaactgttgctgttgaagctgctcctgctgaaacttctgctgcttaag

SEQ ID NO: 70884 - DNA, 153 bp, Artificial Sequence
  derived and/or modified sequence
atggcgggacccgcgacacaatcccccatgaagctgatggcactgcagttactcctctggcactccgccttgtggaccgttcaggaggccaagttgcttctgttgaaactattgctgctgaagctgctgttactgaagctcctcctattgaag

SEQ ID NO: 70885 - DNA, 153 bp, Artificial Sequence
  derived and/or modified sequence
atggcagggcctgccacacagtcacctatgaagttgatggccttacagctccttttgtggcatagtgctttgtggaccgttcaggaggccaaattgcttttgcttaagctactgctcctgaagctgctcttgctgaagctgctcctcctcaaa

SEQ ID NO: 70886 - DNA, 153 bp, Artificial Sequence
  derived and/or modified sequence
atggcagggccggccacccagagccctatgaaactcatggccctccagctcctgctgtggcatagcgcactctggaccgtgcaggaggcaaaactgctgctgttgaaactattgctgctgaaactgctgctccttaaacttctgctgctgaaa

SEQ ID NO: 70887 - DNA, 153 bp, Artificial Sequence
  derived and/or modified sequence
atggcaggtcccgcaacgcagtcgccaatgaaacttatggcacttcaactcctgctctggcattccgcgctgtggaccgtccaggaagctaagctgctgctccttaagttgctcctcctcaaacttcttcttcttaagctcctgctgcttaaa

SEQ ID NO: 70888 - DNA, 153 bp, Artificial Sequence
  derived and/or modified sequence
atggccggccccgctacgcaaagtcccatgaagctaatggccctgcagctgctgctgtggcacagcgcactgtggaccgtccaagaggccaagctgcttctgctcaaactcctcctattgaagcttctactcctaaaactattgctcctaaaa

SEQ ID NO: 70889 - DNA, 153 bp, Artificial Sequence
  derived and/or modified sequence
atggccggcccagctactcagtcacccatgaagctcatggcgctgcagttgctcctatggcatagtgcgctgtggaccgtccaggaggccaagctgctgctgctgaagctcctcctgctgaagctcctgctgctcaagctgctactgctgaag

SEQ ID NO: 70890 - DNA, 153 bp, Artificial Sequence
  derived and/or modified sequence
atggctggacctgccactcagtctcccatgaaactgatggcacttcagttattgctgtggcattctgcgttgtggaccgtgcaggaggccaaattgcttctgctgaaactgttgctactgaaactgcttctgcttaaattgctcctgctgaaa

SEQ ID NO: 70891 - DNA, 153 bp, Artificial Sequence
  derived and/or modified sequence
atggctggacccgcaacccagtctccaatgaagctcatggccttacaactcctgctgtggcacagcgctctgtggacggtccaggaagccaaattgctcttgctgaagctcctcttactaaaactgctgctgctcaagctcctgcttctgaaa

SEQ ID NO: 70892 - DNA, 153 bp, Artificial Sequence
  derived and/or modified sequence
atggcgggtccggcgacgcaatcgccgatgaaactaatggcgctacaactattattatggcattcggcgctatggacggtacaagaagcgaaattactattactaaaattactactattaaaactattactattaaaattattactattaaaa

SEQ ID NO: 70893 - DNA, 153 bp, Artificial Sequence
  derived and/or modified sequence
atggcaggcccagccactcagagtcccatgaaactgatggccctccagctgttattgtggcatagtgcactgtggaccgtgcaggaggctaaactccttttgctgaagcttctgctcctgaagctgcttctgctcaagttgttgcttctgaaa

SEQ ID NO: 70894 - DNA, 153 bp, Artificial Sequence
  derived and/or modified sequence
atggctggtccagctactcagagcccaatgaaactgatggccttgcagttactgttgtggcattctgccctgtggactgttcaagaggctaaacttcttctgcttaaactactgctcctgaagttactccttctaaagctgctcctccttaag

SEQ ID NO: 70895 - DNA, 153 bp, Artificial Sequence
  derived and/or modified sequence
atggcgggacctgccacgcaatcgccaatgaaacttatggccctgcaactgttgctgtggcattcagcactttggaccgtccaggaagcgaaactccttctgctgaagctgctcctgcttaaacttctgctccttaagctgcttctgctgaaa

SEQ ID NO: 70896 - DNA, 153 bp, Artificial Sequence
  derived and/or modified sequence
atggcggggccggccacgcagtcccccatgaaacttatggcattgcaactccttctttggcactcggcactttggactgtgcaggaagcaaagctgctcctcctgaaactgctgctgctcaagctgcttctgctcaaattgttgttgctgaag

SEQ ID NO: 70897 - DNA, 153 bp, Artificial Sequence
  derived and/or modified sequence
atggcaggcccggctacgcagagtcccatgaagctgatggcactccaactgctgctgtggcatagtgctctctggacggttcaggaggctaaactcctgcttcttaagttgcttctgctgaaactgctgctcctgaagctcctcctgttgaag

SEQ ID NO: 70898 - DNA, 153 bp, Artificial Sequence
  derived and/or modified sequence
atggcggggcctgcaactcagagtccaatgaaactgatggccctccagctgctcctgtggcattccgcactgtggacagtacaggaagccaagttgctgctgctgaagctgctgctgctgaagttgctactactaaagttactgcttctgaaa

SEQ ID NO: 70899 - DNA, 153 bp, Artificial Sequence
  derived and/or modified sequence
atggccggcccagccacccaaagccctatgaagcttatggcccttcagctcctgctgtggcactccgccttatggacagtccaggaagctaagttgctcctgctcaagctgctcttactgaagctgctcctcctgaagctcctactacttaag

SEQ ID NO: 70900 - DNA, 153 bp, Artificial Sequence
  derived and/or modified sequence
atggcgggacccgctacccaaagccccatgaaactcatggccctccagttactgctgtggcactccgctttgtggaccgtgcaggaggcaaagctgttattgctgaagctcctgcttcttaagttacttctgttgaaactcctgctgctgaag

SEQ ID NO: 70901 - DNA, 153 bp, Artificial Sequence
  derived and/or modified sequence
atggccggacctgccacccagtctccgatgaagctgatggctctgcaacttctcctgtggcatagcgccttgtggacagtgcaagaggctaagctgctcctgcttaagctactcctccttaagctgctgcttcttaaactgctgcttctgaaa

SEQ ID NO: 70902 - DNA, 153 bp, Artificial Sequence
  derived and/or modified sequence
atggccggacctgcaactcagtcgccgatgaagctcatggcactgcaactgctcctctggcactcagccttgtggaccgtgcaggaagcaaaactgcttttgcttaagctcctgctcctcaaactgctgctgctgaagttgctcctgctgaag

SEQ ID NO: 70903 - DNA, 153 bp, Artificial Sequence
  derived and/or modified sequence
atggcagggcccgctactcagagcccgatgaagctgatggcactgcagctcctgctgtggcactccgccctgtggactgtgcaggaggcgaaactgctgttgttgaagctgctcctcctgaagttgctgctccttaagctgcttctgctcaag

SEQ ID NO: 70904 - DNA, 153 bp, Artificial Sequence
  derived and/or modified sequence
atggcaggcccagccactcaaagtcccatgaaactcatggccttgcaattacttctttggcatagcgctctttggaccgtgcaagaggccaaattgctgctcctgaaacttctcctccttaagcttttgttactgaagctgctgctgctgaaa

SEQ ID NO: 70905 - DNA, 153 bp, Artificial Sequence
  derived and/or modified sequence
atggcgggaccggccacgcagagcccgatgaagctcatggcacttcagctcttgctgtggcactccgccctttggactgtgcaagaagccaaactgctccttttgaaactgctcctcctcaaactccttctgctgaagttgctgctgctgaaa

SEQ ID NO: 70906 - DNA, 153 bp, Artificial Sequence
  derived and/or modified sequence
atggccggcccagcgacacaatctccgatgaaacttatggcactgcagcttctcttgtggcatagcgctctctggactgtacaagaggctaagctgcttcttctcaaactcttgctcctgaaactcttgctgctcaagttgttgttgttgaaa

SEQ ID NO: 70907 - DNA, 153 bp, Artificial Sequence
  derived and/or modified sequence
atggctggacctgccacccagtcccccatgaaactgatggcacttcaactgctcctgtggcattcggcactctggactgtgcaagaagcgaagctcttgttgcttaaactcctgctgctgaagctccttcttttgaagctgttgctgctcaag

SEQ ID NO: 70908 - DNA, 153 bp, Artificial Sequence
  derived and/or modified sequence
atggccggaccagcaacccagtccccgatgaagttgatggccctgcaattgttgctttggcattccgctctttggaccgtccaagaagcgaagctgctgctgcttaagctgcttctgctcaaactcctccttttgaaactccttctgcttaag

SEQ ID NO: 70909 - DNA, 153 bp, Artificial Sequence
  derived and/or modified sequence
atggctggtcccgcaactcagagccctatgaaacttatggcgctgcagctcctgttgtggcatagtgccttatggacggtccaagaagccaaactgctgctgctgaagttgctgctccttaaactgttgctgttaaagctactactcctgaag

SEQ ID NO: 70910 - DNA, 153 bp, Artificial Sequence
  derived and/or modified sequence
atggcagggcctgctacacagtctccaatgaaacttatggctctccaactacttctctggcactctgctctctggactgttcaggaagccaaacttcttctattaaaactgttactgttaaaactcctgctcttgaagctcctattgctaaaa

SEQ ID NO: 70911 - DNA, 153 bp, Artificial Sequence
  derived and/or modified sequence
atggcgggtcctgctacccaatcacctatgaagctgatggcactccagctgcttctttggcacagcgccttgtggacagtccaggaagcaaagctactcctgctgaagctattacttcttaaactcctgctgttgaagctgctcctcttgaaa

SEQ ID NO: 70912 - DNA, 153 bp, Artificial Sequence
  derived and/or modified sequence
atggctgggccagccacacaaagccccatgaagctaatggcgttgcaactgctcctctggcactccgccttgtggaccgtgcaggaggccaagttactcctgcttaagttgcttctgcttaaactcctgctcttgaaactgctcctactgaag

SEQ ID NO: 70913 - DNA, 153 bp, Artificial Sequence
  derived and/or modified sequence
atggccggaccggcgactcagtctcccatgaaactcatggcgctgcagttgcttttgtggcactctgcgctttggacggtgcaggaagccaagctgctcctcctgaagctcctactgctgaaactgctgctgctgaagttgttgttgctgaaa

SEQ ID NO: 70914 - DNA, 153 bp, Artificial Sequence
  derived and/or modified sequence
atggccggacccgcaacacagtcaccaatgaaactcatggcattacagcttctcctgtggcactcagccctttggacagtgcaggaagccaaactactcttgctgaagctgttgctgcttaaactgttactcttaaaactcctcttactgaag

SEQ ID NO: 70915 - DNA, 153 bp, Artificial Sequence
  derived and/or modified sequence
atggctgggcctgccacgcaatctcctatgaagcttatggccctccagctgctgctgtggcatagtgctttgtggacagtgcaagaggctaaactactgctcctaaaactgctgctgttgaagctcctgcttctcaaactactgctcttgaaa

SEQ ID NO: 70916 - DNA, 153 bp, Artificial Sequence
  derived and/or modified sequence
atggccggaccggcaactcagtccccaatgaaactgatggctttgcagttgctgctgtggcactcggcgctttggaccgtgcaagaagccaagctcctgctcctgaagctgctgcttctgaagttgctcctgctgaaactcctcctgctcaag

SEQ ID NO: 70917 - DNA, 153 bp, Artificial Sequence
  derived and/or modified sequence
atggctgggccagcaactcaatcgcctatgaaactgatggcgctccaactgctgctgtggcacagcgcactgtggaccgtccaggaagcaaagctcctcttgcttaaacttcttctccttaaactccttcttctgaaattgctgctgctgaag

SEQ ID NO: 70918 - DNA, 153 bp, Artificial Sequence
  derived and/or modified sequence
atggccggaccagcgactcaaagccctatgaagctgatggccttgcagctgctgttgtggcattctgcactgtggaccgtgcaggaagctaaactccttttgctgaagttgctgctgcttaagctcctgctgctcaagctcctcttgctgaaa

SEQ ID NO: 70919 - DNA, 153 bp, Artificial Sequence
  derived and/or modified sequence
atggctggacctgctacacagtcaccaatgaagctgatggcgctgcagctcctcttatggcacagcgctttatggactgtccaggaagccaagttgctgttgctaaagcttttgcttttaaagttactgctcctcaagctgctgctcctgaag

SEQ ID NO: 70920 - DNA, 153 bp, Artificial Sequence
  derived and/or modified sequence
atggctggccctgcgacccagagcccgatgaagttgatggccttgcagctgctgttgtggcattcggccctgtggactgtgcaagaagcaaaactcctgctgctgaagctccttctcctgaagctgctccttctgaaactcttgctgttgaag

SEQ ID NO: 70921 - DNA, 153 bp, Artificial Sequence
  derived and/or modified sequence
atggcgggacctgcaactcagtcacctatgaaactgatggcattgcaactgctgctttggcatagcgctctttggactgtccaagaagcaaagctcctcctgctcaagttgctcttgcttaaactgcttctgcttaagttgctcctgctgaag

SEQ ID NO: 70922 - DNA, 153 bp, Artificial Sequence
  derived and/or modified sequence
atggcagggccagctacccagtcacccatgaaactgatggcattgcagctacttctgtggcacagtgccctctggaccgtgcaggaagctaagttgctcctgttgaagctgctgcttctgaagctgttgctcctgaaactgctgctgctcaag

SEQ ID NO: 70923 - DNA, 153 bp, Artificial Sequence
  derived and/or modified sequence
atggccggccctgcaacccagtcccctatgaagctcatggcactgcagctgttgctgtggcactccgctctgtggacagttcaggaagctaaacttctcctgctgaagcttctgctgctaaaattactgttattgaagctcctgcttctaaag

SEQ ID NO: 70924 - DNA, 153 bp, Artificial Sequence
  derived and/or modified sequence
atggccgggcccgcgacacagtctcctatgaagctaatggcattgcagctcttactgtggcattcggccctgtggaccgtgcaagaggcaaagctgttactattgaagcttctgttgttgaagctgctgctcctcaaactgttgctcctcaag

SEQ ID NO: 70925 - DNA, 153 bp, Artificial Sequence
  derived and/or modified sequence
atggctggtccggcaacccagtccccgatgaaactgatggcgctgcaacttcttctgtggcattcggcactgtggaccgtgcaagaagcaaagctcctccttctcaaacttttgctgctgaaactgcttctgctcaaacttctgcttctgaag

SEQ ID NO: 70926 - DNA, 153 bp, Artificial Sequence
  derived and/or modified sequence
atggccggccccgcaacccaaagccccatgaagctcatggccttacagctcctcctgtggcactccgctttgtggacagtgcaggaggcaaaacttcttctacttaagctgttgttactgaagttgcttttgctgaagttgctgttgctgaaa

SEQ ID NO: 70927 - DNA, 153 bp, Artificial Sequence
  derived and/or modified sequence
atggcaggtccggccactcaatccccaatgaagttgatggcactgcagctgctcctgtggcacagtgccctgtggaccgtccaggaggccaagctgctgctcctgaaattgctccttcttaagctgctgctgttgaaacttctgctgctgaag

SEQ ID NO: 70928 - DNA, 153 bp, Artificial Sequence
  derived and/or modified sequence
atggcaggcccagccacacagtcccccatgaaactgatggcgctgcagctgctcttgtggcactcagccctgtggacggtgcaagaagccaaattgttactgctcaaacttcttcttctgaagcttctgctcctaaagctcctgctgctcaag

SEQ ID NO: 70929 - DNA, 153 bp, Artificial Sequence
  derived and/or modified sequence
atggccggcccagcgacccaatcaccaatgaagctcatggccctgcaactgcttctgtggcattccgccctttggactgtgcaagaagcaaaactgcttctgcttaaactcctgctcctgaagctgttgctgcttaaacttcttctgctgaag

SEQ ID NO: 70930 - DNA, 153 bp, Artificial Sequence
  derived and/or modified sequence
atggccggacctgcaacccagtcgcctatgaaactgatggcacttcaactcctgctgtggcactcggccctgtggactgtccaagaggcaaaactgctgctccttaagctgctgcttcttaaacttcttcttctcaagttgcttctgcttaag

SEQ ID NO: 70931 - DNA, 153 bp, Artificial Sequence
  derived and/or modified sequence
atggccggacctgcgactcagagccccatgaaacttatggcacttcagctcctcctctggcactccgccctttggaccgtgcaagaagcgaagctgcttctgctcaagctcctgctgctcaagctgctgctgcttaaacttcttcttctgaag

SEQ ID NO: 70932 - DNA, 153 bp, Artificial Sequence
  derived and/or modified sequence
atggcaggtcctgcaacgcagtccccaatgaagttaatggcgctgcaactgctactctggcactcggctttgtggacagtccaagaggctaaactgctgcttcttaaattgctgcttcttaaactactattactcaaattgttgctgttgaaa

SEQ ID NO: 70933 - RNA, 299 nt, Artificial Sequence
  derived and/or modified sequence
gggaaauaagagagaaaagaagaguaagaagaaauauaagagccaccauggccggacccgcgacgcagucaccgaugaagcucauggcucuucaguugcuccucuggcacucggcgcuguggacagugcaagaggcaaaacuucuccugcugaagcuccuucuguugaaauuguugcuucucaaguugcuuuugcugaaauaaugagcugccuucugcggggcuugccuucuggccaugcccuucuucucucccuugcaccuguaccucuuggucuuugaauaaagccugaguaggaag

SEQ ID NO: 70934 - protein, 582 aa, Artificial Sequence
  derived and/or modified sequence
MDFLLALVLVSSLYLQAAAEFDGRWPRQIVSSIGLCRYGGRIDCCWGWARQSWGQCQPFYVLRQRIARIRCQLKAVCQPRCKHGECIGPNKCKCHPGYAGKTCNQDLNECGLKPRPCKHRCMNTYGSYKCYCLNGYMLMPDGSCSSALTCSMANCQYGCDVVKGQIRCQCPSPGLQLAPDGRTCVDVDECATGRASCPRFRQCVNTFGSYICKCHKGFDLMYIGGKYQCHDIDECSLGQYQCSSFARCYNIRGSYKCKCKEGYQGDGLTCVYIPKVMIEPSGPIHVPKGNGTILKGDTGNNNWIPDVGSTWWPPKTPYIPPIITNRPTSKPTTRPTPKPTPIPTPPPPPPLPTELRTPLPPTTPERPTTGLTTIAPAASTPPGGITVDNRVQTDPQKPRGDVFIPRQPSNDLFEIFEIERGVSADDEAKDDPGVLVHSCNFDHGLCGWIREKDNDLHWEPIRDPAGGQYLTVSAAKAPGGKAARLVLPLGRLMHSGDLCLSFRHKVTGLHSGTLQVFVRKHGAHGAALWGRNGGHGWRQTQITLRGADIKSVVFKGEKRRGHTGEIGLDDVSLKKGHCSEER

SEQ ID NO: 70935 - DNA, 1749 bp, Artificial Sequence
  derived and/or modified sequence
atggactttcttctggctctggtgctggtctcttccctgtacctacaggctgcggctgagtttgacggccgttggccgagacagattgttagctcaattggcctgtgccggtatggaggaagaatcgactgttgttgggggtgggcccgacaaagttggggacagtgccagcccttctatgttttgcggcagcgcatcgcccgaatccgctgccaattgaaagccgtgtgtcagccgcgatgtaaacacggtgaatgtatcgggccaaataaatgtaagtgccaccccggatatgccggaaaaacttgcaatcaggatctgaacgagtgtggcctcaaaccaaggccgtgtaagcacaggtgcatgaacacatatggcagctataaatgctattgcctgaatggctatatgctcatgcccgatggaagttgtagctctgctctgacttgtagcatggccaactgccagtatggctgcgatgtcgtcaagggacagataaggtgtcagtgcccatccccaggactgcagctagcccctgatgggaggacatgcgtcgacgtagatgagtgcgctacagggagggcttcctgcccaaggttcaggcagtgcgtgaatacgtttggatcgtatatttgtaagtgccataagggctttgacctcatgtatatcggtggcaaatatcagtgtcatgatatcgacgaatgctcactgggccagtaccagtgttcttcatttgcccgttgttataatatcagaggcagctataagtgcaaatgcaaagagggataccagggggatggactgacatgtgtttacatccccaaggtcatgattgagccaagcgggcctatccacgtcccaaaaggaaacggcactatactcaaaggtgatactggtaataataattggatacccgatgtcggttctacttggtggccaccaaaaacaccgtatataccgcctatcatcaccaacagaccaacctctaaacccactacacgcccaacgcctaaaccaactcctatccccacccctccaccaccaccgcctctgcccaccgagcttcgaacgcctctgcccccaaccactccagagaggccaaccacgggtttgactaccattgctccggcagcctctaccccccctggtgggattaccgtggacaaccgggtgcagaccgacccccaaaaaccacgtggggacgtcttcattcccagacaaccaagtaacgatttgtttgagattttcgaaatcgaacgtggtgtcagcgctgacgacgaagccaaagacgaccctggcgttctagtgcatagttgtaatttcgaccacgggctgtgcggatggattcgggagaaggacaacgacctgcattgggagccaattcgtgatccggcaggaggacaataccttacagtgagtgccgctaaggcacccggtggcaaggcagccaggcttgtcttgcccctcggacgactcatgcattccggggacctctgtttgagcttcagacacaaggtcaccggcctgcactccggaaccctccaggtgtttgtaagaaaacacggcgcacacggcgcagccctgtgggggaggaacggtggtcacggctggcgccagacccagatcaccctaaggggagcagacattaagagcgttgtttttaagggcgaaaaacgaagggggcacaccggagagatcggacttgatgatgtgagcctgaagaaaggacattgcagcgaagagagatag

SEQ ID NO: 70936 - DNA, 1749 bp, Artificial Sequence
  derived and/or modified sequence
atggatttcctccttgccctcgttcttgtgtcatctctctacctgcaggccgcagcggaatttgatggcagatggcctcgacaaattgtgtcttcgattggcttgtgcaggtatggcggccggatagactgttgttgggggtgggctcggcagtcttggggccagtgccaaccattttatgtactccggcagcgtatagctagaatcaggtgtcagctgaaggcagtctgtcagccaagatgtaagcacggggagtgtattggtcccaataaatgcaaatgtcatcctggctatgccggcaaaacctgcaatcaggacctcaatgaatgcgggttaaaacctcggccatgcaagcaccgatgtatgaacacctatggatcatataagtgctactgtcttaacgggtatatgcttatgcccgacggctcctgctctagcgccttgacatgctccatggccaactgtcagtacggttgcgatgtggtcaagggtcagatccgttgccagtgccccagtcctggcttacagttagctcctgacggccgcacatgtgtagatgtggatgaatgcgctacaggcagagcttcttgcccacgatttcgtcaatgcgtcaacacttttggttcctatatttgcaagtgccataagggattcgatcttatgtacattgggggcaaataccagtgccatgatatcgatgaatgttcacttggacagtaccaatgctccagctttgcgcgctgctataacataaggggcagttacaagtgcaagtgtaaagagggctaccagggcgacggtttgacatgtgtctacattccaaaagtgatgatagagccttccggccccattcatgtaccaaagggcaatggaactatcttgaaaggagatactggtaacaataattggataccagacgttggcagcacctggtggccacctaaaacaccttatattcccccaattattacaaaccgcccgacctccaaacctactacgagaccaactccgaagccgactccaatccccactcccccaccccctccacctttgcctacagaactaagaacccctctccctccaactacgcccgagcggccaacgactggactcacaacaattgcccccgcagcatccacaccccctggtgggattacggtggataatagggtgcagactgacccccaaaaaccccgcggagacgtgttcattccccggcagccaagtaatgatttgttcgagatctttgaaattgagagaggagtgtccgctgacgatgaagctaaagacgaccccggcgtattggtccacagctgcaactttgatcacggcttgtgtggctggatccgggaaaaagataatgatctgcactgggaacctatcagagaccctgccggcggacagtacctaaccgtttccgctgccaaagcccctggtggaaaggcagcccgcttggttctcccgctgggacgcttaatgcattcaggagacctctgcctctctttccgtcacaaagtcacagggttacactctggcaccctacaagtgtttgtgcggaagcacggggcccatggagctgcactctggggcagaaacggcggccacggctggagacagactcagattaccttacggggcgccgacatcaagtctgtggtctttaagggggaaaaacgcagaggtcataccggcgagattggcctggacgatgtgtccctgaagaagggccattgtagtgaagaaaggtag

SEQ ID NO: 70937 - DNA, 2419 bp, Artificial Sequence
  derived and/or modified sequence
tagaagggagcgggagggggctccgggcgccgcgcagcagacctgctccggccgcgcgcctcgccgctgtcctccgggagcggcagcagtagcccgggcggcgagggctgggggttcctcgagactctcagaggggcgcctcccatcggcgcccaccaccccaacctgttcctcgcgcgccactgcgctgcgccccaggacccgctgcccaacatggattttctcctggcgctggtgctggtatcctcgctctacctgcaggcggccgccgagttcgacgggaggtggcccaggcaaatagtgtcatcgattggcctatgtcgttatggtgggaggattgactgctgctggggctgggctcgccagtcttggggacagtgtcagcctttctacgtcttaaggcagagaatagccaggataaggtgccagctcaaagctgtgtgccaaccacgatgcaaacatggtgaatgtatcgggccaaacaagtgcaagtgtcatcctggttatgctggaaaaacctgtaatcaagatctaaatgagtgtggcctgaagccccggccctgtaagcacaggtgcatgaacacttacggcagctacaagtgctactgtctcaacggatatatgctcatgccggatggttcctgctcaagtgccctgacctgctccatggcaaactgtcagtatggctgtgatgttgttaaaggacaaatacggtgccagtgcccatcccctggcctgcagctggctcctgatgggaggacctgtgtagatgttgatgaatgtgctacaggaagagcctcctgccctagatttaggcaatgtgtcaacacttttgggagctacatctgcaagtgtcataaaggcttcgatctcatgtatattggaggcaaatatcaatgtcatgacatagacgaatgctcacttggtcagtatcagtgcagcagctttgctcgatgttataacatacgtgggtcctacaagtgcaaatgtaaagaaggataccagggtgatggactgacttgtgtgtatatcccaaaagttatgattgaaccttcaggtccaattcatgtaccaaagggaaatggtaccattttaaagggtgacacaggaaataataattggattcctgatgttggaagtacttggtggcctccgaagacaccatatattcctcctatcattaccaacaggcctacttctaagccaacaacaagacctacaccaaagccaacaccaattcctactccaccaccaccaccacccctgccaacagagctcagaacacctctaccacctacaaccccagaaaggccaaccaccggactgacaactatagcaccagctgccagtacacctccaggagggattacagttgacaacagggtacagacagaccctcagaaacccagaggagatgtgttcattccacggcaaccttcaaatgacttgtttgaaatatttgaaatagaaagaggagtcagtgcagacgatgaagcaaaggatgatccaggtgttctggtacacagttgtaattttgaccatggactttgtggatggatcagggagaaagacaatgacttgcactgggaaccaatcagggacccagcaggtggacaatatctgacagtgtcggcagccaaagccccagggggaaaagctgcacgcttggtgctacctctcggccgcctcatgcattcaggggacctgtgcctgtcattcaggcacaaggtgacggggctgcactctggcacactccaggtgtttgtgagaaaacacggtgcccacggagcagccctgtggggaagaaatggtggccatggctggaggcaaacacagatcaccttgcgaggggctgacatcaagagcgtcgtcttcaaaggtgaaaaaaggcgtggtcacactggggagattggattagatgatgtgagcttgaaaaaaggccactgctctgaagaacgctaacaactccagaactaacaatgaactcctatgttgctctatcctctttttccaattctcatcttctctcctcttctcccttttatcaggcctaggagaagagtgggtcagtgggtcagaaggaagtctatttggtgacccaggtttttctggcctgcttttgtgcaatcccaatgaacagtgataccctccttgaaatacaggggcatcgcagacacatcaaagccatctgtgggtgttgccttccatcctgtgtctctttcaggaaggcattcagcatgcgtgagccataccatcctccatcctgattacaaggtgctccttgtagcaaattatgagagtgagttacgggagcagtttttaaaagaaatctttgcagatggctatgatgttatgtgttcggtgttgtaccatgagtagtattgacttcccttgagatatgatgtacaatgtgcttgtg

SEQ ID NO: 70938 - DNA, 1749 bp, Artificial Sequence
  derived and/or modified sequence
atggatttcttgctcgccctagtgttggtctcatcactgtatcttcaagccgctgccgaatttgacggaagatggcctagacagatcgtgtcgagcatcggactttgtcgatatgggggtagaatagattgttgttggggatgggctcgacagagttggggacagtgccagccattctacgtattacgtcagcgtatcgctcgcataaggtgccaactaaaggcagtgtgtcagccaagatgtaaacacggtgaatgcattggaccaaataagtgcaagtgccacccaggttacgctggcaaaacttgcaaccaggatctgaacgagtgtggcctcaaacctcgcccatgcaaacaccgttgcatgaatacctacgggagttataagtgctattgtcttaacggatatatgctgatgccagacggaagttgttcatccgcgctaacatgctcaatggcgaattgccaatacggctgcgacgtggtcaaaggacagataagatgccaatgcccatcacccggattgcagctcgctccagatggtcgcacgtgcgtggacgtcgatgaatgtgcaacaggacgcgcctcctgcccacggtttcgccaatgcgttaacacttttggtagctacatctgtaaatgtcacaaaggcttcgaccttatgtatataggcggcaaataccagtgtcacgatattgacgagtgtagtctgggccaataccagtgctcttcctttgcccggtgctataacataagaggcagctacaaatgtaagtgtaaagaaggttatcagggcgacggcctgacttgcgtgtacatcccaaaagttatgatcgaaccaagcggcccaattcacgtgccaaagggaaacggcactattttgaaaggtgacaccggcaacaataactggattccagacgtggggtctacgtggtggccccccaaaactccttacatccctccgataattacgaaccgtccaacttctaaaccaacaacccgccctactcctaaacctacgcctattcctactcccccacctccccctccattacccactgaactcaggacccccctgcccccaaccacccccgaaagacctaccacaggactgacaacgatagccccagcagccagcacaccaccaggaggaataactgttgacaatagggtgcagaccgaccctcagaagccaagaggtgacgtgttcattccccggcagccaagtaatgatttgttcgagatctttgaaattgagagaggagtgtccgctgacgatgaagctaaagacgaccccggcgtattggtccacagctgcaactttgatcacggcttgtgtggctggatccgggaaaaagataatgatctgcactgggaacctatcagagaccctgccggcggacagtacctaaccgtttccgctgccaaagcccctggtggaaaggcagcccgcttggttctcccgctgggacgcttaatgcattcaggagacctctgcctcagcttccggcacaaggtaactggattacacagcggaacccttcaggtgtttgtgcgaaaacacggggcccatggagctgcactgtggggcagaaatggcggacacggctggagacaaacccagattacacttaggggcgctgatattaagagcgtggtcttcaagggcgaaaaaaggaggggccacacgggcgagattgggctggatgacgtgtcactgaaaaaggggcattgcagcgaggagcgctag

SEQ ID NO: 70939 - DNA, 1749 bp, Artificial Sequence
  derived and/or modified sequence
atggacttcctgctggccctggtgctggtgagcagcctgtacctgcaggccgccgccgagttcgacggcagatggcccagacagatcgtgagcagcatcggcctgtgcagatacggcggcagaatcgactgctgctggggctgggccagacagagctggggccagtgccagcccttctacgtgctgagacagagaatcgccagaatcagatgccagctgaaggccgtgtgccagcccagatgcaagcacggcgagtgcatcggccccaacaagtgcaagtgccaccccggctacgccggcaagacctgcaaccaggacctgaacgagtgcggcctgaagcccagaccctgcaagcacagatgcatgaacacctacggcagctacaagtgctactgcctgaacggctacatgctgatgcccgacggcagctgcagcagcgccctgacctgcagcatggccaactgccagtacggctgcgacgtggtgaagggccagatcagatgccagtgccccagccccggcctgcagctggcccccgacggcagaacctgcgtggacgtggacgagtgcgccaccggcagagccagctgccccagattcagacagtgcgtgaacaccttcggcagctacatctgcaagtgccacaagggcttcgacctgatgtacatcggcggcaagtaccagtgccacgacatcgacgagtgcagcctgggccagtaccagtgcagcagcttcgccagatgctacaacatcagaggcagctacaagtgcaagtgcaaggagggctaccagggcgacggcctgacctgcgtgtacatccccaaggtgatgatcgagcccagcggccccatccacgtgcccaagggcaacggcaccatcctgaagggcgacaccggcaacaacaactggatccccgacgtgggcagcacctggtggccccccaagaccccctacatcccccccatcatcaccaacagacccaccagcaagcccaccaccagacccacccccaagcccacccccatccccaccccccccccccccccccccctgcccaccgagctgagaacccccctgccccccaccacccccgagagacccaccaccggcctgaccaccatcgcccccgccgccagcaccccccccggcggcatcaccgtggacaacagagtgcagaccgacccccagaagcccagaggcgacgtgttcatccccagacagcccagcaacgacctgttcgagatcttcgagatcgagagaggcgtgagcgccgacgacgaggccaaggacgaccccggcgtgctggtgcacagctgcaacttcgaccacggcctgtgcggctggatcagagagaaggacaacgacctgcactgggagcccatcagagaccccgccggcggccagtacctgaccgtgagcgccgccaaggcccccggcggcaaggccgccagactggtgctgcccctgggcagactgatgcacagcggcgacctgtgcctgagcttcagacacaaggtgaccggcctgcacagcggcaccctgcaggtgttcgtgagaaagcacggcgcccacggcgccgccctgtggggcagaaacggcggccacggctggagacagacccagatcaccctgagaggcgccgacatcaagagcgtggtgttcaagggcgagaagagaagaggccacaccggcgagatcggcctggacgacgtgagcctgaagaagggccactgcagcgaggagagatag

SEQ ID NO: 70940 - DNA, 1749 bp, Artificial Sequence
  derived and/or modified sequence
atggacttcctactggcactggttctggtttcttctttatacctgcaagctgcagcagaatttgacggaagatggccgcggcaaatagtgtcaagtattggactgtgcagatacggtgggagaatcgattgctgctggggatgggccagacagagttggggtcaatgtcagcccttttatgtgctccggcagagaattgctagaatcagatgtcagctcaaggccgtgtgtcagccaaggtgtaagcacggagagtgtatagggcccaataaatgtaaatgccaccctggctacgcggggaagacttgtaaccaagatttaaatgagtgtggtttgaagccaaggccttgtaagcaccgctgtatgaacacgtacggctcttataaatgctactgtttgaatggctacatgctgatgcccgacggctcatgttcttctgccctcacttgctctatggcgaactgccaatacggttgtgatgtggtgaaagggcagataagatgccagtgcccaagtcccggcctccaacttgcccctgatggacgaacatgcgtcgacgtggatgagtgcgcgacaggcagagccagctgtccacggttccggcaatgtgttaacaccttcggtagctacatatgcaagtgtcataaaggattcgatctcatgtacattggaggaaaatatcagtgtcacgacatcgatgaatgctcacttggtcagtaccaatgcagttctttcgcacggtgttacaatatccgtggatcttacaaatgtaagtgcaaagagggctaccagggggatggattaacttgcgtctatatcccaaaggtcatgatcgagccatctggccccatccatgtgccgaaggggaatggaactattctaaaaggggacacaggcaacaataattggattccagatgttggttccacatggtggccacccaagaccccttacattccccctattatcacgaatcggccgacatccaagcctacaacccgcccaaccccaaaacccacaccaattccgactccacctccccctcctcccctcccaactgagctgagaaccccactgccacctaccacacctgagaggcccacaacaggcctgacaactatcgccccggctgcatctactccccctggaggaatcacagtggacaatcgggtgcagacagatcctcaaaaacctaggggcgatgtgttcattccccggcagccttccaacgatttgttcgagatcttcgaaatcgagcgcggggtgtcagctgacgatgaggcgaaggacgaccctggcgtcctcgttcattcatgtaatttcgatcacgggctttgtggctggattagggagaaggacaatgacctgcattgggagcctatacgcgaccctgcaggcggccagtatctcacagtcagcgcagcaaaggccccggggggcaaggctgccaggctggttttacccctgggcagattgatgcatagcggggatttgtgtttgtccttcaggcataaggttacaggtctgcattctggtacactccaggtctttgtgcggaaacatggggcccatggtgccgctctctgggggcgcaacggcggtcatggttggagacagactcagattactctccgcggcgccgatataaagtcagtcgtatttaaaggcgaaaaacgtcggggacataccggcgagatcgggctggacgacgtctccctgaagaaaggtcactgttccgaggagagatag

SEQ ID NO: 70941 - DNA, 1749 bp, Artificial Sequence
  derived and/or modified sequence
atggacttcctgctggccctggtgctggtgagcagcctgtacctgcaggccgctgctgagtttgatggccgctggccccggcagatcgtgagcagcatcggcctgtgccgctatggaggaagaattgactgctgctggggctgggcccggcagagctggggccagtgccagcccttctacgtgctgcggcagagaattgcccgcatccgctgccagctgaaggctgtgtgccagccccgctgcaagcatggagaatgtattggccccaacaagtgcaagtgccaccctggctacgccggcaagacctgcaaccaggacctgaatgaatgtggcctgaagccccggccctgcaagcaccgctgcatgaacacctacggcagctacaagtgctactgcctgaatggctacatgctgatgccagatggcagctgcagcagcgccctgacctgcagcatggccaactgccagtatggctgtgatgtggtgaagggccagatccgctgccagtgccccagccctggcctgcagctggccccagatggccgcacctgtgtggatgtggatgaatgtgccaccggccgggccagctgcccccgcttccggcagtgtgtgaacaccttcggcagctacatctgcaagtgccacaagggctttgacctgatgtacatcggcggcaagtaccagtgccacgacattgatgagtgcagcctgggccagtaccagtgcagcagctttgcccgctgctacaacatccggggcagctacaagtgcaagtgcaaggagggctaccagggagatggcctgacctgtgtgtacatccccaaggtgatgattgagcccagcggccccatccacgtgcccaagggaaatggcaccatcctgaagggggacaccggcaacaacaactggatcccagatgtgggcagcacctggtggccacccaagaccccctacatcccccccatcatcaccaaccggcccaccagcaagcccaccacccggcccacccccaagcccacccccatccccaccccacctcctcctccacccctgcccacagagctgcggacccccctgccccccaccaccccagagcggcccaccaccggcctgaccaccatcgccccagctgccagcaccccacctgggggcatcaccgtggacaacagagtgcagacagacccccagaagcccagaggagatgtgttcatcccccggcagcccagcaatgacctgtttgagatctttgaaattgaaagaggagtgtctgcagatgatgaggccaaggatgaccccggggtgctggtgcacagctgcaactttgaccacggcctgtgtggctggatccgggagaaggacaatgacctgcactgggagcccatccgggaccctgctgggggccagtacctgactgtgtctgctgccaaggcccctgggggcaaggccgcccggctggtgctgcccctgggccgcctgatgcacagcggggacctgtgcctgtccttccgccacaaggtgacaggcctgcacagcggcaccctgcaggtgtttgtgaggaagcatggagcccacggggccgccctgtggggcagaaatggaggccacggctggaggcagacccagatcaccctgcggggagctgacatcaagtctgtggtgttcaagggggagaagagaagaggccacactggagagatcggcctggatgatgtgtccctgaagaagggccactgcagcgaggagaggtag

SEQ ID NO: 70942 - DNA, 1749 bp, Artificial Sequence
  derived and/or modified sequence
atggacttcctgctggccctggtgctggtgagcagcctgtacctgcaggcggccgctgaattcgacggcagatggccgcgccagattgtcagtagtattggtctgtgccggtatggcggtagaatcgattgctgttggggttgggccagacagtcatggggtcagtgccagccattctacgtgttaaggcagcgtattgcccgcattcgatgtcagttgaaggcagtttgtcagccacgctgtaagcatggtgaatgcatcggacccaataaatgtaagtgtcaccctggctatgcaggtaaaacctgcaatcaagaccttaatgaatgcgggctaaagccccgcccttgcaagcatcgctgtatgaacacatacggcagttacaagtgttactgtctaaacggctacatgctaatgccagatgggtcttgcagctcagcgctcacctgtagcatggctaattgtcaatacggatgcgacgtcgtgaaaggtcagattagatgccaatgcccaagccccgggctccagctggcccccgatggccggacctgcgtcgatgtggacgagtgcgcaaccggtcgcgccagctgtccaaggtttcgacagtgtgtcaacaccttcgggtcctacatttgtaagtgtcataagggatttgatctgatgtacatcggtggaaaataccaatgccacgacattgatgagtgttcattgggacagtatcagtgctcatcattcgctcgctgttataatataagggggtcctataaatgcaagtgtaaagaaggataccaaggcgacgggttgacgtgtgtgtatatccctaaggtaatgattgagccatcgggacctatccacgttcctaagggcaacggcacaatcctgaaaggcgatacagggaacaacaattggattcccgatgtcgggagtacatggtggccccctaaaacaccctacatccctcccattattacgaatcggccaacttcaaagccaaccacacggccaacccctaaacctacccctattcctactccacccccgcctccacctctgccaacagaattacgcactcccttacctcctactactcctgaaagacccacaacaggcctcaccacaatcgctccggccgccagcacacctcccgggggaatcaccgtggacaacagggtccagaccgatccacagaaacctcggggcgatgtgtttattcctagacagcccagcaacgatttgtttgagatcttcgagattgagcgaggcgtctctgcggacgatgaggccaaagatgaccccggcgttctcgtccatagctgtaattttgaccatggcctgtgcgggtggattcgagagaaggataatgatctgcactgggagcccatccgggaccctgcaggaggccagtatcttacagtctcagcggctaaggctcccggtggcaaggccgcccggctggtccttccactgggaaggctgatgcatagcggtgacctctgcctgagctttaggcacaaagtgaccgggctgcattctggcactctgcaggtgttcgtgaggaaacacggagcccacggcgccgcactatggggccgcaatgggggacacggatggcggcagacccagattacgttacgcggggctgacattaaaagcgtagtcttcaaaggagagaagcggcgcggccataccggagagataggcctcgacgatgtcagtctgaagaaaggacactgctcagaggaacgctag

SEQ ID NO: 70943 - RNA, 1749 nt, Artificial Sequence
  derived and/or modified sequence
auggauuuccuccuugcccucguucuugugucaucucucuaccugcaggccgcagcggaauuugauggcagauggccucgacaaauugugucuucgauuggcuugugcagguauggcggccggauagacuguuguugggggugggcucggcagucuuggggccagugccaaccauuuuauguacuccggcagcguauagcuagaaucaggugucagcugaaggcagucugucagccaagauguaagcacggggaguguauuggucccaauaaaugcaaaugucauccuggcuaugccggcaaaaccugcaaucaggaccucaaugaaugcggguuaaaaccucggccaugcaagcaccgauguaugaacaccuauggaucauauaagugcuacugucuuaacggguauaugcuuaugcccgacggcuccugcucuagcgccuugacaugcuccauggccaacugucaguacgguugcgauguggucaagggucagauccguugccagugccccaguccuggcuuacaguuagcuccugacggccgcacauguguagauguggaugaaugcgcuacaggcagagcuucuugcccacgauuucgucaaugcgucaacacuuuugguuccuauauuugcaagugccauaagggauucgaucuuauguacauugggggcaaauaccagugccaugauaucgaugaauguucacuuggacaguaccaaugcuccagcuuugcgcgcugcuauaacauaaggggcaguuacaagugcaaguguaaagagggcuaccagggcgacgguuugacaugugucuacauuccaaaagugaugauagagccuuccggccccauucauguaccaaagggcaauggaacuaucuugaaaggagauacugguaacaauaauuggauaccagacguuggcagcaccugguggccaccuaaaacaccuuauauucccccaauuauuacaaaccgcccgaccuccaaaccuacuacgagaccaacuccgaagccgacuccaauccccacucccccacccccuccaccuuugccuacagaacuaagaaccccucucccuccaacuacgcccgagcggccaacgacuggacucacaacaauugcccccgcagcauccacacccccuggugggauuacgguggauaauagggugcagacugacccccaaaaaccccgcggagacguguucauuccccggcagccaaguaaugauuuguucgagaucuuugaaauugagagaggaguguccgcugacgaugaagcuaaagacgaccccggcguauugguccacagcugcaacuuugaucacggcuuguguggcuggauccgggaaaaagauaaugaucugcacugggaaccuaucagagacccugccggcggacaguaccuaaccguuuccgcugccaaagccccugguggaaaggcagcccgcuugguucucccgcugggacgcuuaaugcauucaggagaccucugccucucuuuccgucacaaagucacaggguuacacucuggcacccuacaaguguuugugcggaagcacggggcccauggagcugcacucuggggcagaaacggcggccacggcuggagacagacucagauuaccuuacggggcgccgacaucaagucuguggucuuuaagggggaaaaacgcagaggucauaccggcgagauuggccuggacgaugugucccugaagaagggccauuguagugaagaaagguag

SEQ ID NO: 70944 - RNA, 1749 nt, Artificial Sequence
  derived and/or modified sequence
auggauuucuugcucgcccuaguguuggucucaucacuguaucuucaagccgcugccgaauuugacggaagauggccuagacagaucgugucgagcaucggacuuugucgauauggggguagaauagauuguuguuggggaugggcucgacagaguuggggacagugccagccauucuacguauuacgucagcguaucgcucgcauaaggugccaacuaaaggcagugugucagccaagauguaaacacggugaaugcauuggaccaaauaagugcaagugccacccagguuacgcuggcaaaacuugcaaccaggaucugaacgaguguggccucaaaccucgcccaugcaaacaccguugcaugaauaccuacgggaguuauaagugcuauugucuuaacggauauaugcugaugccagacggaaguuguucauccgcgcuaacaugcucaauggcgaauugccaauacggcugcgacguggucaaaggacagauaagaugccaaugcccaucacccggauugcagcucgcuccagauggucgcacgugcguggacgucgaugaaugugcaacaggacgcgccuccugcccacgguuucgccaaugcguuaacacuuuugguagcuacaucuguaaaugucacaaaggcuucgaccuuauguauauaggcggcaaauaccagugucacgauauugacgaguguagucugggccaauaccagugcucuuccuuugcccggugcuauaacauaagaggcagcuacaaauguaaguguaaagaagguuaucagggcgacggccugacuugcguguacaucccaaaaguuaugaucgaaccaagcggcccaauucacgugccaaagggaaacggcacuauuuugaaaggugacaccggcaacaauaacuggauuccagacguggggucuacgugguggccccccaaaacuccuuacaucccuccgauaauuacgaaccguccaacuucuaaaccaacaacccgcccuacuccuaaaccuacgccuauuccuacucccccaccucccccuccauuacccacugaacucaggaccccccugcccccaaccacccccgaaagaccuaccacaggacugacaacgauagccccagcagccagcacaccaccaggaggaauaacuguugacaauagggugcagaccgacccucagaagccaagaggugacguguucauuccccggcagccaaguaaugauuuguucgagaucuuugaaauugagagaggaguguccgcugacgaugaagcuaaagacgaccccggcguauugguccacagcugcaacuuugaucacggcuuguguggcuggauccgggaaaaagauaaugaucugcacugggaaccuaucagagacccugccggcggacaguaccuaaccguuuccgcugccaaagccccugguggaaaggcagcccgcuugguucucccgcugggacgcuuaaugcauucaggagaccucugccucagcuuccggcacaagguaacuggauuacacagcggaacccuucagguguuugugcgaaaacacggggcccauggagcugcacuguggggcagaaauggcggacacggcuggagacaaacccagauuacacuuaggggcgcugauauuaagagcguggucuucaagggcgaaaaaaggaggggccacacgggcgagauugggcuggaugacgugucacugaaaaaggggcauugcagcgaggagcgcuag

SEQ ID NO: 70945 - protein, 595 aa, Artificial Sequence
  derived and/or modified sequence
MDFLLALVLVSSLYLQAAAEFDGRWPRQIVSSIGLCRYGGRIDCCWGWARQSWGQCQPVCQPRCKHGECIGPNKCKCHPGYAGKTCNQDEHIPAPLDQGSEQPLFQPLDHQATSLPSRDLNECGLKPRPCKHRCMNTYGSYKCYCLNGYMLMPDGSCSSALTCSMANCQYGCDVVKGQIRCQCPSPGLQLAPDGRTCVDVDECATGRASCPRFRQCVNTFGSYICKCHKGFDLMYIGGKYQCHDIDECSLGQYQCSSFARCYNIRGSYKCKCKEGYQGDGLTCVYIPKVMIEPSGPIHVPKGNGTILKGDTGNNNWIPDVGSTWWPPKTPYIPPIITNRPTSKPTTRPTPKPTPIPTPPPPPPLPTELRTPLPPTTPERPTTGLTTIAPAASTPPGGITVDNRVQTDPQKPRGDVFIPRQPSNDLFEIFEIERGVSADDEAKDDPGVLVHSCNFDHGLCGWIREKDNDLHWEPIRDPAGGQYLTVSAAKAPGGKAARLVLPLGRLMHSGDLCLSFRHKVTGLHSGTLQVFVRKHGAHGAALWGRNGGHGWRQTQITLRGADIKSVVFKGEKRRGHTGEIGLDDVSLKKGHCSEER

SEQ ID NO: 70946 - DNA, 1788 bp, Artificial Sequence
  derived and/or modified sequence
atggattttctcttggccctggtcctcgtgtcttccctgtacttacaggcggctgccgagtttgatggtcgttggcctcgccagatagtaagttcaattggactgtgccggtatgggggaaggattgactgttgttgggggtgggctcggcagtcatggggtcaatgccagcctgtctgccaaccccgatgcaagcatggagagtgtattggacccaataaatgcaagtgccatcccggatacgctggcaaaacctgcaatcaggacgaacacatccctgcccctctggatcagggctctgagcaacctttattccagccactggaccatcaggcgacatcgttgccgtctagggaccttaacgaatgcggcttaaaacctcggccatgcaagcacagatgcatgaatacatacgggtcttataagtgctactgtctcaacgggtacatgcttatgcctgacggaagctgctccagcgccctgacttgttctatggctaactgccagtacggctgcgacgtggttaaaggacagatccgctgccaatgtccgtccccaggcctgcagctagcacccgatggtaggacttgtgtggatgtcgacgagtgcgctacaggtagagcgtcatgtccacgttttaggcagtgcgtgaacacgttcggctcatacatctgtaaatgccacaaaggctttgacctcatgtacatcggtggtaagtaccagtgccacgatatagatgagtgttcattggggcaatatcagtgttcatcattcgctcggtgttacaacatccggggtagctacaaatgtaagtgtaaagaaggataccaaggagatggattgacttgcgtgtacatccctaaagtgatgatcgagccctcaggcccaatccacgtccctaaaggaaatggcactattctgaagggcgacactggaaacaacaattggataccagatgtcggcagtacctggtggcctccgaagaccccatacattccccctatcatcaccaacaggcccacctctaagccgactacccgccctacaccgaagccaacacccatcccaacacctccaccccctccccctctcccaaccgaactgcggactcctttgccccctactactcctgaacgccctaccaccggccttaccacaatcgcacctgctgcttccacgccccctggcggaatcactgtcgacaaccgggttcagacagacccgcagaaaccgaggggcgacgtgtttatcccccgtcagccaagtaatgatcttttcgagatctttgagatcgaacgcggagtgagtgctgacgacgaggcaaaagatgaccccggtgtactcgtccattcatgcaatttcgatcacggactgtgcgggtggattagggagaaggataacgatctccattgggagccgatacgcgaccccgctggcggacagtaccttacagtctccgcagccaaggcccctggcggtaaggcagccagacttgtgctgccacttggcagacttatgcacagcggtgacttatgtctatccttccggcacaaggtaaccggcctgcacagtgggaccctgcaggtttttgttcggaagcatggggcacatggagccgcactgtggggccgaaatggtggccatgggtggaggcaaacacagataacgctgagaggcgcagatattaagagcgtggtctttaagggagagaaaaggaggggccatacaggagaaattggtcttgatgacgtttccttgaagaaaggccattgctccgaggaaagatag

SEQ ID NO: 70947 - DNA, 2481 bp, Artificial Sequence
  derived and/or modified sequence
agaagggagcgggagggggctccgggcgccgcgcagcagacctgctccggccgcgcgcctcgccgctgtcctccgggagcggcagcagtagcccgggcggcgagggctgggggttcctcgagactctcagaggggcgcctcccatcggcgcccaccaccccaacctgttcctcgcgcgccactgcgctgcgccccaggacccgctgcccaacatggattttctcctggcgctggtgctggtatcctcgctctacctgcaggcggccgccgagttcgacgggaggtggcccaggcaaatagtgtcatcgattggcctatgtcgttatggtgggaggattgactgctgctggggctgggctcgccagtcttggggacagtgtcagcctgtgtgccaaccacgatgcaaacatggtgaatgtatcgggccaaacaagtgcaagtgtcatcctggttatgctggaaaaacctgtaatcaagacgagcacatcccagctcctcttgaccaaggcagtgaacagcctcttttccaacccctggatcaccaagccacaagtttgccttcaagggatctaaatgagtgtggcctgaagccccggccctgtaagcacaggtgcatgaacacttacggcagctacaagtgctactgtctcaacggatatatgctcatgccggatggttcctgctcaagtgccctgacctgctccatggcaaactgtcagtatggctgtgatgttgttaaaggacaaatacggtgccagtgcccatcccctggcctgcagctggctcctgatgggaggacctgtgtagatgttgatgaatgtgctacaggaagagcctcctgccctagatttaggcaatgtgtcaacacttttgggagctacatctgcaagtgtcataaaggcttcgatctcatgtatattggaggcaaatatcaatgtcatgacatagacgaatgctcacttggtcagtatcagtgcagcagctttgctcgatgttataacatacgtgggtcctacaagtgcaaatgtaaagaaggataccagggtgatggactgacttgtgtgtatatcccaaaagttatgattgaaccttcaggtccaattcatgtaccaaagggaaatggtaccattttaaagggtgacacaggaaataataattggattcctgatgttggaagtacttggtggcctccgaagacaccatatattcctcctatcattaccaacaggcctacttctaagccaacaacaagacctacaccaaagccaacaccaattcctactccaccaccaccaccacccctgccaacagagctcagaacacctctaccacctacaaccccagaaaggccaaccaccggactgacaactatagcaccagctgccagtacacctccaggagggattacagttgacaacagggtacagacagaccctcagaaacccagaggagatgtgttcattccacggcaaccttcaaatgacttgtttgaaatatttgaaatagaaagaggagtcagtgcagacgatgaagcaaaggatgatccaggtgttctggtacacagttgtaattttgaccatggactttgtggatggatcagggagaaagacaatgacttgcactgggaaccaatcagggacccagcaggtggacaatatctgacagtgtcggcagccaaagccccagggggaaaagctgcacgcttggtgctacctctcggccgcctcatgcattcaggggacctgtgcctgtcattcaggcacaaggtgacggggctgcactctggcacactccaggtgtttgtgagaaaacacggtgcccacggagcagccctgtggggaagaaatggtggccatggctggaggcaaacacagatcaccttgcgaggggctgacatcaagagcgtcgtcttcaaaggtgaaaaaaggcgtggtcacactggggagattggattagatgatgtgagcttgaaaaaaggccactgctctgaagaacgctaacaactccagaactaacaatgaactcctatgttgctctatcctctttttccaattctcatcttctctcctcttctcccttttatcaggcctaggagaagagtgggtcagtgggtcagaaggaagtctatttggtgacccaggtttttctggcctgcttttgtgcaatcccaatgaacagtgataccctccttgaaatacaggggcatcgcagacacatcaaagccatctgtgggtgttgccttccatcctgtgtctctttcaggaaggcattcagcatgcgtgagccataccatcctccatcctgattacaaggtgctccttgtagcaaattatgagagtgagttacgggagcagtttttaaaagaaatctttgcagatggctatgatgttatgtgttcggtgttgtaccatgagtagtattgacttcccttgagatatgatgtacaatgtgcttgtgaaattgacttaccctcttcactta

SEQ ID NO: 70948 - DNA, 1788 bp, Artificial Sequence
  derived and/or modified sequence
atggacttcttgttggctctcgtcctggtatcgtccctatacctgcaggccgccgccgagttcgatggccgctggccaaggcagattgtcagcagcatcgggttgtgccgttatggaggtcggatcgattgttgttggggttgggcgcggcaatcttgggggcagtgtcagccggtgtgccagccgaggtgcaagcacggagaatgcattgggcccaacaaatgcaaatgccatcccgggtacgctggcaaaacttgtaatcaagacgagcacattcctgcaccactggaccagggatctgagcagcctctgttccagccgttggatcatcaggctacctcccttccctcacgcgatctgaacgagtgcggactgaaacctcgcccgtgcaaacaccgctgcatgaacacttatgggtcgtacaaatgttattgcttaaatggctatatgttgatgcccgacggttcctgtagttccgccctgacatgttcaatggctaattgccagtacggctgtgacgtggttaaaggacagatccgctgtcaatgccctagtcccggcctccaactggcaccagacggaagaacctgcgtagatgttgacgagtgtgccacaggccgggcgtcctgtcctagatttagacaatgcgtgaatactttcggcagctacatctgcaaatgccacaaggggttcgatttgatgtacatcggaggaaagtatcagtgccacgatattgacgagtgctcactgggacagtaccagtgttcatcctttgccaggtgttataacatcagagggagttataagtgtaaatgtaaagagggctatcaaggtgatggactcacttgcgtgtacatccccaaggtgatgatagagccatctggacctatccatgtgcccaaaggcaacggaacaatactgaagggtgatactggaaacaataactggattcctgatgtcgggtccacgtggtggccccccaagaccccctatattccccctatcatcaccaaccgtccaacgagcaagccaacaacgaggcctacaccaaaaccaaccccaatccccactcccccaccgccacctcctctccctactgaactgagaacgccacttcccccaacaactcccgaaaggccaacgactggtctgactactattgccccggcggcctctacaccacctggcggaattacggtggacaacagggttcagacagacccgcagaaaccacgcggtgatgtgttcatccctcgtcagccgtcaaacgatctgtttgaaatattcgaaattgagcgcggtgtgtccgcagatgacgaggccaaggatgatcccggagtattggtgcactcatgtaactttgatcacgggttgtgcggatggatcagagaaaaagacaatgacttgcattgggagccaatacgagatccggccggtggtcagtatctgaccgtgtctgcagctaaagcccctggaggtaaagctgctcgccttgtcctgccgttgggcaggctgatgcacagtggggacctctgcctctccttcagacataaagtaactggactccacagtgggacccttcaagtcttcgtccgcaaacatggggcacatggagcagccttatgggggcgcaacgggggtcatgggtggagacagactcaaattacactacgcggcgccgatatcaagagcgtggtattcaaaggagagaagcgaaggggacataccggagagattggactcgatgatgtgagtttgaaaaagggccactgttcagaagaaaggtag

SEQ ID NO: 70949 - DNA, 1788 bp, Artificial Sequence
  derived and/or modified sequence
atggactttcttttggccctggttctcgtcagttctctttatttacaggctgccgcagaattcgatgggagatggcccagacagattgtgtcctccataggattgtgtcgatatgggggcagaattgattgttgctgggggtgggctcgccagagctgggggcagtgccagccagtgtgccagccccgctgcaagcatggagaatgtattggaccgaataaatgtaaatgccacccagggtatgcaggcaaaacgtgcaaccaggatgaacatatcccagcacctctcgaccagggaagcgagcaacccctgttccagccactggatcaccaagctacctctttgccctctcgggaccttaatgagtgcggattgaaacctcgaccctgtaaacacaggtgtatgaatacatacggctcctataaatgctattgcctgaacggctatatgttaatgcccgacggcagttgttcttcagctttgacatgcagtatggccaattgccagtacggctgcgacgtggtcaagggacagatacgttgccaatgtccatccccaggcttgcagctagcccccgacgggagaacttgtgtggatgtggatgaatgcgctacggggagagcctcatgcccccgctttaggcagtgtgtaaatacgtttggatcatatatatgtaaatgccacaaaggattcgatctgatgtacattggaggcaaataccagtgtcatgatatagacgagtgttcgctgggacagtaccagtgttcaagtttcgctcgatgttacaatataaggggcagctataagtgcaaatgcaaagagggatatcagggagacggtttgacctgtgtttacatcccaaaagttatgattgaaccatctggtcctattcacgtgccgaagggaaacggaaccatcttaaaaggggatactggtaacaataattggattccagacgttggcagcacatggtggccacccaaaaccccctatattcctccaatcatcacaaatcggcctacatctaaacccaccactcgccctacaccaaaaccaacacctattccaacgccacctcctcccccacctttgccgacagaactccggaccccactgccccccaccaccccagaaagacctactactgggttaaccacaattgctccagctgcctcaactccccctggcgggatcacagtcgacaatagggtccagactgatccacagaaaccccgcggtgacgtgtttataccacgccagccctccaatgatctgtttgagatattcgagatagagcgtggcgtcagtgccgacgatgaagccaaggatgatccgggcgtgctggtgcactcatgcaactttgaccacggcctctgcggatggattagggagaaagacaacgacctgcattgggagccaatccgagacccagccggcggccaataccttaccgtgagcgcagccaaagccccaggtggaaaagctgccagactggtgcttccccttggtagattaatgcactccggcgacctgtgcctctccttccgacacaaggtgacaggactgcacagcggcacactccaggtatttgtaagaaaacatggggctcacggggcggcgctatggggtagaaatggcggacacgggtggcgccagactcagataactctgcggggggctgacattaaatcggtcgtgttcaaaggcgaaaagaggcgcggccacacaggggagattgggctggatgacgtatccttaaagaagggtcactgctcggaagaacggtag

SEQ ID NO: 70950 - DNA, 1788 bp, Artificial Sequence
  derived and/or modified sequence
atggacttcctgctggccctggtgctggtgagcagcctgtacctgcaggccgccgccgagttcgacggcagatggcccagacagatcgtgagcagcatcggcctgtgcagatacggcggcagaatcgactgctgctggggctgggccagacagagctggggccagtgccagcccgtgtgccagcccagatgcaagcacggcgagtgcatcggccccaacaagtgcaagtgccaccccggctacgccggcaagacctgcaaccaggacgagcacatccccgcccccctggaccagggcagcgagcagcccctgttccagcccctggaccaccaggccaccagcctgcccagcagagacctgaacgagtgcggcctgaagcccagaccctgcaagcacagatgcatgaacacctacggcagctacaagtgctactgcctgaacggctacatgctgatgcccgacggcagctgcagcagcgccctgacctgcagcatggccaactgccagtacggctgcgacgtggtgaagggccagatcagatgccagtgccccagccccggcctgcagctggcccccgacggcagaacctgcgtggacgtggacgagtgcgccaccggcagagccagctgccccagattcagacagtgcgtgaacaccttcggcagctacatctgcaagtgccacaagggcttcgacctgatgtacatcggcggcaagtaccagtgccacgacatcgacgagtgcagcctgggccagtaccagtgcagcagcttcgccagatgctacaacatcagaggcagctacaagtgcaagtgcaaggagggctaccagggcgacggcctgacctgcgtgtacatccccaaggtgatgatcgagcccagcggccccatccacgtgcccaagggcaacggcaccatcctgaagggcgacaccggcaacaacaactggatccccgacgtgggcagcacctggtggccccccaagaccccctacatcccccccatcatcaccaacagacccaccagcaagcccaccaccagacccacccccaagcccacccccatccccaccccccccccccccccccccctgcccaccgagctgagaacccccctgccccccaccacccccgagagacccaccaccggcctgaccaccatcgcccccgccgccagcaccccccccggcggcatcaccgtggacaacagagtgcagaccgacccccagaagcccagaggcgacgtgttcatccccagacagcccagcaacgacctgttcgagatcttcgagatcgagagaggcgtgagcgccgacgacgaggccaaggacgaccccggcgtgctggtgcacagctgcaacttcgaccacggcctgtgcggctggatcagagagaaggacaacgacctgcactgggagcccatcagagaccccgccggcggccagtacctgaccgtgagcgccgccaaggcccccggcggcaaggccgccagactggtgctgcccctgggcagactgatgcacagcggcgacctgtgcctgagcttcagacacaaggtgaccggcctgcacagcggcaccctgcaggtgttcgtgagaaagcacggcgcccacggcgccgccctgtggggcagaaacggcggccacggctggagacagacccagatcaccctgagaggcgccgacatcaagagcgtggtgttcaagggcgagaagagaagaggccacaccggcgagatcggcctggacgacgtgagcctgaagaagggccactgcagcgaggagagatag

SEQ ID NO: 70951 - DNA, 1788 bp, Artificial Sequence
  derived and/or modified sequence
atggactttttgcttgcccttgtgctagtgtcctctctgtacctccaggcagcggctgaatttgacggcaggtggccgcgccaaatagtttcctccattggactctgccggtacggcgggcgcatcgattgctgttggggatgggccaggcagtcctggggccagtgccagccagtctgccagccacggtgtaaacacggagaatgtatcgggcctaacaaatgcaaatgccaccccggatatgcaggcaagacttgtaatcaggatgagcacatcccagcgcctctggaccaggggagcgagcagccactgttccaacctctggatcatcaggcaacctctcttccctcgcgagatcttaacgaatgcggcttgaagccacggccatgcaaacacaggtgcatgaatacttacggaagctataaatgctactgtctgaatggttacatgctgatgcctgacgggtcttgcagctcggcactgacatgttccatggccaattgtcaatacggttgtgacgtcgtcaagggtcaaatcagatgtcaatgccctagccccggcctgcagttagcaccagacggacgcacttgcgtggatgtggacgaatgcgcaacaggccgagccagctgtccccggttcaggcaatgcgtgaacacctttgggtcttatatatgtaaatgccacaagggatttgaccttatgtacatcggtggcaagtatcagtgccacgacatcgatgaatgctcccttgggcagtaccagtgcagtagttttgcaagatgttataacatcagaggctcctacaaatgcaagtgtaaggagggataccagggggatggcctcacttgtgtatacatccccaaggtgatgatcgagccttccggccccatccacgtgcccaagggtaatggcactatcctcaaaggcgatacaggcaacaataattggattcccgatgtggggagtacgtggtggccgcccaaaactccctatattccccccattataactaacagaccgacgtctaaacccaccacacggccaactccaaagccaactcctatccctacaccgccaccacccccccctcttcccacagagctcagaaccccactgccaccgaccacaccagagcgcccaactaccggactgacaaccattgcaccagccgcatccacacctcccggaggcattactgtcgataatcgggttcagacagatccccagaagcccaggggggatgtcttcatccctagacaaccatctaatgatctttttgaaatattcgaaatcgagcgtggtgtgtctgccgatgacgaagctaaagatgacccgggcgttctggtccacagttgcaatttcgatcatggattgtgtggctggattcgggaaaaggataatgatctgcactgggaaccgattagagacccagctgggggtcagtacctcaccgtctccgctgctaaggcgcccgggggtaaggcggcgaggcttgtcctgcctctcgggcgactgatgcactctggcgatctttgtttatccttccgccacaaggtcactggattacacagcggtaccttgcaagtatttgtgcgtaaacatggcgctcatggagctgcgctgtggggccggaatggtggccatggatggcgacagactcaaatcacccttcgcggggctgacattaaatcggtggtctttaaaggtgaaaagcgccgcggacatactggcgaaatcgggctggatgatgtttcactgaaaaagggccattgctctgaggaacgctag

SEQ ID NO: 70952 - DNA, 1788 bp, Artificial Sequence
  derived and/or modified sequence
atggacttcctgctggccctggtgctggtgagcagcctgtacctgcaggccgctgctgagtttgatggccgctggccccggcagatcgtgagcagcatcggcctgtgccgctatggaggaagaattgactgctgctggggctgggcccggcagagctggggccagtgccagcctgtgtgccagccccgctgcaagcacggggagtgcatcggccccaacaagtgcaagtgccaccctggctacgccggcaagacctgcaaccaggatgagcacatcccagcccccctggaccagggcagcgagcagcccctcttccagcccctggaccaccaggccaccagcctgcccagccgggacctgaatgaatgtggcctgaagccccggccctgcaagcaccgctgcatgaacacctacggcagctacaagtgctactgcctgaatggctacatgctgatgccagatggcagctgcagcagcgccctgacctgcagcatggccaactgccagtatggctgtgatgtggtgaagggccagatccgctgccagtgccccagccctggcctgcagctggccccagatggccgcacctgtgtggatgtggatgaatgtgccaccggccgggccagctgcccccgcttccggcagtgtgtgaacaccttcggcagctacatctgcaagtgccacaagggctttgacctgatgtacatcggcggcaagtaccagtgccacgacattgatgaatgttccctgggccagtaccagtgcagcagctttgcccgctgctacaacatccggggcagctacaagtgcaagtgcaaggagggctaccagggagatggcctgacctgtgtgtacatccccaaggtgatgattgagcccagcggccccatccacgtgcccaagggaaatggcaccatcctgaagggggacaccggcaacaacaactggatcccagatgtgggcagcacctggtggccacccaagaccccctacatcccccccatcatcaccaaccggcccaccagcaagcccaccacccggcccacccccaagcccacccccatccccaccccacctcctcctccacccctgcccacagagctgcggacccccctgccccccaccaccccagagcggcccaccaccggcctgaccaccatcgccccagctgccagcaccccacctgggggcatcaccgtggacaacagagtgcagacagacccccagaagcccagaggagatgtgttcatcccccggcagcccagcaatgacctgtttgagatctttgaaattgagcggggcgtgtctgcagatgatgaggccaaggatgatcctggggtgctggtgcacagctgcaactttgaccacggcctgtgtggctggatccgggagaaggacaatgacctgcactgggagcccatccgggaccctgctgggggccagtacctgactgtgtctgctgccaaggcccctgggggcaaggccgcccggctggtgctgcccctgggccgcctgatgcacagcggggacctgtgcctgtccttccgccacaaggtgacaggcctgcacagcggcaccctgcaggtgtttgtgaggaagcacggggcccatggagctgccctgtggggcagaaatggaggccacggctggaggcagacccagatcaccctgcggggagctgacatcaagtctgtggtgttcaagggggagaagaggcggggccacactggagaaattggcctggatgatgtgtccctgaagaagggccactgcagcgaggagaggtag

SEQ ID NO: 70953 - DNA, 1788 bp, Artificial Sequence
  derived and/or modified sequence
atggacttcctgctggccctggtgctggtgagcagcctgtacctgcaggctgccgcagagtttgacggcagatggccaagacagatcgtttcttccattggcctgtgccggtatgggggaagaatcgattgttgttgggggtgggcacgacagtcttggggacagtgccagcctgtctgccagccccgttgtaagcatggggagtgcatcgggccaaacaaatgtaaatgccatccaggctatgccggtaaaacctgcaatcaggacgaacacattcctgcacccctcgaccagggctcagagcagccactttttcagcctctggatcaccaggcaacatctctgccgtctagggacctgaatgagtgtggtctcaagccgcgaccctgcaaacatcgttgtatgaatacctacggatcatacaaatgttattgtttgaatggctatatgctcatgccagacgggtcctgctcatccgcccttacgtgcagcatggcaaactgccagtacggttgcgatgttgtgaagggccagatacggtgtcagtgtcctagtcccggccttcagctagccccagatggaagaacttgcgtagacgttgatgagtgcgcaaccggacgggctagctgtcctcgcttccggcaatgcgtgaatacgttcggttcttatatttgtaagtgtcacaagggctttgacctgatgtacatcggcggcaagtaccagtgccatgacatagatgaatgctctctgggacagtatcagtgcagcagtttcgcgcggtgctacaatatacgcgggagttataagtgcaagtgtaaggaggggtaccaaggggacggcctgacatgcgtgtatattcccaaggttatgatagaaccatctgggcccattcatgttcccaagggcaacgggacaattctgaagggtgatactggaaacaacaattggatcccagacgtgggcagcacatggtggccccccaaaacaccttacatacctccaatcatcaccaaccgccctaccagcaaaccaaccacccggccgacccccaagcccactccaataccaactcccccacccccccccccgcttccaacggaacttcgaacacctctgccccctacaactcctgaacgtcccacaacaggactgacaaccatcgcccctgcagcgagcacgcctcctggcgggatcaccgtcgacaacagggtgcagactgatccccagaagcccaggggagatgttttcattccacggcaaccgtcaaacgatctgttcgagatctttgagatcgagcggggagtgagcgctgatgacgaggccaaggacgacccgggggtgcttgttcactcttgtaacttcgaccacggactgtgcgggtggatcagagagaaagataacgacctgcactgggagccgattcgagatcctgcgggcgggcagtacctcaccgtgtctgctgccaaggctccaggtggcaaggctgccaggctggtcctccccctcggccgactgatgcactcaggcgatttatgcttatctttcaggcacaaggttacaggcttacactcagggaccctccaggttttcgtgcggaagcacggcgcacacggcgcggccctttgggggcgcaatggagggcatggctggcgacagactcaaattacattgcgtggggccgatatcaagagtgtggttttcaaaggcgagaaaagacgcggacatactggcgaaatagggctcgatgacgtctccctcaaaaaaggtcattgtagcgaagagcgatag

SEQ ID NO: 70954 - RNA, 1788 nt, Artificial Sequence
  derived and/or modified sequence
auggacuucuuguuggcucucguccugguaucgucccuauaccugcaggccgccgccgaguucgauggccgcuggccaaggcagauugucagcagcaucggguugugccguuauggaggucggaucgauuguuguugggguugggcgcggcaaucuugggggcagugucagccggugugccagccgaggugcaagcacggagaaugcauugggcccaacaaaugcaaaugccaucccggguacgcuggcaaaacuuguaaucaagacgagcacauuccugcaccacuggaccagggaucugagcagccucuguuccagccguuggaucaucaggcuaccucccuucccucacgcgaucugaacgagugcggacugaaaccucgcccgugcaaacaccgcugcaugaacacuuaugggucguacaaauguuauugcuuaaauggcuauauguugaugcccgacgguuccuguaguuccgcccugacauguucaauggcuaauugccaguacggcugugacgugguuaaaggacagauccgcugucaaugcccuagucccggccuccaacuggcaccagacggaagaaccugcguagauguugacgagugugccacaggccgggcguccuguccuagauuuagacaaugcgugaauacuuucggcagcuacaucugcaaaugccacaagggguucgauuugauguacaucggaggaaaguaucagugccacgauauugacgagugcucacugggacaguaccaguguucauccuuugccagguguuauaacaucagagggaguuauaaguguaaauguaaagagggcuaucaaggugauggacucacuugcguguacauccccaaggugaugauagagccaucuggaccuauccaugugcccaaaggcaacggaacaauacugaagggugauacuggaaacaauaacuggauuccugaugucggguccacgugguggccccccaagacccccuauauucccccuaucaucaccaaccguccaacgagcaagccaacaacgaggccuacaccaaaaccaaccccaauccccacucccccaccgccaccuccucucccuacugaacugagaacgccacuucccccaacaacucccgaaaggccaacgacuggucugacuacuauugccccggcggccucuacaccaccuggcggaauuacgguggacaacaggguucagacagacccgcagaaaccacgcggugauguguucaucccucgucagccgucaaacgaucuguuugaaauauucgaaauugagcgcgguguguccgcagaugacgaggccaaggaugaucccggaguauuggugcacucauguaacuuugaucacggguugugcggauggaucagagaaaaagacaaugacuugcauugggagccaauacgagauccggccgguggucaguaucugaccgugucugcagcuaaagccccuggagguaaagcugcucgccuuguccugccguugggcaggcugaugcacaguggggaccucugccucuccuucagacauaaaguaacuggacuccacagugggacccuucaagucuucguccgcaaacauggggcacauggagcagccuuaugggggcgcaacgggggucauggguggagacagacucaaauuacacuacgcggcgccgauaucaagagcgugguauucaaaggagagaagcgaaggggacauaccggagagauuggacucgaugaugugaguuugaaaaagggccacuguucagaagaaagguag

SEQ ID NO: 70955 - RNA, 1788 nt, Artificial Sequence
  derived and/or modified sequence
auggacuuucuuuuggcccugguucucgucaguucucuuuauuuacaggcugccgcagaauucgaugggagauggcccagacagauuguguccuccauaggauugugucgauaugggggcagaauugauuguugcugggggugggcucgccagagcugggggcagugccagccagugugccagccccgcugcaagcauggagaauguauuggaccgaauaaauguaaaugccacccaggguaugcaggcaaaacgugcaaccaggaugaacauaucccagcaccucucgaccagggaagcgagcaaccccuguuccagccacuggaucaccaagcuaccucuuugcccucucgggaccuuaaugagugcggauugaaaccucgacccuguaaacacagguguaugaauacauacggcuccuauaaaugcuauugccugaacggcuauauguuaaugcccgacggcaguuguucuucagcuuugacaugcaguauggccaauugccaguacggcugcgacguggucaagggacagauacguugccaauguccauccccaggcuugcagcuagcccccgacgggagaacuuguguggauguggaugaaugcgcuacggggagagccucaugcccccgcuuuaggcaguguguaaauacguuuggaucauauauauguaaaugccacaaaggauucgaucugauguacauuggaggcaaauaccagugucaugauauagacgaguguucgcugggacaguaccaguguucaaguuucgcucgauguuacaauauaaggggcagcuauaagugcaaaugcaaagagggauaucagggagacgguuugaccuguguuuacaucccaaaaguuaugauugaaccaucugguccuauucacgugccgaagggaaacggaaccaucuuaaaaggggauacugguaacaauaauuggauuccagacguuggcagcacaugguggccacccaaaacccccuauauuccuccaaucaucacaaaucggccuacaucuaaacccaccacucgcccuacaccaaaaccaacaccuauuccaacgccaccuccucccccaccuuugccgacagaacuccggaccccacugccccccaccaccccagaaagaccuacuacuggguuaaccacaauugcuccagcugccucaacucccccuggcgggaucacagucgacaauaggguccagacugauccacagaaaccccgcggugacguguuuauaccacgccagcccuccaaugaucuguuugagauauucgagauagagcguggcgucagugccgacgaugaagccaaggaugauccgggcgugcuggugcacucaugcaacuuugaccacggccucugcggauggauuagggagaaagacaacgaccugcauugggagccaauccgagacccagccggcggccaauaccuuaccgugagcgcagccaaagccccagguggaaaagcugccagacuggugcuuccccuugguagauuaaugcacuccggcgaccugugccucuccuuccgacacaaggugacaggacugcacagcggcacacuccagguauuuguaagaaaacauggggcucacggggcggcgcuaugggguagaaauggcggacacggguggcgccagacucagauaacucugcggggggcugacauuaaaucggucguguucaaaggcgaaaagaggcgcggccacacaggggagauugggcuggaugacguauccuuaaagaagggucacugcucggaagaacgguag

SEQ ID NO: 70956 - protein, 509 aa, Artificial Sequence
  derived and/or modified sequence
MDFLLALVLVSSLYLQAAAEFDGRWPRQIVSSIGLCRYGGRIDCCWGWARQSWGQCQPVCQPRCKHGECIGPNKCKCHPGYAGKTCNQDLNECGLKPRPCKHRCMNTYGSYKCYCLNGYMLMPDGSCSSALTCSMANCQYGCDVVKGQIRCQCPSPGLQLAPDGRTCVDVDECATGRASCPRFRQCVNTFGSYICKCHKGFDLMYIGGKYQCHDIDECSLGQYQCSSFARCYNIRGSYKCKCKEGYQGDGLTCVYIPKVMIEPSGPIHVPKGNGTILKGDTGNNNWIPDVGSTWWPPKTPYIPPIITNRPTSKPTTRPTPKPTPIPTPPPPPPLPTELRTPLPPTTPERPTTGLTTIAPAASTPPGGITVDNRVQTDPQKPRGDVFSVLVHSCNFDHGLCGWIREKDNDLHWEPIRDPAGGQYLTVSAAKAPGGKAARLVLPLGRLMHSGDLCLSFRHKVTGLHSGTLQVFVRKHGAHGAALWGRNGGHGWRQTQITLRGADIKSESQR

SEQ ID NO: 70957 - protein, 536 aa, Artificial Sequence
  derived and/or modified sequence
MDFLLALVLVSSLYLQAAAEFDGRWPRQIVSSIGLCRYGGRIDCCWGWARQSWGQCQPVCQPRCKHGECIGPNKCKCHPGYAGKTCNQDLNECGLKPRPCKHRCMNTYGSYKCYCLNGYMLMPDGSCSSALTCSMANCQYGCDVVKGQIRCQCPSPGLQLAPDGRTCVDVDECATGRASCPRFRQCVNTFGSYICKCHKGFDLMYIGGKYQCHDIDECSLGQYQCSSFARCYNIRGSYKCKCKEGYQGDGLTCVYIPKVMIEPSGPIHVPKGNGTILKGDTGNNNWIPDVGSTWWPPKTPYIPPIITNRPTSKPTTRPTPKPTPIPTPPPPPPLPTELRTPLPPTTPERPTTGLTTIAPAASTPPGGITVDNRVQTDPQKPRGDVFSVLVHSCNFDHGLCGWIREKDNDLHWEPIRDPAGGQYLTVSAAKAPGGKAARLVLPLGRLMHSGDLCLSFRHKVTGLHSGTLQVFVRKHGAHGAALWGRNGGHGWRQTQITLRGADIKSVVFKGEKRRGHTGEIGLDDVSLKKGHCSEER

SEQ ID NO: 70958 - DNA, 1530 bp, Artificial Sequence
  derived and/or modified sequence
atggattttcttctggctctggtgctcgtttcctctctgtatctgcaggccgcagctgagtttgacgggaggtggcccaggcagatagttagctctatcgggttgtgtcgctacggcggtcgcattgattgctgttggggctgggccaggcagtcctggggtcagtgccagcctgtctgtcagccacgctgtaaacacggggagtgcatcggaccaaacaaatgtaaatgccatcctggttatgcgggtaaaacttgcaatcaggacctgaatgagtgcgggctgaagccgaggccttgcaagcataggtgcatgaatacttacggttcctataagtgctattgtctgaatggatacatgctgatgcccgacggatcatgctcctcggccctgacgtgcagcatggctaactgccagtatggctgtgacgtcgttaaaggtcagatacgttgtcaatgtcccagtcccggtcttcagctggcaccagacggtagaacttgtgtggatgttgacgagtgtgccaccggaagagcatcttgcccccgattccgccagtgtgtgaacacctttggttcatatatctgcaagtgtcataaggggtttgatcttatgtacataggtggtaagtatcagtgtcacgacattgatgagtgctcacttggacagtatcaatgtagttcctttgcccgttgctacaacataaggggatcctacaagtgcaagtgcaaggagggatatcaaggagatggtctgacctgcgtgtacataccgaaggtcatgattgaaccgagtggccctattcacgtcccgaagggaaacggtactattttaaaaggtgacaccggcaataataactggattcccgacgttgggagcacctggtggcctccaaagactccctatattcctcctatcatcacgaataggcccaccagcaagccaaccactcgccctacaccaaagcccactccaatacctacgccaccaccccctcctccactgcctaccgagttgcggactccgctaccaccgacaacgcccgagcgcccaaccacgggtctgaccacgatcgcccctgccgcttctaccccacccggtgggatcacagtggacaatcgcgtgcaaacagacccccagaaacctcgcggtgatgtgttcagtgtcctagtgcactcctgcaattttgatcacggactgtgcggatggatcagggaaaaggataacgacctccactgggagcccatcagagatccggctgggggacagtacttgacagtctctgcagcgaaggctcccggagggaaagccgcaagactggttctgcccttaggacggctcatgcactcaggagatttatgccttagcttcagacataaggtcacgggcttacatagcggcactctacaggtgtttgtgcgaaagcatggcgctcacggggctgccttgtggggcaggaatggtggacacggctggcgacagacacagatcacgctgaggggcgctgatatcaagtcggaatcccagaggtag

SEQ ID NO: 70959 - DNA, 1611 bp, Artificial Sequence
  derived and/or modified sequence
atggatttccttctcgccttagtactcgtcagctctctgtacttgcaggccgctgccgaattcgatggcaggtggcccagacagatcgtttcctccattggactctgtcgatacggcggacgtatcgactgttgttggggctgggcgagacagagctggggccagtgccagcctgtgtgtcagccgcgttgtaagcacggagagtgcatagggccaaataaatgcaagtgtcaccctggctatgctggcaaaacctgcaaccaggacctgaacgagtgcggcttaaaaccaagaccctgcaaacatcggtgcatgaatacttatggctcgtataagtgctattgccttaatggctatatgctgatgcctgacgggagttgttcctctgcactgacctgcagcatggccaactgccagtacggatgcgacgtcgtgaaaggacagataaggtgtcagtgtccttcccctggcctacagctcgcacccgatggcaggacctgtgtggacgtggacgaatgtgccaccggacgggcttcttgtccgaggtttcggcaatgtgtgaatacattcgggagctacatttgtaagtgtcacaagggttttgatctcatgtacattggtggaaagtaccaatgtcacgacatcgatgagtgctcactcggacaataccagtgcagctcattcgccagatgttataatatccggggttcctacaagtgcaaatgtaaggaaggctaccagggagacggcctgacgtgtgtttacatccctaaggtgatgatcgagccaagtggtcccattcatgtgccaaagggtaatgggacaattctgaagggcgacactgggaacaataattggatcccggacgtcggatccacatggtggccccctaaaacaccctacatccctcctatcattaccaaccggcctacctctaaaccaacgacgcgtcccactccgaaaccaacacctattccgactccacctcctccaccccctctgccaaccgaattgcggacaccgctccctccaacaacgcctgagcggcctacgaccgggctcactaccatcgctcctgctgcttcaactccccctggaggtatcaccgttgacaaccgcgtgcagaccgaccctcaaaagccacgaggtgacgtgttctccgtgctcgtgcacagctgcaatttcgatcatggactgtgcgggtggatccgcgagaaagacaacgatctacattgggaaccgatccgggatccagcaggaggacagtacctgactgtgtctgcggctaaagccccaggcggtaaagcagcgcgactcgttctgccactgggacgtctcatgcactcaggagatttatgcttatcgtttcgacacaaagtaaccggactgcatagcgggacattgcaagtgttcgtgaggaagcacggggcacatggcgctgctttgtgggggagaaacggagggcacgggtggcggcaaacccagattactttacgaggggctgacataaaaagtgtcgtatttaagggcgaaaaacggcgtggtcacacgggagagatcggccttgatgacgtgtcactcaagaaaggacattgttctgaggagagatag

SEQ ID NO: 70960 - DNA, 1530 bp, Artificial Sequence
  derived and/or modified sequence
atggactttctccttgccctcgttttagtgtccagtctgtatctccaggcagccgcagagtttgacgggcgctggccaaggcagatagtctctagtattgggttatgtcgttatggggggaggattgattgttgttgggggtgggctagacagtcttggggtcaatgtcagccggtgtgtcagccgagatgtaaacacggcgaatgcatagggccgaacaaatgtaaatgccatccaggctatgcagggaaaacatgcaatcaggacttgaacgagtgcggcttgaaaccccgtccttgcaagcaccgatgtatgaatacctatggttcctacaaatgctactgcctcaacggatatatgctgatgcctgatgggtcttgttcttccgctctcacctgctctatggctaactgccagtacggatgcgacgttgtgaaaggccaaattagatgtcagtgcccatcccctggtctacagctggctccggacgggcgaacatgtgtggatgtggacgagtgcgctaccggcagggcctcttgcccacggttccgacagtgtgtcaatacgttcggatcttatatttgtaaatgtcataaagggtttgacctgatgtacattggagggaaataccaatgtcacgatatagacgaatgctcactcggccagtaccaatgctcatcttttgctaggtgttataacattcgcggctcatataagtgcaaatgtaaggaaggataccaaggcgatggcttaacctgtgtgtatattcctaaagtaatgatcgagccatccggcccaatccatgtgcccaagggaaacggcactattcttaaaggggatacagggaacaataattggataccagacgtgggctcaacttggtggccccccaagaccccttacattccaccaattatcacaaacaggcccactagtaaaccaaccacacgtccaacaccaaagccaaccccaattcctaccccaccgcctcccccccccttacccacggaactgcgcactccactgccccccaccacaccggagcgacctacaactgggctaacaactattgctcccgccgcttctacaccaccgggcgggattactgtggataaccgcgtgcagacggaccctcagaagccaagaggagacgtattttccgtgctggtccattcttgcaattttgatcatggactgtgcggatggattcgggagaaggataatgaccttcattgggagccaatccgggaccccgccggcggtcagtatctcaccgtgtcggcagccaaagcccccggtggcaaagcagctcgcctggttctcccattgggcaggttgatgcatagcggggacctctgcctgtccttccggcacaaagtgacggggctgcattcaggcaccctgcaggtgttcgtgcggaaacacggcgcacatggggccgctttgtggggacgaaacggcgggcatggatggagacagacccagatcacactgagaggcgctgacattaagtccgagtcgcagcgctag

SEQ ID NO: 70961 - DNA, 1611 bp, Artificial Sequence
  derived and/or modified sequence
atggactttttgctcgcgctggtgcttgtgagctccctgtacctgcaggcggctgccgaattcgacggcagatggccacggcagatcgtgtcttcaattggcctgtgtcggtacggtggcagaatcgattgttgctggggatgggcccggcaatcatggggccagtgccaaccagtttgtcaaccacggtgtaaacatggggaatgtatcggacccaacaaatgcaagtgccacccaggatacgccggaaagacatgcaaccaagaccttaacgaatgtggactaaaaccaagaccttgtaaacatcgctgcatgaacacttatggtagctacaagtgctactgtcttaatggctacatgttgatgcctgacggctcttgttccagcgcactgacctgttcaatggccaattgccagtacggatgcgacgtggtgaaaggccagatcagatgccaatgcccaagtccggggttgcagttagcccccgatggcaggacatgcgttgacgtcgacgaatgcgccaccggaagagccagttgcccaagattcaggcagtgcgtgaatacatttggatcttacatctgtaagtgccataaaggtttcgatttaatgtatataggaggcaaatatcagtgtcacgacattgacgagtgctcactcggccaatatcagtgctctagttttgctagatgctataatatacgtggatcctataaatgtaaatgtaaagaaggttatcagggagatggacttacctgcgtatatattcccaaggtgatgatcgagccgagcggccccatccacgtcccaaaaggtaacggtaccattctgaagggagatactggaaacaataattggatccccgatgttggaagcacctggtggccgcctaaaaccccctacattccaccgattataacaaaccgccctacctcaaagcctactaccagacccacccctaaaccaactccgatccccacgccacctcctcctcctcctctgccaaccgaactgcgaactcctctcccgcccactactcccgagaggccaacaaccggcctcacaactattgcgccagcagcgtcaaccccacccggtggaataactgtggacaacagagtccagacggaccctcagaagccacgcggcgatgtgttcagcgttctagtgcacagctgtaatttcgaccatggcctgtgtggatggattagagagaaagataacgacctgcactgggaacccatacgagaccctgctgggggtcagtacctcacagtgtctgcagccaaagcaccaggaggcaaggcagcgcggctggtcttgcctctgggcaggctcatgcactccggggacctgtgtcttagctttcgtcacaaagttacaggacttcactccggcaccctacaggtcttcgtcagaaagcacggggcccatggagctgcactgtggggcagaaatgggggacatggctggcggcaaactcaaatcaccctgcgaggcgccgatattaaatcagtagtgtttaagggagaaaagagaaggggccatacaggagaaatcggactcgatgatgtatctctgaaaaaagggcattgttcggaagagcggtag

SEQ ID NO: 70962 - DNA, 1530 bp, Artificial Sequence
  derived and/or modified sequence
atggatttcctcctcgcccttgttcttgtttcatctctgtatcttcaagctgccgccgaatttgatgggaggtggcctcgccagatcgttagcagcatcggcttgtgtaggtatggcggtcggatcgattgctgttggggctgggcccgtcagagttggggtcagtgccaacccgtttgtcagcctagatgtaaacacggggaatgtattgggccaaacaaatgcaaatgccatccaggttacgccggtaaaacctgcaatcaagacctcaacgaatgtggactcaaaccaaggccttgtaaacaccgatgcatgaacacgtatggatcttataaatgctactgtctgaatggttatatgttaatgcccgacggcagttgtagcagcgcactcacttgttcaatggccaattgtcagtacggctgcgacgtagtaaaagggcagatacgatgtcaatgtccatcaccaggcctgcaattggcgcctgacggaagaacctgtgtcgatgtggatgagtgcgctacaggtagagctagctgccctagattccggcagtgtgtcaacacattcggtagttacatctgcaaatgtcacaagggatttgacctgatgtacattggagggaaataccaatgtcacgatatagacgaatgctcactcggccagtaccaatgctcatcttttgctaggtgttataacattcgcggctcatataagtgcaaatgtaaggaaggataccaaggcgatggcttaacctgtgtgtatattcctaaagtaatgatcgagccatccggcccaatccatgtgcccaagggaaacggcactattcttaaaggggatacagggaacaataattggataccagacgtgggctcaacttggtggccccccaagaccccttacattcctcctatcatcactaatcgccccacttcgaaacccaccactcgccccactccaaagcctacacctattcctacacccccacccccacctccgctgcccaccgaattgcgcaccccacttccccccacaacgccagaacggccaactactggactgaccacaattgcacccgctgcatcaaccccccccggcggcatcacagtagataacagagtgcaaaccgatccccaaaaaccccgaggagacgtgttcagtgtgttggtccacagctgcaacttcgatcacggactatgcgggtggattagagagaaggataacgatttacactgggagccaattagagacccggccggcggacaatatttgactgtatctgctgcaaaagcccctggaggcaaagccgctcggctagtattgccattgggccgtctcatgcacagcggggacctgtgtctctcattccggcacaaggtcacaggcctccatagtggaaccctccaggtgtttgtgaggaaacacggagcacatggagccgccttgtggggacgtaatggcgggcacggatggcgtcagactcagatcacattgcgaggtgccgacataaaaagcgaatcccaacgatag

SEQ ID NO: 70963 - DNA, 1611 bp, Artificial Sequence
  derived and/or modified sequence
atggatttccttcttgctctggttctggtgtcttctttgtatttacaggctgcagccgagtttgatggcagatggccccgtcagatcgtatcttctatcgggttatgcaggtatggaggccgcatcgactgttgttgggggtgggcacgtcagtcctgggggcagtgccagccagtgtgtcaaccaaggtgtaaacacggcgagtgcatcggccctaataagtgtaaatgccacccgggttatgccggcaagacgtgcaatcaggacttaaatgaatgtggtctgaagccaagaccctgtaagcatcggtgtatgaatacttacggatcttataaatgctattgtctgaacggctacatgctaatgcccgacgggtcatgctccagtgcactgacgtgttcaatggccaactgccagtatggttgcgacgttgttaagggacagatacgatgtcaatgcccgtctcccggattgcagctggcaccagacggccgaacttgtgtagacgttgatgagtgcgctactgggcgagcctcctgccctagattccgtcagtgcgtgaatactttcggctcctacatttgcaagtgtcataagggcttcgatcttatgtatatcggtggaaagtatcagtgccacgatattgacgagtgcagtcttggacaataccaatgctcttctttcgctcgctgttataatatccggggttcctataaatgtaagtgcaaagagggataccagggagacggactgacttgtgtgtatattcccaaagtcatgattgagcctagcggcccaatacacgtccccaaaggcaacggaaccattcttaagggcgatacaggaaataataactggattcccgacgttgggtcgacatggtggccacccaagactccttacataccaccgattatcacaaaccgccccaccagcaaaccaacaaccagaccgacaccaaaacctacaccgattccgacacccccaccaccgcctcctttgcccaccgaacttcgcacaccactccctcctactacgcccgagcgcccaacaacaggtttaactacaattgccccagcagcaagcacaccgcccggtggcatcacagttgataatcgcgtgcaaaccgatccacagaagccgcggggagacgtcttttccgtacttgtccattcctgtaactttgaccacggactttgtgggtggatcagagaaaaggataatgatttgcattgggaacctatcagagatcccgcggggggccagtacctcacagtgtccgctgccaaggctccaggtggtaaagccgcacggctcgtgctcccacttggtaggctgatgcacagcggcgacttatgcctctccttcagacataaagtgacgggcctccattcaggaactctgcaggtgttcgttcggaaacatggggcacatggtgctgccctctggggcaggaacggcggccacggatggcgtcagacacagattacgctgcggggggcagacataaagagtgttgtgttcaaaggtgaaaagaggaggggacatacaggggaaattgggctcgatgatgttagtttaaagaaagggcactgtagcgaagagcgttag

SEQ ID NO: 70964 - DNA, 2362 bp, Artificial Sequence
  derived and/or modified sequence
agaagggagcgggagggggctccgggcgccgcgcagcagacctgctccggccgcgcgcctcgccgctgtcctccgggagcggcagcagtagcccgggcggcgagggctgggggttcctcgagactctcagaggggcgcctcccatcggcgcccaccaccccaacctgttcctcgcgcgccactgcgctgcgccccaggacccgctgcccaacatggattttctcctggcgctggtgctggtatcctcgctctacctgcaggcggccgccgagttcgacgggaggtggcccaggcaaatagtgtcatcgattggcctatgtcgttatggtgggaggattgactgctgctggggctgggctcgccagtcttggggacagtgtcagcctgtgtgccaaccacgatgcaaacatggtgaatgtatcgggccaaacaagtgcaagtgtcatcctggttatgctggaaaaacctgtaatcaagatctaaatgagtgtggcctgaagccccggccctgtaagcacaggtgcatgaacacttacggcagctacaagtgctactgtctcaacggatatatgctcatgccggatggttcctgctcaagtgccctgacctgctccatggcaaactgtcagtatggctgtgatgttgttaaaggacaaatacggtgccagtgcccatcccctggcctgcagctggctcctgatgggaggacctgtgtagatgttgatgaatgtgctacaggaagagcctcctgccctagatttaggcaatgtgtcaacacttttgggagctacatctgcaagtgtcataaaggcttcgatctcatgtatattggaggcaaatatcaatgtcatgacatagacgaatgctcacttggtcagtatcagtgcagcagctttgctcgatgttataacatacgtgggtcctacaagtgcaaatgtaaagaaggataccagggtgatggactgacttgtgtgtatatcccaaaagttatgattgaaccttcaggtccaattcatgtaccaaagggaaatggtaccattttaaagggtgacacaggaaataataattggattcctgatgttggaagtacttggtggcctccgaagacaccatatattcctcctatcattaccaacaggcctacttctaagccaacaacaagacctacaccaaagccaacaccaattcctactccaccaccaccaccacccctgccaacagagctcagaacacctctaccacctacaaccccagaaaggccaaccaccggactgacaactatagcaccagctgccagtacacctccaggagggattacagttgacaacagggtacagacagaccctcagaaacccagaggagatgtgttcagtgttctggtacacagttgtaattttgaccatggactttgtggatggatcagggagaaagacaatgacttgcactgggaaccaatcagggacccagcaggtggacaatatctgacagtgtcggcagccaaagccccagggggaaaagctgcacgcttggtgctacctctcggccgcctcatgcattcaggggacctgtgcctgtcattcaggcacaaggtgacggggctgcactctggcacactccaggtgtttgtgagaaaacacggtgcccacggagcagccctgtggggaagaaatggtggccatggctggaggcaaacacagatcaccttgcgaggggctgacatcaagagcgtcgtcttcaaaggtgaaaaaaggcgtggtcacactggggagattggattagatgatgtgagcttgaaaaaaggccactgctctgaagaacgctaacaactccagaactaacaatgaactcctatgttgctctatcctctttttccaattctcatcttctctcctcttctcccttttatcaggcctaggagaagagtgggtcagtgggtcagaaggaagtctatttggtgacccaggtttttctggcctgcttttgtgcaatcccaatgaacagtgataccctccttgaaatacaggggcatcgcagacacatcaaagccatctgtgggtgttgccttccatcctgtgtctctttcaggaaggcattcagcatgcgtgagccataccatcctccatcctgattacaaggtgctccttgtagcaaattatgagagtgagttacgggagcagtttttaaaagaaatctttgcagatggctatgatgttatgtgttcggtgttgtaccatgagtagtattgacttcccttgagatatgatgtacaatgtgcttgtgaaattgacttaccctcttcacttaagttagttctggcctgacctgaactctgacttttactgccattcactttataaaataa

SEQ ID NO: 70965 - DNA, 1530 bp, Artificial Sequence
  derived and/or modified sequence
atggacttcctgctggccctggtgctggtgagcagcctgtacctgcaggccgccgccgagttcgacggcagatggcccagacagatcgtgagcagcatcggcctgtgcagatacggcggcagaatcgactgctgctggggctgggccagacagagctggggccagtgccagcccgtgtgccagcccagatgcaagcacggcgagtgcatcggccccaacaagtgcaagtgccaccccggctacgccggcaagacctgcaaccaggacctgaacgagtgcggcctgaagcccagaccctgcaagcacagatgcatgaacacctacggcagctacaagtgctactgcctgaacggctacatgctgatgcccgacggcagctgcagcagcgccctgacctgcagcatggccaactgccagtacggctgcgacgtggtgaagggccagatcagatgccagtgccccagccccggcctgcagctggcccccgacggcagaacctgcgtggacgtggacgagtgcgccaccggcagagccagctgccccagattcagacagtgcgtgaacaccttcggcagctacatctgcaagtgccacaagggcttcgacctgatgtacatcggcggcaagtaccagtgccacgacatcgacgagtgcagcctgggccagtaccagtgcagcagcttcgccagatgctacaacatcagaggcagctacaagtgcaagtgcaaggagggctaccagggcgacggcctgacctgcgtgtacatccccaaggtgatgatcgagcccagcggccccatccacgtgcccaagggcaacggcaccatcctgaagggcgacaccggcaacaacaactggatccccgacgtgggcagcacctggtggccccccaagaccccctacatcccccccatcatcaccaacagacccaccagcaagcccaccaccagacccacccccaagcccacccccatccccaccccccccccccccccccccctgcccaccgagctgagaacccccctgccccccaccacccccgagagacccaccaccggcctgaccaccatcgcccccgccgccagcaccccccccggcggcatcaccgtggacaacagagtgcagaccgacccccagaagcccagaggcgacgtgttcagcgtgctggtgcacagctgcaacttcgaccacggcctgtgcggctggatcagagagaaggacaacgacctgcactgggagcccatcagagaccccgccggcggccagtacctgaccgtgagcgccgccaaggcccccggcggcaaggccgccagactggtgctgcccctgggcagactgatgcacagcggcgacctgtgcctgagcttcagacacaaggtgaccggcctgcacagcggcaccctgcaggtgttcgtgagaaagcacggcgcccacggcgccgccctgtggggcagaaacggcggccacggctggagacagacccagatcaccctgagaggcgccgacatcaagagcgagagccagagatag

SEQ ID NO: 70966 - DNA, 3003 bp, Artificial Sequence
  derived and/or modified sequence
gggagggggctccgggcgccgcgcagcagacctgctccggccgcgcgcctcgccgctgtcctccgggagcggcagcagtagcccgggcggcgagggctgggggttcctcgagactctcagaggggcgcctcccatcggcgcccaccaccccaacctgttcctcgcgcgccactgcgctgcgccccaggacccgctgcccaacatggattttctcctggcgctggtgctggtatcctcgctctacctgcaggcggccgccgagttcgacgggaggtggcccaggcaaatagtgtcatcgattggcctatgtcgttatggtgggaggattgactgctgctggggctgggctcgccagtcttggggacagtgtcagcctgtgtgccaaccacgatgcaaacatggtgaatgtatcgggccaaacaagtgcaagtgtcatcctggttatgctggaaaaacctgtaatcaagatctaaatgagtgtggcctgaagccccggccctgtaagcacaggtgcatgaacacttacggcagctacaagtgctactgtctcaacggatatatgctcatgccggatggttcctgctcaagtgccctgacctgctccatggcaaactgtcagtatggctgtgatgttgttaaaggacaaatacggtgccagtgcccatcccctggcctgcagctggctcctgatgggaggacctgtgtagatgttgatgaatgtgctacaggaagagcctcctgccctagatttaggcaatgtgtcaacacttttgggagctacatctgcaagtgtcataaaggcttcgatctcatgtatattggaggcaaatatcaatgtcatgacatagacgaatgctcacttggtcagtatcagtgcagcagctttgctcgatgttataacatacgtgggtcctacaagtgcaaatgtaaagaaggataccagggtgatggactgacttgtgtgtatatcccaaaagttatgattgaaccttcaggtccaattcatgtaccaaagggaaatggtaccattttaaagggtgacacaggaaataataattggattcctgatgttggaagtacttggtggcctccgaagacaccatatattcctcctatcattaccaacaggcctacttctaagccaacaacaagacctacaccaaagccaacaccaattcctactccaccaccaccaccacccctgccaacagagctcagaacacctctaccacctacaaccccagaaaggccaaccaccggactgacaactatagcaccagctgccagtacacctccaggagggattacagttgacaacagggtacagacagaccctcagaaacccagaggagatgtgttcagtgttctggtacacagttgtaattttgaccatggactttgtggatggatcagggagaaagacaatgacttgcactgggaaccaatcagggacccagcaggtggacaatatctgacagtgtcggcagccaaagccccagggggaaaagctgcacgcttggtgctacctctcggccgcctcatgcattcaggggacctgtgcctgtcattcaggcacaaggtgacggggctgcactctggcacactccaggtgtttgtgagaaaacacggtgcccacggagcagccctgtggggaagaaatggtggccatggctggaggcaaacacagatcaccttgcgaggggctgacatcaagagcgaatcacaaagatgattaaagggttggaaaaaaagatctatgatggaaaattaaaggaactgggattattgagcctggagaagagaagactgaggggcaaaccattgatggttttcaagtatatgaagggttggcacagagagggtggcgaccagctgttctccatatgcactaagaatagaacaagaggaaactggcttagactagagtataagggagcatttcttggcaggggccattgttagaatacttcataaaaaaagaagtgtgaaaatctcagtatctctctctctttctaaaaaattagataaaaatttgtctatttaagatggttaaagatgttcttacccaaggaaaagtaacaaattatagaatttcccaaaagatgttttgatcctactagtagtatgcagtgaaaatctttagaactaaataatttggacaaggcttaatttaggcatttccctcttgacctcctaatggagagggattgaaaggggaagagcccaccaaatgctgagctcactgaaatatctctcccttatggcaatcctagcagtattaaagaaaaaaggaaactatttattccaaatgagagtatgatggacagatattttagtatctcagtaatgtcctagtgtggcggtggttttcaatgtttcttcatgttaaaggtataagcctttcatttgttcaatggatgatgtttcagatttttttttttttaagagatccttcaaggaacacagttcagagagattttcatcgggtgcattctctctgcttcgtgtgtgacaagttatcttggctgctgagaaagagtgccctgccccacaccggcagacctttccttcacctcatcagtatgattcagtttctcttatcaattggactctcccaggttccacagaacagtaatattttttgaacaataggtacaatagaaggtcttctgtcatttaacctggtaaaggcagggctggagggggaaaataaatcattaagcctttgagtaacggcagaatatatggctgtagatccatttttaatggttcatttcctttatggtcatataactgcacagctgaagatgaaaggggaaaataaatgaaaattttacttttcgatgccaatgatacattgcactaaactgatggaagaagttatccaaagtactgtataacatcttgtttattatttaatgttttctaaaataaaaaatgttagtggttttccaaatggcctaataaaaacaattatttgtaaataaaaacactgttagtaat

SEQ ID NO: 70967 - DNA, 1611 bp, Artificial Sequence
  derived and/or modified sequence
atggacttcctgctggccctggtgctggtgagcagcctgtacctgcaggccgccgccgagttcgacggcagatggcccagacagatcgtgagcagcatcggcctgtgcagatacggcggcagaatcgactgctgctggggctgggccagacagagctggggccagtgccagcccgtgtgccagcccagatgcaagcacggcgagtgcatcggccccaacaagtgcaagtgccaccccggctacgccggcaagacctgcaaccaggacctgaacgagtgcggcctgaagcccagaccctgcaagcacagatgcatgaacacctacggcagctacaagtgctactgcctgaacggctacatgctgatgcccgacggcagctgcagcagcgccctgacctgcagcatggccaactgccagtacggctgcgacgtggtgaagggccagatcagatgccagtgccccagccccggcctgcagctggcccccgacggcagaacctgcgtggacgtggacgagtgcgccaccggcagagccagctgccccagattcagacagtgcgtgaacaccttcggcagctacatctgcaagtgccacaagggcttcgacctgatgtacatcggcggcaagtaccagtgccacgacatcgacgagtgcagcctgggccagtaccagtgcagcagcttcgccagatgctacaacatcagaggcagctacaagtgcaagtgcaaggagggctaccagggcgacggcctgacctgcgtgtacatccccaaggtgatgatcgagcccagcggccccatccacgtgcccaagggcaacggcaccatcctgaagggcgacaccggcaacaacaactggatccccgacgtgggcagcacctggtggccccccaagaccccctacatcccccccatcatcaccaacagacccaccagcaagcccaccaccagacccacccccaagcccacccccatccccaccccccccccccccccccccctgcccaccgagctgagaacccccctgccccccaccacccccgagagacccaccaccggcctgaccaccatcgcccccgccgccagcaccccccccggcggcatcaccgtggacaacagagtgcagaccgacccccagaagcccagaggcgacgtgttcagcgtgctggtgcacagctgcaacttcgaccacggcctgtgcggctggatcagagagaaggacaacgacctgcactgggagcccatcagagaccccgccggcggccagtacctgaccgtgagcgccgccaaggcccccggcggcaaggccgccagactggtgctgcccctgggcagactgatgcacagcggcgacctgtgcctgagcttcagacacaaggtgaccggcctgcacagcggcaccctgcaggtgttcgtgagaaagcacggcgcccacggcgccgccctgtggggcagaaacggcggccacggctggagacagacccagatcaccctgagaggcgccgacatcaagagcgtggtgttcaagggcgagaagagaagaggccacaccggcgagatcggcctggacgacgtgagcctgaagaagggccactgcagcgaggagagatag

SEQ ID NO: 70968 - DNA, 1530 bp, Artificial Sequence
  derived and/or modified sequence
atggactttctgctggccttggtgctggtgagttccctgtatttacaggcagccgcagagttcgacggtcgctggccgaggcagatcgtaagctcaatcggcctctgtagatacggaggacggatcgattgctgctggggatgggcccgccagtcttggggccagtgccagccagtctgtcagcccaggtgcaagcatggagagtgtatcggacctaataaatgtaaatgccatcctggatacgcaggtaaaacttgcaatcaggacctaaacgaatgcggactcaagccaagaccctgcaagcacaggtgtatgaacacctatggcagctacaagtgttactgcctgaatggttacatgctgatgccggacggatcctgcagctctgcactcacatgcagtatggctaactgccagtacggatgtgatgtggttaaaggtcaaatacggtgccaatgccccagtcccggtctccagctggcaccggatggcagaacctgcgtggatgttgatgagtgcgccaccggaagggcttcctgccctcggttcaggcagtgcgtaaatacatttggctcctacatctgcaagtgccataaaggattcgacttaatgtacattgggggtaagtaccagtgccatgatatagacgagtgctctttgggacagtatcagtgtagttcctttgccagatgttacaatattaggggttcctataagtgcaagtgcaaggaaggctaccagggggatggtttgacatgtgtgtatattcctaaggtgatgattgagccgtccggtccaattcacgtacccaagggaaacggtaccatcctcaaaggagacactggaaacaacaactggatccccgatgttggatctacatggtggcccccgaaaaccccttatatacccccaatcattacaaaccgtcctacatcaaagccgaccacacgccctactccgaaacctaccccgatcccaactcccccaccccctccccctttgcccacagaacttaggacacctctgccccctacaacacccgagaggccaacaacaggcctgaccaccatcgcccccgccgcaagcacacctcccggaggtataactgtggacaatcgcgtgcagacagatccacagaagccacgcggcgacgtgttctcggtactagtgcacagttgtaatttcgaccatgggttgtgtgggtggattcgggaaaaagacaacgacctgcactgggagcccattagggatcctgctggagggcaatacttgaccgtttccgctgcaaaggccccaggggggaaagctgcccggctggttctgccactgggaagactcatgcattccggtgatctgtgtttgtcgttcaggcacaaagttacaggactccacagcggcacactccaagttttcgtgaggaaacatggtgctcacggtgctgccttgtgggggcgtaacggaggccacgggtggcgacagacacagattactcttcggggcgccgatataaaatcagaaagtcagcggtag

SEQ ID NO: 70969 - DNA, 1611 bp, Artificial Sequence
  derived and/or modified sequence
atggacttcctgctggctctggtgcttgtatcaagtttgtacctccaggccgcagcagaatttgacgggaggtggccacgtcagatcgtgagtagtattggcctctgtcgctatggagggagaatagactgttgttggggctgggccaggcagtcatggggccaatgtcaacccgtgtgtcaacctaggtgcaagcacggagaatgcataggtcccaataaatgcaagtgtcatcccggttacgctgggaaaacctgtaatcaggatctaaatgaatgcggactgaagccaagaccctgtaagcatagatgtatgaacacatacggaagctataagtgttattgcttgaacgggtatatgctcatgcccgacgggagttgctcctcagcattgacttgctctatggccaactgtcaatatggatgcgatgtcgttaagggccagatcagatgtcaatgtccctctcctggcctgcagttagcccccgatgggcgaacctgcgttgacgtcgatgaatgtgctacgggacgggctagctgcccaaggttccgccagtgtgtgaacaccttcgggtcatacatttgcaagtgtcacaagggctttgacctaatgtacattggaggcaagtatcagtgccacgacatcgacgagtgtagtctcggccagtaccagtgcagcagcttcgcaagatgctacaatattaggggatcatacaagtgtaagtgcaaggagggttaccagggtgacggattgacgtgcgtgtacattcctaaagtgatgatcgagcccagcggccctattcatgttcccaaggggaacggaaccattctgaaaggagatacaggtaataacaattggatccctgatgttggaagtacctggtggccacctaaaaccccatatatcccacccattataactaacagaccaacaagtaaaccaacaaccaggcctaccccaaagcccacccctatacctacaccaccacctcccccacctcttcctacagaacttaggacaccgctgccccccacgacgccagaaaggcccaccactggcttaacaacgatagctcctgcagcttccacaccccctggtggcattactgttgacaacagagtgcagacagacccccaaaagcccagaggagatgtgttttctgtattagtacattcttgcaatttcgatcatggactgtgcggatggatccgcgaaaaggataacgatttacattgggagccaatcagggacccggccggaggacagtatttgacggtaagcgcggctaaggcacctgggggcaaggccgcccggctcgtgctacctttaggcaggttgatgcactccggtgacctgtgcttgtcatttcggcacaaggttacaggtctgcacagcgggacacttcaagtcttcgtgcgaaagcatggagcccacggggctgcactgtgggggcgaaacggcggacatggctggagacagactcaaattaccctccgtggcgccgatataaagtcggtcgtgtttaaaggagaaaagcgacgtgggcacactggggaaattggcctggatgatgttagcctgaaaaaggggcactgctcagaggaacgatag

SEQ ID NO: 70970 - DNA, 1530 bp, Artificial Sequence
  derived and/or modified sequence
atggacttcctgctggccctggtgctggtgagcagcctgtacctgcaggccgctgctgagtttgatggccgctggccccggcagatcgtgagcagcatcggcctgtgccgctatggaggaagaattgactgctgctggggctgggcccggcagagctggggccagtgccagcctgtgtgccagccccgctgcaagcacggggagtgcatcggccccaacaagtgcaagtgccaccctggctacgccggcaagacctgcaaccaggacctgaatgaatgtggcctgaagccccggccctgcaagcaccgctgcatgaacacctacggcagctacaagtgctactgcctgaatggctacatgctgatgccagatggcagctgcagcagcgccctgacctgcagcatggccaactgccagtatggctgtgatgtggtgaagggccagatccgctgccagtgccccagccctggcctgcagctggccccagatggccgcacctgtgtggatgtggatgaatgtgccaccggccgggccagctgcccccgcttccggcagtgtgtgaacaccttcggcagctacatctgcaagtgccacaagggctttgacctgatgtacatcggcggcaagtaccagtgccacgacattgatgaatgttccctgggccagtaccagtgcagcagctttgcccgctgctacaacatccggggcagctacaagtgcaagtgcaaggagggctaccagggagatggcctgacctgtgtgtacatccccaaggtgatgattgagcccagcggccccatccacgtgcccaagggaaatggcaccatcctgaagggggacaccggcaacaacaactggatcccagatgtgggcagcacctggtggccacccaagaccccctacatcccccccatcatcaccaaccggcccaccagcaagcccaccacccggcccacccccaagcccacccccatccccaccccacctcctcctccacccctgcccacagagctgcggacccccctgccccccaccaccccagagcggcccaccaccggcctgaccaccatcgccccagctgccagcaccccacctgggggcatcaccgtggacaacagagtgcagacagacccccagaagcccagaggagatgtgttttctgtgctggtgcacagctgcaactttgaccacggcctgtgtggctggatccgggagaaggacaatgacctgcactgggagcccatccgggaccctgctgggggccagtacctgactgtgtctgctgccaaggcccctgggggcaaggccgcccggctggtgctgcccctgggccgcctgatgcacagcggggacctgtgcctgtccttccgccacaaggtgacaggcctgcacagcggcaccctgcaggtgtttgtgaggaagcatggagcccacggggccgccctgtggggcagaaatggaggccacggctggaggcagacccagatcaccctgcggggagctgacatcaagtctgagagccagaggtag

SEQ ID NO: 70971 - DNA, 1611 bp, Artificial Sequence
  derived and/or modified sequence
atggacttcctgctggccctggtgctggtgagcagcctgtacctgcaggccgctgctgagtttgatggccgctggccccggcagatcgtgagcagcatcggcctgtgccgctatggaggaagaattgactgctgctggggctgggcccggcagagctggggccagtgccagcctgtgtgccagccccgctgcaagcacggggagtgcatcggccccaacaagtgcaagtgccaccctggctacgccggcaagacctgcaaccaggacctgaatgaatgtggcctgaagccccggccctgcaagcaccgctgcatgaacacctacggcagctacaagtgctactgcctgaatggctacatgctgatgccagatggcagctgcagcagcgccctgacctgcagcatggccaactgccagtatggctgtgatgtggtgaagggccagatccgctgccagtgccccagccctggcctgcagctggccccagatggccgcacctgtgtggatgtggatgaatgtgccaccggccgggccagctgcccccgcttccggcagtgtgtgaacaccttcggcagctacatctgcaagtgccacaagggctttgacctgatgtacatcggcggcaagtaccagtgccacgacattgatgaatgttccctgggccagtaccagtgcagcagctttgcccgctgctacaacatccggggcagctacaagtgcaagtgcaaggagggctaccagggagatggcctgacctgtgtgtacatccccaaggtgatgattgagcccagcggccccatccacgtgcccaagggaaatggcaccatcctgaagggggacaccggcaacaacaactggatcccagatgtgggcagcacctggtggccacccaagaccccctacatcccccccatcatcaccaaccggcccaccagcaagcccaccacccggcccacccccaagcccacccccatccccaccccacctcctcctccacccctgcccacagagctgcggacccccctgccccccaccaccccagagcggcccaccaccggcctgaccaccatcgccccagctgccagcaccccacctgggggcatcaccgtggacaacagagtgcagacagacccccagaagcccagaggagatgtgttttctgtgctggtgcacagctgcaactttgaccacggcctgtgtggctggatccgggagaaggacaatgacctgcactgggagcccatccgggaccctgctgggggccagtacctgactgtgtctgctgccaaggcccctgggggcaaggccgcccggctggtgctgcccctgggccgcctgatgcacagcggggacctgtgcctgtccttccgccacaaggtgacaggcctgcacagcggcaccctgcaggtgtttgtgaggaagcatggagcccacggggccgccctgtggggcagaaatggaggccacggctggaggcagacccagatcaccctgcggggagctgacatcaagtctgtggtgttcaagggggagaagagaagaggccacactggagagatcggcctggatgatgtgtccctgaagaagggccactgcagcgaggagaggtag

SEQ ID NO: 70972 - DNA, 1530 bp, Artificial Sequence
  derived and/or modified sequence
atggacttcctgctggccctggtgctggtgagcagcctgtacctgcaggcagcagccgagtttgacgggaggtggccgcgacagattgtctcttccatcggtttatgccgctacggtggtagaatcgattgctgttggggctgggcccgccagtcttggggccagtgtcagcctgtgtgccagccccggtgcaaacacggagagtgcattggcccaaacaagtgcaagtgccacccaggctatgcaggtaaaacatgtaaccaggacctgaatgaatgcggactcaagccccggccgtgtaagcatcgctgcatgaatacttacggttcttataaatgttactgcctgaacggctacatgctgatgccagacggcagttgcagttccgctctcacctgctccatggcaaattgtcaatacggatgtgatgtagttaaaggacaaatccggtgtcagtgtccgtcccctggactgcagttggctcccgatggcagaacctgtgtggacgtggatgagtgtgccacaggccgggccagctgcccacgttttcggcaatgcgtgaatacctttggctcttatatctgtaagtgtcacaaagggttcgatcttatgtatatcgggggaaagtatcagtgccacgacatagatgagtgctcccttggccagtatcaatgttcaagcttcgctcggtgctacaacatcaggggttcctataaatgtaagtgtaaagaaggataccagggcgatggtttaacatgtgtttatatccccaaggttatgattgagccaagtgggcccatccacgtacctaaaggcaacggaaccattctgaagggcgacacgggtaataacaactggatacctgatgtcggctcgacctggtggccaccgaagacgccttacattccgcctattattaccaatcgccctacctccaagcccaccacgaggccaacgcccaaacctacacctattcccacccccccacctccgccacccctacccacagagctgagaacgcctctcccccctaccacacctgaacgcccaaccacgggactgacaactattgctccagccgcctctactcctcctggaggtattacagtggacaaccgcgttcagaccgatccacagaaacctcgaggtgacgtctttagtgtgctggtccattcgtgcaactttgaccatggcctttgtggctggattcgcgagaaagacaatgatttgcactgggaacccattcgagatcctgccggtggccaatatttgacagtgtcagcggccaaagcacccggcgggaaggccgcccggttagtgttacccttgggccggttaatgcatagtggcgatctgtgtctcagcttccgccacaaggtgactgggctacacagcggtacactccaggtgtttgtgcgcaaacatggtgcccacggagctgctctctggggcagaaatgggggccacggatggagacagacgcagatcacactgcgaggggcagacattaaatccgaaagtcagaggtag

SEQ ID NO: 70973 - DNA, 1611 bp, Artificial Sequence
  derived and/or modified sequence
atggacttcctgctggccctggtgctggtgagcagcctgtacctgcaggctgcggccgagttcgacgggcgatggcctcgccagattgtgagttccatcggactgtgcaggtatggcggccgcatagactgttgctgggggtgggcacgtcagtcttggggacagtgtcagccagtctgtcaaccccgctgtaagcatggcgaatgcatcggaccaaacaagtgtaagtgtcacccaggctacgctggtaagacttgcaaccaggatctgaatgaatgtggacttaaacccaggccctgtaaacacagatgtatgaatacgtatggaagctataaatgctactgtctgaatggatacatgctcatgcctgatggctcctgttcgtctgctttgacgtgctctatggcaaactgccagtatggctgcgacgtagtcaagggccagatccggtgccagtgtcccagccccggactgcagctggcacctgacggaagaacttgcgtagatgtggacgagtgtgctaccggccgtgcttcctgcccccgctttagacagtgtgttaacacgttcggtagctatatttgcaagtgccataaggggttcgacttaatgtacattggtgggaaatatcagtgtcacgacatcgatgaatgcagtctgggccaatatcagtgctcctcctttgctaggtgctataatatacgggggtcttataagtgcaagtgtaaggaaggctaccagggcgacggtctcacctgcgtgtatataccaaaagtgatgatcgaaccctccggtcccatccacgtgccaaaaggcaatggaaccatccttaagggtgacaccggcaataataactggataccagatgtggggtccacctggtggccacccaagactccatacattcctcccatcatcaccaaccgtcccacatccaaacctaccactagacctactccaaaacccaccccgattcctaccccccctcccccaccacctcttcctacagagctccggactccgttaccaccgaccacccctgagcgtcctacaaccggcctgaccaccatcgcccctgccgcctcaaccccgccaggcggcatcactgtggataatagggtgcagactgacccacagaaacctagaggtgatgtcttctcggtgttggtgcatagctgtaatttcgaccacggcctctgtggctggatccgggagaaggacaacgacctgcattgggagccaatacgcgatcccgcggggggtcagtacctgaccgtgagcgccgcaaaggcccccggaggcaaggctgccaggctggtgctccctctcggccggttgatgcactctggagacctctgcctgtcgtttcgccataaggtgaccggcctgcactccggtacccttcaagtgtttgtccgcaaacacggtgcacacggtgctgccttgtggggcaggaatggcgggcatggctggcggcaaacccagattaccctgagaggcgcggacattaaatcagttgtgtttaagggcgaaaagcggagagggcatacaggagagatcggcctggatgatgtctctctcaaaaaaggacattgcagcgaagagcggtag

SEQ ID NO: 70974 - RNA, 1530 nt, Artificial Sequence
  derived and/or modified sequence
auggacuuucuccuugcccucguuuuaguguccagucuguaucuccaggcagccgcagaguuugacgggcgcuggccaaggcagauagucucuaguauuggguuaugucguuauggggggaggauugauuguuguugggggugggcuagacagucuuggggucaaugucagccggugugucagccgagauguaaacacggcgaaugcauagggccgaacaaauguaaaugccauccaggcuaugcagggaaaacaugcaaucaggacuugaacgagugcggcuugaaaccccguccuugcaagcaccgauguaugaauaccuaugguuccuacaaaugcuacugccucaacggauauaugcugaugccugaugggucuuguucuuccgcucucaccugcucuauggcuaacugccaguacggaugcgacguugugaaaggccaaauuagaugucagugcccauccccuggucuacagcuggcuccggacgggcgaacauguguggauguggacgagugcgcuaccggcagggccucuugcccacgguuccgacagugugucaauacguucggaucuuauauuuguaaaugucauaaaggguuugaccugauguacauuggagggaaauaccaaugucacgauauagacgaaugcucacucggccaguaccaaugcucaucuuuugcuagguguuauaacauucgcggcucauauaagugcaaauguaaggaaggauaccaaggcgauggcuuaaccuguguguauauuccuaaaguaaugaucgagccauccggcccaauccaugugcccaagggaaacggcacuauucuuaaaggggauacagggaacaauaauuggauaccagacgugggcucaacuugguggccccccaagaccccuuacauuccaccaauuaucacaaacaggcccacuaguaaaccaaccacacguccaacaccaaagccaaccccaauuccuaccccaccgccucccccccccuuacccacggaacugcgcacuccacugccccccaccacaccggagcgaccuacaacugggcuaacaacuauugcucccgccgcuucuacaccaccgggcgggauuacuguggauaaccgcgugcagacggacccucagaagccaagaggagacguauuuuccgugcugguccauucuugcaauuuugaucauggacugugcggauggauucgggagaaggauaaugaccuucauugggagccaauccgggaccccgccggcggucaguaucucaccgugucggcagccaaagcccccgguggcaaagcagcucgccugguucucccauugggcagguugaugcauagcggggaccucugccuguccuuccggcacaaagugacggggcugcauucaggcacccugcagguguucgugcggaaacacggcgcacauggggccgcuuuguggggacgaaacggcgggcauggauggagacagacccagaucacacugagaggcgcugacauuaaguccgagucgcagcgcuag

SEQ ID NO: 70975 - RNA, 1611 nt, Artificial Sequence
  derived and/or modified sequence
auggacuuuuugcucgcgcuggugcuugugagcucccuguaccugcaggcggcugccgaauucgacggcagauggccacggcagaucgugucuucaauuggccugugucgguacgguggcagaaucgauuguugcuggggaugggcccggcaaucauggggccagugccaaccaguuugucaaccacgguguaaacauggggaauguaucggacccaacaaaugcaagugccacccaggauacgccggaaagacaugcaaccaagaccuuaacgaauguggacuaaaaccaagaccuuguaaacaucgcugcaugaacacuuaugguagcuacaagugcuacugucuuaauggcuacauguugaugccugacggcucuuguuccagcgcacugaccuguucaauggccaauugccaguacggaugcgacguggugaaaggccagaucagaugccaaugcccaaguccgggguugcaguuagcccccgauggcaggacaugcguugacgucgacgaaugcgccaccggaagagccaguugcccaagauucaggcagugcgugaauacauuuggaucuuacaucuguaagugccauaaagguuucgauuuaauguauauaggaggcaaauaucagugucacgacauugacgagugcucacucggccaauaucagugcucuaguuuugcuagaugcuauaauauacguggauccuauaaauguaaauguaaagaagguuaucagggagauggacuuaccugcguauauauucccaaggugaugaucgagccgagcggccccauccacgucccaaaagguaacgguaccauucugaagggagauacuggaaacaauaauuggauccccgauguuggaagcaccugguggccgccuaaaacccccuacauuccaccgauuauaacaaaccgcccuaccucaaagccuacuaccagacccaccccuaaaccaacuccgauccccacgccaccuccuccuccuccucugccaaccgaacugcgaacuccucucccgcccacuacucccgagaggccaacaaccggccucacaacuauugcgccagcagcgucaaccccacccgguggaauaacuguggacaacagaguccagacggacccucagaagccacgcggcgauguguucagcguucuagugcacagcuguaauuucgaccauggccuguguggauggauuagagagaaagauaacgaccugcacugggaacccauacgagacccugcugggggucaguaccucacagugucugcagccaaagcaccaggaggcaaggcagcgcggcuggucuugccucugggcaggcucaugcacuccggggaccugugucuuagcuuucgucacaaaguuacaggacuucacuccggcacccuacaggucuucgucagaaagcacggggcccauggagcugcacuguggggcagaaaugggggacauggcuggcggcaaacucaaaucacccugcgaggcgccgauauuaaaucaguaguguuuaagggagaaaagagaaggggccauacaggagaaaucggacucgaugauguaucucugaaaaaagggcauuguucggaagagcgguag

SEQ ID NO: 70976 - RNA, 1530 nt, Artificial Sequence
  derived and/or modified sequence
auggauuuccuccucgcccuuguucuuguuucaucucuguaucuucaagcugccgccgaauuugaugggagguggccucgccagaucguuagcagcaucggcuuguguagguauggcggucggaucgauugcuguuggggcugggcccgucagaguuggggucagugccaacccguuugucagccuagauguaaacacggggaauguauugggccaaacaaaugcaaaugccauccagguuacgccgguaaaaccugcaaucaagaccucaacgaauguggacucaaaccaaggccuuguaaacaccgaugcaugaacacguauggaucuuauaaaugcuacugucugaaugguuauauguuaaugcccgacggcaguuguagcagcgcacucacuuguucaauggccaauugucaguacggcugcgacguaguaaaagggcagauacgaugucaauguccaucaccaggccugcaauuggcgccugacggaagaaccugugucgauguggaugagugcgcuacagguagagcuagcugcccuagauuccggcagugugucaacacauucgguaguuacaucugcaaaugucacaagggauuugaccugauguacauuggagggaaauaccaaugucacgauauagacgaaugcucacucggccaguaccaaugcucaucuuuugcuagguguuauaacauucgcggcucauauaagugcaaauguaaggaaggauaccaaggcgauggcuuaaccuguguguauauuccuaaaguaaugaucgagccauccggcccaauccaugugcccaagggaaacggcacuauucuuaaaggggauacagggaacaauaauuggauaccagacgugggcucaacuugguggccccccaagaccccuuacauuccuccuaucaucacuaaucgccccacuucgaaacccaccacucgccccacuccaaagccuacaccuauuccuacacccccacccccaccuccgcugcccaccgaauugcgcaccccacuuccccccacaacgccagaacggccaacuacuggacugaccacaauugcacccgcugcaucaaccccccccggcggcaucacaguagauaacagagugcaaaccgauccccaaaaaccccgaggagacguguucaguguguugguccacagcugcaacuucgaucacggacuaugcggguggauuagagagaaggauaacgauuuacacugggagccaauuagagacccggccggcggacaauauuugacuguaucugcugcaaaagccccuggaggcaaagccgcucggcuaguauugccauugggccgucucaugcacagcggggaccugugucucucauuccggcacaaggucacaggccuccauaguggaacccuccagguguuugugaggaaacacggagcacauggagccgccuuguggggacguaauggcgggcacggauggcgucagacucagaucacauugcgaggugccgacauaaaaagcgaaucccaacgauag

SEQ ID NO: 70977 - RNA, 1611 nt, Artificial Sequence
  derived and/or modified sequence
auggauuuccuucuugcucugguucuggugucuucuuuguauuuacaggcugcagccgaguuugauggcagauggccccgucagaucguaucuucuaucggguuaugcagguauggaggccgcaucgacuguuguugggggugggcacgucaguccugggggcagugccagccagugugucaaccaagguguaaacacggcgagugcaucggcccuaauaaguguaaaugccacccggguuaugccggcaagacgugcaaucaggacuuaaaugaauguggucugaagccaagacccuguaagcaucgguguaugaauacuuacggaucuuauaaaugcuauugucugaacggcuacaugcuaaugcccgacgggucaugcuccagugcacugacguguucaauggccaacugccaguaugguugcgacguuguuaagggacagauacgaugucaaugcccgucucccggauugcagcuggcaccagacggccgaacuuguguagacguugaugagugcgcuacugggcgagccuccugcccuagauuccgucagugcgugaauacuuucggcuccuacauuugcaagugucauaagggcuucgaucuuauguauaucgguggaaaguaucagugccacgauauugacgagugcagucuuggacaauaccaaugcucuucuuucgcucgcuguuauaauauccgggguuccuauaaauguaagugcaaagagggauaccagggagacggacugacuuguguguauauucccaaagucaugauugagccuagcggcccaauacacguccccaaaggcaacggaaccauucuuaagggcgauacaggaaauaauaacuggauucccgacguugggucgacaugguggccacccaagacuccuuacauaccaccgauuaucacaaaccgccccaccagcaaaccaacaaccagaccgacaccaaaaccuacaccgauuccgacacccccaccaccgccuccuuugcccaccgaacuucgcacaccacucccuccuacuacgcccgagcgcccaacaacagguuuaacuacaauugccccagcagcaagcacaccgcccgguggcaucacaguugauaaucgcgugcaaaccgauccacagaagccgcggggagacgucuuuuccguacuuguccauuccuguaacuuugaccacggacuuuguggguggaucagagaaaaggauaaugauuugcauugggaaccuaucagagaucccgcggggggccaguaccucacaguguccgcugccaaggcuccaggugguaaagccgcacggcucgugcucccacuugguaggcugaugcacagcggcgacuuaugccucuccuucagacauaaagugacgggccuccauucaggaacucugcagguguucguucggaaacauggggcacauggugcugcccucuggggcaggaacggcggccacggauggcgucagacacagauuacgcugcggggggcagacauaaagaguguuguguucaaaggugaaaagaggaggggacauacaggggaaauugggcucgaugauguuaguuuaaagaaagggcacuguagcgaagagcguuag

SEQ ID NO: 70978 - protein, 566 aa, Artificial Sequence
  derived and/or modified sequence
MDFLLALVLVSSLYLQAAAEFDGRWPRQIVSSIGLCRYGGRIDCCWGWARQSWGQCQPVCQPRCKHGECIGPNKCKCHPGYAGKTCNQDEHIPAPLDQGSEQPLFQPLDHQATSLPSRDLNECGLKPRPCKHRCMNTYGSYKCYCLNGYMLMPDGSCSSALTCSMANCQYGCDVVKGQIRCQCPSPGLQLAPDGRTCVDVDECATGRASCPRFRQCVNTFGSYICKCHKGFDLMYIGGKYQCHDIDECSLGQYQCSSFARCYNIRGSYKCKCKEGYQGDGLTCVYIPKVMIEPSGPIHVPKGNGTILKGDTGNNNWIPDVGSTWWPPKTPYIPPIITNRPTSKPTTRPTPKPTPIPTPPPPPPLPTELRTPLPPTTPERPTTGLTTIAPAASTPPGGITVDNRVQTDPQKPRGDVFSVLVHSCNFDHGLCGWIREKDNDLHWEPIRDPAGGQYLTVSAAKAPGGKAARLVLPLGRLMHSGDLCLSFRHKVTGLHSGTLQVFVRKHGAHGAALWGRNGGHGWRQTQITLRGADIKSVVFKGEKRRGHTGEIGLDDVSLKKGHCSEER

SEQ ID NO: 70979 - DNA, 1701 bp, Artificial Sequence
  derived and/or modified sequence
atggacttcttactggcgctcgtcttggtctcatctctatacttgcaggccgcagctgaattcgatggccgatggcctcggcagattgtatctagcataggtctctgtagatacggcggaagaatagattgttgctggggttgggctaggcagagctgggggcagtgccagcccgtctgtcagccaagatgtaagcatggcgaatgtataggaccaaacaaatgcaaatgtcatccaggctacgcaggtaagacttgtaaccaagacgagcacatcccagcccctctggatcagggaagcgagcagccgctgttccaaccactggaccaccaggccacaagcctgccctccagggacttgaatgaatgcggcttgaaaccacgcccatgtaagcacaggtgcatgaatacatacgggtcctataagtgctattgtttaaacgggtacatgctgatgccagatggctcctgctcctccgcccttacatgcagtatggccaactgccaatacggctgcgatgttgtcaaaggacagataaggtgtcagtgtccttcaccgggactgcagctggcccctgatgggagaacctgcgtggacgtagacgagtgcgcaaccggaagagctagttgcccaagatttcgacaatgcgtcaacaccttcggatcatatatctgcaagtgtcacaaaggttttgacctcatgtacatcggcggtaaatatcagtgccacgacatcgacgaatgcagccttgggcagtatcaatgcagtagcttcgcgagatgctacaatattaggggatcatataagtgtaagtgcaaggaaggataccagggtgacggcctcacttgtgtttacatcccaaaagttatgatcgagcctagcggtcccatccatgtgccaaaagggaatggaaccatcttgaagggagatacgggcaataacaactggatccctgacgtcggatctacttggtggcctccaaagacgccatatatccccccaataataactaaccgccctacttcgaaaccaactacccgccctactccaaagcccactcctattcccactccaccaccacctccccctctgcctacggagttgcgcacacccttaccccctactacgccagagcggcctaccaccggacttaccaccatcgcacctgccgctagcacaccccctggcggtattaccgtagataacagggtccagactgacccacaaaaaccgagaggagacgtgttttctgtgcttgtgcatagctgcaatttcgaccatgggctttgcggctggatacgggagaaagataacgatttgcactgggaacccatccgagatccggcagggggacagtacctgactgtttctgccgcaaaggctcctggaggtaaagccgctcggcttgtcctacccctgggccgattgatgcatagtggcgacctgtgcctgagcttccgccataaagttactggcttacatagcgggacattgcaggtttttgtgcggaaacatggcgcacatggagccgcattgtgggggaggaatggcggacacggatggaggcagactcagattactttgagaggggctgacattaagtcagttgttttcaaaggggaaaagcgcagggggcacacgggcgaaatcgggttagacgatgttagtttgaagaaagggcattgttcggaggagcggtag

SEQ ID NO: 70980 - DNA, 1701 bp, Artificial Sequence
  derived and/or modified sequence
atggattttttacttgcacttgttttggtctcatctctatatcttcaggccgctgcagaattcgacgggagatggcccagacaaattgtttcgtctattggcttgtgcaggtatggaggcagaattgactgttgctggggttgggctcgacagtcctggggacagtgtcagcccgtgtgccagccacggtgcaaacatggagagtgtatcggtcccaataagtgcaaatgtcacccaggctatgccgggaaaacttgtaaccaggacgaacatattcctgcccccctggaccaaggcagtgagcagccactgtttcaacccctggatcaccaagccacatccctgccctcccgggacttgaacgaatgcggcctcaaacccaggccttgcaaacatcgctgcatgaacacctacggatcttacaaatgctactgcctgaatggctacatgctgatgcccgatgggagttgttcctctgctctcacatgctcgatggcaaattgtcaatacgggtgcgatgtcgtcaaaggccaaataaggtgccaatgtcctagccccggacttcaattggccccagatggcaggacctgcgtcgacgttgatgagtgcgccactggccgcgcctcctgcccccgcttccggcagtgtgtgaacaccttcgggagctacatctgcaagtgccacaaagggttcgatctcatgtatatcggaggaaaataccaatgccatgatatagatgaatgctcccttggccagtatcagtgtagctcgtttgcacggtgctataatataagaggatcatataaatgcaaatgtaaggaaggctatcagggcgatgggctgacctgcgtctacataccgaaagttatgatcgagccatccgggccgatacacgtgcctaagggcaacggaaccatcctgaaaggcgacacagggaataataattggatacctgacgtaggaagtacatggtggcctcctaagactccgtacatacctccaatcatcaccaaccgccccaccagcaaaccaacaacccgaccaactcctaaaccaacccccatacccacccctcctcccccgccacccctgccaactgaacttcgtacgcccctgcctcctaccacaccagagcggcctactactggactaacaaccatcgccccagctgcatctactcctcctggtggcattactgtagataaccgcgtgcagaccgatcctcaaaagccgagaggggacgttttctctgtgttggtgcactcttgtaacttcgaccacggactgtgcggatggatacgagagaaagacaatgaccttcactgggagccaatcagggatccagccggtgggcagtacctgacagtgtccgctgctaaagcaccaggaggaaaggctgctcggctggttcttcccctcggtagactgatgcattcaggcgacttgtgtttaagctttcggcataaggtaactgggctgcattctggaacgctccaggtgttcgtgagaaagcacggcgctcatggggcagctctctggggccgcaacggtggccacggctggaggcaaacacaaatcacacttcggggagcagacatcaagagtgtggttttcaagggagagaagcggcgaggccatacaggcgaaatcggtttggatgatgtgagcctgaaaaaaggacattgttctgaggagagatag

SEQ ID NO: 70981 - DNA, 1701 bp, Artificial Sequence
  derived and/or modified sequence
atggactttctcctggccctggtattggtatcctccctctacttacaggctgcagctgagtttgacggtcgttggccgagacagatagtttcttctattggtttgtgcagatatggggggcgcattgattgttgctggggctgggcgcgccagtcatggggtcagtgccagcccgtgtgtcaaccgagatgcaaacacggagagtgcataggacccaataaatgcaagtgtcaccctggctatgccggaaagacatgcaatcaagatgaacatatccccgcccctcttgaccaaggttctgaacagccattgttccaacccttagaccaccaagcgacctccctgccttctcgagatctcaatgagtgtgggttgaagcctaggccttgcaagcacagatgtatgaatacgtatggctcttacaaatgttactgcctaaacggatatatgctcatgccagatggatcgtgtagctcagccttgacttgttctatggctaactgtcagtatggttgtgacgtggtgaaaggccagattcgctgccaatgtcctagcccaggcctccaactagcccctgatggacggacgtgtgtggacgttgacgagtgcgctaccggtcgggcttcttgtcctcgctttcgacagtgcgtaaacaccttcggttcctatatatgcaagtgtcacaaggggtttgaccttatgtatattgggggaaagtatcaatgccatgacatcgacgaatgtagcttgggccagtatcagtgcagttccttcgcaagatgctacaatatacgaggatcttataagtgcaaatgcaaggaaggttaccaaggagatgggcttacatgcgtttatattcccaaggtgatgatagagccatcagggccaatacatgtccctaagggcaacggaaccatcctgaaaggcgacacagggaataataattggatacctgacgtaggaagtacatggtggcctcctaagactccgtacatacctccaatcatcaccaaccgccccaccagcaaaccaacaacccgaccaactcctaaaccaacccccatacccacccctcctcccccgccacccctgccaactgaacttcgtacgcccctgcctcctaccacaccagagcggcctactactggactaacaaccatcgccccagctgcatctactcctcctggtggcattactgtagacaatagagtgcaaaccgacccccaaaagccacgaggagatgtcttttctgtattagtgcactcgtgcaattttgaccatggcttgtgtggatggatcagggagaaggataatgacttgcattgggaacccattagggacccggccgggggacagtatcttaccgtatcagccgcgaaagcgcccggaggaaaagccgccagacttgtgttgccactgggccgacttatgcatagtggcgatttgtgtctcagcttccgccacaaagtgacaggcctacattcagggacactgcaggtgttcgtgcggaaacacggggcgcacggggctgcattgtggggcagaaatggtggacatggctggaggcagacacagattactctacggggagcggatatcaagtcggtggtatttaagggtgaaaaacggagggggcatacaggagagatcggactggacgatgtttctttgaagaaaggacattgttccgaagaaagatag

SEQ ID NO: 70982 - DNA, 2187 bp, Artificial Sequence
  derived and/or modified sequence
gcgcgcctcgccgctgtcctccgggagcggcagcagtagcccgggcggcgagggctgggggttcctcgagactctcagaggggcgcctcccatcggcgcccaccaccccaacctgttcctcgcgcgccactgcgctgcgccccaggacccgctgcccaacatggattttctcctggcgctggtgctggtatcctcgctctacctgcaggcggccgccgagttcgacgggaggtggcccaggcaaatagtgtcatcgattggcctatgtcgttatggtgggaggattgactgctgctggggctgggctcgccagtcttggggacagtgtcagcctgtgtgccaaccacgatgcaaacatggtgaatgtatcgggccaaacaagtgcaagtgtcatcctggttatgctggaaaaacctgtaatcaagacgagcacatcccagctcctcttgaccaaggcagtgaacagcctcttttccaacccctggatcaccaagccacaagtttgccttcaagggatctaaatgagtgtggcctgaagccccggccctgtaagcacaggtgcatgaacacttacggcagctacaagtgctactgtctcaacggatatatgctcatgccggatggttcctgctcaagtgccctgacctgctccatggcaaactgtcagtatggctgtgatgttgttaaaggacaaatacggtgccagtgcccatcccctggcctgcagctggctcctgatgggaggacctgtgtagatgttgatgaatgtgctacaggaagagcctcctgccctagatttaggcaatgtgtcaacacttttgggagctacatctgcaagtgtcataaaggcttcgatctcatgtatattggaggcaaatatcaatgtcatgacatagacgaatgctcacttggtcagtatcagtgcagcagctttgctcgatgttataacatacgtgggtcctacaagtgcaaatgtaaagaaggataccagggtgatggactgacttgtgtgtatatcccaaaagttatgattgaaccttcaggtccaattcatgtaccaaagggaaatggtaccattttaaagggtgacacaggaaataataattggattcctgatgttggaagtacttggtggcctccgaagacaccatatattcctcctatcattaccaacaggcctacttctaagccaacaacaagacctacaccaaagccaacaccaattcctactccaccaccaccaccacccctgccaacagagctcagaacacctctaccacctacaaccccagaaaggccaaccaccggactgacaactatagcaccagctgccagtacacctccaggagggattacagttgacaacagggtacagacagaccctcagaaacccagaggagatgtgttcagtgttctggtacacagttgtaattttgaccatggactttgtggatggatcagggagaaagacaatgacttgcactgggaaccaatcagggacccagcaggtggacaatatctgacagtgtcggcagccaaagccccagggggaaaagctgcacgcttggtgctacctctcggccgcctcatgcattcaggggacctgtgcctgtcattcaggcacaaggtgacggggctgcactctggcacactccaggtgtttgtgagaaaacacggtgcccacggagcagccctgtggggaagaaatggtggccatggctggaggcaaacacagatcaccttgcgaggggctgacatcaagagcgtcgtcttcaaaggtgaaaaaaggcgtggtcacactggggagattggattagatgatgtgagcttgaaaaaaggccactgctctgaagaacgctaacaactccagaactaacaatgaactcctatgttgctctatcctctttttccaattctcatcttctctcctcttctcccttttatcaggcctaggagaagagtgggtcagtgggtcagaaggaagtctatttggtgacccaggtttttctggcctgcttttgtgcaatcccaatgaacagtgataccctccttgaaatacaggggcatcgcagacacatcaaagccatctgtgggtgttgccttccatcctgtgtctctttcaggaaggcattcagcatgcgtgagccataccatcctccatcctgattacaaggtgctccttgtagc

SEQ ID NO: 70983 - DNA, 1701 bp, Artificial Sequence
  derived and/or modified sequence
atggacttcctgctggccctggtgctggtgagcagcctgtacctgcaggccgccgccgagttcgacggcagatggcccagacagatcgtgagcagcatcggcctgtgcagatacggcggcagaatcgactgctgctggggctgggccagacagagctggggccagtgccagcccgtgtgccagcccagatgcaagcacggcgagtgcatcggccccaacaagtgcaagtgccaccccggctacgccggcaagacctgcaaccaggacgagcacatccccgcccccctggaccagggcagcgagcagcccctgttccagcccctggaccaccaggccaccagcctgcccagcagagacctgaacgagtgcggcctgaagcccagaccctgcaagcacagatgcatgaacacctacggcagctacaagtgctactgcctgaacggctacatgctgatgcccgacggcagctgcagcagcgccctgacctgcagcatggccaactgccagtacggctgcgacgtggtgaagggccagatcagatgccagtgccccagccccggcctgcagctggcccccgacggcagaacctgcgtggacgtggacgagtgcgccaccggcagagccagctgccccagattcagacagtgcgtgaacaccttcggcagctacatctgcaagtgccacaagggcttcgacctgatgtacatcggcggcaagtaccagtgccacgacatcgacgagtgcagcctgggccagtaccagtgcagcagcttcgccagatgctacaacatcagaggcagctacaagtgcaagtgcaaggagggctaccagggcgacggcctgacctgcgtgtacatccccaaggtgatgatcgagcccagcggccccatccacgtgcccaagggcaacggcaccatcctgaagggcgacaccggcaacaacaactggatccccgacgtgggcagcacctggtggccccccaagaccccctacatcccccccatcatcaccaacagacccaccagcaagcccaccaccagacccacccccaagcccacccccatccccaccccccccccccccccccccctgcccaccgagctgagaacccccctgccccccaccacccccgagagacccaccaccggcctgaccaccatcgcccccgccgccagcaccccccccggcggcatcaccgtggacaacagagtgcagaccgacccccagaagcccagaggcgacgtgttcagcgtgctggtgcacagctgcaacttcgaccacggcctgtgcggctggatcagagagaaggacaacgacctgcactgggagcccatcagagaccccgccggcggccagtacctgaccgtgagcgccgccaaggcccccggcggcaaggccgccagactggtgctgcccctgggcagactgatgcacagcggcgacctgtgcctgagcttcagacacaaggtgaccggcctgcacagcggcaccctgcaggtgttcgtgagaaagcacggcgcccacggcgccgccctgtggggcagaaacggcggccacggctggagacagacccagatcaccctgagaggcgccgacatcaagagcgtggtgttcaagggcgagaagagaagaggccacaccggcgagatcggcctggacgacgtgagcctgaagaagggccactgcagcgaggagagatag

SEQ ID NO: 70984 - DNA, 1701 bp, Artificial Sequence
  derived and/or modified sequence
atggactttctgctggcacttgtcctggtgagctctctgtacctacaagcagcagccgaatttgatggcagatggcccaggcaaattgtgtcatcgatcgggttatgcaggtatgggggccgcattgactgttgttggggatgggcgaggcagtcttggggacagtgccagcctgtctgtcagcccaggtgcaaacatggggaatgtattggtcctaataaatgcaagtgtcaccctggttacgctggcaagacttgcaatcaggatgaacacattcctgcccccttggatcagggatctgagcagcccctgtttcagccactagatcatcaggcaacctcgctgccatcacgggacttaaatgaatgcgggcttaagcctaggccttgtaaacacaggtgcatgaacacctatggttcatacaagtgctattgtttgaatggctacatgctgatgcccgacggttcctgctcctccgctctcacatgctccatggcgaactgtcagtatggctgcgatgtcgttaaagggcagattaggtgtcagtgtccctctcctggcctgcaacttgcccccgacggcagaacttgtgttgacgtcgatgagtgtgccacagggcgtgcctcttgcccacggttccgacaatgcgttaatacattcggtagttatatatgcaagtgccataaaggattcgacctgatgtacattggaggtaaataccagtgccacgatatcgatgaatgtagtctgggccagtatcagtgcagtagctttgctcgctgttataatattagaggctcctacaaatgtaagtgcaaggaaggttatcagggggacggactgacatgtgtctatattcccaaagtcatgattgagccaagcggacccattcacgtgcctaaggggaacgggaccattctgaagggcgataccgggaataataattggattccggacgtcggaagtacgtggtggccaccaaaaacaccgtatatccctcctattataacaaaccgccccacctccaagcctaccaccagacccaccccaaagcccaccccaattcctaccccccctccccccccaccgctcccaactgagctgagaacacctctgccgcctaccacccccgagaggcccaccacagggctcactaccattgcccccgcggcgagtactcctcctggtggcatcacggtggacaaccgcgtgcagaccgaccctcagaagcccaggggagatgtattctctgtgctcgtgcactcatgcaattttgaccacggcttgtgcggttggataagagagaaggacaatgacctacattgggagcccatcagagacccggccgggggccagtatttgacagtgtctgctgctaaggccccaggtggcaaagccgcccggttagtacttcctttgggccgcctaatgcactcaggagatctgtgcctgagtttccggcacaaggtgaccggcctccacagtggcaccctgcaggttttcgtgagaaagcatggtgcccatggtgccgccctgtgggggcgcaatggtgggcatggttggcggcaaacccagatcactctccgaggagctgacatcaagtctgtggtgttcaagggagagaaacggagagggcacactggggagatcggcctggatgatgtgtccctgaagaaaggacactgcagtgaggaacggtag

SEQ ID NO: 70985 - DNA, 1701 bp, Artificial Sequence
  derived and/or modified sequence
atggacttcctgctggccctggtgctggtgagcagcctgtacctgcaggccgctgctgagtttgatggccgctggccccggcagatcgtgagcagcatcggcctgtgccgctatggaggaagaattgactgctgctggggctgggcccggcagagctggggccagtgccagcctgtgtgccagccccgctgcaagcacggggagtgcatcggccccaacaagtgcaagtgccaccctggctacgccggcaagacctgcaaccaggatgagcacatcccagcccccctggaccagggcagcgagcagcccctcttccagcccctggaccaccaggccaccagcctgcccagccgggacctgaatgaatgtggcctgaagccccggccctgcaagcaccgctgcatgaacacctacggcagctacaagtgctactgcctgaatggctacatgctgatgccagatggcagctgcagcagcgccctgacctgcagcatggccaactgccagtatggctgtgatgtggtgaagggccagatccgctgccagtgccccagccctggcctgcagctggccccagatggccgcacctgtgtggatgtggatgaatgtgccaccggccgggccagctgcccccgcttccggcagtgtgtgaacaccttcggcagctacatctgcaagtgccacaagggctttgacctgatgtacatcggcggcaagtaccagtgccacgacattgatgaatgttccctgggccagtaccagtgcagcagctttgcccgctgctacaacatccggggcagctacaagtgcaagtgcaaggagggctaccagggagatggcctgacctgtgtgtacatccccaaggtgatgattgagcccagcggccccatccacgtgcccaagggaaatggcaccatcctgaagggggacaccggcaacaacaactggatcccagatgtgggcagcacctggtggccacccaagaccccctacatcccccccatcatcaccaaccggcccaccagcaagcccaccacccggcccacccccaagcccacccccatccccaccccacctcctcctccacccctgcccacagagctgcggacccccctgccccccaccaccccagagcggcccaccaccggcctgaccaccatcgccccagctgccagcaccccacctgggggcatcaccgtggacaacagagtgcagacagacccccagaagcccagaggagatgtgttttctgtgctggtgcacagctgcaactttgaccacggcctgtgtggctggatccgggagaaggacaatgacctgcactgggagcccatccgggaccctgctgggggccagtacctgactgtgtctgctgccaaggcccctgggggcaaggccgcccggctggtgctgcccctgggccgcctgatgcacagcggggacctgtgcctgtccttccgccacaaggtgacaggcctgcacagcggcaccctgcaggtgtttgtgaggaagcatggagcccacggggccgccctgtggggcagaaatggaggccacggctggaggcagacccagatcaccctgcggggagctgacatcaagtctgtggtgttcaagggggagaagagaagaggccacactggagagatcggcctggatgatgtgtccctgaagaagggccactgcagcgaggagaggtag

SEQ ID NO: 70986 - DNA, 1701 bp, Artificial Sequence
  derived and/or modified sequence
atggacttcctgctggccctggtgctggtgagcagcctgtacctgcaggcagccgcggaatttgacgggcgctggccacgccagatcgtctctagtattggactatgccgatatggcggcagaatcgattgctgctggggttgggcccggcagtcctggggacagtgtcagccagtgtgccagccaagatgcaagcacggggaatgcattggccccaacaagtgtaaatgccaccccggctacgcgggtaagacatgtaaccaggatgagcacatccccgccccactggatcagggaagtgagcagccacttttccaaccgctcgatcatcaagctaccagcctgccatcacgcgacttaaatgaatgtggcctgaagcccaggccttgtaaacaccgttgcatgaacacctacggatcttacaagtgctactgcttaaatggctatatgctgatgcctgatgggagctgttcttcagcactcacctgttcaatggctaactgccagtatgggtgtgatgttgttaaggggcagattagatgtcagtgcccttccccaggcctgcaactggctcctgacgggcgcacttgtgtagacgtcgacgaatgtgccaccggcagggcgagttgcccacgcttccggcaatgtgttaatacattcggctcctacatctgtaagtgccataagggttttgacttgatgtacataggcggtaagtaccaatgtcacgacatcgacgagtgcagtctgggccagtatcaatgttcaagcttcgcaaggtgctataacattagggggtcatacaaatgcaagtgcaaggaaggatatcagggggatggactcacctgtgtctacatcccaaaagtgatgatcgagccctcggggcccattcatgtgccaaaaggaaacggaacgattctgaagggcgatacagggaacaataattggatcccagacgtgggatccacctggtggccccctaagactccatacatacccccgataattaccaaccgccctacaagtaaacccaccaccaggcctacccccaagccaacccctattccgacgccgccaccacccccacctctgcctacagagttacgcacaccgctccctccgacaactcccgaacggcctaccactggcctgaccacaattgctcctgctgcctctactcctccaggaggaatcaccgtggacaaccgagtgcaaactgacccccagaagcctaggggggatgtgttcagcgttctggtccattcctgtaacttcgaccacggcctgtgcggatggatcagggagaaggataacgacctgcattgggaacccattcgagatccagccggcggacagtacctgaccgtgtcagcagctaaggcccccgggggcaaagctgcacgtctggtcctaccacttggtaggttaatgcattccggcgatttatgtctgtccttccgtcacaaggttacgggcttgcattcaggcaccctacaggtctttgtgcgcaaacacggcgcacacggtgctgccctgtggggccgaaatggaggccacggttggcgccaaactcagatcacgctccggggagccgatattaaaagcgtcgtctttaaaggagagaaacggaggggccatactggagagattggcttggacgacgtcagtttgaagaaagggcactgcagcgaggaaagatag

SEQ ID NO: 70987 - RNA, 1701 nt, Artificial Sequence
  derived and/or modified sequence
auggauuuuuuacuugcacuuguuuuggucucaucucuauaucuucaggccgcugcagaauucgacgggagauggcccagacaaauuguuucgucuauuggcuugugcagguauggaggcagaauugacuguugcugggguugggcucgacaguccuggggacagugucagcccgugugccagccacggugcaaacauggagaguguaucggucccaauaagugcaaaugucacccaggcuaugccgggaaaacuuguaaccaggacgaacauauuccugccccccuggaccaaggcagugagcagccacuguuucaaccccuggaucaccaagccacaucccugcccucccgggacuugaacgaaugcggccucaaacccaggccuugcaaacaucgcugcaugaacaccuacggaucuuacaaaugcuacugccugaauggcuacaugcugaugcccgaugggaguuguuccucugcucucacaugcucgauggcaaauugucaauacgggugcgaugucgucaaaggccaaauaaggugccaauguccuagccccggacuucaauuggccccagauggcaggaccugcgucgacguugaugagugcgccacuggccgcgccuccugcccccgcuuccggcagugugugaacaccuucgggagcuacaucugcaagugccacaaaggguucgaucucauguauaucggaggaaaauaccaaugccaugauauagaugaaugcucccuuggccaguaucaguguagcucguuugcacggugcuauaauauaagaggaucauauaaaugcaaauguaaggaaggcuaucagggcgaugggcugaccugcgucuacauaccgaaaguuaugaucgagccauccgggccgauacacgugccuaagggcaacggaaccauccugaaaggcgacacagggaauaauaauuggauaccugacguaggaaguacaugguggccuccuaagacuccguacauaccuccaaucaucaccaaccgccccaccagcaaaccaacaacccgaccaacuccuaaaccaacccccauacccaccccuccucccccgccaccccugccaacugaacuucguacgccccugccuccuaccacaccagagcggccuacuacuggacuaacaaccaucgccccagcugcaucuacuccuccugguggcauuacuguagauaaccgcgugcagaccgauccucaaaagccgagaggggacguuuucucuguguuggugcacucuuguaacuucgaccacggacugugcggauggauacgagagaaagacaaugaccuucacugggagccaaucagggauccagccggugggcaguaccugacaguguccgcugcuaaagcaccaggaggaaaggcugcucggcugguucuuccccucgguagacugaugcauucaggcgacuuguguuuaagcuuucggcauaagguaacugggcugcauucuggaacgcuccagguguucgugagaaagcacggcgcucauggggcagcucucuggggccgcaacgguggccacggcuggaggcaaacacaaaucacacuucggggagcagacaucaagagugugguuuucaagggagagaagcggcgaggccauacaggcgaaaucgguuuggaugaugugagccugaaaaaaggacauuguucugaggagagauag

SEQ ID NO: 70988 - RNA, 1701 nt, Artificial Sequence
  derived and/or modified sequence
auggacuuucuccuggcccugguauugguauccucccucuacuuacaggcugcagcugaguuugacggucguuggccgagacagauaguuucuucuauugguuugugcagauauggggggcgcauugauuguugcuggggcugggcgcgccagucauggggucagugccagcccgugugucaaccgagaugcaaacacggagagugcauaggacccaauaaaugcaagugucacccuggcuaugccggaaagacaugcaaucaagaugaacauauccccgccccucuugaccaagguucugaacagccauuguuccaacccuuagaccaccaagcgaccucccugccuucucgagaucucaaugaguguggguugaagccuaggccuugcaagcacagauguaugaauacguauggcucuuacaaauguuacugccuaaacggauauaugcucaugccagauggaucguguagcucagccuugacuuguucuauggcuaacugucaguaugguugugacguggugaaaggccagauucgcugccaauguccuagcccaggccuccaacuagccccugauggacggacguguguggacguugacgagugcgcuaccggucgggcuucuuguccucgcuuucgacagugcguaaacaccuucgguuccuauauaugcaagugucacaagggguuugaccuuauguauauugggggaaaguaucaaugccaugacaucgacgaauguagcuugggccaguaucagugcaguuccuucgcaagaugcuacaauauacgaggaucuuauaagugcaaaugcaaggaagguuaccaaggagaugggcuuacaugcguuuauauucccaaggugaugauagagccaucagggccaauacaugucccuaagggcaacggaaccauccugaaaggcgacacagggaauaauaauuggauaccugacguaggaaguacaugguggccuccuaagacuccguacauaccuccaaucaucaccaaccgccccaccagcaaaccaacaacccgaccaacuccuaaaccaacccccauacccaccccuccucccccgccaccccugccaacugaacuucguacgccccugccuccuaccacaccagagcggccuacuacuggacuaacaaccaucgccccagcugcaucuacuccuccugguggcauuacuguagacaauagagugcaaaccgacccccaaaagccacgaggagaugucuuuucuguauuagugcacucgugcaauuuugaccauggcuuguguggauggaucagggagaaggauaaugacuugcauugggaacccauuagggacccggccgggggacaguaucuuaccguaucagccgcgaaagcgcccggaggaaaagccgccagacuuguguugccacugggccgacuuaugcauaguggcgauuugugucucagcuuccgccacaaagugacaggccuacauucagggacacugcagguguucgugcggaaacacggggcgcacggggcugcauuguggggcagaaaugguggacauggcuggaggcagacacagauuacucuacggggagcggauaucaagucggugguauuuaagggugaaaaacggagggggcauacaggagagaucggacuggacgauguuucuuugaagaaaggacauuguuccgaagaaagauag

SEQ ID NO: 70989 - protein, 525 aa, Artificial Sequence
  derived and/or modified sequence
MRVFCVGLLLFSVTWAAPTFQPQTEKTKQSCVEEQRQEEKNKDNIGFHHLGKRINQELSSKENIVQERKKDLSLSEASENKGSSKSQNYFTNRQRLNKEYSISNKENTHNGLRMSIYPKSTGNKGFEDGDDAISKLHDQEEYGAALIRNNMQHIMGPVTAIKLLGEENKENTPRNVLNIIPASMNYAKAHSKDKKKPQRDSQAQKSPVKSKSTHRIQHNIDYLKHLSKVKKIPSDFEGSGYTDLQERGDNDISPFSGDGQPFKDIPGKGEATGPDLEGKDIQTGFAGPSEAESTHLDTKKPGYNEIPEREENGGNTIGTRDETAKEADAVDVSLVEGSNDIMGSTNFKELPGREGNRVDAGSQNAHQGKVEFHYPPAPSKEKRKEGSSDAAESTNYNEIPKNGKGSTRKGVDHSNRNQATLNEKQRFPSKGKSQGLPIPSRGLDNEIKNEMDSFNGPSHENIITHGRKYHYVPHRQNNSTRNKGMPQGKGSWGRQPHSNRRFSSRRRDDSSESSDSGSSSESDGD

SEQ ID NO: 70990 - protein, 275 aa, Artificial Sequence
  derived and/or modified sequence
MRVFCVGLLLFSVTWAAPTFQPQTEKTKQSCVEEQRQEEKNKDNIGFHHLGKRINQELSSKENIVQERKKDLSLSEASENKGSSKSQNYFTNRQRLNKEYSISNKENTHNGLRMSIYPKSTGNKGFEDGDDAISKLHDQEEYGAALIRNNMQHIMGPVTAIKLLGEENKENTPRNVLNIIPASMNYAKAHSKDKKKPQRDSQAQKSPVKSKSTHRIQHNIDYLKHLSKVKKIPSDFEGSGYTDLQERGDNDISPFSGTANLLRTFLVKEKLLVLT

SEQ ID NO: 70991 - protein, 412 aa, Artificial Sequence
  derived and/or modified sequence
MSIYPKSTGNKGFEDGDDAISKLHDQEEYGAALIRNNMQHIMGPVTAIKLLGEENKENTPRNVLNIIPASMNYAKAHSKDKKKPQRDSQAQKSPVKSKSTHRIQHNIDYLKHLSKVKKIPSDFEGSGYTDLQERGDNDISPFSGDGQPFKDIPGKGEATGPDLEGKDIQTGFAGPSEAESTHLDTKKPGYNEIPEREENGGNTIGTRDETAKEADAVDVSLVEGSNDIMGSTNFKELPGREGNRVDAGSQNAHQGKVEFHYPPAPSKEKRKEGSSDAAESTNYNEIPKNGKGSTRKGVDHSNRNQATLNEKQRFPSKGKSQGLPIPSRGLDNEIKNEMDSFNGPSHENIITHGRKYHYVPHRQNNSTRNKGMPQGKGSWGRQPHSNRRFSSRRRDDSSESSDSGSSSESDGD

SEQ ID NO: 70992 - DNA, 1578 bp, Artificial Sequence
  derived and/or modified sequence
atgcgcgttttctgtgtggggttgttactattcagcgtcacctgggccgcgcctacattccaacctcagacagagaagacgaaacagagctgcgtcgaggaacagagacaggaggagaaaaataaggataatatcggctttcaccacctgggcaaacgcatcaaccaggagctgtcttctaaagaaaacatcgtgcaagaaaggaagaaggatctgtcactcagtgaagccagtgagaataagggctcttccaagtcccaaaactacttcactaacaggcagcgactcaacaaggaatatagtatctcgaacaaagagaacacacacaacgggctgaggatgtctatttatcctaagtcgactggtaacaagggctttgaggatggggacgatgctatttccaaactgcatgatcaggaagaatacggcgcagccttgatccgcaataatatgcaacacatcatgggcccagtgactgcaattaagctgctgggcgaagaaaacaaggagaacacgccaaggaatgttttgaacatcatccccgcctcaatgaactacgctaaagctcatagcaaggacaagaaaaaacctcagcgggactctcaagctcaaaaatctccagtcaaaagcaagtcaactcaccggatacagcacaacattgactatctgaagcacctgtcaaaagtcaaaaagatcccctccgacttcgagggctccgggtatactgacctacaggagagaggtgacaacgatatttcccctttcagtggagacggacaacccttcaaagatattcctggcaagggggaagccactggccccgatctggaggggaaagatattcagactggtttcgccggaccctctgaggctgagtccacgcacctggacacgaagaaaccggggtacaacgagattccagaaagggaggaaaacgggggcaacacaattggcacgagagacgagactgccaaggaagctgatgctgtggacgtatctctcgtggagggttcaaatgatataatgggatccacaaacttcaaggaactacccgggcgagaaggtaaccgggtggatgcgggtagtcaaaacgcacaccaagggaaagtggaatttcattatcctcccgcgccgtctaaggagaaaaggaaggagggaagttcagatgcagctgagagtacaaattataatgaaatcccgaaaaacggtaaggggagcactcgaaagggggtcgaccactccaaccgtaatcaggccacattgaatgagaaacaaagatttccatcaaaggggaaaagccagggactgccgataccctccagaggcctagataacgagatcaaaaacgagatggactcctttaatggacccagtcacgaaaacattatcacccatggccgaaagtaccactacgtgcctcacaggcagaacaatagcaccagaaacaaaggcatgccacagggaaagggcagttgggggaggcagccgcactcgaatagacggttcagctcacgcaggcgtgatgacagctctgaatctagtgattcaggctcttcctccgagagcgatggggactag

SEQ ID NO: 70993 - DNA, 1578 bp, Artificial Sequence
  derived and/or modified sequence
atgagggttttttgcgtgggtctgcttctattcagtgtcacctgggccgcccctaccttccagccccagacggagaagacaaagcagtcatgcgtggaagaacagcgacaggaagaaaaaaataaggataacattgggtttcaccatctgggtaagcgaattaaccaggaactgagcagcaaagaaaacatcgtgcaggaaagaaaaaaggatttaagtctgtcagaagcctctgagaataaagggtcctccaagtcgcagaactacttcacgaatcggcaacgcctaaataaagagtacagtatctcaaataaagagaatacacataatggcctccggatgagcatttacccaaagtccaccggaaataagggtttcgaggacggagatgatgcaatctcaaaactccacgaccaggaggagtatggcgcagcacttatcagaaacaatatgcagcatataatgggacccgtgacagccatcaaactcctgggcgaagaaaataaagaaaacacacctcgcaatgttttaaacatcattcccgcctcaatgaattacgcgaaggcccactccaaagataaaaaaaagccccagcgggacagtcaagcccagaagtctcctgtgaaaagcaagtctactcatcgaatacagcataacatcgactacctcaagcatctttctaaggtcaaaaagatcccatccgattttgagggcagcggctatacagatctgcaggagcgtggcgataacgatatcagtccttttagtggagacggacagcctttcaaagatatcccaggcaaaggcgaagccacaggccccgatttggaagggaaggacatccagaccggattcgcgggcccatcagaggccgagagcacacacctcgatactaagaagcctggctataatgagataccagagagggaagaaaacggtgggaatacaatcgggacccgcgatgagactgctaaggaggccgacgctgtggacgtgtccctcgttgagggttccaatgacatcatgggttcaactaattttaaggagttaccggggcgggaaggcaaccgggttgatgccgggtcccagaacgcccatcaggggaaggtagaatttcactacccgcccgcccccagcaaggagaagcgcaaggaagggtcatcggatgccgccgagagcacgaactacaacgagatcccgaagaatgggaaaggaagcaccagaaagggcgtcgaccacagtaatcggaatcaggctactctgaacgagaagcagcgttttccctccaagggaaaatctcagggtctacccatcccatcccgcggcctggataatgagataaagaatgagatggactcttttaatgggcccagccatgagaacattatcactcatggacgaaaataccactacgttccccatcgacagaacaatagtacaaggaataagggcatgccccagggcaaagggagttggggccgccaacctcatagcaatcgacgattttcatcacgccgaagagatgattcttctgagagctcagatagcggcagttcctccgagtccgatggagactag

SEQ ID NO: 70994 - DNA, 828 bp, Artificial Sequence
  derived and/or modified sequence
atgagggtgttctgtgtgggtttgctcctcttctccgtcacgtgggccgcccccactttccagcctcaaaccgaaaaaactaagcaatcttgcgtcgaagagcagcgtcaggaagagaaaaataaggataatattgggttccaccacctgggcaaaagaatcaatcaggagctttcctctaaggaaaacatcgtgcaggagaggaagaaggatttgtcgctgagcgaagcaagtgagaacaaaggttcctctaagagtcagaattacttcaccaatcgccagaggctcaataaagagtattccataagcaacaaagagaacacccacaatggcctcagaatgtccatttaccccaagtctactggtaataaaggctttgaggacggggacgacgcgattagcaaactgcatgaccaggaagaatatggcgcagccctcattcggaacaatatgcagcacattatggggccagtgacggccattaaactgctgggcgaagaaaacaaggagaacactccacgtaatgtcctcaatattattccagcatccatgaattacgccaaagcacattcaaaagataagaagaagccccagcgcgactctcaggctcagaagagccccgtgaaatctaagagcacccacaggatacagcataacattgattatctgaagcacctgtcaaaggttaagaagatcccgagcgactttgaaggctctgggtacacagatctccaagagcggggtgataacgacatttcccctttttctggcaccgcaaacctactccgaacatttctcgttaaggaaaaactgctcgtgctgacctag

SEQ ID NO: 70995 - DNA, 1578 bp, Artificial Sequence
  derived and/or modified sequence
atgagggtcttctgtgtgggcctgctgctcttctctgtgacctgggccgcccccaccttccagccccagacagagaagaccaagcagagctgtgtggaggagcagaggcaggaggagaagaacaaggacaacatcggcttccaccacctgggcaagaggatcaaccaggagctgagcagcaaggagaacatcgtgcaggagaggaagaaggacctgagcctgtctgaggcctctgaaaataaaggcagcagcaagagccagaactacttcaccaaccggcagaggctgaacaaggagtacagcatcagcaacaaggagaacacccacaacggcctgaggatgagcatctaccccaagagcactggaaacaagggctttgaagatggagatgatgccatcagcaagctgcatgaccaggaggagtatggagctgccctgatccggaacaacatgcagcacatcatgggccctgtgacagccatcaagctgctgggggaggagaacaaggagaacaccccaagaaatgtgctgaacatcatcccagcctccatgaactatgccaaggcccacagcaaggacaagaagaagccccagagggacagccaggcccagaagagccctgtgaagagcaagagcacccaccgcatccagcacaacatcgactacctgaagcacctgagcaaggtgaagaagatccccagcgactttgagggcagcggctacacagacctgcaggagcggggggacaatgacatcagccccttctctggagatggccagcccttcaaggacatccctgggaagggggaggccaccggccctgacctggagggcaaggacatccagacaggctttgctggccccagcgaggccgagagcacccacctggacaccaagaagccaggctacaatgagatccctgagcgggaggagaatggaggcaacaccatcggcaccagagatgaaacagccaaggaggctgatgctgtggatgtgtccctggtggagggcagcaatgacatcatgggcagcaccaacttcaaggagctgcccggccgggagggcaacagagtggatgctggcagccagaatgcccaccagggcaaggtggagttccactaccccccagcccccagcaaggagaagaggaaggagggcagcagtgatgctgctgagagcaccaactacaatgagatccccaagaatggcaagggcagcaccaggaaaggagtggaccacagcaacagaaaccaggccaccctgaatgagaagcagcgcttccccagcaagggcaagagccagggcctgcccatccccagccggggcctggacaatgagatcaagaatgagatggacagcttcaacggccccagccatgagaacatcatcacccacggcaggaagtaccactacgtgccccaccggcagaacaacagcaccagaaataaaggcatgccccagggcaagggctcctggggccggcagccccacagcaacagacgcttcagcagcagaagaagagatgacagcagcgagagcagtgacagcggcagcagcagcgagagtgatggagactag

SEQ ID NO: 70996 - DNA, 828 bp, Artificial Sequence
  derived and/or modified sequence
atgagggtcttctgtgtgggcctgctgctcttctctgtgacctgggccgcccccaccttccagccccagacagagaagaccaagcagagctgtgtggaggagcagaggcaggaggagaagaacaaggacaacatcggcttccaccacctgggcaagaggatcaaccaggagctgagcagcaaggagaacatcgtgcaggagaggaagaaggacctgagcctgtctgaggcctctgaaaataaaggcagcagcaagagccagaactacttcaccaaccggcagaggctgaacaaggagtacagcatcagcaacaaggagaacacccacaacggcctgaggatgagcatctaccccaagagcactggaaacaagggctttgaagatggagatgatgccatcagcaagctgcatgaccaggaggagtatggagctgccctgatccggaacaacatgcagcacatcatgggccctgtgacagccatcaagctgctgggggaggagaacaaggagaacaccccaagaaatgtgctgaacatcatcccagcctccatgaactatgccaaggcccacagcaaggacaagaagaagccccagagggacagccaggcccagaagagccctgtgaagagcaagagcacccaccgcatccagcacaacatcgactacctgaagcacctgagcaaggtgaagaagatccccagcgactttgagggcagcggctacacagacctgcaggagcggggggacaatgacatcagccccttcagcggcacagccaacctgctgcggaccttcctggtgaaggagaagctgctggtgctgacctag

SEQ ID NO: 70997 - DNA, 1986 bp, Artificial Sequence
  derived and/or modified sequence
caggtattctgaaggtgaaagataccagagattctcaaagatgcgagttttctgtgtgggactactccttttcagtgtgacctgggcagcaccaacatttcaaccacagactgagaaaactaagcaaagctgtgtggaagagcagaggcaggaagaaaaaaacaaagacaatattggttttcaccatttgggcaagagaataaatcaagagctatcatctaaagaaaatattgtccaggaaagaaagaaagatttgtccctttctgaagccagtgagaataagggaagtagtaaatctcaaaattatttcacaaatagacagagactgaataaagaatatagtatcagtaacaaagagaatactcacaatggcctgaggatgtcaatttatcctaagtcaactgggaataaagggtttgaggatggagatgatgctatcagcaaactacatgaccaagaagaatatggcgcagctctcatcagaaataacatgcaacatataatggggccagtgactgcgattaaactcctgggggaagaaaacaaagagaacacacctaggaatgttctaaacataatcccagcaagtatgaattatgctaaagcacactcgaaggataaaaagaagcctcaaagagattcccaagcccagaaaagtccagtaaaaagcaaaagcacccatcgtattcaacacaacattgactacctaaaacatctctcaaaagtcaaaaaaatccccagtgattttgaaggcagcggttatacagatcttcaagagagaggggacaatgatatatctcctttcagtggggacggccaaccttttaaggacattcctggtaaaggagaagctactggtcctgacctagaaggcaaagatattcaaacagggtttgcaggcccaagtgaagctgagagtactcatcttgacacaaaaaagccaggttataatgagatcccagagagagaagaaaatggtggaaataccattggaactagggatgaaactgcgaaagaggcagatgctgttgatgtcagccttgtagagggcagcaacgatatcatgggtagtaccaattttaaggagctccctggaagagaaggaaacagagtggatgctggcagccaaaatgctcaccaagggaaggttgagtttcattaccctcctgcaccctcaaaagagaaaagaaaagaaggcagtagtgatgcagctgaaagtaccaactataatgaaattcctaaaaatggcaaaggcagtaccagaaagggtgtagatcattctaataggaaccaagcaaccttaaatgaaaaacaaaggtttcctagtaagggcaaaagtcagggcctgcccattccttctcgtggtcttgataatgaaatcaaaaacgaaatggattcctttaatggccccagtcatgagaatataataacacatggcagaaaatatcattatgtaccccacagacaaaataattctacacggaataagggtatgccacaagggaaaggctcctggggtagacaaccccattccaacaggaggtttagttcccgtagaagggatgacagtagtgagtcatctgacagtggcagttcaagtgagagcgatggtgactagtccaccaggagttcccagcggggtgacagtctgaagacctcgtcacctgtgagttgatgtagaggagagccacctgacagctgaccaggtgaagagaggatagagtgaagaactgagtgagccaagaatcctggtctccttgggggaatttttgctatcttaatagtcacagtataaaattctattaaaggctataatgtttttaagcaaaaaaaaatcattacagatctatgaaataggtaacatttgagtaggtgtcatttaaaaatagttggtgaatgtcacaaatgccttctatgttgtttgctctgtagacatgaaaataaacaatatctctcgatgataatttgtattaagtaatctataag

SEQ ID NO: 70998 - DNA, 2022 bp, Artificial Sequence
  derived and/or modified sequence
atgcagtgctcccctggcctgccggcagctatccacaccagaaagaggaaaaggtagactgagattctcaaagatgcgagttttctgtgtgggactactccttttcagtgtgacctgggcagcaccaacatttcaaccacagactgagaaaactaagcaaagctgtgtggaagagcagaggcaggaagaaaaaaacaaagacaatattggttttcaccatttgggcaagagaataaatcaagagctatcatctaaagaaaatattgtccaggaaagaaagaaagatttgtccctttctgaagccagtgagaataagggaagtagtaaatctcaaaattatttcacaaatagacagagactgaataaagaatatagtatcagtaacaaagagaatactcacaatggcctgaggatgtcaatttatcctaagtcaactgggaataaagggtttgaggatggagatgatgctatcagcaaactacatgaccaagaagaatatggcgcagctctcatcagaaataacatgcaacatataatggggccagtgactgcgattaaactcctgggggaagaaaacaaagagaacacacctaggaatgttctaaacataatcccagcaagtatgaattatgctaaagcacactcgaaggataaaaagaagcctcaaagagattcccaagcccagaaaagtccagtaaaaagcaaaagcacccatcgtattcaacacaacattgactacctaaaacatctctcaaaagtcaaaaaaatccccagtgattttgaaggcagcggttatacagatcttcaagagagaggggacaatgatatatctcctttcagtggggacggccaaccttttaaggacattcctggtaaaggagaagctactggtcctgacctagaaggcaaagatattcaaacagggtttgcaggcccaagtgaagctgagagtactcatcttgacacaaaaaagccaggttataatgagatcccagagagagaagaaaatggtggaaataccattggaactagggatgaaactgcgaaagaggcagatgctgttgatgtcagccttgtagagggcagcaacgatatcatgggtagtaccaattttaaggagctccctggaagagaaggaaacagagtggatgctggcagccaaaatgctcaccaagggaaggttgagtttcattaccctcctgcaccctcaaaagagaaaagaaaagaaggcagtagtgatgcagctgaaagtaccaactataatgaaattcctaaaaatggcaaaggcagtaccagaaagggtgtagatcattctaataggaaccaagcaaccttaaatgaaaaacaaaggtttcctagtaagggcaaaagtcagggcctgcccattccttctcgtggtcttgataatgaaatcaaaaacgaaatggattcctttaatggccccagtcatgagaatataataacacatggcagaaaatatcattatgtaccccacagacaaaataattctacacggaataagggtatgccacaagggaaaggctcctggggtagacaaccccattccaacaggaggtttagttcccgtagaagggatgacagtagtgagtcatctgacagtggcagttcaagtgagagcgatggtgactagtccaccaggagttcccagcggggtgacagtctgaagacctcgtcacctgtgagttgatgtagaggagagccacctgacagctgaccaggtgaagagaggatagagtgaagaactgagtgagccaagaatcctggtctccttgggggaatttttgctatcttaatagtcacagtataaaattctattaaaggctataatgtttttaagcaaaaaaaaatcattacagatctatgaaataggtaacatttgagtaggtgtcatttaaaaatagttggtgaatgtcacaaatgccttctatgttgtttgctctgtagacatgaaaataaacaatatctctcgatgataatttgtattaagtaatctataagaaa

SEQ ID NO: 70999 - DNA, 2031 bp, Artificial Sequence
  derived and/or modified sequence
tttacataaacaaatgcagtgctcccctggcctgccggcagctatccacaccagaaagaggaaaaggtagactgagattctcaaagatgcgagttttctgtgtgggactactccttttcagtgtgacctgggcagcaccaacatttcaaccacagactgagaaaactaagcaaagctgtgtggaagagcagaggcaggaagaaaaaaacaaagacaatattggttttcaccatttgggcaagagaataaatcaagagctatcatctaaagaaaatattgtccaggaaagaaagaaagatttgtccctttctgaagccagtgagaataagggaagtagtaaatctcaaaattatttcacaaatagacagagactgaataaagaatatagtatcagtaacaaagagaatactcacaatggcctgaggatgtcaatttatcctaagtcaactgggaataaagggtttgaggatggagatgatgctatcagcaaactacatgaccaagaagaatatggcgcagctctcatcagaaataacatgcaacatataatggggccagtgactgcgattaaactcctgggggaagaaaacaaagagaacacacctaggaatgttctaaacataatcccagcaagtatgaattatgctaaagcacactcgaaggataaaaagaagcctcaaagagattcccaagcccagaaaagtccagtaaaaagcaaaagcacccatcgtattcaacacaacattgactacctaaaacatctctcaaaagtcaaaaaaatccccagtgattttgaaggcagcggttatacagatcttcaagagagaggggacaatgatatatctcctttcagtgggacggccaaccttttaaggacattcctggtaaaggagaagctactggtcctgacctagaaggcaaagatattcaaacagggtttgcaggcccaagtgaagctgagagtactcatcttgacacaaaaaagccaggttataatgagatcccagagagagaagaaaatggtggaaataccattggaactagggatgaaactgcgaaagaggcagatgctgttgatgtcagccttgtagagggcagcaacgatatcatgggtagtaccaattttaaggagctccctggaagagaaggaaacagagtggatgctggcagccaaaatgctcaccaagggaaggttgagtttcattaccctcctgcaccctcaaaagagaaaagaaaagaaggcagtagtgatgcagctgaaagtaccaactataatgaaattcctaaaaatggcaaaggcagtaccagaaagggtgtagatcattctaataggaaccaagcaaccttaaatgaaaaacaaaggtttcctagtaagggcaaaagtcagggcctgcccattccttctcgtggtcttgataatgaaatcaaaaacgaaatggattcctttaatggccccagtcatgagaatataataacacatggcagaaaatatcattatgtaccccacagacaaaataattctacacggaataagggtatgccacaagggaaaggctcctggggtagacaaccccattccaacaggaggtttagttcccgtagaagggatgacagtagtgagtcatctgacagtggcagttcaagtgagagcgatggtgactagtccaccaggagttcccagcggggtgacagtctgaagacctcgtcacctgtgagttgatgtagaggagagccacctgacagctgaccaggtgaagagaggatagagtgaagaactgagtgagccaagaatcctggtctccttgggggaatttttgctatcttaatagtcacagtataaaattctattaaaggctataatgtttttaagcaaaaaaaaatcattacagatctatgaaataggtaacatttgagtaggtgtcatttaaaaatagttggtgaatgtcacaaatgccttctatgttgtttgctctgtagacatgaaaataaacaatatctctcgatgataatttgtattaagtaatctataag

SEQ ID NO: 71000 - DNA, 1578 bp, Artificial Sequence
  derived and/or modified sequence
atgcgggtgttctgcgtgggcctgctgctgttcagcgtgacctgggcggctcccaccttccagccacagacagagaaaaccaaacagtcgtgcgttgaggagcagaggcaagaggagaaaaataaggataatattggattccaccaccttggaaaacggatcaatcaagagctctcaagcaaagaaaatattgttcaagagcggaaaaaggatttgtcactgagcgaggcgagcgagaacaaaggctcatcaaaatcccaaaactactttaccaatagacagcgcctgaataaagaatatagtataagcaacaaggaaaacactcataacggcttgcgcatgtcgatctaccccaagagcaccgggaataaaggattcgaggacggagacgatgctatcagcaaacttcatgaccaagaagaatacggcgctgctcttataagaaataacatgcaacacattatgggccctgttacagcaatcaagctgttaggcgaagagaacaaggaaaatactccccggaacgtgctaaacattattcctgcatctatgaactatgcaaaggcccattcgaaagataagaagaaaccccagcgagactctcaggcccagaaatctcctgttaagagcaaatccacgcatagaatccaacacaacattgattacctgaaacacctctctaaggttaaaaagatcccttcagactttgagggctctggctacaccgatctgcaagaacggggtgacaatgacatcagccccttctccggcgatggtcagccattcaaggacattcccgggaagggcgaagctaccggtcctgatctggaaggcaaggacatacagaccggcttcgccggcccctctgaagctgaatctacgcacttagatacgaagaaaccaggctataacgagattccagagagagaggagaatgggggaaatacaatcggaaccagagacgaaacagccaaggaggccgacgccgttgatgtatccctggtggagggaagcaatgatattatggggtccactaatttcaaagagttgcctgggcgtgaaggcaatcgcgttgacgctggatcccagaacgcccaccaggggaaagtcgagttccattacccgcccgccccttccaaggagaaaagaaaagaagggagctcagacgccgccgaaagtaccaactacaatgagatcccgaaaaacggtaaagggagtacacgcaaaggcgtggaccacagtaatagaaatcaggccaccttaaacgagaaacagcgcttcccttcgaaggggaagtctcaagggcttccaatcccctcccgaggactggataacgagatcaaaaacgaaatggacagttttaacgggccatcccacgagaacatcataacccacggtcggaagtaccattatgtgccccaccgccagaataacagcacacgtaacaagggcatgccacagggtaaaggctcttggggacgtcagcctcacagcaaccggaggtttagctcgagaaggagggacgatagcagtgaaagcagtgactccggttcctctagcgaatctgatggggactag

SEQ ID NO: 71001 - DNA, 1578 bp, Artificial Sequence
  derived and/or modified sequence
atgcgggtgttctgcgtgggcctgctgctgttcagcgtgacctgggcggccccaactttccagccacaaaccgaaaaaaccaagcaatcttgcgtcgaagagcagcgacaggaggagaagaataaagacaatattgggtttcaccacttgggcaaaaggatcaaccaagaactgagctcaaaagaaaatatcgtccaggagaggaaaaaggatttgtctctgagcgaggcatccgaaaataagggttcttcaaagagccagaactactttaccaacagacagcggctgaataaggaatattccattagcaacaaggaaaatacccacaatgggctgcgaatgtctatttaccctaagagtaccgggaacaaagggtttgaggatggggatgatgcgatcagtaaactgcacgaccaggaggagtacggagctgccctgattcggaataatatgcagcacatcatggggcccgtgactgccattaaactgttgggtgaggagaacaaagagaatactccccgcaatgttcttaatatcattcccgcgtccatgaactatgccaaggcacatagtaaagacaagaaaaagcctcaaagagattcccaagcgcagaagagcccagtgaagagcaaatcaacccatcgaatccaacacaacatagattacctgaagcatctgtctaaagtcaaaaagattccctctgattttgaaggcagcgggtataccgatctgcaggagcgcggtgataacgacattagtcctttctctggcgacgggcagcccttcaaggatatccctgggaagggggaagcaactggccccgatcttgaaggtaaggacatccagactggctttgcaggcccttctgaagcagagtccacccacctggacaccaagaagcctggttacaacgaaattccggagcgcgaagaaaatggcggcaacactatcggcactcgggacgagaccgccaaagaggcagatgcggtggatgtaagcctagtggagggctccaatgacatcatgggctccactaacttcaaagagctgcctgggagggaaggcaacagggttgacgccggatcacaaaatgctcatcagggaaaagtggaattccactatcccccggcccctagcaaggaaaagaggaaggaaggctcctctgacgccgcagagtctacaaactacaatgagatacctaagaatggaaagggatccacaaggaaaggagtggaccactctaacaggaatcaggctaccttgaatgagaagcagcgcttccccagtaaggggaaatctcagggcctgcccattccttctagaggtctggacaacgaaatcaaaaatgagatggatagctttaacggaccctctcacgaaaacattatcacccacggcagaaagtaccattacgttccccaccgacagaacaattccactagaaacaagggaatgccacagggcaagggaagctggggccgccagccccactctaatagacgcttctcctcccgtcgccgcgatgattctagtgaatcctccgactctgggtccagttctgagtctgacggggactag

SEQ ID NO: 71002 - DNA, 828 bp, Artificial Sequence
  derived and/or modified sequence
atgcgggtgttctgcgtgggcctgctgctgttcagcgtgacctgggctgcccccacctttcagccacagactgaaaaaaccaaacagagctgtgttgaggagcagcgccaggaggagaagaacaaggacaacattggattccaccatctcgggaaacggataaatcaggagctgtcctctaaagaaaatattgttcaggaaagaaagaaagatctttctctttccgaagcttccgaaaataagggctccagtaaatctcagaattatttcaccaacaggcagagactcaacaaagagtacagcattagtaacaaggaaaatacccacaacggcctgcgaatgtctatataccccaagagcacagggaataagggtttcgaagatggcgacgatgccatcagtaagctccatgatcaagaggagtacggcgcagccctgatccgaaataacatgcaacacattatgggacccgtgacggccatcaagctgctgggagaggaaaataaggagaacactccccgcaatgtgcttaacattataccagcctccatgaactacgcaaaggcccactctaaggacaaaaagaaacctcagcgggactcccaagctcagaagagccctgtaaaatcaaagtcaacacaccgaatacagcataacatcgactacctgaagcatctgtctaaggtgaagaagattccttctgattttgagggctcagggtatacggacttacaagagcgcggggataatgatatttccccctttagtggcaccgccaaccttctccggacattcctcgtcaaggaaaagctgttggtgctgacctag

SEQ ID NO: 71003 - DNA, 1578 bp, Artificial Sequence
  derived and/or modified sequence
atgcgagttttttgtgtgggattgctgttattcagcgtgacttgggcggctcctaccttccaaccacagacagagaagacaaaacagtcatgcgtggaagagcagagacaggaggaaaagaacaaggataacattggattccatcacctggggaaaaggatcaatcaggagttgagctctaaagaaaacatcgtccaggaacgtaagaaggatttgtccctctctgaagccagtgagaacaaaggtagcagtaagtcccagaattattttaccaacagacagagattaaacaaggaatatagcatatcaaacaaagaaaatacccacaacggtttgcgaatgtccatatatcctaaaagcaccggaaacaaagggtttgaggacggtgacgacgctataagtaaactacatgatcaggaggagtacggtgccgcactgatccggaataacatgcagcacatcatgggccctgtcacagccatcaagctgttgggagaggagaataaggaaaacaccccgagaaatgtcctgaacataatacccgcttctatgaactatgctaaggcccattccaaagacaaaaagaagccacagagagactcccaagcacaaaagtccccggtgaagtctaagagtactcaccgaatacagcataatatcgactaccttaagcatctctctaaagttaagaaaattccctctgacttcgagggctcaggctataccgacctacaggaacgtggagacaatgacatttccccattcagcggggacggccagccatttaaagacatcccaggcaagggcgaggcgaccggaccagatctcgaaggcaaggatatccagacgggtttcgcgggtccttctgaggccgaaagcactcacttagatacaaagaagccaggatacaacgaaattcctgagcgagaggaaaatggagggaataccatcgggacacgggacgaaacggcaaaggaggccgacgcagtagacgtgtcattggtggagggttccaacgatattatgggtagcactaacttcaaggagctgcccggacgcgaagggaacagggtcgatgccggatcccagaatgcgcatcagggcaaagtcgaattccactacccacctgccccttcaaaagagaagcgcaaagaagggtccagcgacgctgcggaatcaacaaattataatgagattcctaagaacggaaaaggttccacaaggaagggggttgatcattccaaccgcaaccaggctacactgaacgagaagcagaggtttccaagcaaagggaagagccagggtctaccgatccccagtcggggacttgataatgagatcaagaacgagatggattcgtttaatggaccttctcacgagaacatcattactcatggccgtaagtatcattacgtcccccacaggcaaaataattccacccggaataaagggatgccccaggggaagggatcttggggcagacaacctcactccaatagaagattctcttctcgtcgtcgagacgactcaagcgaaagctccgatagcggatctagcagcgagtccgacggcgactag

SEQ ID NO: 71004 - DNA, 1578 bp, Artificial Sequence
  derived and/or modified sequence
atgcgggtgttttgtgtcggccttctgctcttcagcgtgacttgggccgctcctacatttcagccacaaacagagaagactaagcaaagctgtgtggaggagcagcggcaggaagagaagaataaagacaacatcggctttcaccacttgggcaagagaattaaccaagagttatcctcaaaagagaacatagttcaggaacgcaaaaaggatttatctctcagcgaggcaagcgaaaacaaaggcagctccaaatctcagaattatttcaccaataggcagaggctgaacaaagagtattccatcagcaacaaagaaaacacccacaacggcttgcggatgagcatctaccccaagagcacgggtaacaagggcttcgaggatggggatgatgccatctctaagctacacgaccaggaggaatacggggcagctttaatccgcaataacatgcagcacattatgggccctgttacagccatcaagttactgggagaggaaaataaggagaatacccctagaaacgttcttaacataattccagctagtatgaactacgcgaaagcacactcaaaagataaaaagaaaccgcaacgcgattcacaggcacaaaaatcaccagtaaagtccaagtccacgcaccggattcaacacaacatcgattacttgaagcacttgtccaaagtcaaaaagattcctagcgatttcgaagggtctgggtatacagacttacaagagcggggagataatgacatttccccttttagtggcgatgggcagccattcaaggacatacctggaaagggggaagcgactggacctgatctcgagggtaaagacatccagaccggttttgcaggcccttccgaggctgagtccactcatctggacaccaagaagcctgggtacaatgaaattcccgaacgagaagaaaacgggggaaacacaattgggacgcgcgatgagactgcaaaggaggccgatgccgttgatgtgagtcttgtggaagggagcaatgatatcatggggtctactaactttaaggagctgcctgggagggaaggtaacagggtggacgccggttcccagaacgctcatcagggtaaggtggaatttcactaccctcctgctcctagtaaagagaagcgtaaggagggttcatcagacgctgcggagtctacaaactacaatgagatacccaagaatgggaaggggtcaacgcgcaagggagtggatcatagtaaccggaatcaagcgacattgaatgaaaagcagagattcccctctaaagggaagtcccaggggctgcccattcccagccgaggactcgacaatgagatcaaaaacgaaatggacagctttaatggcccaagccatgaaaatattataacccacgggaggaagtaccactatgtaccccatcgccaaaacaactctactcgcaataaagggatgcctcagggaaaaggatcttggggcagacagccccattcaaataggagattttcaagtcggagaagagacgattcctctgagtcatccgactccggctcttcgtctgagagtgacggagactag

SEQ ID NO: 71005 - DNA, 828 bp, Artificial Sequence
  derived and/or modified sequence
atgagagtgttctgtgttgggctcctgttgttcagtgtcacctgggccgctccgacctttcagccgcagacagagaagaccaaacagtcatgcgtggaagaacaacgacaggaggagaagaataaggataatattggctttcatcacctcggaaagaggatcaatcaagaacttagttcgaaggaaaacatcgtgcaggaacgtaaaaaggatctctctctttctgaagccagcgagaataagggttctagtaaaagtcaaaattactttactaaccgccaaaggctgaacaaggaatatagcatcagcaataaagaaaatacacataatggtttgagaatgagcatttatccgaagtctactggaaataagggcttcgaggacggcgacgacgctatttccaaacttcacgaccaagaggagtacggggctgcacttattcggaacaatatgcagcacataatgggtcccgtaacagctatcaaattgctaggtgaggaaaataaggaaaacacaccgcgaaacgttctgaatataatccccgcttcaatgaattacgctaaggctcattccaaggacaaaaaaaagccccagcgcgactcacaagcccaaaaatctcctgtcaaatcgaaatccacgcatcggatccagcataatatagactatctgaagcacctgagtaaagtcaagaagattccaagcgactttgagggctccggctacacagacctacaggaacgaggagataacgatatcagcccctttagtggaacggcaaacctactgcgcaccttcctcgttaaggagaagcttctggtgctgacttag

SEQ ID NO: 71006 - DNA, 1578 bp, Artificial Sequence
  derived and/or modified sequence
atgagagtgttctgcgtgggcctgctgctgttcagcgtgacctgggccgcccccaccttccagccccagaccgagaagaccaagcagagctgcgtggaggagcagagacaggaggagaagaacaaggacaacatcggcttccaccacctgggcaagagaatcaaccaggagctgagcagcaaggagaacatcgtgcaggagagaaagaaggacctgagcctgagcgaggccagcgagaacaagggcagcagcaagagccagaactacttcaccaacagacagagactgaacaaggagtacagcatcagcaacaaggagaacacccacaacggcctgagaatgagcatctaccccaagagcaccggcaacaagggcttcgaggacggcgacgacgccatcagcaagctgcacgaccaggaggagtacggcgccgccctgatcagaaacaacatgcagcacatcatgggccccgtgaccgccatcaagctgctgggcgaggagaacaaggagaacacccccagaaacgtgctgaacatcatccccgccagcatgaactacgccaaggcccacagcaaggacaagaagaagccccagagagacagccaggcccagaagagccccgtgaagagcaagagcacccacagaatccagcacaacatcgactacctgaagcacctgagcaaggtgaagaagatccccagcgacttcgagggcagcggctacaccgacctgcaggagagaggcgacaacgacatcagccccttcagcggcgacggccagcccttcaaggacatccccggcaagggcgaggccaccggccccgacctggagggcaaggacatccagaccggcttcgccggccccagcgaggccgagagcacccacctggacaccaagaagcccggctacaacgagatccccgagagagaggagaacggcggcaacaccatcggcaccagagacgagaccgccaaggaggccgacgccgtggacgtgagcctggtggagggcagcaacgacatcatgggcagcaccaacttcaaggagctgcccggcagagagggcaacagagtggacgccggcagccagaacgcccaccagggcaaggtggagttccactacccccccgcccccagcaaggagaagagaaaggagggcagcagcgacgccgccgagagcaccaactacaacgagatccccaagaacggcaagggcagcaccagaaagggcgtggaccacagcaacagaaaccaggccaccctgaacgagaagcagagattccccagcaagggcaagagccagggcctgcccatccccagcagaggcctggacaacgagatcaagaacgagatggacagcttcaacggccccagccacgagaacatcatcacccacggcagaaagtaccactacgtgccccacagacagaacaacagcaccagaaacaagggcatgccccagggcaagggcagctggggcagacagccccacagcaacagaagattcagcagcagaagaagagacgacagcagcgagagcagcgacagcggcagcagcagcgagagcgacggcgactag

SEQ ID NO: 71007 - DNA, 828 bp, Artificial Sequence
  derived and/or modified sequence
atgagagtgttctgcgtgggcctgctgctgttcagcgtgacctgggccgcccccaccttccagccccagaccgagaagaccaagcagagctgcgtggaggagcagagacaggaggagaagaacaaggacaacatcggcttccaccacctgggcaagagaatcaaccaggagctgagcagcaaggagaacatcgtgcaggagagaaagaaggacctgagcctgagcgaggccagcgagaacaagggcagcagcaagagccagaactacttcaccaacagacagagactgaacaaggagtacagcatcagcaacaaggagaacacccacaacggcctgagaatgagcatctaccccaagagcaccggcaacaagggcttcgaggacggcgacgacgccatcagcaagctgcacgaccaggaggagtacggcgccgccctgatcagaaacaacatgcagcacatcatgggccccgtgaccgccatcaagctgctgggcgaggagaacaaggagaacacccccagaaacgtgctgaacatcatccccgccagcatgaactacgccaaggcccacagcaaggacaagaagaagccccagagagacagccaggcccagaagagccccgtgaagagcaagagcacccacagaatccagcacaacatcgactacctgaagcacctgagcaaggtgaagaagatccccagcgacttcgagggcagcggctacaccgacctgcaggagagaggcgacaacgacatcagccccttcagcggcaccgccaacctgctgagaaccttcctggtgaaggagaagctgctggtgctgacctag

SEQ ID NO: 71008 - DNA, 1239 bp, Artificial Sequence
  derived and/or modified sequence
atgtcgatctaccccaagtcgaccggtaacaagggcttcgaggacggtgacgatgcgatcagtaaactacacgaccaagaagaatatggcgctgcacttatcagaaacaacatgcagcacattatggggcctgtgaccgccatcaaactgcttggtgaggagaataaggaaaatactccgagaaacgtgctgaatatcatcccggcaagtatgaactatgccaaagcccactccaaagataagaaaaagccccagcgcgattcccaggcgcagaagagtccagtaaagtctaaaagcactcaccgtatccagcataatatcgattacttgaaacatctcagcaaggtcaaaaagattccatctgatttcgagggatcggggtacacagatttacaagagcgaggcgacaacgatattagcccgttttctggcgacggacagcctttcaaagacattccaggcaaaggagaagccacggggccggacttggaaggaaaggatatacagactggttttgccgggccgtccgaagcggagtcaactcacctggatacaaagaagcccggctacaatgagattccggagcgggaggaaaatggcggcaataccatcggaactcgcgatgagaccgccaaagaagccgacgctgtagacgtgtccctggtagaaggctctaacgatatcatgggctctaccaactttaaagaactgcctgggcgtgaggggaacagagtagacgctggttctcaaaacgcccatcagggcaaggtggagttccattaccccccagctcccagcaaagagaaacggaaggaagggtcttctgacgcagcggagtctaccaactacaacgaaatacccaaaaatggcaaggggtctacaagaaaaggcgtggaccactccaatcggaaccaggctaccctgaacgaaaaacagcgctttcccagtaagggaaagagtcagggattacctatcccaagtagaggcctcgataacgagatcaaaaatgagatggatagctttaacggaccatcccatgaaaatatcattacccatggccgcaaataccactatgttcctcacagacagaataactctactcggaataagggcatgccacaagggaaaggttcatggggcaggcagcctcactccaaccgaagattcagcagtagacgccgagatgacagctctgagagctccgacagtggtagctcatccgaatccgatggcgactag

SEQ ID NO: 71009 - DNA, 1239 bp, Artificial Sequence
  derived and/or modified sequence
atgagcatctatccgaaaagcaccggcaataaagggtttgaggacggtgacgacgccatctcaaaactacatgatcaagaagagtacggcgccgctcttattcggaacaacatgcagcacatcatgggtcctgtaacagcaattaagctgctgggagaagaaaacaaagagaacacacctcggaacgtcctcaatatcatccctgcatcgatgaactatgcgaaagcccacagcaaagacaagaaaaagccacaaagggattcgcaggcacagaaaagccctgtgaagtcaaaaagcactcaccgcatccagcacaatatagactacctgaaacatctgagtaaggtgaaaaaaatccccagcgattttgagggtagtggctataccgacctgcaggaacgtggggacaatgatatcagcccctttagtggagacggacaacctttcaaggatattcctggtaaaggagaggcgacaggaccagatttggaaggtaaggatatccagacgggattcgctggaccctccgaggccgaatcgactcatcttgacaccaaaaaaccagggtataacgagatcccagagcgcgaggagaatggcggtaatacaatcggtacacgggacgaaactgcaaaagaagcagacgccgttgacgtgtcgctggttgaggggagtaacgatattatgggctcaaccaacttcaaggaattgcccgggcgtgagggaaatcgagtggacgcaggaagccagaacgcgcaccaaggcaaagtggagtttcattaccccccggcgcctagtaaagaaaaacggaaagaaggaagtagtgacgctgctgagtcaaccaattataacgaaatccctaagaatggaaagggtagtacgcggaagggcgtcgatcactccaacagaaaccaagcgactttgaatgagaaacagcgctttccatccaaaggcaaatctcagggcctgcccatcccctcgcgcggcttagacaatgaaatcaagaatgagatggattccttcaacggtcctagccatgaaaacatcattactcacgggcgaaaatatcactacgttcctcataggcagaacaacagtactcgaaataaggggatgccacaaggcaagggatcctggggccggcagccacactcaaataggagattcagctcccggcgcagagacgactcttctgaatctagcgattctggatcgagcagcgagtccgatggcgactag

SEQ ID NO: 71010 - DNA, 1239 bp, Artificial Sequence
  derived and/or modified sequence
atgagcatctaccccaagagcacaggcaacaagggctttgaagatggagatgatgccatcagcaagctgcatgaccaggaggagtatggagctgccctgatccggaacaacatgcagcacatcatgggccctgtgacagccatcaagctgctgggggaggagaacaaggagaacaccccaagaaatgtgctgaacatcatcccagcctccatgaactatgccaaggcccacagcaaggacaagaagaagccccagagggacagccaggcccagaagagccctgtgaagagcaagagcacccaccgcatccagcacaacatcgactacctgaagcacctgagcaaggtgaagaagatccccagcgactttgagggcagcggctacacagacctgcaggagcggggggacaatgacatcagccccttctctggagatggccagcccttcaaggacatccctggaaaaggagaggccactggaccagacctggagggcaaggacatccagacaggctttgctggccccagcgaggccgagagcacccacctggacaccaagaagccaggctacaatgagatccctgagcgggaggagaatggaggcaacaccatcggcaccagagatgaaacagccaaggaggctgatgctgtggatgtgtccctggtggagggcagcaatgacatcatgggcagcaccaacttcaaggagctgcccggccgggagggcaacagagtggatgctggcagccagaatgcccaccagggcaaggtggagttccactaccccccagcccccagcaaggagaagaggaaggagggcagcagtgatgctgctgagagcaccaactacaatgagatccccaagaatggcaagggcagcaccaggaagggcgtggaccacagcaacagaaaccaggccaccctgaatgagaagcagcgcttccccagcaagggcaagagccagggcctgcccatccccagccggggcctggacaatgagatcaagaatgagatggacagcttcaacggccccagccatgagaacatcatcacccacggcaggaagtaccactacgtgccccaccggcagaacaacagcaccaggaacaagggcatgccccagggcaagggctcctggggccggcagccccacagcaacagacgcttcagcagcagaagaagagatgacagcagcgagagcagtgacagcggcagcagcagcgagagtgatggagactag

SEQ ID NO: 71011 - DNA, 357 bp, Artificial Sequence
  derived and/or modified sequence
atgagctgccagcagagccagcagcagtgccagcccccccccaagtgtacacctaaatgcccacctaaatgtcctacaccaaaatgtccgcccaaatgccccccaaagtgtccccctgtttcctcatgctgctctgtttcctcaggtggctgctgcgggtccagctccggaggctgttgctcatccggcggcggtgggtgttgttcctctggcgggggggggtgttgtcttagtcaccacaggcggcgccgctcccaccgccatagaccacagtcatctgattgctgcagtcagcctagcgcgggttcgtcttgttgtggtggagggtcagggcagcatagcggaggttgttgttag

SEQ ID NO: 71012 - DNA, 1239 bp, Artificial Sequence
  derived and/or modified sequence
atgagcatctaccccaagagcaccggcaacaagggcttcgaggacggcgacgatgccatttcaaagctccacgatcaggaggaatacggcgcggctctaatcagaaacaacatgcagcacattatgggtccggtgaccgctatcaagctgctcggcgaggagaacaaggagaacacgccaagaaatgtcctcaatataatccccgctagtatgaactatgccaaggcgcactctaaggacaaaaaaaagcctcagagggattctcaagcacagaagagcccagtgaaatccaaatccactcaccgcattcagcataatattgactaccttaaacacctgtcaaaggtcaagaaaattccctctgactttgaaggatctggatataccgatctgcaagagagaggagacaacgacatttcaccttttagcggggacggtcagccattcaaggacattcctgggaagggagaggctacagggcccgacctggaaggcaaggacatccagaccggcttcgcaggaccttccgaagcagaatctacccacctggacacgaaaaaacccggttataacgaaatcccggagcgtgaggaaaatggcgggaacactatcggcacacgggacgagaccgctaaagaggcagacgcagtagacgtttcgctcgtcgagggctctaacgatattatgggctcgacaaacttcaaagaactacctggcagggagggcaaccgcgtggatgccgggagccaaaatgcccatcaaggaaaggtggagtttcattatccaccagcaccttcgaaagagaaacggaaagaaggcagttccgacgccgctgagtcaacgaattataacgaaattcccaagaacggcaagggtagcaccaggaagggggttgaccactccaaccgcaaccaggcaactctgaacgaaaaacaacgttttccatcaaaaggcaaatctcagggcctgcctattccaagccgaggactagataatgaaattaagaatgagatggatagtttcaacgggccttcccacgaaaacatcatcacgcacggccgtaagtatcactatgtgccacacaggcagaacaactctacccgtaataagggtatgccacagggcaagggcagctggggcagacagccacattccaacaggcgattctcctcccgcagaagagatgacagttctgagagctcagatagcgggtcttcatccgagtcagatggagactag

SEQ ID NO: 71013 - DNA, 1239 bp, Artificial Sequence
  derived and/or modified sequence
atgagcatctaccccaagagcaccggcaacaagggcttcgaggacggcgacgatgccatttccaagctgcatgatcaggaagaatatggagccgcgttaatacggaataatatgcagcacatcatgggtccggttacagccattaaattactgggtgaggagaacaaagagaatacgccgcgcaacgtattaaacattatccccgcgtcaatgaactacgctaaggcccactcaaaagacaaaaaaaaacctcaaagggactctcaagcgcagaagtcccccgtgaaaagcaagagcacacatcggatccagcataacatagattatctaaaacatttgtcaaaggtaaagaagatcccttcagacttcgagggtagcgggtataccgatctccaggaacgtggggataacgacatcagcccattctcgggcgacggccagccgttcaaggacattcctggaaaaggtgaagccacaggccccgacttagaaggcaaggacattcagacaggcttcgccggcccctcagaggcggaatcaacacacctggacaccaagaagcctggctataacgaaattccagagagggaagagaacggggggaataccataggaactcgggacgagacagctaaggaggccgacgccgtcgatgtttccctggtggagggcagtaacgatatcatgggatccactaactttaaagagctcccaggtcgggagggcaatcgggtcgacgccggtagccagaatgcccatcaaggcaaggtggagttccactatcctcctgcacctagcaaggagaaaaggaaggagggctcatccgatgcagccgaaagtacgaactataacgagataccaaagaacggcaagggttccacccgcaaaggcgtcgaccattctaatcgaaaccaggccacccttaacgaaaagcaacgatttccaagtaagggaaaaagccagggcctcccaatccctagtcgagggttagacaatgagattaaaaatgaaatggattcctttaacggaccaagtcatgagaatatcattacacacggccggaagtatcactacgtgccacacaggcaaaacaatagtacccgtaacaagggcatgccacagggtaagggctcttgggggagacaacctcatagtaatcgccgctttagctccagacgcagagatgatagcagcgaatcaagcgattcaggctccagcagcgagagcgatggggactag

SEQ ID NO: 71014 - DNA, 1239 bp, Artificial Sequence
  derived and/or modified sequence
atgtcaatataccccaagagcactggcaataagggtttcgaggatggtgatgatgccatatcgaaactgcacgatcaggaagaatacggcgcagcactgatccggaataacatgcagcatattatgggcccagtgactgctataaaactcctcggtgaggagaataaagagaacacccccagaaacgtgctgaacatcattcctgccagcatgaactatgcaaaggcacactccaaagataagaagaagccccagagggactcacaggctcaaaagtcccccgttaaatccaaaagcacccataggattcagcacaatatcgactacttgaagcacctgtctaaggttaaaaagattccgtccgatttcgaagggagtggttacactgatttgcaggagagaggagacaacgatatctctccctttagcggagatggccagccttttaaagatatacctggaaagggcgaagccactgggcctgacttagaggggaaagatatccaaaccggctttgcaggcccttctgaggccgaatccacacacctggataccaagaagcctggctataacgagatccccgaaagggaggagaatgggggtaacacaataggcacccgggacgagaccgccaaggaggcagacgccgtagatgtctctctcgttgagggctctaacgacatcatgggttcaaccaatttcaaggagctgccgggacgagaggggaatagagtggacgctggatcacaaaacgcccatcagggaaaggtggaattccactacccgccagctccttctaaagagaagcggaaggagggcagctcagacgcagccgaatctacaaattacaatgagattcctaaaaatggcaagggctccacgagaaagggcgtcgatcactccaaccgaaaccaggcaaccctgaacgagaagcagcggttccccagcaaagggaagtctcagggtctgcctatcccctcccggggactggataacgaaatcaagaacgagatggatagttttaacggtccaagtcatgagaacattatcactcacggcaggaaataccactacgtccctcaccggcaaaacaactcaactcgaaataagggcatgccacagggcaagggctcgtgggggaggcagcctcattcgaatagacggttttcaagcaggaggcgtgatgactcaagcgaatcaagcgacagcgggtcgtcttcggagtctgacggcgactag

SEQ ID NO: 71015 - DNA, 1239 bp, Artificial Sequence
  derived and/or modified sequence
atgagtatttaccccaaaagcacaggaaataagggatttgaagatggtgacgatgcgattagcaagttacatgaccaggaagagtatggggctgctctgatacggaataatatgcagcatatcatggggccagtcacagctattaaactgctcggcgaagagaataaagagaataccccgcgaaatgtgttgaatatcattcccgctagtatgaattatgcgaaagctcattccaaagataagaagaaacctcaacgcgactctcaggctcaaaaatccccagttaaaagcaagtccacccaccgtattcagcataatatagattacctgaaacacctctcaaaagtcaagaaaatccccagtgacttcgaaggctctggttataccgacctgcaggaaagaggggacaacgatatatcgcctttctccggagacggccaaccattcaaggacatacccggtaaaggcgaagccaccgggccagacttagagggcaaggatatacaaaccgggttcgccggacccagcgaggcggaaagtacccacttggatactaaaaagccgggatacaacgaaatccccgagagggaggagaacggcggaaacaccataggtacccgagatgagaccgccaaggaagcagatgccgtggacgtgtcgctggtggagggatccaatgatatcatgggcagcacaaattttaaggagcttcccggaagagaggggaatagagtagacgcgggatcccagaatgcgcatcaggggaaggtagagttccactatccccctgcaccatctaaggaaaagagaaaagagggcagctcagatgccgcagaaagtactaattataatgagatccctaaaaacgggaaaggcagcacacggaagggagtcgatcattccaatagaaatcaagcaacgctcaacgagaaacagagatttccgagcaagggcaaatcacagggccttccaatccctagcaggggcctcgataacgagataaaaaacgagatggactcctttaatggccctagccatgaaaacattataacacacggtcgcaagtaccattacgtgccacacaggcagaacaactctacgcgcaacaaaggcatgccccaaggtaaaggcagttggggccgtcagccacattcaaatcgacgcttttcttctcgccgacgggacgacagcagcgagagttctgacagtgggagtagtagtgaatctgacggggactag

SEQ ID NO: 71016 - DNA, 1239 bp, Artificial Sequence
  derived and/or modified sequence
atgagcatctaccccaagagcaccggcaacaagggcttcgaggacggcgacgacgccatcagcaagctgcacgaccaggaggagtacggcgccgccctgatcagaaacaacatgcagcacatcatgggccccgtgaccgccatcaagctgctgggcgaggagaacaaggagaacacccccagaaacgtgctgaacatcatccccgccagcatgaactacgccaaggcccacagcaaggacaagaagaagccccagagagacagccaggcccagaagagccccgtgaagagcaagagcacccacagaatccagcacaacatcgactacctgaagcacctgagcaaggtgaagaagatccccagcgacttcgagggcagcggctacaccgacctgcaggagagaggcgacaacgacatcagccccttcagcggcgacggccagcccttcaaggacatccccggcaagggcgaggccaccggccccgacctggagggcaaggacatccagaccggcttcgccggccccagcgaggccgagagcacccacctggacaccaagaagcccggctacaacgagatccccgagagagaggagaacggcggcaacaccatcggcaccagagacgagaccgccaaggaggccgacgccgtggacgtgagcctggtggagggcagcaacgacatcatgggcagcaccaacttcaaggagctgcccggcagagagggcaacagagtggacgccggcagccagaacgcccaccagggcaaggtggagttccactacccccccgcccccagcaaggagaagagaaaggagggcagcagcgacgccgccgagagcaccaactacaacgagatccccaagaacggcaagggcagcaccagaaagggcgtggaccacagcaacagaaaccaggccaccctgaacgagaagcagagattccccagcaagggcaagagccagggcctgcccatccccagcagaggcctggacaacgagatcaagaacgagatggacagcttcaacggccccagccacgagaacatcatcacccacggcagaaagtaccactacgtgccccacagacagaacaacagcaccagaaacaagggcatgccccagggcaagggcagctggggcagacagccccacagcaacagaagattcagcagcagaagaagagacgacagcagcgagagcagcgacagcggcagcagcagcgagagcgacggcgactag

SEQ ID NO: 71017 - protein, 108 aa, Artificial Sequence
  derived and/or modified sequence
MVSRKAVAALLVVHVAAMLASQTEAFVPIFTYGELQRMQEKERNKGQKKSLSVWQRSGEEGPVDPAEPIREEENEMIKLTAPLEIGMRMNSRQLEKYPATLEGLLTAK

SEQ ID NO: 71018 - DNA, 327 bp, Artificial Sequence
  derived and/or modified sequence
atggtcagtaggaaggctgtggccgcccttttggtcgtccatgtggccgctatgctggcgtcccagactgaggcctttgtgccaattttcacctacggagagttacagcgcatgcaagaaaaagaacgcaataaaggacagaaaaagtccctttccgtttggcagaggagcggtgaggaggggccagttgaccctgctgagcccatccgggaagaggagaatgaaatgattaaactaaccgctcctttagagattggaatgcgcatgaactcccggcagttagaaaagtatcccgcaactctagaagggctgctgacagccaagtag

SEQ ID NO: 71019 - DNA, 327 bp, Artificial Sequence
  derived and/or modified sequence
atggtgtccaggaaggctgtggccgccctgctggtggtgcacgtggccgccatgctggccagccagacagaggcctttgtgcccatcttcacctacggggagctgcagaggatgcaggagaaggagagaaataaaggccagaagaagagcctgtctgtgtggcagaggtctggagaggagggccctgtggaccctgctgagcccatccgggaggaggagaatgagatgatcaagctgacagcccccctggagatcggcatgaggatgaacagccggcagctggagaagtacccagccaccctggagggcctgctgacagccaagtag

SEQ ID NO: 71020 - DNA, 400 bp, Artificial Sequence
  derived and/or modified sequence
ccagacccactcagaccacgtgcacgccctccaagatggtatcccgtaaggctgtggctgctctgctggtggtgcatgtagctgccatgctggcctcccagacggaagccttcgtccccatcttcacctatggcgaactccagaggatgcaggaaaaggaacggaataaagggcaaaagaaatccctgagtgtatggcagaggtctggggaggaaggtcctgtagaccctgcggagcccatcagggaagaagaaaacgaaatgatcaagctgactgctcctctggaaattggaatgaggatgaactccagacagctggaaaagtacccggccaccctggaagggctgctgacagccaagtgatggccacgctggggagaaggtggacagatttgggaggc

SEQ ID NO: 71021 - DNA, 327 bp, Artificial Sequence
  derived and/or modified sequence
atggtgagccggaaggccgtggccgccctgctggtggtgcacgtggccgcaatgctcgcttcacagaccgaagccttcgtgcctatttttacttatggagagctgcagagaatgcaggagaaagagcggaataagggtcaaaaaaagagcctcagcgtctggcagcgctccggggaggaaggaccagtggatcccgccgaaccaattcgggaagaggaaaacgagatgattaagctgaccgctcccctagaaatcggcatgcgcatgaactcccggcagctagagaaatacccagctacacttgaaggactgctcactgccaaatag

SEQ ID NO: 71022 - DNA, 327 bp, Artificial Sequence
  derived and/or modified sequence
atggtgtcacgcaaagcagtggcagccttactggtcgtacatgtggccgctatgcttgccagccagacagaagcttttgtccccatattcacctacggcgagcttcaacgcatgcaagagaaagagagaaacaaggggcaaaaaaagagcttaagcgtctggcaacgaagcggtgaagaaggaccagtagaccctgcagaacctatccgcgaggaggagaacgagatgatcaagctgaccgcccctttagagattgggatgcgtatgaactcgcggcagttggagaaataccctgccacattggaagggctcctgaccgcaaagtag

SEQ ID NO: 71023 - DNA, 327 bp, Artificial Sequence
  derived and/or modified sequence
atggtgtcacgaaaggcggtcgctgccctgcttgtggttcacgttgctgctatgctagcgtcacagaccgaagcgttcgtgccaatcttcacttatggcgagcttcagaggatgcaagagaaggagcgtaataagggtcagaagaaatctctgagtgtttggcagaggtcaggagaagaggggccagtcgacccagctgaacctatccgagaagaggagaatgaaatgataaaactgacagctcctctagaaatagggatgcggatgaattcaagacaacttgagaaatatcctgctactttggaaggcctgctcactgctaaatag

SEQ ID NO: 71024 - DNA, 327 bp, Artificial Sequence
  derived and/or modified sequence
atggtctcaaggaaggcagtggccgcactgttagtcgtgcatgttgccgccatgctggcctcccagacggaggccttcgtgccaatcttcacttatggagaattacagagaatgcaggagaaggagcggaataaagggcagaagaaaagtttatctgtgtggcagagaagtggggaagaaggaccggtagaccctgcagaacccatacgcgaagaagagaatgaaatgatcaagctgacagctcctttggaaatcggaatgcggatgaactcccggcagcttgaaaaataccccgccacacttgaaggattattaacagccaagtag

SEQ ID NO: 71025 - DNA, 327 bp, Artificial Sequence
  derived and/or modified sequence
atggtgagcagaaaggccgtggccgccctgctggtggtgcacgtggccgccatgctggccagccagaccgaggccttcgtgcccatcttcacctacggcgagctgcagagaatgcaggagaaggagagaaacaagggccagaagaagagcctgagcgtgtggcagagaagcggcgaggagggccccgtggaccccgccgagcccatcagagaggaggagaacgagatgatcaagctgaccgcccccctggagatcggcatgagaatgaacagcagacagctggagaagtaccccgccaccctggagggcctgctgaccgccaagtag

SEQ ID NO: 71026 - protein, 427 aa, Artificial Sequence
  derived and/or modified sequence
MFEIKKICCIGAGYVGGPTCSVIAHMCPEIRVTVVDVNESRINAWNSPTLPIYEPGLKEVVESCRGKNLFFSTNIDDAIKEADLVFISVLSNPEFLAEGTAIKDLKNPDRVLIGGDETPEGQRAVQALCAVYEHWVPREKILTTNTWSSELSKLAANAFLAQRISSINSISALCEATGADVEEVATAIGMDQRIGNKFLKASVGFGGSCFQKDVLNLVYLCEALNLPEVARYWQQVIDMNDYQRRRFASRIIDSLFNTVTDKKIAILGFAFKKDTGDTRESSSIYISKYLMDEGAHLHIYDPKVPREQIVVDLSHPGVSEDDQVSRLVTISKDPYEACDGAHAVVICTEWDMFKELDYERIHKKMLKPAFIFDGRRVLDGLHNELQTIGFQIETIGKKVSSKRIPYAPSGEIPKFSLQDPPNKKPKV

SEQ ID NO: 71027 - DNA, 1284 bp, Artificial Sequence
  derived and/or modified sequence
atgttcgagatcaagaagatctgctgcatcggcgccggctacgtgggcggccccacctgcagcgtgatcgcccacatgtgccccgagatcagagtgaccgtggtggacgtgaacgagagcagaatcaacgcctggaacagccccaccctgcccatctacgagcccggcctgaaggaggtggtggagagctgcagaggcaagaacctgttcttcagcaccaacatcgacgacgccatcaaggaggccgacctggtgttcatcagcgtgctgagcaaccccgagttcctggccgagggcaccgccatcaaggacctgaagaaccccgacagagtgctgatcggcggcgacgagacccccgagggccagagagccgtgcaggccctgtgcgccgtgtacgagcactgggtgcccagagagaagatcctgaccaccaacacctggagcagcgagctgagcaagctggccgccaacgccttcctggcccagagaatcagcagcatcaacagcatcagcgccctgtgcgaggccaccggcgccgacgtggaggaggtggccaccgccatcggcatggaccagagaatcggcaacaagttcctgaaggccagcgtgggcttcggcggcagctgcttccagaaggacgtgctgaacctggtgtacctgtgcgaggccctgaacctgcccgaggtggccagatactggcagcaggtgatcgacatgaacgactaccagagaagaagattcgccagcagaatcatcgacagcctgttcaacaccgtgaccgacaagaagatcgccatcctgggcttcgccttcaagaaggacaccggcgacaccagagagagcagcagcatctacatcagcaagtacctgatggacgagggcgcccacctgcacatctacgaccccaaggtgcccagagagcagatcgtggtggacctgagccaccccggcgtgagcgaggacgaccaggtgagcagactggtgaccatcagcaaggacccctacgaggcctgcgacggcgcccacgccgtggtgatctgcaccgagtgggacatgttcaaggagctggactacgagagaatccacaagaagatgctgaagcccgccttcatcttcgacggcagaagagtgctggacggcctgcacaacgagctgcagaccatcggcttccagatcgagaccatcggcaagaaggtgagcagcaagagaatcccctacgcccccagcggcgagatccccaagttcagcctgcaggacccccccaacaagaagcccaaggtgtag

SEQ ID NO: 71028 - DNA, 168 bp, Artificial Sequence
  derived and/or modified sequence
atgttcgagatcaagaagatctgctgcatcggcgccggctacgtgggcggccccacctgcagcgtgatcgcccacatgtgccccgagatcagagtgaccgtggtggacgtgaacgagagcagaatcaacgcctggaacagccccaccctgcccatctacgaggactag

SEQ ID NO: 71029 - DNA, 258 bp, Artificial Sequence
  derived and/or modified sequence
atgttcgagatcaagaagatctgctgcatcggcgccggctacgtgggcggccccacctgcagcgtgatcgcccacatgtgccccgagatcagagtgaccgtggtggacgtgaacgagagcagaatcaacgcctggaacagccccaccctgcccatctacgagcccggcctgaaggaggtggtggagagctgcagaggcaagaacctgttcttcagcaccaacatcgacgacgccatcaaggaggccgacctggtgtag

SEQ ID NO: 71030 - DNA, 162 bp, Artificial Sequence
  derived and/or modified sequence
atgttcgagatcaagaagatctgctgcatcggcgccggctacgtgggcggccccacctgcagcgtgatcgcccacatgtgccccgagatcagagtgaccgtggtggacgtgaacgagagcagaatcaacgcctggaacagccccaccctgcccatctactag

SEQ ID NO: 71031 - DNA, 1284 bp, Artificial Sequence
  derived and/or modified sequence
atgtttgagattaaaaaaatttgctgcattggggctgggtatgtggggggaccgacctgtagtgtgatagcccacatgtgccccgaaattagggtgactgttgtggacgtgaacgaatcacgtattaacgcctggaatagtccgaccttgcccatttatgaacctggactgaaggaggtggtggaatcatgcagaggaaaaaacctatttttctccacaaacatcgacgacgctataaaggaggctgacctggtctttatctcagtgttgagcaatccagagtttcttgcagaaggcaccgccatcaaggacctgaagaatcccgatagagtcttgattggcggcgatgagacaccagaaggccagcgagccgtgcaggcgctgtgtgctgtctacgaacattgggtaccaagggaaaagatcctgactacaaatacctggtcgtccgaactcagcaagctagctgctaacgcttttttggcacaacggatctccagcatcaattctatcagcgccctttgcgaagccacaggcgcagacgtggaggaggtggctacagccattggaatggatcagagaataggaaataagtttttgaaggcgtccgttggattcgggggttcatgctttcagaaggacgtcctgaacctggtgtatctgtgtgaggccctgaatctgccagaagtggctcgctattggcaacaggtgattgacatgaatgattaccagcgcagaaggttcgccagtagaattatcgactctttgttcaacaccgtgacagacaagaagatcgcgatactgggttttgcctttaagaaagatacaggtgataccagagagtcttcttcaatttacattagtaagtatctgatggacgaaggcgctcatctgcatatatatgaccccaaggtcccccgagagcaaatagttgtcgatttgagccatcctggagtgtccgaggacgatcaagtttcccggctagtgactatctccaaagatccttacgaagcttgtgacggagcccatgccgtggtcatttgtacagagtgggatatgtttaaagagctggattatgaaagaatccataagaaaatgctgaagcctgcatttatatttgacggcagaagagtcctggacggcctgcataacgagctccagacgatcggattccaaattgaaaccatcggaaagaaagtgtcttctaagaggattccctacgctccttctggagagataccgaaattcagcctccaggatcccccgaacaagaagcctaaggtttag

SEQ ID NO: 71032 - DNA, 168 bp, Artificial Sequence
  derived and/or modified sequence
atgttcgagatcaagaagatttgctgtattggagccggttatgtagggggtcccacttgtagcgtcattgcgcatatgtgtccagagattcgagtgaccgtcgtggacgttaacgagtctcggatcaacgcttggaacagcccaacactccctatttatgaggattag

SEQ ID NO: 71033 - DNA, 258 bp, Artificial Sequence
  derived and/or modified sequence
atgttcgagatcaagaagatatgctgcatcggcgctgggtacgtgggtggccccacatgttcagtgattgctcacatgtgtcctgagattcgggtgactgtagtggatgtcaatgaatctagaattaacgcttggaactctcctacgctcccaatatacgaaccgggacttaaagaagtggtggagtcatgccgggggaaaaatctcttcttctctacgaacatcgacgacgccattaaagaagccgatcttgtttag

SEQ ID NO: 71034 - DNA, 162 bp, Artificial Sequence
  derived and/or modified sequence
atgtttgagatcaaaaagatttgttgcataggagcaggctacgtcggcggcccaacctgctctgtcatcgctcatatgtgcccagaaatccgagtgactgtggtggacgtcaatgagtcgaggataaatgcttggaatagtcccaccttgcctatctattag

SEQ ID NO: 71035 - DNA, 168 bp, Artificial Sequence
  derived and/or modified sequence
atgttcgagatcaagaagatctgttgcattggagcggggtatgtgggcggtcctacctgttctgttatagcacatatgtgccctgaaataagggtcactgttgtagacgttaacgaaagcaggataaatgcctggaactctccaaccttgcccatctatgaggattag

SEQ ID NO: 71036 - DNA, 1284 bp, Artificial Sequence
  derived and/or modified sequence
atgtttgagatcaagaagatctgctgcatcggggccggctacgtgggcggccccacctgcagcgtgattgcccacatgtgcccagagatccgggtgacagtggtggatgtgaatgaaagccgcatcaatgcctggaacagccccaccctgcccatctatgagcccggcctgaaggaggtggtggagagctgccggggcaagaacctcttcttcagcaccaacattgatgatgccatcaaggaggccgacctggtgttcatctctgtgctgagcaaccctgagttcctggccgagggcacagccatcaaggacctgaagaacccagacagagtgctgattggaggagatgagaccccagagggccagagagctgtgcaggccctgtgtgctgtgtatgagcactgggtgccccgggagaagatcctgaccaccaacacctggagcagcgagctgagcaagctggccgccaatgccttcctggcccagaggatcagcagcatcaacagcatcagcgccctgtgtgaggccactggagcagatgtggaggaggtggccacagccatcggcatggaccagagaattggcaacaagttcctgaaggcctctgtgggctttggaggcagctgcttccagaaggatgtgctgaacctggtgtacctgtgtgaggccctgaacctgcctgaggtggcccgctactggcagcaggtgattgacatgaatgactaccagaggagaagatttgccagccgcatcatcgacagcctcttcaacacagtgacagacaagaagatcgccatcctgggctttgccttcaagaaggacacaggagacacccgggagagcagcagcatctacatcagcaagtacctgatggatgagggcgcccacctgcacatctatgaccccaaggtgccccgggagcagatcgtggtggacctgagccaccctggggtgtctgaagatgaccaggtgtcccggctggtgaccatcagcaaggacccctatgaggcctgtgatggagcccatgctgtggtgatctgcacagagtgggacatgttcaaggagctggactatgaaagaatccacaagaagatgctgaagccagccttcatctttgatggaagaagagtgctggatggcctgcacaatgagctgcagaccatcggcttccagatcgagaccatcggcaagaaggtgagcagcaagaggatcccctatgcccccagcggggagatccccaagttcagcctgcaggacccccccaacaagaagcccaaggtgtag

SEQ ID NO: 71037 - DNA, 168 bp, Artificial Sequence
  derived and/or modified sequence
atgtttgagatcaagaagatctgctgcatcggggccggctacgtgggcggccccacctgcagcgtgattgcccacatgtgcccagagatccgggtgacagtggtggatgtgaatgaaagccgcatcaatgcctggaacagccccaccctgcccatctatgaggactag

SEQ ID NO: 71038 - DNA, 258 bp, Artificial Sequence
  derived and/or modified sequence
atgtttgagatcaagaagatctgctgcatcggggccggctacgtgggcggccccacctgcagcgtgattgcccacatgtgcccagagatccgggtgacagtggtggatgtgaatgaaagccgcatcaatgcctggaacagccccaccctgcccatctatgagcccggcctgaaggaggtggtggagagctgccggggcaagaacctcttcttcagcaccaacattgatgatgccatcaaggaggccgacctggtgtag

SEQ ID NO: 71039 - DNA, 162 bp, Artificial Sequence
  derived and/or modified sequence
atgtttgagatcaagaagatctgctgcatcggggccggctacgtgggcggccccacctgcagcgtgattgcccacatgtgcccagagatccgggtgacagtggtggatgtgaatgaaagccgcatcaatgcctggaacagccccaccctgcccatctactag

SEQ ID NO: 71040 - DNA, 1284 bp, Artificial Sequence
  derived and/or modified sequence
atgttcgagatcaagaagatctgctgcatcggcgccggctacgtgggcggcccaacctgttctgtgatagcgcacatgtgtcccgagattagggtgaccgtggtcgacgtgaacgaatctcgcattaatgcatggaactcccccacgttgccaatttacgagccagggttaaaggaggtggtggaaagctgcagaggtaagaatctttttttctccaccaatatcgacgatgccataaaggaagcggacttagtcttcatcagtgttctgtcaaatccagagtttcttgctgagggcacagctatcaaagacttgaagaaccccgatagagttctgataggcggggatgagacaccagagggccagcgcgctgttcaggcactctgcgcagtctatgaacactgggtcccacgcgagaaaattctaacaacgaacacgtggagttccgagctatcaaagttggccgccaacgcatttctggcccagcgcatctcctcaatcaattctatttcggcactgtgcgaggccactggtgccgatgtcgaggaagtagcgactgctatcggaatggaccaaagaatcgggaataaattcctgaaggcctctgtgggcttcgggggctcctgcttccagaaagacgtcctcaacttagtgtacttgtgtgaggccctgaacttgcctgaagttgcaaggtattggcagcaggttatcgatatgaatgattatcagcgtcgccggtttgcctccaggattatcgacagtctgtttaatacggtgaccgacaaaaagatcgccattctcgggttcgcctttaagaaggacaccggcgataccagggaatcatcgtccatttatatttccaagtatctcatggatgagggagcacatctccatatctatgatcccaaggtccctagagaacaaattgtggtggacttgtcccatccaggcgtatcagaggacgaccaggtgtcgcgcttggttaccatcagcaaagatccttacgaggcgtgtgatggcgcacatgccgtcgtgatttgcacagagtgggacatgtttaaagagctggattatgagcgcatccataagaagatgctgaagcccgcgttcatcttcgatggccggagggtactggacggtcttcacaatgaactgcaaacaattgggttccagatagaaaccataggcaagaaagtgtcttctaaaaggatcccatatgccccatccggcgaaatcccaaagttttccctgcaggatcccccaaataagaagccgaaggtttag

SEQ ID NO: 71041 - DNA, 168 bp, Artificial Sequence
  derived and/or modified sequence
atgttcgagatcaagaagatctgctgcatcggcgccggctacgtggggggccccacttgcagcgtcatagcccacatgtgccccgagattagagtgaccgtcgtggatgttaacgaatctcggataaatgcatggaattcacccacattacccatatatgaagactag

SEQ ID NO: 71042 - DNA, 258 bp, Artificial Sequence
  derived and/or modified sequence
atgttcgagatcaagaagatctgctgcatcggcgccggctacgtgggaggacctacttgtagcgtgatcgctcacatgtgtcccgagatccgggtcaccgtggtcgacgtgaacgagtctcggattaacgcatggaactccccgactctgcccatctatgagccaggcctgaaggaagtcgtggagtcatgtagaggcaagaacctgttcttcagtaccaatatcgatgatgctattaaggaggccgatctggtttag

SEQ ID NO: 71043 - DNA, 162 bp, Artificial Sequence
  derived and/or modified sequence
atgttcgagatcaagaagatctgctgcatcggcgccggctacgtgggtggtccaacgtgtagcgtcatcgcccacatgtgtcccgaaattcgggttactgttgtagacgtaaatgagtcccggattaatgcgtggaatagcccaacactgcctatctactag

SEQ ID NO: 71044 - DNA, 168 bp, Artificial Sequence
  derived and/or modified sequence
atgttcgagatcaagaagatctgctgcatcggcgccggctacgtgggtgggcccacttgttccgtgattgcccacatgtgccccgaaattcgggtcactgtagtagatgtgaatgagagcaggataaacgcatggaattcacccaccctgccaatttacgaagactag

SEQ ID NO: 71045 - DNA, 1284 bp, Artificial Sequence
  derived and/or modified sequence
atgttcgagattaagaagatttgttgtatcggcgctgggtatgtgggcggacctacttgttcggtgattgcacacatgtgtcccgagatacgagtaactgtggtcgacgttaatgagagtcgcatcaatgcttggaactctcctaccctccctatctacgagccaggcctgaaagaggtagttgaaagctgtagaggaaaaaacctattcttcagtacaaacatcgatgacgctatcaaggaagctgacttagtgtttatctctgtcctgtcaaacccagaattcctcgcagagggtactgcgatcaaggatctcaagaatcccgatcgggtcctcattggcggtgatgagacgcctgaaggccaacgggctgttcaggccctgtgtgctgtatatgagcactgggtgccgagagaaaaaatcctgactactaatacatggtcaagtgagctctccaaactcgccgctaacgcatttcttgctcaaaggatcagcagtattaacagcatttcagctttatgcgaggccactggcgcagacgtcgaggaagtcgcaactgctatcggaatggaccaacgaatcggcaataagtttctcaaagcttccgtggggtttggcggaagctgctttcagaaagatgtgctcaacctagtctacttatgtgaggccctcaacctgccagaagttgcgcgttactggcagcaggtgatcgacatgaatgattatcaacggcgacggtttgcctcacgcatcattgactccctctttaataccgtgaccgataaaaaaatcgccatactcgggtttgctttcaagaaagacaccggggacaccagagaaagctctagcatctacatctccaaatacctaatggacgagggtgctcatctgcatatctacgatccaaaagttccccgagagcagatcgtggtggatcttagccatcctggtgtgtccgaggatgatcaagtatcaagactcgtgacaatatcaaaggatccatatgaggcctgcgacggcgctcacgccgtagtgatttgcactgagtgggatatgttcaaagagttggattacgaaaggatccacaaaaagatgttgaaaccagcctttattttcgacggcaggagggtgctggatggtctccacaacgagctgcagacaataggttttcaaatcgagacaatcgggaaaaaagtcagttctaagcggatcccatacgcaccgtctggcgagatccccaaattttcactgcaggatcccccaaataagaaacctaaggtatag

SEQ ID NO: 71046 - DNA, 168 bp, Artificial Sequence
  derived and/or modified sequence
atgttcgaaatcaagaaaatctgctgcataggagcaggctacgtaggtggacctacctgttcagtgattgcacacatgtgccccgagattagggtcacagtggtggatgttaatgaatctagaataaatgcttggaactcccctactctgcctatttacgaggactag

SEQ ID NO: 71047 - DNA, 258 bp, Artificial Sequence
  derived and/or modified sequence
atgttcgaaattaaaaaaatctgttgtatcggtgctggatacgtgggcggacctacgtgttccgtcattgcccacatgtgcccagagatcagagttaccgtcgtagatgtgaatgagagccgcataaatgcctggaacagccctacattgccaatatatgagcctggtctgaaggaggtggtcgaatcctgcagaggaaagaacttattcttcagcacgaatatcgacgatgcaatcaaagaggccgaccttgtttag

SEQ ID NO: 71048 - DNA, 162 bp, Artificial Sequence
  derived and/or modified sequence
atgtttgaaatcaagaagatctgttgcatcggcgcaggatatgtggggggtcccacttgctcggttatagcccacatgtgccctgagatcagggtaactgtggtcgatgtcaacgaatcccgtataaatgcttggaacagtccaacgctgccaatatactag

SEQ ID NO: 71049 - DNA, 168 bp, Artificial Sequence
  derived and/or modified sequence
atgtttgagattaaaaaaatctgttgtattggggcaggatacgtcggcggtccgacctgtagcgtcatcgcccatatgtgccctgagatccgagttactgtcgtggatgtgaatgagagtcgaatcaatgcctggaacagtcccaccttaccaatatacgaggactag

SEQ ID NO: 71050 - DNA, 2826 bp, Artificial Sequence
  derived and/or modified sequence
gtaacgcgtggcagcctgagggaggggcgtgcgccgagagggagctcagatcgagcggggcgcgggtggagaagctgcggcggcgcggcccgtaggaaggtgctgtccgaacgatcgggataggagcggtccctgcgcttgctgctgggaagtggtacaatcatgtttgaaattaagaagatctgttgcatcggtgcaggctatgttggaggacccacatgtagtgtcattgctcatatgtgtcctgaaatcagggtaacggttgttgatgtcaatgaatcaagaatcaatgcgtggaattctcctacacttcctatttatgagccaggactaaaagaagtggtagaatcctgtcgaggaaaaaatctttttttttctaccaatattgatgatgccatcaaagaagctgatcttgtatttatttctgtgctgtccaaccctgagtttctggcagagggaacagccatcaaggacctaaagaacccagacagagtactgattggaggggatgaaactccagagggccagagagctgtgcaggccctgtgtgctgtatatgagcactgggttcccagagaaaagatcctcaccactaatacttggtcttcagagctttccaaactggcagcaaatgcttttcttgcccagagaataagcagcattaactccataagtgctctgtgtgaagcaacaggagctgatgtagaagaggtagcaacagcgattggaatggaccagagaattggaaacaagtttctaaaagccagtgttgggtttggtgggagctgtttccaaaaggatgttctgaatttggtttatctctgtgaggctctgaatttgccagaagtagctcgttattggcagcaggtcatagacatgaatgactaccagaggaggaggtttgcttcccggatcatagatagtctgtttaatacagtaactgataagaagatagctattttgggatttgcattcaaaaaggacactggtgatacaagagaatcttctagtatatatattagcaaatatttgatggatgaaggtgcacatctacatatatatgatccaaaagtacctagggaacaaatagttgtggatctttctcatccaggtgtttcagaggatgaccaagtgtcccggctcgtgaccatttccaaggatccatatgaagcatgtgatggtgcccatgctgttgttatttgcactgagtgggacatgtttaaggaattggattatgaacgcattcataaaaaaatgctaaagccagcctttatcttcgatggacggcgtgtcctggatgggctccacaatgaactacaaaccattggcttccagattgaaacaattggcaaaaaggtgtcttcaaagagaattccatatgctccttctggtgaaattccgaagtttagtcttcaagatccacctaacaagaaacctaaagtgtagagattgccatttttatttgtgattttttttttttttttttggtacttcaggatagcaaatatctatctgctattaaatggtaaatgaaccaagtgtttttttttgttttttttttgagacagagtctcactgttgcccaggctggagtgcagtggtgcaatctcggctcactgcaagctctgcttcccaggttcacgccattctcctggctcagcctcccaagtagctgggactacaggcacccgccacagtgcctggctaattttttgtatttttagtagagacagggtttcaccatgtgagccaggatggtctcaatctcctgaccttgtgaaccacccgtctcggcctcccaaagtgctgggattacaggtgtgagccaccacgcctggcccatgaaccaagtgtttttaaggaaacaaaactatttttttaatcatcagatttatactagctatatggatattagcatatctggtaattatgaatctagaatttttttacatatttttataatactgttagctcagttattggatgagtgaaagataatcatgttggttttaatagtgtcaatttttgtaaaataaaaattaaacttcaaactctttactttataaattgtccataggccacactttaatatcacattataaagggaaggacagtcttcattcctcctggttattggtttgtttgtcattaaagatatattttgaatccatgaaattgctatgctaaacagcctttacatgtatggtctggttaaagttcctttgttccttttgttttaataaaatgtgtcactgattttttagctcaaaatcatcactgttaatttccagtcaccccaaatatggttaaaagattttttttttaatcatgaagagaaaattagtagcatttctttctctccccattatttattggttttcctcactaatctttttttttttagtccaaaagccaaaaatatttatcttggttttacattttaatttccattcttaattgtaatttttttctttaaataaggaaaccaatataatctcatgtataaaaacttaaatattttacaagttacatatagcatcattctaaaataagaattttttttgttttctgtctgcttttttcttatgtctcttgttgagttttatattttcagtggttatttttgcttgtgttagatcattattaaaatatatccaatgtccctttgatacttgtgctctgctgagaatgtacagtttgcattaaacatcccaggtctcatccttcaggaattttgcagttcaatgagaagagggagacaaatataaagatgaggacagaagcatctctacagatgaaaattacataaataaaacattctccatc

SEQ ID NO: 71051 - protein, 397 aa, Artificial Sequence
  derived and/or modified sequence
MGKGRAADLKYIEACARRIVQNSNGYKIVTEKSTVPVRAAESIRRIFDANTKPNLNLQVLSNPEFLAEGTAIKDLKNPDRVLIGGDETPEGQRAVQALCAVYEHWVPREKILTTNTWSSELSKLAANAFLAQRISSINSISALCEATGADVEEVATAIGMDQRIGNKFLKASVGFGGSCFQKDVLNLVYLCEALNLPEVARYWQQVIDMNDYQRRRFASRIIDSLFNTVTDKKIAILGFAFKKDTGDTRESSSIYISKYLMDEGAHLHIYDPKVPREQIVVDLSHPGVSEDDQVSRLVTISKDPYEACDGAHAVVICTEWDMFKELDYERIHKKMLKPAFIFDGRRVLDGLHNELQTIGFQIETIGKKVSSKRIPYAPSGEIPKFSLQDPPNKKPKV

SEQ ID NO: 71052 - DNA, 1194 bp, Artificial Sequence
  derived and/or modified sequence
atgggcaagggcagagccgccgacctgaagtacatcgaggcctgcgccagaagaatcgtgcagaacagcaacggctacaagatcgtgaccgagaagagcaccgtgcccgtgagagccgccgagagcatcagaagaatcttcgacgccaacaccaagcccaacctgaacctgcaggtgctgagcaaccccgagttcctggccgagggcaccgccatcaaggacctgaagaaccccgacagagtgctgatcggcggcgacgagacccccgagggccagagagccgtgcaggccctgtgcgccgtgtacgagcactgggtgcccagagagaagatcctgaccaccaacacctggagcagcgagctgagcaagctggccgccaacgccttcctggcccagagaatcagcagcatcaacagcatcagcgccctgtgcgaggccaccggcgccgacgtggaggaggtggccaccgccatcggcatggaccagagaatcggcaacaagttcctgaaggccagcgtgggcttcggcggcagctgcttccagaaggacgtgctgaacctggtgtacctgtgcgaggccctgaacctgcccgaggtggccagatactggcagcaggtgatcgacatgaacgactaccagagaagaagattcgccagcagaatcatcgacagcctgttcaacaccgtgaccgacaagaagatcgccatcctgggcttcgccttcaagaaggacaccggcgacaccagagagagcagcagcatctacatcagcaagtacctgatggacgagggcgcccacctgcacatctacgaccccaaggtgcccagagagcagatcgtggtggacctgagccaccccggcgtgagcgaggacgaccaggtgagcagactggtgaccatcagcaaggacccctacgaggcctgcgacggcgcccacgccgtggtgatctgcaccgagtgggacatgttcaaggagctggactacgagagaatccacaagaagatgctgaagcccgccttcatcttcgacggcagaagagtgctggacggcctgcacaacgagctgcagaccatcggcttccagatcgagaccatcggcaagaaggtgagcagcaagagaatcccctacgcccccagcggcgagatccccaagttcagcctgcaggacccccccaacaagaagcccaaggtgtag

SEQ ID NO: 71053 - DNA, 1194 bp, Artificial Sequence
  derived and/or modified sequence
atggggaagggaagggctgcagatctgaagtacatagaagcatgtgccaggcgtatcgtgcagaacagcaacggatacaaaatcgtgaccgagaaaagtaccgtgcccgtcagagctgcagagtcaatccgcaggattttcgatgccaacaccaaaccaaacctaaaccttcaggtgcttagcaaccccgagttcttggccgaaggtaccgccatcaaggacctcaagaatccagaccgtgtgctcatagggggggatgagacaccagaagggcagagggctgtgcaggcgctatgcgccgtctatgaacattgggtgcctcgtgagaagattcttaccaccaatacatggtcgtctgagcttagcaaactggcggccaacgccttcctcgcacagagaatttcctccatcaattccatttccgcgctttgtgaagcaactggagcggacgtggaggaagtggccactgccataggtatggaccagaggattgggaacaaattcctcaaagcttcagtcggctttggaggctcctgctttcagaaggatgtgttaaacttggtttacctttgcgaagctctgaatcttccagaggtggcacgctactggcaacaagtgatcgatatgaacgactatcaacgcaggcggttcgcaagtcggataattgattccctgttcaacacggtgacagacaagaaaatcgccatcctgggattcgccttcaaaaaggataccggcgacacccgagaatcctcatcaatatacatttctaagtaccttatggatgaaggcgctcacctgcacatctacgacccaaaagtgccccgtgaacagattgtcgtagacttaagtcaccctggagtgtcagaggacgatcaagtgtcccgtttggttactatttccaaagacccttatgaggcatgtgacggcgcccacgcagttgtgatttgcacggagtgggatatgttcaaggaactggattacgagcggattcacaagaagatgttgaaacccgcatttattttcgacgggagaagagtcctggacgggctgcataacgagttgcagaccatcggatttcagatcgaaacgattggaaagaaagtatcttcgaagaggatcccgtacgcaccctctggcgagatccctaagttctccttgcaagacccgccaaataaaaaacctaaagtttag

SEQ ID NO: 71054 - DNA, 1194 bp, Artificial Sequence
  derived and/or modified sequence
atgggcaagggccgggctgctgacctgaagtacatcgaggcctgtgccaggagaattgtgcagaacagcaatggctacaagatcgtgacagagaagagcacagtgcctgtgcgggctgctgagagcatccgccgcatctttgatgccaacaccaagcccaacctgaacctgcaggtgctgagcaaccctgagttcctggccgagggcacagccatcaaggacctgaagaacccagacagagtgctgattggaggagatgagaccccagagggccagagagctgtgcaggccctgtgtgctgtgtatgagcactgggtgccccgggagaagatcctgaccaccaacacctggagcagcgagctgagcaagctggccgccaatgccttcctggcccagaggatcagcagcatcaacagcatcagcgccctgtgtgaggccactggagcagatgtggaggaggtggccacagccatcggcatggaccagagaattggcaacaagttcctgaaggcctctgtgggctttggaggcagctgcttccagaaggatgtgctgaacctggtgtacctgtgtgaggccctgaacctgcctgaggtggcccgctactggcagcaggtgattgacatgaatgactaccagaggagaagatttgccagccgcatcatcgacagcctcttcaacacagtgacagacaagaagatcgccatcctgggctttgccttcaagaaggacacaggagacacccgggagagcagcagcatctacatcagcaagtacctgatggatgagggcgcccacctgcacatctatgaccccaaggtgccccgggagcagatcgtggtggacctgagccaccctggggtgtctgaagatgaccaggtgtcccggctggtgaccatcagcaaggacccctatgaggcctgtgatggagcccatgctgtggtgatctgcacagagtgggacatgttcaaggagctggactatgaaagaatccacaagaagatgctgaagccagccttcatctttgatggaagaagagtgctggatggcctgcacaatgagctgcagaccatcggcttccagatcgagaccatcggcaagaaggtgagcagcaagaggatcccctatgcccccagcggggagatccccaagttcagcctgcaggacccccccaacaagaagcccaaggtgtag

SEQ ID NO: 71055 - DNA, 1194 bp, Artificial Sequence
  derived and/or modified sequence
atgggcaagggccgggccgccgacctgaagtacatcgaggcctgcgcaagaaggattgtgcagaatagtaacgggtacaaaattgtgaccgagaagtctaccgtgcccgtcagggccgctgaaagcattcgcagaatctttgatgccaacactaagccgaacctcaacctgcaggtgctctccaaccctgagtttttggcggagggaactgcaataaaggatctaaaaaatccggacagggttctgatcggcggagatgaaactccagagggacaaagggccgtgcaggcattgtgtgccgtatacgagcactgggttccccgggaaaaaatcttgaccactaacacctggagtagtgagctgtccaaactggcggccaatgcgtttctggcccagcgaatctcttctatcaattcaatttcggccctgtgtgaagctaccggtgcggacgtggaggaggttgccacggcgatcgggatggaccagcggatcggaaacaagttcctgaaggcatcagtgggattcggcggaagctgcttccagaaagatgtcctgaacctggtctatttgtgtgaagccttaaatcttccagaggtggcccggtactggcagcaggtcattgatatgaatgactatcagcggaggcgtttcgcatcccgtattatcgattcactcttcaacacagttactgacaagaaaatcgcaattttgggcttcgccttcaagaaggatacgggcgacaccagagaaagctcgtccatctacataagcaaatatttaatggatgagggggcccacctgcacatatacgatcctaaagttcctcgcgaacagatagtcgtcgacttgtcccaccccggagtcagcgaggatgaccaggtctctagacttgtgaccatcagtaaggatccttacgaggcctgcgacggtgcccatgcagtggtcatctgtactgagtgggacatgttcaaagagctggattacgagcgtatccacaaaaagatgctgaaaccagctttcatcttcgacggcaggcgcgtgctggacggactccacaatgaacttcagaccattggcttccaaatcgaaaccataggcaagaaagtctcatcaaagaggattccctacgcgccctcgggcgagattcccaagttcagcttacaggatcctcccaacaagaagccaaaagtgtag

SEQ ID NO: 71056 - DNA, 1194 bp, Artificial Sequence
  derived and/or modified sequence
atggggaaaggcagagccgcagacctgaagtacattgaggcatgcgccaggagaattgtgcagaattcaaatgggtacaagatcgttacagagaagagtactgtgcccgtccgggctgcagagtcaattcgcagaattttcgatgcaaacacaaaaccgaatctgaacttacaggtgctttctaatccggagtttttggcagaagggaccgctatcaaagatctcaagaatcctgatagagtgcttatagggggtgatgaaacacccgaaggtcagcgggcagttcaggctctttgcgccgtatacgagcactgggtgcctcgggagaagatccttaccactaacacttggtcatccgaactttctaaactcgccgcaaatgcctttctggctcagcgtatttcatccataaactctatatcagccctgtgcgaggcgacgggcgctgacgtggaggaggttgccaccgccatcggaatggatcagagaataggtaacaagttccttaaggcgtctgtcggcttcgggggatcctgttttcaaaaggacgtactcaatctggtgtatctgtgcgaggctttaaatttacccgaggttgcaagatattggcagcaagtgatcgatatgaacgattatcagagaagacgcttcgcctcccgtattattgatagtctttttaacaccgtcactgataagaagattgccatattgggcttcgcttttaagaaagacacaggggatacgagggagtcaagtagtatctatatatcaaagtatttgatggacgagggagcccacctgcacatttacgatcccaaggtcccgagggagcagatagtagtggacctttcgcatcccggagtcagcgaggacgaccaggtcagccggctggtcaccatcagtaaggacccatacgaagcctgtgacggcgcacacgccgtggtgatttgtacagagtgggatatgttcaaggagttagactatgagcggattcataaaaagatgctcaaacccgctttcatcttcgatgggcgaagggttttagacgggttgcataacgagctgcagaccatcggattccagatcgaaaccataggcaagaaagtgagcagcaaaagaattccctatgccccatccggggaaattccaaaattttccctgcaggacccccctaataagaagccaaaagtctag

SEQ ID NO: 71057 - protein, 119 aa, Artificial Sequence
  derived and/or modified sequence
MSVTDQAFVTLATDDIYCQGALVLGQSLRRHRLTRKLVVLITPQVSSLLRDMDEAGNHDSEQTIAGIENQTLHVLTHRWELNNENTWTQGGEHHTLEPVVGRGEGGGIALGDIPNVNDE

SEQ ID NO: 71058 - protein, 64 aa, Artificial Sequence
  derived and/or modified sequence
MSVTDQAFVTLATDDIYCQGALVLGQSLRRHRLTRKLVVLITPQVSSLLRPAASLVLSRVSSRP

SEQ ID NO: 71059 - protein, 63 aa, Artificial Sequence
  derived and/or modified sequence
MSVTDQAFVTLATDDIYCQGALVLGQSLRRHRLTRKLVVLITPQVSSLLSLSKRCKISSSHLD

SEQ ID NO: 71060 - protein, 138 aa, Artificial Sequence
  derived and/or modified sequence
MSVTDQAFVTLATNDIYCQGALVLGQSLRRHRLTRKLVVLITPQVSSLLRVILSKVFDEVIEVNLIDSADYIHLAFLKRPELGLTLTKLHCWTLTHYSKCVFLDADTLVLSNVDELFDRGEFSAAPDPGWPDCFNSGV

SEQ ID NO: 71061 - DNA, 360 bp, Artificial Sequence
  derived and/or modified sequence
atgagcgtgaccgaccaggccttcgtgaccctggccaccgacgacatctactgccagggcgccctggtgctgggccagagcctgagaagacacagactgaccagaaagctggtggtgctgatcaccccccaggtgagcagcctgctgagagacatggacgaggccggcaaccacgacagcgagcagaccatcgccggcatcgagaaccagaccctgcacgtgctgacccacagatgggagctgaacaacgagaacacctggacccagggcggcgagcaccacaccctggagcccgtggtgggcagaggcgagggcggcggcatcgccctgggcgacatccccaacgtgaacgacgagtag

SEQ ID NO: 71062 - DNA, 195 bp, Artificial Sequence
  derived and/or modified sequence
atgagcgtgaccgaccaggccttcgtgaccctggccaccgacgacatctactgccagggcgccctggtgctgggccagagcctgagaagacacagactgaccagaaagctggtggtgctgatcaccccccaggtgagcagcctgctgagacccgccgccagcctggtgctgagcagagtgagcagcagaccctag

SEQ ID NO: 71063 - DNA, 192 bp, Artificial Sequence
  derived and/or modified sequence
atgagcgtgaccgaccaggccttcgtgaccctggccaccgacgacatctactgccagggcgccctggtgctgggccagagcctgagaagacacagactgaccagaaagctggtggtgctgatcaccccccaggtgagcagcctgctgagcctgagcaagagatgcaagatcagcagcagccacctggactag

SEQ ID NO: 71064 - DNA, 360 bp, Artificial Sequence
  derived and/or modified sequence
atgtccgtgacagatcaggctttcgtaaccctggcgaccgacgacatttactgccagggagccctagtactcggccaaagtttgagacgtcataggctgacacgcaaacttgtcgtcctcattacaccccaagtgagcagcttactgcgcgacatggatgaagccggtaaccatgatagcgagcaaaccatcgccggcatcgagaatcagactttacatgttctaactcatcggtgggagctgaacaatgagaatacatggacccagggcggagaacaccacaccttagagccagtggtgggcagaggagagggcggaggtatcgctctgggggacatacctaacgtcaatgatgaatag

SEQ ID NO: 71065 - DNA, 195 bp, Artificial Sequence
  derived and/or modified sequence
atgtccgtgacagatcaggcatttgtaacattggctaccgatgacatttactgtcagggagctctcgtcctgggccaatcactgagacgccacaggctgaccagaaagctggtagtgctgattacgccgcaggtaagcagccttcttaggcccgccgcctcactagttttgagccgggtgtcatcccggccttag

SEQ ID NO: 71066 - DNA, 192 bp, Artificial Sequence
  derived and/or modified sequence
atgtccgtgaccgatcaggcgtttgttactctcgccaccgacgacatatactgccaaggagctctggttctggggcagtccttacggaggcaccgcctaaccagaaagctcgtggtcttgatcacaccccaggtatcctcactgttatctctctcaaaacgatgtaagatttcctcatcccacttagattag

SEQ ID NO: 71067 - DNA, 360 bp, Artificial Sequence
  derived and/or modified sequence
atgtctgtgacagaccaggcctttgtgaccctggccacagatgacatctactgccagggcgccctggtgctgggccagagcctgcggcggcaccggctgaccaggaagctggtggtgctgatcaccccccaggtgagcagcctgctgcgggacatggatgaagctggcaaccacgacagcgagcagaccatcgccggcatcgagaaccagaccctgcacgtgctgacccaccgctgggagctgaacaatgaaaacacctggacccagggcggggagcaccacaccctggagcctgtggtgggccgcggggagggcggcggcatcgccctgggggacatccccaacgtgaatgatgaatag

SEQ ID NO: 71068 - DNA, 195 bp, Artificial Sequence
  derived and/or modified sequence
atgtctgtgacagaccaggcctttgtgaccctggccacagatgacatctactgccagggcgccctggtgctgggccagagcctgcggcggcaccggctgaccaggaagctggtggtgctgatcaccccccaggtgagcagcctgctgcggcctgctgccagcctggtgctgagccgggtgagcagccggccctag

SEQ ID NO: 71069 - DNA, 192 bp, Artificial Sequence
  derived and/or modified sequence
atgtctgtgacagaccaggcctttgtgaccctggccacagatgacatctactgccagggcgccctggtgctgggccagagcctgcggcggcaccggctgaccaggaagctggtggtgctgatcaccccccaggtgagcagcctgctgagcctgagcaagcgctgcaagatcagcagcagccacctggactag

SEQ ID NO: 71070 - DNA, 623 bp, Artificial Sequence
  derived and/or modified sequence
aggcctggaaatccacgcggcttcccaaagacggcgcctctgttctgcgggttcgtgacgaggatttatttccacccactgcgcctgggcgcaggtctgcgggtccgcgcccactgcgtgcggcgccacggaccatgtcggtgactgatcaggcttttgtcacactggccacagatgacatctactgccagggcgccctggtcctggggcagtcactgaggagacacaggctgacgaggaagctggtggtgttgatcactcctcaggtgtccagcctgctcagggacatggatgaagctggaaaccatgactctgagcaaactattgcagggatagaaaaccaaacactgcatgttctcactcataggtgggaattgaacaatgagaacacttggacacagggtggagaacatcacacactggagccagtcgtggggcggggagaggggggagggatagctttaggagatatacctaatgtaaatgatgagtaaacgggtgcagcacaccaacatggtacatgtatatatatgtatcaaacctgcacattgtgcacatgtaccctagaacttaaagtataataaaaaaaatttataaataaaaatgtttaggcaattaaaaaa

SEQ ID NO: 71071 - DNA, 300 bp, Artificial Sequence
  derived and/or modified sequence
tttatttccacccactgcgcctgggcgcaggtctgcgggtccgcgcccactgcgtgcggcgccacggaccatgtcggtgactgatcaggcttttgtcacactggccacagatgacatctactgccagggcgccctggtcctggggcagtcactgaggagacacaggctgacgaggaagctggtggtgttgatcactcctcaggtgtccagcctgctcagacctgcagcctcgttggtcctctccagggtttcttcaaggccatagacggaaggtgacatctctgcattgtcctgaacttt

SEQ ID NO: 71072 - DNA, 639 bp, Artificial Sequence
  derived and/or modified sequence
aggcctggaaatccacgcggcttcccaaagacggcgcctctgttctgcgggttcgtgacgaggatttatttccacccactgcgcctgggcgcaggtctgcgggtccgcgcccactgcgtgcggcgccacggaccatgtcggtgactgatcaggcttttgtcacactggccacagatgacatctactgccagggcgccctggtcctggggcagtcactgaggagacacaggctgacgaggaagctggtggtgttgatcactcctcaggtgtccagcctgctcagtctctccaaaaggtgcaagatatcatccagccacttggactgagagctcatcccaatccagttcctgatcagatggggccctgccactcgttccagccaggtgacctggtgttcgttaaaaagttccagaaagaaggactcctgcttagaaaagacctcatactgtcatccttaccaccccaatggctctaaaagtagaaaggaatgcttacattcatgacaccccctagtacaaagcatgtttaactgtaatctatgactaactaccctaattactggattggcagaaccctttttctccttctcttgtttagtcttccaaccattatatattaaaattagtttcttaaatttgt

SEQ ID NO: 71073 - DNA, 360 bp, Artificial Sequence
  derived and/or modified sequence
atgagcgtgaccgaccaggccttcgtgaccctggccaccgacgacatctattgtcagggggcactcgtgttaggccagtccctgagacgccacagactgactaggaaattagtagtccttatcacaccccaggtcagctccctgctgagggacatggatgaggcaggtaaccatgatagtgagcaaaccatagccggtattgaaaatcaaactctccatgtgttgacccatagatgggagctgaacaatgagaatacatggactcagggcggcgagcaccatacactggagcctgtggtcggtcggggagagggtggtggcatcgcactcggagacatccccaatgtaaatgatgagtag

SEQ ID NO: 71074 - DNA, 195 bp, Artificial Sequence
  derived and/or modified sequence
atgagcgtgaccgaccaggccttcgtgaccctggccaccgacgacatctactgccagggcgctctggttctgggacagtctctccggcggcaccggctgacacggaagctggtggtgttgatcacgccccaagtctcatctttgctgcgccccgccgccagcctggtcctgtcccgtgtgtcgtctcgcccctag

SEQ ID NO: 71075 - DNA, 192 bp, Artificial Sequence
  derived and/or modified sequence
atgagcgtgaccgaccaggccttcgtgaccctggccaccgacgacatttactgccagggcgccttggttctcgggcagagcctgcgtcggcataggttgactcgcaaactggttgtccttatcactccacaggtctcgtcccttctcagtctgagtaagagatgcaagatctctagttcgcaccttgactag

SEQ ID NO: 71076 - DNA, 360 bp, Artificial Sequence
  derived and/or modified sequence
atgagcgtcactgaccaagccttcgtgactctggcaacagacgacatctactgccagggggctcttgttctcggccagagcttgaggaggcatcgccttacgcggaagctggtcgtgcttattaccccccaggtgtcatccctgctacgcgatatggacgaggccggtaaccacgacagtgagcagacaattgccggaattgagaaccaaacactgcacgtcctcacccatcggtgggagctaaacaacgagaatacctggacacagggcggagaacaccacaccctcgaacctgtggtcggtagaggggagggtggtgggatagctctcggagacattccaaacgtgaacgacgaatag

SEQ ID NO: 71077 - DNA, 195 bp, Artificial Sequence
  derived and/or modified sequence
atgtccgtgaccgaccaggctttcgtgactctagccactgacgatatctactgccagggagcgttagtgctcggccagtcccttagaagacaccgtctgacacgcaagctcgtcgtactgattaccccacaggtgagctcattattgcggcctgctgccagtctggtgttgagtagagtgtccagtcgcccatag

SEQ ID NO: 71078 - DNA, 192 bp, Artificial Sequence
  derived and/or modified sequence
atgtcagtgaccgatcaagccttcgtcacgctggccaccgacgacatctactgtcagggggcactggtgcttgggcagtccttgcgtcgccaccggcttacccgtaagctcgtagtattgatcaccccacaggtctcctcccttttaagcttgtcaaagagatgtaaaatctcgagcagccacctagactag

SEQ ID NO: 71079 - protein, 430 aa, Artificial Sequence
  derived and/or modified sequence
MSETEFHHGAQAGLELLRSSNSPTSASQSAGMTVTDQAFVTLATNDIYCQGALVLGQSLRRHRLTRKLVVLITPQVSSLLRVILSKVFDEVIEVNLIDSADYIHLAFLKRPELGLTLTKLHCWTLTHYSKCVFLDADTLVLSNVDELFDRGEFSAAPDPGWPDCFNSGVFVFQPSLHTHKLLLQHAMEHGSFDGADQGLLNSFFRNWSTTDIHKHLPFIYNLSSNTMYTYSPAFKQFGSSAKVVHFLGSMKPWNYKYNPQSGSVLEQGSASSSQHQAAFLHLWWTVYQNNVLPLYKSVQAGEARASPGHTLCHSDVGGPCADSASGVGEPCENSTPSAGVPCANSPLGSNQPAQGLPEPTQIVDETLSLPEGRRSEDVDLAVSVSQISIEEKVKELSPEEERRKWEEGRIDYMGKDAFARIQEKLDRFLQ

SEQ ID NO: 71080 - DNA, 1293 bp, Artificial Sequence
  derived and/or modified sequence
atgagcgaaaccgagtttcatcatggcgcgcaggctggacttgagctgctgagatcatccaacagcccaacaagtgccagccaaagcgccggcatgacagtcaccgaccaagccttcgtgactttagccacaaacgatatctactgtcagggtgcccttgtgctgggccaatctcttcggcgccaccgtttgacacgaaagctcgtcgtgctgattacgcctcaggtgtccagcctccttcgcgtgattctcagtaaggtctttgatgaggtgatcgaggtaaacttaattgactctgcagactacatccacctggcgttcctgaaaagacctgagctgggtcttaccttgactaaactgcactgttggacattgactcactactcaaagtgtgtgtttttggacgcggacactctggtgctgagcaatgttgatgaactttttgaccgcggggagttttccgcagcacctgaccctggctggccagattgtttcaactccggcgtgtttgtgtttcagccttcactgcacacgcacaaactgcttctacagcatgccatggagcatggttcctttgacggcgctgaccagggtctgctaaacagcttctttagaaactggtccactaccgatatccacaagcacctgccattcatatataatctgtcgagcaacacaatgtacacctactcccccgcatttaagcagtttggatccagcgcaaaggttgttcactttcttggatcaatgaagccctggaactacaaatataacccacagtctgggtctgtactggaacagggcagcgcaagctccagccagcaccaggctgctttcctgcacctgtggtggaccgtgtatcagaataacgtgctccccctctacaagtcagtccaagcaggcgaagctcgggctagccccggacacacactgtgtcatagtgatgtcggtggcccgtgcgcagatagtgcctctggagtgggggagccatgtgagaatagtacaccttctgccggagtgccctgcgccaactctcccctcggatccaaccagcccgcacaagggctccccgaaccgacacagatcgtcgatgagactctaagcttacccgaagggcggcgttccgaagatgttgatctggccgtatctgtgtcccagatctcaatagaagagaaggtgaaggagctgagtcccgaggaggaacgtcgcaagtgggaagaaggcagaattgattatatgggcaaggacgcctttgcccggatccaggagaaacttgacaggtttctgcaatag

SEQ ID NO: 71081 - DNA, 3172 bp, Artificial Sequence
  derived and/or modified sequence
cgcgggcttgcgggcaggggctgcagggaggaggagaggacccgcgcccgcgggggctggcggaggcggggccgggcttccggacagaggccaatcgctgccctcggggcctccagcgccggctctgggccgaggcagccagagcgcggaagaggcctggaaatccacgcggattcccggagacggcgcctctgctctgcgggttcgtggcgaggaagtccacccactgctcccgggcgcaggtctgcaggtccgcgcccactgcccgcggcgccactgaccatgtcggagacagagtttcaccatggtgcccaggctggtctcgaactcctgaggtcaagcaattcacccacctcagcctcccaaagtgctggaatgacagtgactgatcaggcttttgtcacactagccaccaatgacatctactgccagggcgccctggtcctggggcagtcactgaggagacacaggctgacgaggaagctggtggtgttgatcactcctcaggtgtccagcctgctcagggtcatcctctcgaaggtgttcgatgaagtcattgaagtgaatctaatcgatagtgccgactacatccacctggcctttctgaagagacctgagctcgggctcaccctcaccaagcttcactgttggactctcactcactacagcaagtgtgtcttcctggatgcagacactctggtgctgtccaatgtcgatgagctgtttgacaggggagagttttctgcggccccggaccccggatggccggattgcttcaatagcggggtgtttgtcttccagccttctctccacacgcataaactcctgctacagcacgccatggaacacggcagctttgacggggcagaccaaggcttactgaatagtttcttcaggaactggtcgaccacagacatccacaagcacctgccgttcatctataacttgagtagtaacacgatgtacacttacagccctgccttcaagcaattcggttccagtgcaaaggtcgtccactttttggggtccatgaaaccttggaactacaagtacaatccacagagtggctcggtgttggagcaaggctcagcgtccagcagccagcaccaggcggcattccttcatctctggtggacggtctaccagaacaacgtgctgcccctttataaaagcgtccaagcgggggaagcacgcgcgtctcctggtcacacactttgccacagtgatgtgggggggccgtgtgcggattcagcctctggtgttggagagccgtgtgaaaattcaacacccagtgcgggcgtgccgtgtgcaaattcaccactgggttctaaccagcctgctcagggccttccggagccgacccagatagtggatgagaccctgtccctacctgaaggacgccgttcagaagatgtcgacctggccgtctctgtttcccagatctccatcgaagagaaggtgaaggaattgagccccgaggaagagaggaggaagtgggaggaaggccgtatcgactacatggggaaggacgcgtttgctcgcatccaggagaagctggaccggttcctgcagtaatccggcagctggtgggcgttgtgtgtagttagacaatgtcctgttgggtggtcctgttgcgtggagatctcctctggtcctttcaaagggaaacgctgttgaaccttgtgcctctatttatgcttaatccatttgagtgcctcacacaaaaaacgtagagtatagaaatccaccttaaagcccctcgccccaacttctccaccaacgccttctgggctttcttcagaggtcacttctacccttgaagctgtcggcaaaagcgagcagtaataacattctagtagactctcgatggtggtctccgctcttgcccgaaggacctctgaagtacgctggagctgtgttgtacaggtgctgtgagacctaccctattcagaattaaacctcactgcaaatttcctcccatcacgaagctaacaacactaatatacgtatttagcacctctgaggctttgccatggagacccatttctgtagggctaaggaaacatttagacgtggtgactgactttcatttggacttggcgaagtgtatctgagaaacacctcggctgtggtctctctgctttaaatcctaacaggacttcctagagcgttgacagaaattctactcgtggacgttgggaagaaagattgtaggtggcttggggaatgtgggtggcttagaggatctaaaccgattcacttcctggttgagaagcaacgagggcttgctctaaatcgtttagaggataacaggatctagagatgctctctgcttgacaacaaaagtcagggtgcagtcggtccacccttgactgctcttggcttggtctctaccctcactacctcagttctcaataacttagtgaatcactgccctcctcaaagccatttccactcagctctttccagagaattctcagttttatgagacgggaaactttatttcacgagaaagcctcattgtcagaagtatcttcattcaatgggcacaatatgctgtgtatctcaccaggtagctgtcaggggccaccgagagtgtcgttaaaaatgggcatggttgtaataaaggaggaaagtgcgacttttgaaatgtttggaaggtttatttctcatgcacattccagggaaaagcagagagtaaattagagacgggataggaaggccgtgggagaactcgatcctagcctgtgtcagctggatgtgtttacgtggagaggcgtggccactttttaggtcacctgaagcagtttagcctttggatagaggaacctgcctgaatttatggcattagtggtggcatttttttgtgtacaagatgtgggtgatggaggggctgtttctttttccgtgtgggtggttaataatcgtcagtctcggagggcgaggctcgtaggatatttcaggtgagtcagggttggatggtcatcggctttcagaaggagaccacgggaatgttcagggaaacaatgtcagcttctctgaggaccagaattcatgttcacgggcagtgatgagttggcttatggagtgagtccagtctggaattccgccgtgcattctagcctgtatcatctcatttggacaaatgctggcacgttgaaattaaaatgtt

SEQ ID NO: 71082 - DNA, 1293 bp, Artificial Sequence
  derived and/or modified sequence
atgtctgaaacagagttccaccacggggcccaggccggcctggagctgctgcggagcagcaacagccccaccagcgccagccagagcgctggcatgacagtgacagaccaggcctttgtgaccctggccaccaatgacatctactgccagggcgccctggtgctgggccagagcctgcggcggcaccggctgaccaggaagctggtggtgctgatcaccccccaggtgagcagcctgctgcgggtcatcctgagcaaggtgtttgatgaagtcatcgaggtgaacctgattgattctgctgactacatccacctggccttcctgaagaggcctgagctgggcctgaccctgaccaagctgcactgctggaccctgacccactacagcaaatgtgtgttcctggatgctgacaccctggtgctgagcaatgtggatgagctgtttgacagaggagagttctctgctgccccagaccccggctggccagactgcttcaacagcggcgtgtttgtgttccagcccagcctgcacacccacaagctgctgctgcagcacgccatggagcacggcagctttgatggagctgaccagggcctgctgaacagcttcttcaggaactggagcaccacagacatccacaagcacctgcccttcatctacaacctgagcagcaacaccatgtacacctacagccctgccttcaagcagtttggcagcagcgccaaggtggtgcacttcctgggctccatgaagccctggaactacaagtacaacccccagagcggctctgtgctggagcagggcagcgccagcagcagccagcaccaggccgccttcctgcacctgtggtggacagtgtaccagaacaacgtgctgcccctgtacaagtctgtgcaggccggggaggcccgggccagccctggccacaccctgtgccacagtgatgtgggcggcccctgtgccgacagcgccagcggcgtgggggagccctgtgagaacagcaccccatctgctggggtgccctgtgccaacagccccctgggcagcaaccagcctgcccagggcctgcctgagcccacccagatcgtggatgagaccctgagcctgcctgagggcagaagaagtgaagatgtggacctggccgtgtctgtgtcccagatcagcattgaggagaaggtgaaggagctgagccctgaggaggagaggaggaagtgggaggagggcagaattgactacatgggcaaggatgcctttgcccgcatccaggagaagctggaccgcttcctgcagtag

SEQ ID NO: 71083 - DNA, 1293 bp, Artificial Sequence
  derived and/or modified sequence
atgagcgagaccgagttccaccacggcgcccaggccggcctggagctcctgcggtcaagcaactcaccaacttcagcatctcagtcagctggcatgaccgtgacagaccaagctttcgtgactctggctaccaacgacatttattgtcagggagcccttgtgctgggccaatccttgcgccgacaccgtctgaccagaaaactggtcgtgctcattactccacaagtttccagtctgcttagagttatcctgagcaaagtgtttgatgaagtgatcgaagtgaatttgatcgatagcgcagactatattcacctagcgttcctgaagcgcccagagttaggtttgaccctgaccaagttgcactgttggaccctgacacattatagcaagtgcgtgttcctggacgccgacacattagtcctctcaaatgtggatgaactctttgaccggggcgaattctccgctgcacctgaccctggatggccagattgcttcaactctggcgtttttgtattccagccttcgctgcacacacataaactgctactgcagcatgctatggagcacggctcttttgacggagctgatcagggcctcctcaattccttttttcggaactggtcaacgacagacatacacaagcatctgcctttcatctataatctgtcctccaacaccatgtacacttacagccccgccttcaaacagttcggttcgagcgcaaaggtcgtgcacttcttggggagcatgaagccatggaactacaaatataacccccagagtggtagcgttctggagcaaggcagcgcctctagctctcagcaccaggcggccttcctccacctctggtggaccgtctaccaaaacaacgtgctgcccctgtacaagagtgtgcaggctggcgaggctcgcgcttcccctggacatacgttgtgtcattccgacgtcggcggtccatgcgcagactctgcatccggagtgggggaaccgtgtgagaatagcaccccttccgccggggtgccctgtgcaaactctcccttgggcagtaatcagccagcgcagggattgcctgaacccacacagatcgtggacgagaccctgagcctgcccgagggcagaagaagcgaggatgtggacttggccgtatcagtatcacagatttccattgaagagaaggtcaaagagctgtctcccgaagaggagcgtagaaagtgggaagagggccgaatagactatatggggaaggacgcctttgcacggatccaggagaagctcgatagatttctacagtag

SEQ ID NO: 71084 - DNA, 1293 bp, Artificial Sequence
  derived and/or modified sequence
atgtcagaaaccgaatttcatcacggtgcacaagcgggtctcgagttgctcagatccagcaacagccccaccagtgcatctcagtcagccggtatgaccgtgacagaccaggcttttgttaccctggctacaaatgacatttactgtcagggcgctctggtgctgggccagtcgcttcgacggcaccgtctgacaagaaagctggtcgtattgattactccacaggtttcatcactacttcgcgtgattctgtctaaggtgtttgatgaagtgattgaggtaaacctgattgacagtgctgactacatccacctagcattcctgaagcgacccgaactgggtctaacccttacaaagctgcactgctggaccttgacccactattccaaatgtgtgttcttggatgctgatacgcttgtactgtcaaacgtggatgagttgtttgatagaggggagtttagtgcagcgcctgacccaggctggcccgactgctttaattcgggtgtgtttgtattccagccctctttgcacactcataagcttctcttgcagcatgccatggagcatggctcttttgatggtgctgaccaaggcttactcaactctttctttcgaaattggtcaacaactgacatccataagcacctgccattcatatataacctaagctccaacacgatgtacacctacagccccgctttcaagcagtttggatcttctgcaaaagttgtgcactttctgggatccatgaaaccctggaactataagtacaatccccagagcggatccgtgttagaacagggtagcgcatcaagttcccagcatcaggcagctttccttcacctgtggtggacagtatatcaaaataacgtgctgccactgtacaagagcgtgcaggctggcgaagccagagcctctcctgggcatactctgtgtcacagtgacgtcggcggaccatgcgccgatagcgccagcggcgtcggggaaccttgtgagaattccaccccctctgccggtgtcccttgcgcaaattccccattaggcagtaatcaacccgctcagggactgcctgagcctacacagatagtggacgagacattatccctaccagaaggcagacgatccgaagatgtagatctggccgtctctgtaagccagatctccatcgaagaaaaagttaaggaactgagtccagaggaggaaagaaggaagtgggaggaggggaggattgattacatgggaaaggatgcctttgccaggatccaggaaaaacttgataggtttttgcaatag

SEQ ID NO: 71085 - DNA, 1293 bp, Artificial Sequence
  derived and/or modified sequence
atgagcgagaccgagttccaccacggcgcccaggccggcctggagctgctgagaagcagcaacagccccaccagcgccagccagagcgccggcatgaccgtgaccgaccaggccttcgtgaccctggccaccaacgacatctactgccagggcgccctggtgctgggccagagcctgagaagacacagactgaccagaaagctggtggtgctgatcaccccccaggtgagcagcctgctgagagtgatcctgagcaaggtgttcgacgaggtgatcgaggtgaacctgatcgacagcgccgactacatccacctggccttcctgaagagacccgagctgggcctgaccctgaccaagctgcactgctggaccctgacccactacagcaagtgcgtgttcctggacgccgacaccctggtgctgagcaacgtggacgagctgttcgacagaggcgagttcagcgccgcccccgaccccggctggcccgactgcttcaacagcggcgtgttcgtgttccagcccagcctgcacacccacaagctgctgctgcagcacgccatggagcacggcagcttcgacggcgccgaccagggcctgctgaacagcttcttcagaaactggagcaccaccgacatccacaagcacctgcccttcatctacaacctgagcagcaacaccatgtacacctacagccccgccttcaagcagttcggcagcagcgccaaggtggtgcacttcctgggcagcatgaagccctggaactacaagtacaacccccagagcggcagcgtgctggagcagggcagcgccagcagcagccagcaccaggccgccttcctgcacctgtggtggaccgtgtaccagaacaacgtgctgcccctgtacaagagcgtgcaggccggcgaggccagagccagccccggccacaccctgtgccacagcgacgtgggcggcccctgcgccgacagcgccagcggcgtgggcgagccctgcgagaacagcacccccagcgccggcgtgccctgcgccaacagccccctgggcagcaaccagcccgcccagggcctgcccgagcccacccagatcgtggacgagaccctgagcctgcccgagggcagaagaagcgaggacgtggacctggccgtgagcgtgagccagatcagcatcgaggagaaggtgaaggagctgagccccgaggaggagagaagaaagtgggaggagggcagaatcgactacatgggcaaggacgccttcgccagaatccaggagaagctggacagattcctgcagtag

SEQ ID NO: 71086 - protein, 331 aa, Artificial Sequence
  derived and/or modified sequence
MAFVTRQFMRSVSSSSTASASAKKIIVKHVTVIGGGLMGAGIAQVAAATGHTVVLVDQTEDILAKSKKGIEESLRKVAKKKFAENLKAGDEFVEKTLSTIATSTDAASVVHSTDLVVEAIVENLKVKNELFKRLDKFAAEHTIFASNTSSLQITSIANATTRQDRFAGLHFFNPVPVMKLVEVIKTPMTSQKTFESLVDFSKALGKHPVSCKDTPGFIVNRLLVPYLMEAIRLYERDFQTCGDSNSGLGFSLKGDASKEDIDTAMKLGAGYPMGPFELLDYVGLDTTKFIVDGWHEMDAENPLHQPSPSLNKLVAENKFGKKTGEGFYKYK

SEQ ID NO: 71087 - DNA, 996 bp, Artificial Sequence
  derived and/or modified sequence
atggccttcgtgaccagacagttcatgagaagcgtgagcagcagcagcaccgccagcgccagcgccaagaagatcatcgtgaagcacgtgaccgtgatcggcggcggcctgatgggcgccggcatcgcccaggtggccgccgccaccggccacaccgtggtgctggtggaccagaccgaggacatcctggccaagagcaagaagggcatcgaggagagcctgagaaaggtggccaagaagaagttcgccgagaacctgaaggccggcgacgagttcgtggagaagaccctgagcaccatcgccaccagcaccgacgccgccagcgtggtgcacagcaccgacctggtggtggaggccatcgtggagaacctgaaggtgaagaacgagctgttcaagagactggacaagttcgccgccgagcacaccatcttcgccagcaacaccagcagcctgcagatcaccagcatcgccaacgccaccaccagacaggacagattcgccggcctgcacttcttcaaccccgtgcccgtgatgaagctggtggaggtgatcaagacccccatgaccagccagaagaccttcgagagcctggtggacttcagcaaggccctgggcaagcaccccgtgagctgcaaggacacccccggcttcatcgtgaacagactgctggtgccctacctgatggaggccatcagactgtacgagagagacttccagacctgcggcgacagcaacagcggcctgggcttcagcctgaagggcgacgccagcaaggaggacatcgacaccgccatgaagctgggcgccggctaccccatgggccccttcgagctgctggactacgtgggcctggacaccaccaagttcatcgtggacggctggcacgagatggacgccgagaaccccctgcaccagcccagccccagcctgaacaagctggtggccgagaacaagttcggcaagaagaccggcgagggcttctacaagtacaagtag

SEQ ID NO: 71088 - DNA, 996 bp, Artificial Sequence
  derived and/or modified sequence
atggcttttgtgactcggcagtttatgcgctcagtgtcaagcagctcgacagctagtgcctctgcaaagaagattatcgtcaagcatgttaccgttattgggggagggttgatgggggctggaatcgctcaggtagcagccgctacaggccataccgtagtgctggtggatcaaaccgaggacatattggccaagtccaaaaagggcatcgaagagagtctacgcaaagtcgctaaaaagaaatttgcggagaacctaaaggccggggatgagtttgtagagaagacgctctcgactatagccacttcgacagacgcagcttcagttgttcacagcaccgaccttgtggttgaagcaatagtagagaacttgaaagttaagaacgaattgtttaaacgattggacaagttcgccgctgagcacacaattttcgctagcaatacgagttctctccaaatcacttccatcgccaacgctacgactcgtcaggataggttcgccggattgcattttttcaacccagtgcccgtaatgaagctcgtagaggtgatcaagacaccaatgacaagccagaagacattcgagagtttagtagacttcagcaaggcacttgggaaacatccagtcagctgcaaggacacaccaggatttatcgtgaataggctgctggtgccgtacctcatggaggcaatccgcctgtatgagcgtgacttccagacctgtggcgatagcaactcaggactcggcttcagcctgaagggcgatgcctcaaaagaggatatcgacacggcaatgaaacttggtgctggctatcccatgggcccgttcgaactgctcgactatgtcgggctggacactactaagttcatcgttgacggctggcacgaaatggacgccgaaaaccctttgcaccaacctagtccctcgttaaataagctggtcgctgagaacaaattcggaaaaaagactggagaaggattttacaagtacaaatag

SEQ ID NO: 71089 - DNA, 996 bp, Artificial Sequence
  derived and/or modified sequence
atggcctttgtgacccggcagttcatgaggtctgtgagcagcagcagcacagccagcgccagcgccaagaagatcatcgtgaagcacgtgacagtgattggaggcggcctgatgggcgccggcatcgcccaggtggccgccgccaccggccacacagtggtgctggtggaccagacagaggacatcctggccaagagcaagaagggcatcgaggagagcctgaggaaggtggccaagaagaagtttgctgagaacctgaaggctggagatgaatttgtggagaagaccctgagcaccatcgccaccagcacagatgctgcctctgtggtgcacagcacagacctggtggtggaggccatcgtggagaacctgaaggtgaagaatgagctgttcaagaggctggacaagtttgctgctgagcacaccatctttgccagcaacaccagcagcctgcagatcaccagcatcgccaatgccaccacccggcaggacagatttgctggcctgcacttcttcaaccctgtgcctgtgatgaagctggtggaggtgatcaagacccccatgaccagccagaagacctttgagagcctggtggacttcagcaaggccctgggcaagcaccctgtgtcctgcaaggacaccccaggcttcatcgtgaaccggctgctggtgccctacctgatggaggccatccggctgtatgaaagagacttccagacctgtggggacagcaacagcggcctgggcttcagcctgaagggagatgccagcaaagaagatattgacacagccatgaagctgggcgccggctaccccatgggcccctttgagctgctggactatgtgggcctggacaccaccaagttcatcgtggatggctggcatgagatggatgctgagaaccccctgcaccagcccagccccagcctgaacaagctggtggccgagaacaagtttgggaagaagacaggagagggcttctacaagtacaagtag

SEQ ID NO: 71090 - DNA, 996 bp, Artificial Sequence
  derived and/or modified sequence
atggccttcgtgacccggcagttcatgcggagcgtgagcagcagctcgacagcctccgcctccgcaaagaagataattgtgaaacatgtgacggtaattggcggaggactaatgggagctggaatcgcgcaagtggctgcagctaccggccataccgtggtcctggtggatcagacagaggacatactcgcaaaaagcaaaaaggggatcgaggagtcactacgaaaggtggcgaagaaaaagtttgcggagaatcttaaagcgggggatgagtttgtggagaagactttgagcacgattgcaaccagtacagatgccgccagcgtcgtgcattccaccgacctggtggtggaagcaattgtagagaaccttaaggtcaagaatgagctctttaagcggctggacaagttcgccgctgaacacaccatcttcgcatcaaacacttcatcccttcagatcaccagtatagccaacgccactacaagacaagacaggttcgcagggctgcacttctttaatccagtccccgtgatgaagctggtggaagtgataaaaactccaatgacgtcccaaaagacgttcgagagtctcgtagatttttctaaggctttaggcaaacaccccgtgtcctgtaaggatactccaggctttatagtgaatcgcctcctcgttccttacctgatggaggcgatcagactttatgagcgggactttcagacttgcggcgacagcaatagcggcttgggtttttctctgaagggagatgcaagtaaggaggatattgacaccgcgatgaaattaggtgctggctatccaatgggacccttcgaacttttagactatgtgggacttgatacgacaaagttcattgtagatgggtggcacgagatggatgccgagaaccctttgcatcaaccaagccctagcctcaacaagctggtggccgaaaacaagttcggtaaaaaaaccggcgaggggttttacaagtacaagtag

SEQ ID NO: 71091 - DNA, 2033 bp, Artificial Sequence
  derived and/or modified sequence
cgtgtatacccgctcaacgctgggacgttacagccagggccaatgggcagagcgggactcgaggccccgcccccgccttgtggcgtcacggggacgccgggggcgcgcgggctgcagggccgcgtaggtccccgcccccagagtctggctttccgcggctgcccgcctcgcgcgtcttccctgcccgggtctcctcgctgtcgccgccgctgccacaccatggccttcgtcaccaggcagttcatgcgttccgtgtcctcctcgtccaccgcctcggcctcggccaagaagataatcgtcaagcacgtgacggtcatcggcggcgggctgatgggcgccggcattgcccaggttgctgcagcaactggtcacacagtagtgttggtagaccagacagaggacatcctggcaaaatccaaaaagggaattgaggaaagccttaggaaagtggcaaagaagaagtttgcagaaaaccttaaggccggcgatgaatttgtggagaagaccctgagcaccatagcgaccagcacggatgcagcctccgttgtccacagcacagacttggtggtggaagccatcgtggagaatctgaaggtgaaaaacgagctcttcaaaaggctggacaagtttgctgctgaacatacaatctttgccagcaacacttcctccttgcagattacaagcatagctaatgccaccaccagacaagaccgattcgctggcctccatttcttcaacccagtgcctgtcatgaaacttgtggaggtcattaaaacaccaatgaccagccagaagacatttgaatctttggtagactttagcaaagccctaggaaagcatcctgtttcttgcaaggacactcctgggtttattgtgaaccgcctcctggttccatacctcatggaagcaatcaggctgtatgaacgagacttccaaacgtgtggtgattctaactcgggtttgggcttttctttaaaaggtgacgcatccaaagaagacattgacactgctatgaaattaggagccggttaccccatgggcccatttgagcttctagattatgtcggactggatactacgaagttcatcgtggatgggtggcatgaaatggatgcagagaacccattacatcagcccagcccatccttaaataagctggtagcagagaacaagttcggcaagaagactggagaaggattttacaaatacaagtgatgtgcagcttctccggctctgagaagaacacctgagagcgctttccagccagtgccccgagtgcctgtgggaatgctctttggtcagacattccctcacacagtacagtttaataaatgtgcattttgattgtaatctatcgaagtgattattacaccagttacagcagtaatagattctccattaagaaataattcccttttttagtctgttcatttctgtgtattttctaaacagctttacacccttggtgccttggagcaaacatgttttttgaaccttgtcatttttgtgaagaattgcctagattccttctctcatcaacgggaaagtacttcctctgagagtgcgagtgcaccatgctcactgttgctgcgtgggagagtcacaagccactggcaagcaagtggtatagtctgtgaagcactgcagcgagcagcacctggatcttgcctttataagaacattttactacctgcagctttgagtcttgccctacattttgggcatgacataagatgtgtctttattcagctcgtcgtgaagatgctgctgctgaatgggtcagcatatctctgtttgcatggtttgcaggaggtcggttttcatggtcattcagttccacagatctgaatgattactgtctgtctgtgtcttttttccatgagaaatcactgttgcaaattgcctataaattgactctactaaaataacaatgtttcagtctgaaaatttgaattgaaaaaaatgtataatataaaattgtaatacactcaaatgattataaaagtaaaagttggtaatttaggcagaagcta

SEQ ID NO: 71092 - DNA, 996 bp, Artificial Sequence
  derived and/or modified sequence
atggcatttgtcactcggcaattcatgcgttctgtttcaagctcttccacagccagcgcatccgccaaaaaaatcatcgtcaagcacgtgacagtcatcgggggagggctaatgggggcaggaattgcgcaagtcgcagctgccactggccataccgtggtactagttgatcagacggaggacatcctcgctaaaagtaagaagggaattgaagagagcctgcgaaaggtggccaaaaaaaaattcgcggagaacttaaaagcgggtgatgagttcgtggaaaagacccttagcaccatcgcaacctcaactgatgccgcttccgtggtgcattctacagatctggtggttgaggctattgtggaaaatttaaaggtgaaaaacgagctatttaagcgacttgacaagtttgcggctgagcatacgatattcgcttctaatacatcctctctccaaatcaccagcatcgccaacgcgactactcgccaagacagatttgccggactgcactttttcaaccctgtgcctgtgatgaaactggtcgaggtgatcaagacacccatgaccagccaaaagacatttgagagcctggtggatttttccaaagctctaggcaagcacccagtgtcttgcaaggatacgcccggttttatcgtgaataggctcctcgtgccctatttaatggaagctatcagattgtacgagagagattttcaaacctgtggcgatagcaattctgggctgggctttagtctgaagggtgatgcttcaaaggaagacatagacaccgccatgaaattaggggctggttatcctatgggtcctttcgaattgctagactacgtcggcctggacactacaaagtttatagtggatgggtggcacgagatggatgctgagaaccctcttcaccagcctagtccaagccttaataagctggtggctgagaataagtttggtaagaaaaccggagaaggattttacaaatacaaatag

SEQ ID NO: 71093 - protein, 332 aa, Artificial Sequence
  derived and/or modified sequence
MLWLFQSLLFVFCFGPGNVVSQSSLTPLMVNGILGESVTLPLEFPAGEKVNFITWLFNETSLAFIVPHETKSPEIHVTNPKQGKRLNFTQSYSLQLSNLKMEDTGSYRAQISTKTSAKLSSYTLRILRQLRNIQVTNHSQLFQNMTCELHLTCSVEDADDNVSFRWEALGNTLSSQPNLTVSWDPRISSEQDYTCIAENAVSNLSFSVSAQKLCEDVKIQYTDTKMILFMVSGICIVFGFIILLLLVLRKRRDSLSLSTQRTQGPAESARNLEYVSVSPTNNTVYASVTHSNRETEIWTPRENDTITIYSTINHSKESKPTFSRATALDNVV

SEQ ID NO: 71094 - DNA, 999 bp, Artificial Sequence
  derived and/or modified sequence
atgctttggctgtttcaatccttgctgttcgttttttgtttcgggcccgggaacgtggtgagtcagtcctcactgacccccctgatggtcaatggaatccttggcgagtccgtgacacttccgctcgaattcccagcaggcgagaaggtgaactttatcacatggctgtttaatgaaacaagcttagcattcatagttccccacgagacaaagagcccggagattcacgtgactaacccaaaacaggggaaacggctgaatttcacccaatcctatagtctacaactgtcgaacctgaagatggaggatactggcagttacagggctcagatttccaccaaaacgagtgccaaactgtctagttacaccctgcgcattctcagacagctgcgtaatattcaagtgaccaaccattcccagttgtttcaaaatatgacttgcgaacttcatttgacttgtagcgtcgaggatgctgatgacaatgtttccttcaggtgggaggcactcggcaatacattgtctagccaacctaacctgactgtgtcttgggatccacggatctcgtcggagcaggactacacttgcattgcagaaaatgctgtttcaaatctgtcatttagcgtatccgcccagaaactgtgtgaagacgtcaagatccaatatactgatacaaagatgatcctgttcatggtctcaggcatctgtatagtcttcgggtttatcatccttctgctgctggtgctgcggaagcgaagagactcattgagcctgtcgacacagcgcactcagggaccggccgagtccgcgcgtaatcttgaatatgttagcgtttcccctaccaataacactgtgtacgcatcagtgacgcatagtaatcgggaaacggaaatctggaccccaagagagaacgatactattacaatctattcaacaatcaaccattccaaagagagtaagcccacattttcacgcgctacagcgcttgataacgttgtgtag

SEQ ID NO: 71095 - DNA, 999 bp, Artificial Sequence
  derived and/or modified sequence
atgctgtggctgttccagagcctgctgtttgtgttctgcttcggccctggaaatgtggtgtcccagagcagcctgacccccctgatggtgaatggcatcctgggggagagcgtgaccctgcccctggagttccctgctggggagaaggtgaacttcatcacctggctgttcaatgagaccagcctggccttcatcgtgccccatgagaccaagagccctgagatccacgtgaccaaccccaagcagggcaagaggctgaacttcacccagagctacagcctgcagctgagcaacctgaagatggaggacaccggcagctaccgggcccagatcagcaccaagaccagcgccaagctgagcagctacaccctgcgcatcctgcggcagctgaggaacatccaggtgaccaaccacagccagctgttccagaacatgacctgtgagctgcacctgacctgcagcgtggaggatgctgatgacaacgtgtccttccgctgggaggccctgggcaacaccctgagcagccagcccaacctgactgtgtcctgggacccccgcatcagcagcgagcaggactacacctgcatcgccgagaatgctgtgagcaacctgtccttctctgtgtctgcccagaagctgtgtgaagatgtgaagatccagtacacagacaccaagatgatcctcttcatggtgtctggcatctgcatcgtgtttggcttcatcatcctgctgctgctggtgctgaggaagagaagagacagcctgagcctgagcacccagaggacccagggccctgctgagagcgccaggaacctggagtatgtgtctgtgagccccaccaacaacacagtgtatgcctctgtgacccacagcaaccgggagacagagatctggaccccccgggagaatgacaccatcaccatctacagcaccatcaaccacagcaaggagagcaagcccaccttcagccgggccacagccctggacaacgtggtgtag

SEQ ID NO: 71096 - DNA, 999 bp, Artificial Sequence
  derived and/or modified sequence
atgctgtggctgttccagagcctgctgttcgtgttctgcttcggccctggcaacgtggtgtcacaatcaagcttgaccccactgatggtgaatggcatcctgggcgaatccgtgactctgcccctggagtttcccgctggcgagaaagttaactttatcacttggctttttaatgagacctctctggccttcatcgttccacacgagactaaaagcccagagattcacgttacaaatcccaagcaggggaagaggctcaactttacacagtcctattcattacaactgagcaatctgaaaatggaagacacaggatcctacagggcccagatcagcaccaagacgtctgccaagctttcatcctacaccctgagaatcctacggcagctgcgaaacatccaggttacgaatcatagtcagctcttccagaacatgacatgtgagctgcacttgacttgcagtgttgaggacgccgacgacaacgtttcattcagatgggaagcgctcggaaataccctgagcagtcagcctaatctcacagtgtcctgggatcctcggatttccagcgagcaggactacacttgcattgctgaaaacgccgtgtctaacctgtctttctctgttagcgcccaaaagctgtgcgaggacgtgaaaatccagtatacagacacgaaaatgatcctctttatggtgtccggcatttgcattgtgtttggctttataatactgctgctgctagtgctgcgaaaacgcagagactccctgagtctatctactcagagaacacaaggccctgccgaatctgccaggaacctcgagtatgtgtccgtgtcccccacgaataacaccgtgtacgccagcgtaacccattcaaacagggagaccgagatctggactccacgtgaaaacgacaccataaccatctatagcaccattaatcacagcaaggagtctaaaccaaccttctcacgggcaaccgcacttgataacgtcgtatag

SEQ ID NO: 71097 - DNA, 999 bp, Artificial Sequence
  derived and/or modified sequence
atgctgtggttgttccagtcactactctttgtgttttgtttcggtcccggaaatgtggtttcgcagtcatccctgaccccacttatggttaatggtatccttggagaaagcgtaaccctccctctggagttccccgcaggcgaaaaggtgaattttatcacatggctttttaatgaaacttcactcgccttcattgtaccccatgagacaaagagccccgaaattcacgtcacgaatccaaaacagggaaagcgcttgaatttcacccagtcatatagccttcagctgtccaatcttaaaatggaggacacaggctcgtatcgagcccagatttcaaccaagacaagcgcgaagttaagttcatacacacttaggatactcaggcagctgagaaacatccaggtcactaaccacagccagctcttccagaatatgacctgcgagctgcatctgacttgctcagtagaagacgcggatgacaatgtgagcttcaggtgggaggccttgggcaacaccttgagttcacagcccaatctgacagtcagttgggatccacgtattagttccgaacaagactacacctgtattgctgaaaacgctgtgtctaatctttcgttttccgtctccgctcaaaagctctgcgaagacgtgaagattcaatacaccgacaccaaaatgattttgttcatggtctctgggatctgtattgtgttcggctttatcatcctgttactcttagtcctccggaagcgcagagatagcctgtccttgagtacccagcggacccaaggtcctgctgaatcggcgaggaacctggaatacgtgtcagtctcccccaccaataatacggtgtacgcttctgtgactcactccaacagagagacagaaatttggactcccagagaaaatgacacaatcactatttactccactataaaccattcaaaggagtccaaaccgactttttcccgtgctactgcactggacaacgtggtctag

SEQ ID NO: 71098 - DNA, 2712 bp, Artificial Sequence
  derived and/or modified sequence
cagaagggcaaaaacattgactgcctcaaggtctcaagcaccagtcttcaccgcggaaagcatgttgtggctgttccaatcgctcctgtttgtcttctgctttggcccagggaatgtagtttcacaaagcagcttaaccccattgatggtgaacgggattctgggggagtcagtaactcttcccctggagtttcctgcaggagagaaggtcaacttcatcacttggcttttcaatgaaacatctcttgccttcatagtaccccatgaaaccaaaagtccagaaatccacgtgactaatccgaaacagggaaagcgactgaacttcacccagtcctactccctgcaactcagcaacctgaagatggaagacacaggctcttacagagcccagatatccacaaagacctctgcaaagctgtccagttacactctgaggatattaagacaactgaggaacatacaagttaccaatcacagtcagctatttcagaatatgacctgtgagctccatctgacttgctctgtggaggatgcagatgacaatgtctcattcagatgggaggccttgggaaacacactttcaagtcagccaaacctcactgtctcctgggaccccaggatttccagtgaacaggactacacctgcatagcagagaatgctgtcagtaatttatccttctctgtctctgcccagaagctttgcgaagatgttaaaattcaatatacagataccaaaatgattctgtttatggtttctgggatatgcatagtcttcggtttcatcatactgctgttacttgttttgaggaaaagaagagattccctatctttgtctactcagcgaacacagggccccgcagagtccgcaaggaacctagagtatgtttcagtgtctccaacgaacaacactgtgtatgcttcagtcactcattcaaacagggaaacagaaatctggacacctagagaaaatgatactatcacaatttactccacaattaatcattccaaagagagtaaacccactttttccagggcaactgcccttgacaatgtcgtgtaagttgctgaaaggcctcagaggaattcgggaatgacacgtcttctgatcccatgagacagaacaaagaacaggaagcttggttcctgttgttcctggcaacagaatttgaatatctaggataggatgatcacctccagtccttcggacttaaacctgcctacctgagtcaaacacctaaggataacatcatttccagcatgtggttcaaataatattttccaatccacttcaggccaaaacatgctaaagataacacaccagcacattgactctctctttgataactaagcaaatggaattatggttgacagagagtttatgatccagaagacaaccacttctctccttttagaaagcagcaggattgacttattgagaaataatgcagtgtgttggttacatgtgtagtctctggagttggatgggcccatcctgatacaagttgagcatcccttgtctgaaatgcttgggattagaaatgtttcagatttcaattttttttcagattttggaatatttgcattatatttagcggttgagtatccaaatccaaaaatccaaaattcaaaatgctccaataagcatttcccttgagtttcattgatgtcgatgcagtgctcaaaatctcagattttggagcattttggatattggatttttggatttgggatgctcaacttgtacaatgtttattagacacatctcctgggacatactgcctaaccttttggagccttagtctcccagactgaaaaaggaagaggatggtattacatcagctccattgtttgagccaagaatctaagtcatccctgactccagtgtctttgtcaccaggccctttggactctacctcagaaatatttcttggaccttccacttctcctccaactccttgaccaccatcctgtatccaaccatcaccacctctaacctgaatcctaccttaagatcagaacagttgtcctcacttttgttcttgtccctctccaacccactctccacaagatggccagagtaatgtttttaatataaattggatccttcagtttcctgcttaaaaccctgcaggtttcccaatgcactcagaaagaaatccagtttccatggccctggatggtctggcccacctccagcctcagctagcattacccttctgacactctctatgtagcctccctgatcttctttcagctcctctattaaaggaaaagttctttatgttaattatttacatcttcctgcaggcccttcctctgcctgctggggtcctcctattctttaggtttaattttaaatatgtcacctcctaagagaaaccttcccagaccactctttctaaaatgaatcttctaggctgggcatggtggctcacacctgtaatccctgtactttgggaggccaaggggggagatcacttgaggtcaggagttcaagaccagcctggccaacttggtgaaaccccgtctttactaaaaatacaaaaaaattagccaggcgtggtggtgcacccctaaaatcccagctacttgagagactgaggcaggagaatcgcttgaacccaggaggtggaggttccagtgagccaaaatcatgccaatgtattccagtctgggtgacagagtgagactctgtctcaaaaaataaataaa

SEQ ID NO: 71099 - DNA, 999 bp, Artificial Sequence
  derived and/or modified sequence
atgctgtggctgttccagagcctgctgttcgtgttctgcttcggccccggcaacgtggtgagccagagcagcctgacccccctgatggtgaacggcatcctgggcgagagcgtgaccctgcccctggagttccccgccggcgagaaggtgaacttcatcacctggctgttcaacgagaccagcctggccttcatcgtgccccacgagaccaagagccccgagatccacgtgaccaaccccaagcagggcaagagactgaacttcacccagagctacagcctgcagctgagcaacctgaagatggaggacaccggcagctacagagcccagatcagcaccaagaccagcgccaagctgagcagctacaccctgagaatcctgagacagctgagaaacatccaggtgaccaaccacagccagctgttccagaacatgacctgcgagctgcacctgacctgcagcgtggaggacgccgacgacaacgtgagcttcagatgggaggccctgggcaacaccctgagcagccagcccaacctgaccgtgagctgggaccccagaatcagcagcgagcaggactacacctgcatcgccgagaacgccgtgagcaacctgagcttcagcgtgagcgcccagaagctgtgcgaggacgtgaagatccagtacaccgacaccaagatgatcctgttcatggtgagcggcatctgcatcgtgttcggcttcatcatcctgctgctgctggtgctgagaaagagaagagacagcctgagcctgagcacccagagaacccagggccccgccgagagcgccagaaacctggagtacgtgagcgtgagccccaccaacaacaccgtgtacgccagcgtgacccacagcaacagagagaccgagatctggacccccagagagaacgacaccatcaccatctacagcaccatcaaccacagcaaggagagcaagcccaccttcagcagagccaccgccctggacaacgtggtgtag

SEQ ID NO: 71100 - protein, 221 aa, Artificial Sequence
  derived and/or modified sequence
MLWLFQSLLFVFCFGPGQLRNIQVTNHSQLFQNMTCELHLTCSVEDADDNVSFRWEALGNTLSSQPNLTVSWDPRISSEQDYTCIAENAVSNLSFSVSAQKLCEDVKIQYTDTKMILFMVSGICIVFGFIILLLLVLRKRRDSLSLSTQRTQGPAESARNLEYVSVSPTNNTVYASVTHSNRETEIWTPRENDTITIYSTINHSKESKPTFSRATALDNVV

SEQ ID NO: 71101 - DNA, 666 bp, Artificial Sequence
  derived and/or modified sequence
atgctctggctgtttcagtcccttctgtttgtgttttgtttcggaccaggccagcttcgcaatatacaggtcaccaaccactcacagctgtttcagaacatgacatgcgagctgcatttgacatgcagcgttgaggatgccgacgacaacgtctcgttccgttgggaggccctgggtaacacgctgagctctcagcccaacctaactgtttcctgggatcctaggatatcctccgagcaggactacacctgcatcgccgaaaacgctgtctctaatctctctttcagcgtgtctgcccagaagctctgtgaggacgtgaagatccagtacacagacaccaagatgatcctttttatggtgagtgggatctgcatagtcttcgggttcattatcctgctcctgctcgtgctgcggaagagacgcgattcactatcactgagtacccagcgtacgcaggggcccgcagagtccgccagaaacctcgaatatgtcagcgtctcaccgacaaacaacacagtatatgccagcgtgacgcatagcaacagagagacagagatctggacgccccgagagaacgataccattactatttacagcaccatcaatcacagcaaagagtcgaagcccacgttctctagagccacagccctggacaacgtggtctag

SEQ ID NO: 71102 - DNA, 666 bp, Artificial Sequence
  derived and/or modified sequence
atgctgtggctgttccagagcctgctgtttgtgttctgcttcggccctggccagctgaggaacatccaggtgaccaaccacagccagctgttccagaacatgacctgtgagctgcacctgacctgcagcgtggaggatgctgatgacaacgtgtccttccgctgggaggccctgggcaacaccctgagcagccagcccaacctgactgtgtcctgggacccccgcatcagcagcgagcaggactacacctgcatcgcagaaaatgctgtgagcaacctgtccttctctgtgtctgcccagaagctgtgtgaagatgtgaagatccagtacacagacaccaagatgatcctcttcatggtgtctggcatctgcatcgtgtttggcttcatcatcctgctgctgctggtgctgaggaagaggcgggacagcctgagcctgagcacccagaggacccagggccctgctgagagcgccaggaacctggagtatgtgtctgtgagccccaccaacaacacagtgtatgcctctgtgacccacagcaaccgggagacagagatctggaccccaagagaaaatgacaccatcaccatctacagcaccatcaaccacagcaaggagagcaagcccaccttcagccgggccacagccctggacaacgtggtgtag

SEQ ID NO: 71103 - DNA, 666 bp, Artificial Sequence
  derived and/or modified sequence
atgctgtggctgttccagagcctgctgttcgtgttctgcttcggcccgggccaactaagaaacatacaggttacaaaccactcccagctgtttcaaaacatgacatgtgagctgcacctgacatgcagtgtggaggacgccgatgacaatgtatcatttaggtgggaggctttagggaatacattaagctcacagccaaatcttaccgtctcctgggatcctcgcatttccagcgagcaggactacacgtgcattgccgagaatgctgtgtcaaacctttcattctcggtatccgcccagaaactctgtgaagacgtgaagattcagtacacggacaccaaaatgattttattcatggtcagcggcatctgtattgtgtttgggtttatcattcttctgctgctggttcttcgcaaaaggcgagattcactcagtctgtccacacagcggactcagggcccggcggagagtgcccgtaacctggaatatgtctccgtttcgcctaccaataataccgtttatgctagtgtgacccactcaaatagagaaaccgaaatatggactcctagagaaaacgacactattacgatttactctaccatcaaccattctaaagaatcgaaaccaactttttctcgtgctactgcgttagataatgtcgtgtag

SEQ ID NO: 71104 - DNA, 666 bp, Artificial Sequence
  derived and/or modified sequence
atgttgtggctctttcaatcgctcctgttcgtattttgctttggacctggtcagctccgcaacatccaggtcacgaatcactcacaactctttcagaacatgacatgcgagctgcacctaacatgtagtgtggaggatgcggacgacaacgtttcctttcgatgggaggccttaggaaacaccctgtccagtcagcctaacctgacggtcagctgggaccccaggatcagtagcgagcaggattacacgtgcatcgcggagaatgcagtttcgaacctatcattctccgtcagcgcccagaaactctgcgaagatgtgaagatccagtatacagacacaaagatgattttatttatggtaagcgggatctgcatcgtgttcggtttcatcatcctcctgcttcttgtactacgaaagaggcgagacagtctctcgttgtctacccagcgtacacaggggccagccgaaagcgcgcgtaatctggagtacgtatctgtgagtccaacaaacaacacagtgtatgcaagtgtaacccatagcaaccgggagacagagatatggaccccaagggaaaatgatactataaccatttactccacaatcaatcattcaaaggagtcgaagccaactttctcccgcgcaactgctctcgacaacgtggtgtag

SEQ ID NO: 71105 - DNA, 730 bp, Artificial Sequence
  derived and/or modified sequence
aaacattgactgcctcaaggtctcaagcaccagtcttcaccgcggaaagcatgttgtggctgttccaatcgctcctgtttgtcttctgctttggcccaggacaactgaggaacatacaagttaccaatcacagtcagctatttcagaatatgacctgtgagctccatctgacttgctctgtggaggatgcagatgacaatgtctcattcagatgggaggccttgggaaacacactttcaagtcagccaaacctcactgtctcctgggaccccaggatttccagtgaacaggactacacctgcatagcagagaatgctgtcagtaatttatccttctctgtctctgcccagaagctttgcgaagatgttaaaattcaatatacagataccaaaatgattctgtttatggtttctgggatatgcatagtcttcggtttcatcatactgctgttacttgttttgaggaaaagaagagattccctatctttgtctactcagcgaacacagggccccgcagagtccgcaaggaacctagagtatgtttcagtgtctccaacgaacaacactgtgtatgcttcagtcactcattcaaacagggaaacagaaatctggacacctagagaaaatgatactatcacaatttactccacaattaatcattccaaagagagtaaacccactttttccagggcaactgcccttgacaatgtcgtgtaagttgctgaaaggcc

SEQ ID NO: 71106 - DNA, 666 bp, Artificial Sequence
  derived and/or modified sequence
atgctgtggctgttccagagcctgctgttcgtgttctgcttcggccccggccagctgagaaacatccaggtgaccaaccacagccagctgttccagaacatgacctgcgagctgcacctgacctgcagcgtggaggacgccgacgacaacgtgagcttcagatgggaggccctgggcaacaccctgagcagccagcccaacctgaccgtgagctgggaccccagaatcagcagcgagcaggactacacctgcatcgccgagaacgccgtgagcaacctgagcttcagcgtgagcgcccagaagctgtgcgaggacgtgaagatccagtacaccgacaccaagatgatcctgttcatggtgagcggcatctgcatcgtgttcggcttcatcatcctgctgctgctggtgctgagaaagagaagagacagcctgagcctgagcacccagagaacccagggccccgccgagagcgccagaaacctggagtacgtgagcgtgagccccaccaacaacaccgtgtacgccagcgtgacccacagcaacagagagaccgagatctggacccccagagagaacgacaccatcaccatctacagcaccatcaaccacagcaaggagagcaagcccaccttcagcagagccaccgccctggacaacgtggtgtag

SEQ ID NO: 71107 - protein, 657 aa, Artificial Sequence
  derived and/or modified sequence
MEMETTEPEPDCVVQPPSPPDDFSCQMRLSEKITPLKTCFKKKDQKRLGTGTLRSLRPILNTLLESGSLDGVFRSRNQSTDENSLHEPMMKKAMEINSSCPPAENNMSVLIPDRTNVGDQIPEAHPSTEAPERVVPIQDHSFPSETLSGTVADSTPAHFQTDLLHPVSSDVPTSPDCLDKVIDYVPGIFQENSFTIQYILDTSDKLSTELFQDKSEEASLDLVFELVNQLQYHTHQENGIEICMDFLQGTCIYGRDCLKHHTVLPYHWQIKRTTTQKWQSVFNDSQEHLERFYCNPENDRMRMKYGGQEFWADLNAMNVYETTEFDQLRRLSTPPSSNVNSIYHTVWKFFCRDHFGWREYPESVIRLIEEANSRGLKEVRFMMWNNHYILHNSFFRREIKRRPLFRSCFILLPYLQTLGGVPTQAPPPLEATSSSQIICPDGVTSANFYPETWVYMHPSQDFIQVPVSAEDKSYRIIYNLFHKTVPEFKYRILQILRVQNQFLWEKYKRKKEYMNRKMFGRDRIINERHLFHGTSQDVVDGICKHNFDPRVCGKHATMFGQGSYFAKKASYSHNFSKKSSKGVHFMFLAKVLTGRYTMGSHGMRRPPPVNPGSVTSDLYDSCVDNFFEPQIFVIFNDDQSYPYFVIQYEEVSNTVSI

SEQ ID NO: 71108 - protein, 506 aa, Artificial Sequence
  derived and/or modified sequence
MEMETTEPEPDCVVQPPSPPDDFSCQMRLSEKITPLKTCFKKKDQKRLGTGTLRSLRPILNTLLESGSLDGVFRSRNQSTDENSLHEPMMKKAMEINSSCPPAENNMSVLIPDRTNVGDQIPEAHPSTEAPERVVPIQDHSFPSETLSGTVADSTPAHFQTDLLHPVSSDVPTSPDCLDKVIDYVPGIFQENSFTIQYILDTSDKLSTELFQDKSEEASLDLVFELVNQLQYHTHQENGIEICMDFLQGTCIYGRDCLKHHTVLPYHWQIKRTTTQKWQSVFNDSQEHLERFYCNPENDRMRMKYGGQEFWADLNAMNVYETTEFDQLRRLSTPPSSNVNSIYHTVWKFFCRDHFGWREYPESVIRLIEEANSRGLKEVRFMMWNNHYILHNSFFRREIKRRPLFRSCFILLPYLQTLGGVPTQAPPPLEATSSSQIICPDGVTSANFYPETWVYMHPSQDFIQVPVSAEDKSYRIIYNLFHKTVPEFKYRILQILRVQNQFLWEK

SEQ ID NO: 71109 - protein, 654 aa, Artificial Sequence
  derived and/or modified sequence
MEMETTEPEPDCVVQPPSPPDDFSCQMRLSEKITPLKTCFKKKDQKRLGTGTLRSLRPILNTLLESGSLDGVFRSRNQSTDENSLHEPMMKKAMEINSSCPPAENNMSVLIPDRTNVGDQIPEAHPSTEAPERVVPIQDHSFPSETLSGTVADSTPAHFQTDLLHPVSSDVPTSPDCLDKVIDYVPGIFQENSFTIQYILDTSDKLSTELFQDKSEEASLDLVFELVNQLQYHTHQENGIEICMDFLQGTCIYGRDCLKHHTVLPYHWQIKRTTTQKWQSVFNDSQEHLERFYCNPENDRMRMKYGGQEFWADLNAMNVYETTEFDQLRRLSTPPSSNVNSIYHTVWKFFCRDHFGWREYPESVIRLIEEANSRGLKEVRFMMWNNHYILHNSFFRREIKRRPLFRSCFILLPYLQTLGGVPTQAPPPLEATSSSQIICPDGVTSANFYPETWVYMHPSQDFIQVPVSAEDKSYRIIYNLFHKTVPEFKYRILQILRVQNQFLWEKYKRKKEYMNRKMFGRDRIINERHLFHGTSQDVVDGICKHNFDPRVCGKHATMFGQGSYFAKKASYSHNFSKKSSKGVHFMFLAKVLTGRYTMGSHGMRRPPPVNPGSVTSDLYDSCVDNFFEPQIFVIFNDDQSYPYFVIQYEEVSNT

SEQ ID NO: 71110 - DNA, 1974 bp, Artificial Sequence
  derived and/or modified sequence
atggagatggagaccaccgagcccgagcccgactgcgtggtgcagccccccagcccccccgacgacttcagctgccagatgagactgagcgagaagatcacccccctgaagacctgcttcaagaagaaggaccagaagagactgggcaccggcaccctgagaagcctgagacccatcctgaacaccctgctggagagcggcagcctggacggcgtgttcagaagcagaaaccagagcaccgacgagaacagcctgcacgagcccatgatgaagaaggccatggagatcaacagcagctgcccccccgccgagaacaacatgagcgtgctgatccccgacagaaccaacgtgggcgaccagatccccgaggcccaccccagcaccgaggcccccgagagagtggtgcccatccaggaccacagcttccccagcgagaccctgagcggcaccgtggccgacagcacccccgcccacttccagaccgacctgctgcaccccgtgagcagcgacgtgcccaccagccccgactgcctggacaaggtgatcgactacgtgcccggcatcttccaggagaacagcttcaccatccagtacatcctggacaccagcgacaagctgagcaccgagctgttccaggacaagagcgaggaggccagcctggacctggtgttcgagctggtgaaccagctgcagtaccacacccaccaggagaacggcatcgagatctgcatggacttcctgcagggcacctgcatctacggcagagactgcctgaagcaccacaccgtgctgccctaccactggcagatcaagagaaccaccacccagaagtggcagagcgtgttcaacgacagccaggagcacctggagagattctactgcaaccccgagaacgacagaatgagaatgaagtacggcggccaggagttctgggccgacctgaacgccatgaacgtgtacgagaccaccgagttcgaccagctgagaagactgagcaccccccccagcagcaacgtgaacagcatctaccacaccgtgtggaagttcttctgcagagaccacttcggctggagagagtaccccgagagcgtgatcagactgatcgaggaggccaacagcagaggcctgaaggaggtgagattcatgatgtggaacaaccactacatcctgcacaacagcttcttcagaagagagatcaagagaagacccctgttcagaagctgcttcatcctgctgccctacctgcagaccctgggcggcgtgcccacccaggcccccccccccctggaggccaccagcagcagccagatcatctgccccgacggcgtgaccagcgccaacttctaccccgagacctgggtgtacatgcaccccagccaggacttcatccaggtgcccgtgagcgccgaggacaagagctacagaatcatctacaacctgttccacaagaccgtgcccgagttcaagtacagaatcctgcagatcctgagagtgcagaaccagttcctgtgggagaagtacaagagaaagaaggagtacatgaacagaaagatgttcggcagagacagaatcatcaacgagagacacctgttccacggcaccagccaggacgtggtggacggcatctgcaagcacaacttcgaccccagagtgtgcggcaagcacgccaccatgttcggccagggcagctacttcgccaagaaggccagctacagccacaacttcagcaagaagagcagcaagggcgtgcacttcatgttcctggccaaggtgctgaccggcagatacaccatgggcagccacggcatgagaagacccccccccgtgaaccccggcagcgtgaccagcgacctgtacgacagctgcgtggacaacttcttcgagccccagatcttcgtgatcttcaacgacgaccagagctacccctacttcgtgatccagtacgaggaggtgagcaacaccgtgagcatctag

SEQ ID NO: 71111 - DNA, 1521 bp, Artificial Sequence
  derived and/or modified sequence
atggagatggagaccaccgagcccgagcccgactgcgtggtgcagccccccagcccccccgacgacttcagctgccagatgagactgagcgagaagatcacccccctgaagacctgcttcaagaagaaggaccagaagagactgggcaccggcaccctgagaagcctgagacccatcctgaacaccctgctggagagcggcagcctggacggcgtgttcagaagcagaaaccagagcaccgacgagaacagcctgcacgagcccatgatgaagaaggccatggagatcaacagcagctgcccccccgccgagaacaacatgagcgtgctgatccccgacagaaccaacgtgggcgaccagatccccgaggcccaccccagcaccgaggcccccgagagagtggtgcccatccaggaccacagcttccccagcgagaccctgagcggcaccgtggccgacagcacccccgcccacttccagaccgacctgctgcaccccgtgagcagcgacgtgcccaccagccccgactgcctggacaaggtgatcgactacgtgcccggcatcttccaggagaacagcttcaccatccagtacatcctggacaccagcgacaagctgagcaccgagctgttccaggacaagagcgaggaggccagcctggacctggtgttcgagctggtgaaccagctgcagtaccacacccaccaggagaacggcatcgagatctgcatggacttcctgcagggcacctgcatctacggcagagactgcctgaagcaccacaccgtgctgccctaccactggcagatcaagagaaccaccacccagaagtggcagagcgtgttcaacgacagccaggagcacctggagagattctactgcaaccccgagaacgacagaatgagaatgaagtacggcggccaggagttctgggccgacctgaacgccatgaacgtgtacgagaccaccgagttcgaccagctgagaagactgagcaccccccccagcagcaacgtgaacagcatctaccacaccgtgtggaagttcttctgcagagaccacttcggctggagagagtaccccgagagcgtgatcagactgatcgaggaggccaacagcagaggcctgaaggaggtgagattcatgatgtggaacaaccactacatcctgcacaacagcttcttcagaagagagatcaagagaagacccctgttcagaagctgcttcatcctgctgccctacctgcagaccctgggcggcgtgcccacccaggcccccccccccctggaggccaccagcagcagccagatcatctgccccgacggcgtgaccagcgccaacttctaccccgagacctgggtgtacatgcaccccagccaggacttcatccaggtgcccgtgagcgccgaggacaagagctacagaatcatctacaacctgttccacaagaccgtgcccgagttcaagtacagaatcctgcagatcctgagagtgcagaaccagttcctgtgggagaagtag

SEQ ID NO: 71112 - DNA, 1965 bp, Artificial Sequence
  derived and/or modified sequence
atggagatggagaccaccgagcccgagcccgactgcgtggtgcagccccccagcccccccgacgacttcagctgccagatgagactgagcgagaagatcacccccctgaagacctgcttcaagaagaaggaccagaagagactgggcaccggcaccctgagaagcctgagacccatcctgaacaccctgctggagagcggcagcctggacggcgtgttcagaagcagaaaccagagcaccgacgagaacagcctgcacgagcccatgatgaagaaggccatggagatcaacagcagctgcccccccgccgagaacaacatgagcgtgctgatccccgacagaaccaacgtgggcgaccagatccccgaggcccaccccagcaccgaggcccccgagagagtggtgcccatccaggaccacagcttccccagcgagaccctgagcggcaccgtggccgacagcacccccgcccacttccagaccgacctgctgcaccccgtgagcagcgacgtgcccaccagccccgactgcctggacaaggtgatcgactacgtgcccggcatcttccaggagaacagcttcaccatccagtacatcctggacaccagcgacaagctgagcaccgagctgttccaggacaagagcgaggaggccagcctggacctggtgttcgagctggtgaaccagctgcagtaccacacccaccaggagaacggcatcgagatctgcatggacttcctgcagggcacctgcatctacggcagagactgcctgaagcaccacaccgtgctgccctaccactggcagatcaagagaaccaccacccagaagtggcagagcgtgttcaacgacagccaggagcacctggagagattctactgcaaccccgagaacgacagaatgagaatgaagtacggcggccaggagttctgggccgacctgaacgccatgaacgtgtacgagaccaccgagttcgaccagctgagaagactgagcaccccccccagcagcaacgtgaacagcatctaccacaccgtgtggaagttcttctgcagagaccacttcggctggagagagtaccccgagagcgtgatcagactgatcgaggaggccaacagcagaggcctgaaggaggtgagattcatgatgtggaacaaccactacatcctgcacaacagcttcttcagaagagagatcaagagaagacccctgttcagaagctgcttcatcctgctgccctacctgcagaccctgggcggcgtgcccacccaggcccccccccccctggaggccaccagcagcagccagatcatctgccccgacggcgtgaccagcgccaacttctaccccgagacctgggtgtacatgcaccccagccaggacttcatccaggtgcccgtgagcgccgaggacaagagctacagaatcatctacaacctgttccacaagaccgtgcccgagttcaagtacagaatcctgcagatcctgagagtgcagaaccagttcctgtgggagaagtacaagagaaagaaggagtacatgaacagaaagatgttcggcagagacagaatcatcaacgagagacacctgttccacggcaccagccaggacgtggtggacggcatctgcaagcacaacttcgaccccagagtgtgcggcaagcacgccaccatgttcggccagggcagctacttcgccaagaaggccagctacagccacaacttcagcaagaagagcagcaagggcgtgcacttcatgttcctggccaaggtgctgaccggcagatacaccatgggcagccacggcatgagaagacccccccccgtgaaccccggcagcgtgaccagcgacctgtacgacagctgcgtggacaacttcttcgagccccagatcttcgtgatcttcaacgacgaccagagctacccctacttcgtgatccagtacgaggaggtgagcaacacctag

SEQ ID NO: 71113 - DNA, 1974 bp, Artificial Sequence
  derived and/or modified sequence
atggagatggagacaacggaacccgaaccagattgtgtggttcagccgcctagccctcccgacgacttcagttgtcagatgaggctctctgagaagatcacaccccttaaaacctgcttcaagaagaaggatcagaagcgattggggaccggaacccttagaagtttgcgtcctatcctgaacactctcctcgagtcgggatccttagacggggtattccgaagtcgcaaccagtcaaccgacgaaaacagcctgcacgagccgatgatgaagaaggcaatggaaatcaatagctcctgcccgcctgccgagaataacatgagtgtattgattccggatagaacgaatgtgggggaccagatacctgaagcgcatccctccaccgaagcaccagaaagggttgtgccaatccaagatcatagtttcccctccgaaactctgagcgggacagtggccgatagtaccccggcccattttcagaccgatcttctgcatcccgtttcttcagacgtccctacgagtcctgactgcctggataaagtgattgattacgtgcccggaatcttccaggagaatagcttcaccatccagtacatcttggatacgtccgataaactgagcaccgagctcttccaggacaagtctgaagaggccagtctggatctagtgtttgagctagtgaaccagctgcaataccacacccatcaggagaacgggattgaaatctgtatggattttctccaggggacatgcatttacggcagagactgcctcaaacaccatactgtgcttccctatcactggcagattaagagaacaaccactcaaaagtggcagtcggtgttcaacgactcccaggaacatctggaacggttctattgcaatccggagaatgataggatgcgcatgaagtatggggggcaggagttttgggctgacctcaacgcaatgaatgtgtacgagaccacagagttcgatcagctgcgtaggctctcgactcctccatctagcaatgttaattcaatttatcacaccgtctggaaatttttctgccgcgatcactttggctggcgcgagtaccctgaaagcgtaatcaggttaatcgaggaggcgaatagcagaggcctcaaggaggtcagattcatgatgtggaacaatcactacatcttacacaatagtttttttcgtagggaaattaagagaagaccgctgttccgttcctgctttatcctgctcccctacctgcagaccctcggtggtgtgccaacccaggcacccccaccactggaggcaacatcttccagccagataatctgccctgacggtgtcacatctgccaacttctatcctgagacgtgggtgtacatgcatcctagtcaggattttattcaagtgcccgtgagtgctgaagataaaagctataggatcatctataatctgtttcacaagaccgtgcccgaattcaagtaccgaatcctgcagatcctacgcgtgcagaatcagtttctatgggagaagtataagagaaagaaggagtacatgaatagaaagatgttcggccgcgaccggatcattaatgagaggcacttatttcacggcacctcccaggatgtggtggacggaatttgcaagcataactttgatccccgggtttgtgggaagcacgccaccatgtttgggcagggaagctactttgcaaaaaaagcatcctacagtcataacttttcaaaaaagtccagcaagggggtgcattttatgtttctggccaaagtgttaaccggaagatacaccatgggatcacacggcatgcgacgccccccccctgtgaatccaggatcagttactagcgatctgtacgactcttgcgtcgataactttttcgagccgcagatttttgtcatttttaatgatgatcaaagctacccatactttgtgatccagtatgaggaagtttctaatactgtatcaatttag

SEQ ID NO: 71114 - DNA, 1974 bp, Artificial Sequence
  derived and/or modified sequence
atggagatggagactaccgagcccgaaccagactgtgtggtgcagccacccagtccgccagatgacttctcctgtcaaatgagactcagtgagaagatcacaccactgaagacatgcttcaagaagaaggaccagaaaagacttgggactggtaccctgaggtccctgagaccgatattgaatacactgctggagagcgggtccttggacggcgttttcaggtcaaggaaccagtcaacagacgagaacagcctccacgaacctatgatgaagaaggctatggagattaactctagttgtcccccagccgaaaacaatatgtccgtcctgattcctgaccggactaacgtcggggaccaaatcccagaggcccaccccagtaccgaagctccggaacgagttgttcccattcaggatcattcattcccgagtgagaccctcagcgggacagtcgcagattccacccccgcccactttcagacggatctgctgcacccagtgtccagtgatgtcccaacttcgcctgattgcctagacaaggtgatagattatgtcccgggcatttttcaggagaacagctttacaatccaatatatcttagacacaagcgataagcttagcacggagctcttccaggacaaaagcgaggaggcctctttagatttggtcttcgagctagtcaatcagctgcagtatcacacccatcaggaaaatggaatagaaatttgcatggattttctccaggggacttgcatctacggacgcgactgcctcaagcaccacaccgtgttaccctatcactggcagatcaagcgaaccaccactcagaaatggcagtcagtgtttaatgatagccaagaacaccttgaacgattctactgcaaccctgagaacgaccgtatgagaatgaagtatggtggccaggaattctgggccgatcttaacgccatgaacgtgtatgaaaccaccgaattcgatcagcttcggcgcctgtcaacaccaccctcttctaacgtcaactcgatctaccataccgtgtggaaatttttctgtcgagatcatttcggatggcgcgaataccccgagtctgtgatacgcctgatcgaagaggctaactcacgcggtctcaaggaagtcaggtttatgatgtggaataatcactatatattgcacaatagctttttcagaagggagatcaagaggaggcccctgtttaggagttgcttcatcctgttaccatatcttcaaacactcggcggtgtccccactcaagctccaccacctctcgaggccacttcatcctcacaaatcatatgcccagacggcgtcacgtccgccaatttctacccggagacatgggtgtatatgcatccctctcaagatttcattcaagtgccagttagcgccgaagacaagagctacaggatcatctacaatctatttcacaagacggtgcctgagtttaagtacagaatattgcagattcttcgggtgcaaaaccagttcctgtgggaaaaatataagcgtaagaaagagtacatgaaccgcaagatgttcgggcgggaccgaatcattaacgagaggcatttatttcatggcacgtcgcaggatgtcgtggacggcatctgtaaacataacttcgatcctcgagtctgcggtaaacacgctacaatgttcggacagggaagttacttcgctaagaaagccagctactcccacaatttcagcaaaaaatccagtaagggcgtgcatttcatgttcctggcaaaggtgttaacagggagatacactatggggagccatgggatgaggagacctccgcctgtcaatcctgggtctgtcacgtccgacctttatgactcctgtgtcgacaatttcttcgagccccaaatattcgtaatcttcaacgatgaccaatcatacccgtattttgttattcagtatgaggaggtatccaacaccgttagcatctag

SEQ ID NO: 71115 - DNA, 1521 bp, Artificial Sequence
  derived and/or modified sequence
atggagatggaaacgaccgagccggagcctgactgtgtggttcagccgcccagcccaccagacgacttctcttgccaaatgagactgtccgagaagatcacgccgctgaaaacctgttttaaaaagaaggaccagaagcggttaggtaccgggaccctgcggagtctaaggcccatcctgaatactctgttggaatctgggagcctggatggggtgtttcgaagcaggaaccagtccactgacgagaacagcctgcacgagcctatgatgaagaaggctatggaaatcaacagctcatgcccacccgcagaaaataacatgagtgtgttgattccagaccgcacgaacgttggggatcagatacccgaggctcatcccagcacagaggccccggagcgcgttgtccctattcaggaccattctttcccttcggaaactctgtccgggacagtggccgactctacacctgctcatttccagaccgacttacttcatcctgtcagcagcgatgttcccacaagtccagactgcctggacaaagtgatcgattacgtacccggtatctttcaggagaattcatttaccatccagtacatcctcgacacctccgacaagctgtctactgagcttttccaggataagagcgaggaggcttctctggatttagtctttgagctcgtgaatcagctgcagtatcatacccatcaagagaatggcatcgaaatatgcatggactttctgcagggcacttgcatctacgggagggattgtttaaagcatcacacggtgttaccctaccattggcagattaagcggactaccacgcagaaatggcaatctgtcttcaacgattcacaggagcacctagagaggttctactgcaatcctgaaaatgatcgcatgcggatgaagtatggcgggcaagaattctgggccgatttgaacgccatgaatgtgtacgaaaccaccgagttcgatcaactgaggcgcctgagtacacctccgagtagtaatgtcaattccatctatcacaccgtttggaagttcttctgcagagatcacttcggttggcgtgagtaccctgaatcagtgataagactgatagaagaggccaatagtagaggtttaaaagaagtaagatttatgatgtggaacaaccattatatcttgcacaattcctttttcaggcgagaaattaagagacggcccctgtttagatcatgctttattctcctcccttacctccagaccttgggaggcgtccctactcaggcccctccccccttagaggccacttcttcttcacaaatcatttgccctgacggagtcacttctgcaaacttttatcccgaaacctgggtgtatatgcacccatctcaggatttcattcaagttccagtgagcgctgaagacaaatcatataggataatttacaacctgtttcataaaactgtgccagagtttaaatacagaattctgcagatactacgagtccagaaccaatttctgtgggagaaatag

SEQ ID NO: 71116 - DNA, 1965 bp, Artificial Sequence
  derived and/or modified sequence
atggagatggagacaacagagccagaacctgattgcgtggtgcagcccccttcgccacctgatgacttctcttgccagatgcgtctgtccgagaagataaccccactcaagacctgcttcaagaaaaaagaccaaaagagactgggcaccggaaccctgagaagtctgcggccaatactaaatactctgttggagtctggatcactcgacggagtgtttcgaagtcgcaaccagagcaccgacgagaacagtctacatgagcctatgatgaaaaaggccatggaaattaattcaagttgcccccctgctgaaaacaatatgtctgtcctcattcccgacagaacgaatgttggtgaccagattccagaggcccacccctctacggaagcccctgagcgggttgtgccgattcaggatcattcatttccctccgaaaccctcagtggcaccgtggccgacagcacacctgcacattttcagacggacctgttgcatcctgtgagcagcgacgtgcctacatctcctgactgcctggataaggtgattgattacgtccctggaatttttcaagagaatagctttaccatccagtacatcctggataccagcgataagctgtccactgagctgtttcaggacaagtccgaggaagcttcgctggatctggtgtttgagttagtgaaccaattgcagtaccacactcatcaggagaatggtatcgaaatttgcatggatttccttcagggaacctgtatttatgggagggactgccttaagcatcacacagttttgccctatcattggcaaattaaacgcacaaccacgcagaaatggcagagcgtctttaatgacagtcaggagcacctggagagattttactgtaaccctgaaaacgacagaatgcgcatgaagtacgggggtcaggagttctgggctgatctgaatgctatgaatgtttacgaaactacggagttcgaccagctaagaagactaagcacgcctccgagctcgaatgtgaattcaatctaccataccgtctggaagtttttctgccgcgaccacttcggctggcgcgaataccctgagtccgtgatccgactgatcgaggaggccaattctcgaggtctgaaggaggtgcgcttcatgatgtggaacaaccactacattctgcacaactcattcttcaggcgggagataaagagacgaccattatttagatcctgctttatcctgttgccatacctgcagacactagggggtgtaccaacccaggcccctcccccactggaggccactagttccagtcaaattatctgccctgacggggtcacatctgccaacttttatcctgaaacttgggtgtatatgcatccatctcaagactttatccaggttccagtgagcgccgaagacaaatcttaccggattatctataatctgttccacaagacagtcccagaattcaaatacaggattctgcagatcctcagggtgcagaaccagtttctgtgggaaaagtacaagcggaagaaggagtatatgaacagaaagatgttcggacgggacaggattatcaatgagcgacacctttttcatgggaccagccaggatgtggttgatggaatttgcaagcacaattttgatcctcgcgtgtgtggtaagcacgccaccatgttcggtcaaggctcttactttgcgaagaaagccagctattcccacaacttctcaaagaagtcttccaagggcgtgcattttatgttcttagcgaaagtcctcactgggcggtacaccatgggctctcatggcatgaggaggcctccacctgtgaatcctggatccgttacctccgacctgtatgactcatgtgttgataatttcttcgagccgcagattttcgttatcttcaatgacgatcagtcgtacccctactttgtgatccagtacgaggaagtgtcaaacacctag

SEQ ID NO: 71117 - DNA, 1974 bp, Artificial Sequence
  derived and/or modified sequence
atggagatggaaactacagagcctgagccagattgtgtggtgcagcctccatcgccgccagatgatttctcgtgtcagatgagactgagcgaaaagatcacacccctcaagacctgttttaagaagaaagatcagaagaggctcggaaccggcacacttagatccttgcggcctatcttgaatacacttttggagagtggtagcttggatggagtttttagaagccgcaaccagtctaccgatgagaactctttacacgaaccaatgatgaagaaagctatggagattaatagctcgtgtccacccgcagaaaacaacatgagcgtcctcattccagaccgcaccaatgtgggcgatcaaatcccggaggcacatccgtctacagaggctcctgagagagtggtaccaatccaggaccacagcttcccgtcggaaaccctttctggtactgtggcagactccactcccgctcatttccagaccgaccttcttcatccagtctcttccgacgtgccaaccagcccagattgtctcgataaggtaatcgactacgtgcctgggatcttccaggagaactctttcactatacagtatatactcgacaccagcgacaaattgagcaccgagctctttcaagacaagagtgaggaagcctcacttgacctggtgtttgaactcgtgaaccagctccaataccatacccatcaggaaaatgggattgagatctgcatggatttcctgcagggcacctgtatctatgggcgagactgccttaagcatcacactgttctgccataccattggcaaataaagagaactacaacacagaagtggcagtcagtgttcaatgattcccaggagcacttagagaggttttactgcaatccggagaacgatcggatgcgtatgaaatacggtggccaggaattttgggcagatctgaatgccatgaacgtatacgagactactgaattcgatcagctccgaaggcttagtacaccccccagttctaacgtcaattccatctatcacacagtgtggaagtttttttgcagggatcactttggttggcgggaataccccgagtctgtgattcggctgattgaggaagcaaactcaaggggcctgaaggaggtgcgctttatgatgtggaacaaccactatatcttacacaactcattcttccgccgtgagattaaacggcgacccctctttcgctcatgcttcatcctgttgccctacctgcagaccctggggggagtccccacccaagccccgcctccacttgaggctaccagctcttctcagatcatctgtcccgatggagtgactagcgccaatttttatcctgagacatgggtgtacatgcacccatctcaagacttcatacaggtccccgtgtccgcggaagacaagtcctataggataatttataacctcttccacaaaacggtgccggaatttaaatacaggattttacagattctccgtgtacagaaccagtttctctgggaaaaatacaagcgcaagaaggagtatatgaatcgaaaaatgtttggtcgcgaccgcatcatcaacgagcgacatttgtttcacgggacatctcaggatgtagtcgacggaatttgcaagcacaatttcgacccacgagtttgtggcaagcacgccaccatgttcggtcaggggtcatacttcgctaagaaggcatcgtatagccacaacttttctaaaaagtcctcgaagggggtccacttcatgttcctggctaaggtactgactgggaggtacacgatgggatcccacggcatgagacgtcctcctcccgtgaacccagggtcagtaacatctgacctctacgacagctgcgtggacaacttcttcgagccgcagatctttgtgatcttcaatgacgaccagagctatccttactttgtcattcagtatgaggaggtcagtaacaccgtatccatttag

SEQ ID NO: 71118 - DNA, 1974 bp, Artificial Sequence
  derived and/or modified sequence
atggaaatggaaaccactgagccggagccggattgcgtcgtgcagcctcccagccccccagacgatttcagctgccagatgagactttccgagaagattacccctctgaagacatgcttcaagaagaaggaccagaaaagattgggtacggggactctccgctccctaaggcccatattgaatacgttactcgagtccgggtctctggacggcgtcttccgtagccgcaaccagtccactgatgaaaattcattgcacgaaccaatgatgaagaaagctatggagattaactcgtcatgcccgcctgccgaaaacaatatgtcagtgttaattcctgaccgcaccaacgtgggggaccagatccctgaggctcacccatctacagaagcccctgagcgggtggtgcctatccaggaccattcgttcccttctgaaactctgagcggcacagtcgccgactctacaccagcacactttcagacagatttactccatcctgtgagctcggacgtcccaacctcccccgactgcctggacaaagttatagactacgtaccaggtatcttccaggaaaacagtttcaccatccagtatattcttgacacatccgataagctgagcactgaactcttccaggacaagtctgaggaggcttcacttgacctagttttcgaactagtcaaccaacttcagtatcatacccatcaagaaaacggcattgagatttgtatggactttctgcagggaacatgcatatacggtcgggattgtctgaaacaccatacagtgttgccttaccattggcagatcaaacgaaccactacccagaaatggcagtccgtgtttaacgatagtcaggagcacctcgaacggttttactgtaaccccgaaaatgaccgcatgaggatgaagtacggcggtcaggagttctgggccgacctgaacgccatgaatgtatatgaaacaacggaattcgaccagctccgcaggctgtctactccgccttcctcaaatgtcaattccatttaccacactgtgtggaaatttttttgtcgagaccatttcggttggcgcgagtaccccgagtccgtgatcagactcattgaggaggccaactccaggggactcaaagaggtacgctttatgatgtggaacaaccattacattctccacaactcattcttccgcagagaaattaagcgcaggcctttgttccggtcctgttttatcctgctgccgtacctccaaacactagggggggtgcccacacaggctcccccgcctttagaagctacctcatcctctcaaattatttgtccggacggtgtgacatcagcaaatttttacccagaaacgtgggtttacatgcatccttcccaggatttcattcaagtgcctgtgagtgcagaggacaaaagttaccggatcatatataatctctttcacaaaacagtgccagaattcaagtatagaatattacaaatccttcgagttcagaatcagtttctctgggagaaatacaaaagaaagaaagagtacatgaacaggaagatgttcggacgggacagaattataaacgaaaggcacctgttccacgggacatcccaggacgtagttgacggcatctgcaaacacaatttcgatccgagggtctgtgggaagcacgctactatgtttgggcaaggtagctatttcgctaaaaaagcttcctattctcacaacttcagcaaaaagtccagcaagggggtccatttcatgttcctggccaaagtgcttaccgggaggtacacaatgggaagccacggtatgaggcgcccccctcctgtgaatcccggctctgttacatccgatctctacgatagctgcgtggacaacttcttcgagccacagatattcgtaattttcaatgatgatcagtcttatccatatttcgtgatccagtacgaagaagtgagtaacacagtctcaatttag

SEQ ID NO: 71119 - DNA, 1974 bp, Artificial Sequence
  derived and/or modified sequence
atggagatggagaccacagagcctgagccagactgtgtggtgcagccccccagccccccagatgacttcagctgccagatgaggctgtctgagaagatcacccccctgaagacctgcttcaagaagaaggaccagaagaggctgggcaccggcaccctgcggagcctgcggcccatcctgaacaccctgctggagagcggcagcctggatggagtcttccgcagcaggaaccagagcacagatgagaacagcctgcacgagcccatgatgaagaaggccatggagatcaacagcagctgccccccagctgagaacaacatgtctgtgctgatcccagacaggaccaacgtgggggaccagatccctgaggcccaccccagcacagaggcccctgagcgggtggtgcccatccaggaccacagcttccccagcgagaccctgagcggcaccgtggccgacagcaccccagcccacttccagacagacctgctgcaccctgtgtccagtgatgtgcccaccagcccagactgcctggacaaggtgattgattatgtgcccggcatcttccaggagaacagcttcaccatccagtacatcctggacaccagtgacaagctgagcacagagctgttccaggacaagtctgaggaggccagcctggacctggtgtttgagctggtgaaccagctgcagtaccacacccaccaggagaatggcatcgagatctgcatggacttcctgcagggcacctgcatctacggccgggactgcctgaagcaccacacagtgctgccctaccactggcagatcaagaggaccaccacccagaagtggcagagcgtcttcaatgacagccaggagcacctggagcgcttctactgcaacccagaaaatgacaggatgaggatgaagtatggaggccaggagttctgggccgacctgaatgccatgaatgtgtatgagaccacagaatttgaccagctgcggcggctgagcaccccacccagcagcaatgtgaacagcatctaccacacagtgtggaagttcttctgccgggaccacttcggctggagggagtacccagagagcgtcatccgcctcatcgaggaggccaacagccggggcctgaaggaggtgcgcttcatgatgtggaacaaccactacatcctgcacaacagcttcttccggcgggagatcaagagaagacccctcttccgcagctgcttcatcctgctgccctacctgcagaccctgggcggcgtgcccacccaggcccccccacccctggaggccaccagcagcagccagatcatctgcccagatggagtgaccagcgccaacttctacccagagacctgggtgtacatgcaccccagccaggacttcatccaggtgcctgtgtctgctgaggacaagagctaccgcatcatctacaacctcttccacaagacagtgcctgagttcaagtaccgcatcctgcagatcctgcgggtgcagaaccagttcctgtgggagaagtacaagaggaagaaggagtacatgaacaggaagatgtttggccgggaccgcatcatcaatgaaagacacctgttccacggcaccagccaggatgtggtggatggcatctgcaagcacaactttgacccccgggtgtgtgggaagcacgccaccatgtttggccagggcagctactttgccaagaaggccagctacagccacaacttcagcaagaagagcagcaaaggagtgcacttcatgttcctggccaaggtgctgaccggccgctacaccatgggcagccacggcatgaggcggcccccacctgtgaaccctggctctgtgaccagtgacctgtatgacagctgtgtggacaacttctttgagccccagatcttcgtcatcttcaatgatgaccagagctacccctacttcgtcatccagtatgaggaggtgagcaacacagtgtccatctag

SEQ ID NO: 71120 - DNA, 1521 bp, Artificial Sequence
  derived and/or modified sequence
atggagatggagaccacagagcctgagccagactgtgtggtgcagccccccagccccccagatgacttcagctgccagatgaggctgtctgagaagatcacccccctgaagacctgcttcaagaagaaggaccagaagaggctgggcaccggcaccctgcggagcctgcggcccatcctgaacaccctgctggagagcggcagcctggatggagtcttccgcagcaggaaccagagcacagatgagaacagcctgcacgagcccatgatgaagaaggccatggagatcaacagcagctgccccccagctgagaacaacatgtctgtgctgatcccagacaggaccaacgtgggggaccagatccctgaggcccaccccagcacagaggcccctgagcgggtggtgcccatccaggaccacagcttccccagcgagaccctgagcggcaccgtggccgacagcaccccagcccacttccagacagacctgctgcaccctgtgtccagtgatgtgcccaccagcccagactgcctggacaaggtgattgattatgtgcccggcatcttccaggagaacagcttcaccatccagtacatcctggacaccagtgacaagctgagcacagagctgttccaggacaagtctgaggaggccagcctggacctggtgtttgagctggtgaaccagctgcagtaccacacccaccaggagaatggcatcgagatctgcatggacttcctgcagggcacctgcatctacggccgggactgcctgaagcaccacacagtgctgccctaccactggcagatcaagaggaccaccacccagaagtggcagagcgtcttcaatgacagccaggagcacctggagcgcttctactgcaacccagaaaatgacaggatgaggatgaagtatggaggccaggagttctgggccgacctgaatgccatgaatgtgtatgagaccacagaatttgaccagctgcggcggctgagcaccccacccagcagcaatgtgaacagcatctaccacacagtgtggaagttcttctgccgggaccacttcggctggagggagtacccagagagcgtcatccgcctcatcgaggaggccaacagccggggcctgaaggaggtgcgcttcatgatgtggaacaaccactacatcctgcacaacagcttcttccggcgggagatcaagagaagacccctcttccgcagctgcttcatcctgctgccctacctgcagaccctgggcggcgtgcccacccaggcccccccacccctggaggccaccagcagcagccagatcatctgcccagatggagtgaccagcgccaacttctacccagagacctgggtgtacatgcaccccagccaggacttcatccaggtgcctgtgtctgctgaggacaagagctaccgcatcatctacaacctcttccacaagacagtgcctgagttcaagtaccgcatcctgcagatcctgcgggtgcagaaccagttcctgtgggagaagtag

SEQ ID NO: 71121 - DNA, 1965 bp, Artificial Sequence
  derived and/or modified sequence
atggagatggagaccacagagcctgagccagactgtgtggtgcagccccccagccccccagatgacttcagctgccagatgaggctgtctgagaagatcacccccctgaagacctgcttcaagaagaaggaccagaagaggctgggcaccggcaccctgcggagcctgcggcccatcctgaacaccctgctggagagcggcagcctggatggagtcttccgcagcaggaaccagagcacagatgagaacagcctgcacgagcccatgatgaagaaggccatggagatcaacagcagctgccccccagctgagaacaacatgtctgtgctgatcccagacaggaccaacgtgggggaccagatccctgaggcccaccccagcacagaggcccctgagcgggtggtgcccatccaggaccacagcttccccagcgagaccctgagcggcaccgtggccgacagcaccccagcccacttccagacagacctgctgcaccctgtgtccagtgatgtgcccaccagcccagactgcctggacaaggtgattgattatgtgcccggcatcttccaggagaacagcttcaccatccagtacatcctggacaccagtgacaagctgagcacagagctgttccaggacaagtctgaggaggccagcctggacctggtgtttgagctggtgaaccagctgcagtaccacacccaccaggagaatggcatcgagatctgcatggacttcctgcagggcacctgcatctacggccgggactgcctgaagcaccacacagtgctgccctaccactggcagatcaagaggaccaccacccagaagtggcagagcgtcttcaatgacagccaggagcacctggagcgcttctactgcaacccagaaaatgacaggatgaggatgaagtatggaggccaggagttctgggccgacctgaatgccatgaatgtgtatgagaccacagaatttgaccagctgcggcggctgagcaccccacccagcagcaatgtgaacagcatctaccacacagtgtggaagttcttctgccgggaccacttcggctggagggagtacccagagagcgtcatccgcctcatcgaggaggccaacagccggggcctgaaggaggtgcgcttcatgatgtggaacaaccactacatcctgcacaacagcttcttccggcgggagatcaagagaagacccctcttccgcagctgcttcatcctgctgccctacctgcagaccctgggcggcgtgcccacccaggcccccccacccctggaggccaccagcagcagccagatcatctgcccagatggagtgaccagcgccaacttctacccagagacctgggtgtacatgcaccccagccaggacttcatccaggtgcctgtgtctgctgaggacaagagctaccgcatcatctacaacctcttccacaagacagtgcctgagttcaagtaccgcatcctgcagatcctgcgggtgcagaaccagttcctgtgggagaagtacaagaggaagaaggagtacatgaacaggaagatgtttggccgggaccgcatcatcaatgaaagacacctgttccacggcaccagccaggatgtggtggatggcatctgcaagcacaactttgacccccgggtgtgtgggaagcacgccaccatgtttggccagggcagctactttgccaagaaggccagctacagccacaacttcagcaagaagagcagcaaaggagtgcacttcatgttcctggccaaggtgctgaccggccgctacaccatgggcagccacggcatgaggcggcccccacctgtgaaccctggctctgtgaccagtgacctgtatgacagctgtgtggacaacttctttgagccccagatcttcgtcatcttcaatgatgaccagagctacccctacttcgtcatccagtatgaggaggtgagcaacacctag

SEQ ID NO: 71122 - DNA, 1974 bp, Artificial Sequence
  derived and/or modified sequence
atggagatggagaccaccgagcccgagcccgactgcgtggtgcagccacctagtcccccggacgacttctcctgccagatgagattgagcgagaaaattacacctctgaaaacttgctttaagaagaaggatcagaagaggctaggaaccggaaccttgcgctcgttacgtcctattttgaatacactcctggagagtggaagtctggacggggtgtttcgctcacggaaccagtccaccgacgagaatagtttgcacgagccaatgatgaagaaggccatggaaatcaacagctcatgtcccccagcggaaaataatatgagtgtgctcatccccgatcgcacgaacgtgggcgaccaaatcccagaggctcatccgtctacagaggctcccgaacgggtggttcctattcaagatcatagcttcccttccgaaactctgtcggggactgtggccgacagcaccccagctcattttcagacagacctattgcatcccgtctcctcagacgttccgacaagtcctgattgcctggataaagtgatcgactacgttccgggcatctttcaggagaatagttttacaatccaatacattctcgacacgagcgataaattatccactgaactcttccaagacaagtccgaggaggcctctctggatctggtgttcgagctcgtgaatcagctccagtaccatacccaccaggaaaatggaatcgaaatatgcatggacttcttacaaggaacctgtatctacggtcgagactgtctgaagcatcacactgtgctgccctaccactggcagatcaaacgcacaaccacacagaaatggcagtctgtcttcaatgactcccaggaacacctagaaagattttattgcaaccctgaaaatgacagaatgcgcatgaagtatggcggacaggaattttgggccgatctcaacgccatgaacgtctacgaaaccacagagttcgaccagctcaggcgactttccaccccaccatcctcaaatgtgaacagtatctaccacacagtctggaagttcttctgtcgcgaccatttcggctggcgcgagtatccagaaagcgttatccggctcattgaagaagccaatagtcgcgggctgaaagaggtgaggtttatgatgtggaacaaccattatatcctacacaactcattctttaggcgcgagatcaaacggagacccctgtttcgatcctgctttatcctgctcccatatctgcaaaccttaggaggggtccccacccaagctcccccacccctagaagcaacaagttccagtcaaatcatttgtcccgacggagtcacttccgcaaatttctaccccgaaacttgggtctacatgcatccatctcaggatttcatacaggtcccagtttcagctgaggataaaagttacagaatcatctataacctgtttcataaaactgttcctgaatttaagtaccgcatacttcagatcttgagagtccagaatcagtttctgtgggaaaagtataaacgcaagaaagagtacatgaaccgcaagatgtttgggcgggataggattatcaatgagcgccacctgtttcacggcaccagtcaagatgttgtcgacggaatttgtaagcataactttgacccccgcgtctgtggaaagcacgcaaccatgtttggacaaggttcttacttcgctaaaaaagcctcctacagtcacaacttttcaaaaaaatcaagcaagggcgtgcactttatgttcctggctaaggtgctgacagggcgatacacaatgggcagtcacggcatgagacgccctcccccagtgaaccccggatctgttacgtcagacctctacgacagctgtgtagataattttttcgaaccccagatctttgtgatttttaatgacgaccaatcttacccctattttgtcattcagtacgaagaggtatccaacaccgtgtcaatttag

SEQ ID NO: 71123 - DNA, 1974 bp, Artificial Sequence
  derived and/or modified sequence
atggagatggagaccaccgagcccgagcccgactgcgtggtgcagcctccgagccctcctgacgacttttcgtgtcaaatgcggttgtctgagaagattactcccctgaaaacctgctttaagaagaaggatcagaagaggctgggaaccgggactctgaggtccttgagaccaatcctgaatacactgttagagagtggttccctggatggcgtgttcaggagtcggaatcaaagcacagacgaaaactctttgcacgaacccatgatgaaaaaggctatggagatcaacagttcctgtccccccgctgagaataatatgtccgtgttgatacccgacaggaccaatgtgggcgaccagatccctgaggctcatccttctaccgaagctccagagcgggttgtacctatccaggaccactccttcccttccgagacactatccgggacagtggccgacagtaccccagcacacttccagactgacctgctccacccagtttctagcgatgtgcccaccagtcccgattgcttggataaagtgatcgactacgtgcccggtatcttccaggagaacagcttcacgatccagtatatcctagatacatcggataagctcagtacggaactcttccaggataagtccgaagaagccagcctggatttggtgtttgagctcgtgaatcagttgcaatatcacacacaccaagagaacggcatcgaaatttgcatggacttcctgcagggaacttgtatctacgggagagattgcctgaagcatcacaccgtcctgccgtatcactggcaaattaagcggaccactacccagaaatggcagagcgtctttaacgacagtcaggaacatctcgagcgcttttattgcaatcccgagaacgacagaatgcgaatgaagtacggtggacaggagttctgggctgacttgaatgctatgaacgtgtacgaaacaaccgagtttgatcagctgcgacgcctcagtacacccccttctagcaatgtgaactccatctaccatacggtctggaagtttttctgcagagaccacttcggctggagggagtaccctgagtcagtgatacggctgatagaagaggccaattctcgggggctgaaagaggtgcggtttatgatgtggaataatcattacatcctgcacaattccttcttccgtagggaaatcaaaaggcggcccctcttccgttcctgttttattctgttgccttacctccagaccctgggcggggtgcccacccaggcccctcctccactggaagccacgtcgtcctcccaaatcatttgccctgacggggtgacaagcgccaacttttatccagaaacctgggtatatatgcatcccagccaggattttatccaggtgccggtatccgctgaagacaaatcctaccgcatcatctataatctgtttcacaagaccgtgcccgaatttaaataccgaatcttgcaaattctgcgggtgcaaaatcaattcctctgggagaaatataagcgcaagaaggagtacatgaaccgaaagatgttcggccgcgatcgcatcatcaacgagaggcaccttttccacggtacgtctcaggacgtggtggacgggatttgtaaacacaacttcgacccccgggtgtgcggtaaacatgccacgatgtttgggcaaggctcttatttcgcgaagaaagcctcctactctcataactttagtaagaagtcatcaaagggggttcattttatgtttctggctaaggttttaaccgggcgctacactatgggcagtcacggaatgcgacgcccaccacctgttaaccctgggagtgttacgtctgatctctacgactcctgtgtggataatttcttcgagcctcagattttcgtgatttttaacgatgaccagtcatatccttacttcgtcatccaatacgaggaggtgagcaacacagtgtctatatag

SEQ ID NO: 71124 - DNA, 1521 bp, Artificial Sequence
  derived and/or modified sequence
atggagatggagaccaccgagcccgagcccgactgcgtggtgcagcccccaagccctcctgacgacttctcctgtcagatgagacttagcgagaagattaccccgttgaaaacatgttttaagaaaaaggatcaaaaaagactagggaccggaactctgaggagtctgaggcccattctgaataccctgctggaaagtggatccctggatggggtgttccgatcaagaaatcagagcactgatgagaacagccttcacgagccaatgatgaaaaaggccatggagatcaatagcagctgtcctccagccgagaacaacatgagtgttctcattcccgaccggactaacgtgggcgaccaaatccccgaggctcatcccagcactgaagccccagagcgcgtggtgcctatccaagaccactcattccccagcgagaccctgtcaggtaccgtcgcagactcaaccccagcccacttccagaccgatctactgcacccggtaagctcagatgtcccgaccagccctgactgtcttgacaaagtgattgactacgtcccaggcatctttcaggagaactcattcacgattcaatacatactggacaccagcgataagctttccaccgaattgttccaggataaatctgaggaagcgagcttggatctggtgttcgaactggtcaaccagctgcagtatcacacacatcaggagaatgggattgaaatctgcatggacttcctccagggaacctgcatatacggccgggattgtcttaagcaccacacagtgctgccttatcattggcagataaagcggactacaactcagaagtggcagagtgtcttcaatgatagccaggagcacctggagcgcttttactgcaatcccgagaacgataggatgagaatgaagtacggcggacaggaattttgggcagacctaaatgccatgaatgtctacgagaccactgagtttgaccaattacggcgtctgtcaacgccgccatcttctaatgtgaattcaatataccacaccgtctggaagttcttctgccgtgaccactttggctggcgcgaataccctgaaagcgtgattcgcctgattgaagaggcaaattctcgcggactgaaagaagttcgctttatgatgtggaataaccattacatcctgcataattcgttctttcggcgggagattaaacgtcgcccgcttttccgctcgtgtttcattctgttgccctacctacagaccctgggcggggttcccacccaggctcctccgcctctggaagccactagctcaagtcagattatctgtcccgacggggtcacatccgccaacttttatcccgaaacatgggtgtatatgcacccctcccaagacttcatacaggttcccgtaagtgcggaggacaaatcatacagaattatatacaatcttttccataaaactgttcccgaattcaaatatcgtatcttgcagatcctgcgggtgcagaaccagtttctgtgggagaaatag

SEQ ID NO: 71125 - DNA, 1965 bp, Artificial Sequence
  derived and/or modified sequence
atggagatggagaccaccgagcccgagcccgactgcgtggtgcagccgccatccccccctgacgatttctcctgccagatgagactgtcagagaagatcacccctctgaagacatgcttcaagaaaaaggatcagaagcgtttgggtaccggcactctgcgcagcctcaggcccatcctgaacacgctcttggagtccggctccctggacggggtgttccgatctagaaatcaatcaaccgatgagaactccctgcacgagcctatgatgaagaaggcaatggaaataaatagtagctgtcccccagcagagaataacatgtctgtgttaattcctgatcgtaccaacgtaggcgaccagattcccgaggcccacccttctactgaggctcccgagagagtcgtacccatccaagaccatagctttcctagcgaaactctgagcggcaccgtggcagattcaaccccagctcatttccaaaccgacctcctccaccctgttagttccgatgtccccacgtctcctgactgtttggacaaagtgatcgattatgtgcctggcatcttccaggagaattcattcacgatccagtatatcctagacacttcggataaactgagcactgaactctttcaggataagtccgaggaggccagtctggacctggtcttcgagctggtgaatcagctacaatatcatacccaccaagaaaacgggattgaaatttgcatggacttcctccagggcacatgcatttacggccgagactgcctcaagcaccataccgtgctgccttaccattggcagatcaagcgcaccacaacacaaaagtggcaatccgtcttcaacgatagtcaggaacacctggagcgcttttattgtaaccctgaaaatgacagaatgcggatgaagtacgggggacaggaattctgggcagatttgaacgccatgaacgtatacgagaccacagagttcgaccagctgaggcggttaagcactccacctagttctaacgtaaactcaatatatcacacagtctggaaatttttctgccgagaccactttggctggagagaatatcctgaatcagtgattcggctaattgaagaagccaatagtagaggcctgaaggaggttaggtttatgatgtggaataatcattacattttacataatagcttcttcaggcgggagattaaacgccgccccctgttccggtcctgcttcattttgctcccatatctccagacattagggggagtcccaacccaggctcctcctccgctagaagcaacatccagctcacagattatttgcccagatggtgtcacatcagcaaacttctatcctgagacttgggtatatatgcacccttcacaggatttcatccaggttcctgttagcgcggaagataagtcgtaccgcataatttataatctgttccacaagaccgtgccagaatttaagtacaggatactgcaaatcctgagggtgcagaaccagttcctttgggaaaaatacaaaagaaaaaaggaatacatgaataggaagatgttcggacgcgatcgcatcatcaacgagagacatttatttcacggaacctctcaggatgtggtggatgggatatgtaaacacaactttgacccccgagtgtgtggcaagcacgcaaccatgttcggccagggcagttatttcgccaaaaaagcttcatactcacataacttcagcaaaaagagcagtaagggggtgcatttcatgttcctggctaaggtgctgaccggccgctacactatggggtcccatggaatgcggcgccccccaccagtcaaccctgggagcgtaacaagcgatttgtacgactcttgtgtcgataacttctttgagcctcaaatctttgttatctttaatgacgaccagtcatacccatactttgttattcagtacgaggaggtatcaaatacttag

SEQ ID NO: 71126 - DNA, 1974 bp, Artificial Sequence
  derived and/or modified sequence
atggagatggagaccaccgagcccgagcccgactgcgtggtgcagcctccttcacctcccgatgacttctcctgtcagatgcgcctctccgagaaaatcaccccacttaagacctgtttcaagaagaaagaccagaaacgattaggaacagggacgttacgcagccttcgcccgatactcaacactctgctggagtcaggctcgctggatggagtgtttcgatccagaaatcaatccactgacgaaaacagccttcacgaaccaatgatgaagaaagccatggagataaactccagttgcccccccgcagagaataatatgagtgttctcatcccagacagaacaaatgttggcgaccaaatcccagaagcccacccgagtacggaggctcctgagcgagtagtaccaattcaggaccactcgtttccttctgaaacactgtctggcaccgtggcagatagcacccccgcacatttccagaccgatctactgcaccctgtctcgagtgatgtgcccacttctccggactgcctcgacaaggtgatagattacgttcctggtattttccaggagaactccttcactatccaatacattttggacacttctgacaagctctctacagagttgttccaggacaaatcagaagaggctagtttggacctcgtgtttgaactcgtgaatcagctccaataccatactcatcaggagaatgggatagaaatctgtatggactttctgcaggggacatgtatttacgggagagactgcctcaagcatcacaccgtgcttccataccattggcaaatcaagcgaacgactacgcagaagtggcagagtgtgttcaatgacagccaggagcatctcgaacgtttctattgcaatccagaaaacgatcggatgaggatgaagtacggcggacaggagttctgggccgatcttaatgccatgaatgtctacgagacgaccgaattcgaccagctgaggcgcctgtccactcctccctcttccaatgtgaacagtatctatcatactgtttggaagttcttctgtagagaccattttgggtggagggagtaccctgaaagcgttattagacttattgaagaagcaaactctcgcggtctgaaagaagtgcgcttcatgatgtggaataaccactatatactgcataactccttttttcggcgagagatcaaaagaaggccactctttcgtagctgtttcatcctcctgccatacctccaaactttaggcggcgtgccgactcaggcacctccacctctggaggccacaagcagcagccagatcatttgtcctgatggcgtgacaagcgcaaacttctatccagagacctgggtgtatatgcacccctcgcaggatttcattcaagtgcccgtttctgctgaggataagtcgtacagaatcatctacaatctgttccataaaactgtcccagaatttaagtatcgcatcctccaaatcttaagggttcaaaaccagtttctttgggagaaatacaaacgaaagaaggaatatatgaatcgaaaaatgtttggcagggacaggatcataaacgagcggcatctctttcacggtacatcccaggatgtagttgatgggatatgcaagcacaacttcgacccacgcgtttgcggcaagcatgcaaccatgtttggccaggggtcttacttcgcgaagaaggcgtcatactcccacaactttagcaagaaaagctcgaagggcgtacactttatgttcttggcgaaagtattaacagggaggtatacaatgggctctcacggcatgcgaaggccaccacccgtcaacccagggtctgtaactagtgacttgtacgattcatgcgttgataacttcttcgagccccagattttcgtgatttttaatgacgatcagagttacccatacttcgttatccagtacgaggaagtatcaaacacggttagcatttag

SEQ ID NO: 71127 - DNA, 1974 bp, Artificial Sequence
  derived and/or modified sequence
atggagatggagaccaccgagcccgagcccgactgcgtggtgcagcccccatctccaccagatgatttcagttgtcagatgaggctttctgagaagataacgccgctgaagacctgcttcaaaaagaaggaccagaaaagattgggcaccggcactcttagatccctgaggccgatactgaacactttgctggaatccggaagcctggacggcgtgtttagatccagaaaccaatctactgatgagaattccctgcatgaaccaatgatgaagaaggccatggaaattaattcgtcatgtcctccggctgaaaacaacatgtctgtcttgataccggatcggacaaacgttggagaccagatcccggaggcccacccctccactgaggcgcctgagcgtgttgtgcccatccaggatcattctttccctagcgagacactttctggcaccgtggcggacagcacaccagcgcacttccagaccgacctactgcaccctgtttcgtccgacgtgccgacaagccctgactgtcttgacaaggtaattgattacgtgcctgggatctttcaagagaacagcttcacaattcaatacatcttggatactagcgacaaactatctactgagctctttcaggataagtcagaggaggcctcactggatctggtttttgagttggtgaaccagctgcagtaccatacccatcaagagaatgggatcgaaatctgtatggacttcctgcagggaacatgcatctacggcagggactgcctgaaacaccatacagtgctgccataccactggcaaataaagcgaaccacgacacagaagtggcaaagtgtattcaacgactcacaggagcacctggaaagattctattgtaatcctgagaatgatcgcatgcggatgaaatacggcgggcaggagttctgggctgacctgaatgcaatgaacgtgtatgaaacaaccgagtttgaccagctcagacgactctctacacccccttcttctaacgtgaattctatctaccataccgtttggaagtttttttgcagggaccacttcggctggcgtgaatatccggagagcgtgattaggctcattgaggaggccaacagccgagggctgaaagaggtgagattcatgatgtggaacaaccactacatactgcacaacagcttctttagacgcgagatcaagaggcggcctctgttccgctcctgtttcatcctgctaccgtacttacagaccttggggggagtgcccactcaagcacccccccctcttgaagctacatcttctagtcagatcatttgccccgatggagttacaagcgccaacttttacccagagacctgggtctacatgcatccctcacaggacttcatccaagttccagtgtccgcggaagacaagtcttaccgaataatctacaacctctttcataaaaccgtgccggaatttaagtatagaattttgcagatattgcgtgtgcagaaccagttcctctgggagaaatataaaaggaagaaagagtacatgaaccgcaagatgttcgggcgcgataggattatcaacgagagacatctgtttcacggcacctcacaggacgtcgtagatggtatttgcaaacacaacttcgatccccgggtgtgcgggaaacacgcaactatgttcggccagggaagctactttgccaagaaggcgtcatacagtcataacttttcgaagaaaagctctaagggcgtgcacttcatgtttctcgcaaaggtgttgaccggcagatacacgatgggcagtcatggaatgaggaggccccctccggtgaaccccggttccgtaacctccgatttatatgacagttgtgtggataacttttttgaaccacagatctttgtgatcttcaacgatgaccagtcctacccatacttcgtgattcagtacgaggaggtatcaaacactgtttctatctag

SEQ ID NO: 71128 - DNA, 1974 bp, Artificial Sequence
  derived and/or modified sequence
atggaaatggaaacaacagaacccgaacctgactgcgtggtgcagcccccatcacccccagacgactttagttgccagatgagactgtcagagaaaattacacctctgaaaacgtgctttaagaagaaagatcagaagcgcctgggcacaggaactctgcggagcctgcgccctatcctgaacaccctgctcgagagcgggtcactggatggcgtgttccgctctagaaaccaatcgaccgacgaaaattccctgcatgaaccaatgatgaagaaggccatggagattaacagctcttgtcccccagctgagaataacatgtctgttctgattccggatcgtacaaatgttggagatcagatccccgaagcccacccaagcaccgaagctcctgaaagagtggtaccgatccaagaccatagctttccatcagaaactctctctgggactgtcgccgatagtactcccgctcattttcagacggatctcctccaccccgttagcagcgacgttcccacatctcctgactgcttagacaaggtcatcgactatgttccgggaatctttcaggagaacagttttactattcagtatattctagatacctctgataagctgtcaaccgagctctttcaagataaaagcgaggaggccagtctggacctcgtgtttgagctcgtgaatcaactgcagtatcatacccaccaagagaacgggattgagatctgcatggacttcctccagggaacatgtatctacggaagggactgtctcaaacatcacactgtcttaccataccattggcagatcaaaaggaccaccacgcagaagtggcagtcggttttcaacgacagccaagagcaccttgagcgcttttactgtaacccagaaaatgaccggatgcggatgaagtacggagggcaggagttctgggccgacctgaacgctatgaatgtctatgaaactacggagtttgatcaactgcggaggctgtccaccccgccaagcagcaatgtaaactcgatctatcataccgtctggaaattcttctgtcgggatcacttcggctggagggaatatcctgagtccgtgataaggctgattgaagaggccaactcgcgaggtttaaaggaagtaaggtttatgatgtggaacaatcattacatcctgcataactctttcttccgccgagaaatcaaacgcagacctctgtttcggagctgtttcatcttgctgccttatctgcagaccttggggggtgttcccacacaagcccctcctcccttagaggctacaagtagcagtcagattatttgtcccgatggtgtgacatccgctaatttctatcccgaaacatgggtgtatatgcacccttcccaggactttatacaggtccctgtaagtgcagaggacaaaagctataggattatttacaatctatttcataaaaccgtgcctgagttcaagtaccgaattttacagatactgcgcgtgcagaatcagtttctgtgggaaaaatacaagcgcaagaaggagtacatgaacaggaaaatgtttggacgagacagaataatcaatgagaggcacctgtttcacggaaccagccaggatgttgtcgatggaatctgcaaacacaacttcgaccctcgagtctgtggcaagcacgccaccatgttcgggcagggatcctactttgcaaaaaaggcaagctactcacataatttcagcaagaaaagctcaaagggtgtccactttatgttcttggccaaggtgctgacaggcaggtacacaatgggctcgcatggaatgcgcaggcccccaccggtaaaccctgggtcggtcaccagtgatctgtatgactcatgcgtcgataacttctttgagcctcagatattcgttatatttaatgacgatcaatcctacccttacttcgtgatccagtatgaggaagtgagcaacaccgtgtctatttag

SEQ ID NO: 71129 - DNA, 1974 bp, Artificial Sequence
  derived and/or modified sequence
atggagatggaaacgaccgagcctgagcctgattgcgttgtgcagcctccaagccccccagatgatttttcatgccagatgcggctgtcagagaagattacgcctctgaaaacctgcttcaagaaaaaggaccagaagcgcctcggaactgggaccctacgatcactgaggccaattctgaacactctcctggagtctggctcactggacggtgtgtttaggtctaggaaccagagcaccgacgagaacagtctccatgagcctatgatgaagaaggctatggaaatcaatagcagctgcccaccggctgagaacaatatgagcgtgcttatcccggatcgaacaaatgtaggagatcagatcccggaagcgcacccttcgactgaggctccggagagggtggtacccatccaggatcattctttcccctcagaaactctgagcggcactgtcgcagattctacccctgcacactttcaaacagacctgcttcatccggtgagctcagacgtccctacttctcctgattgcctcgacaaagtcattgactatgtccccggaatctttcaggagaactcttttaccattcagtatattttggatacatcagacaagcttagtaccgagctttttcaagataaatctgaggaggccagtctagacctcgtttttgagttggtgaaccagttacagtaccatacccatcaagaaaacgggattgagatctgcatggactttctgcagggcacttgtatatacgggcgagactgcctgaaacaccacacagtactcccctaccactggcagataaagcggaccactactcagaagtggcagtctgtgttcaacgactcccaggaacacctggagagattctactgcaaccccgagaatgataggatgaggatgaagtacggtggccaggagttctgggccgacctgaacgcaatgaacgtttatgaaaccacagagttcgatcaactccgccgattatccacccctcctagttccaacgtgaactccatatatcacactgtgtggaagtttttctgtagagatcactttgggtggagggagtaccctgagagcgttattaggctcatcgaggaggctaactcacgcggtttgaaagaagtgaggtttatgatgtggaacaaccactatatcctgcacaattcttttttccgaagggagattaaacggaggccactgtttcgcagttgttttatcctgctgccctatctccagaccctaggaggggtgccaacccaggcacctccccctctcgaagccacatcaagcagccaaatcatctgccctgatggggtaacatctgctaatttctaccctgagacatgggtctatatgcacccgtcccaggatttcatccaggttcccgtctccgctgaggataagagttatcggatcatctataacctgttccataagacagtaccagaattcaaataccggatcctgcagatcctgcgcgtgcagaatcaattcctgtgggaaaaatataagagaaaaaaggaatacatgaaccgtaagatgttcgggagagacagaatcatcaatgagaggcacctctttcatggtacctcgcaggacgtggtcgatggcatctgcaaacacaatttcgaccctagagtatgtggcaaacatgccaccatgtttggccagggatcctactttgccaagaaagcatcctactctcacaacttttcaaagaaaagtagcaaaggcgttcactttatgtttctggcgaaggtgctgaccggaaggtacactatgggatcacacggaatgaggaggccaccgccagtcaatccaggcagcgtgacctccgatctgtacgattcatgcgtggacaattttttcgaaccccaaatatttgtaatttttaacgacgatcagtcttatccgtattttgttatccagtacgaagaggtctctaacacggtgagcatctag

SEQ ID NO: 71130 - DNA, 1521 bp, Artificial Sequence
  derived and/or modified sequence
atggaaatggaaaccactgaacccgaacctgactgtgtcgttcagcccccatcaccacccgatgactttagctgccaaatgaggctgtcagagaaaatcacaccgttaaaaacatgtttcaaaaagaaggaccagaaaaggctgggcactggaacgcttcgaagtctgcgccctattttgaacaccttgttggaatctggctcactcgacggtgtcttccggtctcggaatcagtccacagatgaaaattcactgcacgaacctatgatgaaaaaagcgatggagatcaactcctcatgccctccagctgagaacaacatgtctgtgctaatcccagaccgcaccaatgtcggcgatcagattcctgaggcccatccgtcaactgaggctccagagagggtcgtgccaattcaggaccactccttcccatcagagaccctctcgggaactgtggctgacagtacacccgctcacttccagaccgatctgctgcacccagtgtcttccgatgtgccgacaagcccggattgcttagacaaagtcatcgattacgtgccaggaattttccaggagaattcctttaccattcagtatattcttgatacgagcgataagctgagcacagagctgttccaggacaagagcgaggaggcttctctcgatctcgtgtttgaattggtgaatcaattacagtaccatacacaccaggaaaacggaatcgaaatctgcatggacttcctgcagggcacctgcatttacggacgagattgtcttaaacaccacactgtcctcccttatcattggcagatcaagagaacaactacacagaagtggcaatccgtctttaacgacagtcaggaacacctggaacggttttattgcaatcccgagaacgatcgtatgcgcatgaagtatgggggacaggagttttgggcagatctcaatgcaatgaatgtgtacgagacgaccgagttcgaccaactgcgcagactctcaacgcccccaagcagtaatgtaaacagtatctatcacaccgtctggaagttcttttgcagggaccattttggatggagggagtacccagaatcagtcatccggctgatcgaagaagcaaactcgcgaggactgaaggaggttagatttatgatgtggaataaccattatatcctgcacaatagcttttttagacgggagatcaaacggaggcccttgttcaggtcctgtttcattctcctgccttacttgcagaccctcggcggtgttccaacccaggcacccccacccctggaggcaacatcttcctctcagataatctgtcctgatggggtgacctctgcgaatttctaccccgagacatgggtttacatgcatccctcccaggattttatacaagttccagtgtccgctgaggacaagtcctatagaattatttacaacctgtttcataagacagtcccggagtttaagtaccgtatactgcagattctccgagtccaaaatcagttcttatgggagaaatag

SEQ ID NO: 71131 - DNA, 1965 bp, Artificial Sequence
  derived and/or modified sequence
atggagatggaaaccacggaacctgagcccgactgtgtagtgcagcccccaagtcctccggatgactttagctgtcagatgcgcctctccgaaaagataaccccgcttaagacttgttttaagaagaaagatcaaaaacggctcggaaccgggacgctgcgtagcctcagaccgattctgaatacactacttgagagcggatctcttgacggggtgttccgctccagaaaccagtcaactgatgaaaacagtttgcacgagcccatgatgaagaaggctatggaaattaactcgagctgccccccagcagaaaataatatgagtgtgctgattccagataggactaatgtgggcgaccagattcccgaggctcacccaagcaccgaggctcccgaaagagttgtacccattcaggatcacagctttccctccgagaccctgagcggaactgttgccgattcgactccagctcattttcagacggacctactacaccctgtgtcttctgacgtcccaactagcccagactgtctggacaaagtgatagactatgtgcccggaatattccaggagaattctttcaccattcagtacatcctcgatactagcgataagctgtcaaccgaactgttccaggacaaatccgaagaagctagtctcgacctggtgttcgaacttgttaaccagctgcagtaccacactcaccaggagaacgggatagagatctgcatggactttctgcaaggaacttgcatatacggccgagactgtctgaagcaccacaccgtcctaccttatcactggcagattaagcgaacgacaacccaaaagtggcagtccgtgttcaacgatagtcaagaacacttagaaagattttattgcaatccagaaaatgaccgtatgcgtatgaaatacggcggacaagagttctgggctgatctgaatgcaatgaatgtgtatgaaacaacagaatttgaccagctgagaagactctcaacacccccatcttctaatgtaaactctatctatcacaccgtctggaagtttttctgtcgagaccattttggctggcgggagtaccccgagtccgtaatcaggctaattgaggaggctaacagtagaggtctcaaagaggttcgttttatgatgtggaacaaccactacatcctccataattctttttttcggagggaaataaagaggcgccctctgtttcggagttgctttatactcctaccttatcttcaaactttgggtggtgtgcccactcaggctcctccaccactcgaagctacctcaagttcccagattatctgtcctgacggagtcactagcgctaacttttacccggagacttgggtttacatgcaccccagtcaggacttcatacaggtgcccgtgagtgcagaggataagtcctatcgtataatatacaatttatttcataagactgtgcctgagttcaagtacaggatcctacaaatcctgcgggtccagaaccaatttctttgggaaaagtacaaaaggaaaaaagaatatatgaacagaaagatgtttggacgcgatcgcatcattaatgagcgccacctctttcacggtacatcgcaggacgtggtggacgggatctgcaaacacaattttgacccacgggtatgcggaaagcacgcaaccatgtttggtcagggttcttatttcgccaaaaaagcctcttacagtcataacttcagcaagaagtctagcaagggcgttcactttatgtttttggccaaggtacttaccggacggtacacgatgggcagccatggtatgaggcggcctccaccagtcaatcctggaagcgtcaccagcgacctttatgattcatgtgtggataattttttcgagcctcagatctttgtgatcttcaacgatgaccagagctacccttactttgtcattcagtatgaggaggtgagtaatacttag

SEQ ID NO: 71132 - DNA, 1974 bp, Artificial Sequence
  derived and/or modified sequence
atggagatggaaaccaccgagccagagccggattgtgtcgtccagccacccagcccacctgacgacttttcctgccaaatgaggttgtccgagaaaataacgccactcaagacatgtttcaaaaagaaagatcagaaaaggttggggactgggaccctgcgctccctgcgtcctatcctgaacacactgctggaatcaggatccctggacggggtgttccggagcaggaaccagtcaacagacgagaatagtctgcacgaaccaatgatgaagaaggccatggaaattaacagttcttgccctccagctgaaaataacatgagtgttctgatacctgatcgtaccaacgtgggtgaccagatccctgaggctcatcctagtactgaagctccagaaagagtcgtgccaatccaagatcactccttccccagcgaaacactgtcaggcaccgtcgccgacagtacaccggctcatttccagaccgatctgcttcaccccgtttcttccgacgtacctacatctcccgactgcttagacaaagtgattgattatgtgcccggaatttttcaagagaactcctttactatccagtacatcctggatacaagcgacaaattatccacagaactgttccaagacaaaagtgaggaagcgtctctggacttagtgttcgaactcgtaaaccagctccagtatcacacccatcaggagaatggaatcgaaatctgtatggatttcctgcagggaacttgcatttatgggcgtgactgtttaaagcaccacaccgtgcttccatatcactggcagatcaagcgcaccacaacacagaaatggcaaagtgtcttcaacgattctcaggagcatttagagcggttctactgcaaccctgagaatgatcgcatgcgtatgaaatacggcggacaggagttctgggctgatctgaatgccatgaacgtgtacgagaccacagagttcgaccaattgcgtcggctctctacacctccctctagtaacgtaaattctatttaccatacagtgtggaagttcttctgccgggaccacttcggctggcgcgagtaccctgaaagtgtgatacgcctgatagaagaagccaatagcaggggtctgaaggaggtgaggtttatgatgtggaacaatcattatatcctgcacaactctttctttcgcagagaaattaagcggagacccctgtttcgaagctgcttcatactgttaccttatttgcagaccctgggcggtgttcccacgcaggctccaccgcctctggaagcaacgtcttccagccagataatctgtcccgacggcgtaacatcggcgaatttttatccggagacttgggtgtacatgcatccttcccaggacttcatccaggttccagtgtcagccgaagataagtcttataggatcatatataacctcttccataagactgtgcccgaatttaaataccggattttgcaaatactgcgggttcaaaatcagtttctgtgggaaaaatataagagaaagaaggaatatatgaacagaaagatgttcggaagagaccgaatcatcaatgagcggcacttattccacggtacatcccaggatgtggtcgacggtatttgcaaacataacttcgatccgagagtgtgtggcaagcacgctacgatgtttggccagggctcctacttcgccaagaaggcttcatatagccacaacttctcaaaaaaatcaagcaagggggtacatttcatgttcctggctaaagtactcactggtagatatacaatgggcagccatggaatgcgcaggccgcctcccgtgaacccaggcagtgtgacaagtgacctgtatgatagctgcgtggacaacttctttgaaccacagattttcgtgatatttaacgatgaccagagttacccgtatttcgtgatccagtacgaggaggtatctaacacagtgagcatttag

SEQ ID NO: 71133 - DNA, 1974 bp, Artificial Sequence
  derived and/or modified sequence
atggaaatggagacaaccgagcccgagcccgactgtgtagtgcagcctccaagcccccctgatgacttctcctgccagatgagactgagcgagaagatcacacctttgaagacttgctttaaaaagaaagatcagaaacgactgggcacaggaacactccgttccctcaggcccatactgaatacacttcttgagagtgggtctctggacggcgtcttcagatcccggaatcagtcaacagacgagaacagtcttcacgaacccatgatgaagaaagccatggagattaacagtagctgtccacctgccgaaaataacatgtccgtacttattcccgaccgcactaatgtaggagaccagatacctgaggcccacccctcgactgaagctccagagcgcgtagtgcccatccaggatcactcatttccctcagaaacactgagcggcacagtcgctgactcaacccccgctcattttcaaacagatctgctgcaccctgtaagcagcgacgttccaaccagtcctgattgtctcgacaaagtgatcgactatgttcccggtatatttcaagagaactccttcactattcaatatatcctggacaccagtgataagctctccacagaactattccaggacaagtccgaagaggcctccctggacctcgtgttcgaactcgtaaaccagctgcagtatcacacgcatcaggagaacggcattgagatctgtatggacttcctgcaggggacctgtatatacgggagggactgtctcaagcatcacacggtcctgccataccactggcagatcaagcgaactacaacacagaagtggcagtcggtgtttaacgattcacaggaacacctggagagattttactgcaaccctgagaacgatcggatgagaatgaaatatggcggacaggaattttgggcagacctaaatgccatgaatgtgtacgaaacaactgagttcgaccagctacgcaggctgtccacaccacctagtagcaacgtcaattctatctaccatactgtgtggaaattcttttgtcgggaccacttcggatggagagagtatcccgagtccgttatccgcctcatcgaggaagccaattctcggggtctcaaggaggtcagatttatgatgtggaacaatcattacatcctgcataactccttttttcgcagagaaatcaaacgcaggcctttgtttaggagctgtttcattttactgccttacctgcagacccttggaggagtgcccacacaggcccctcctcccctcgaagcgacgagcagctcccagatcatatgtcccgacggagtcacatctgcaaacttttacccggagacatgggtctacatgcatccgtcccaagacttcatccaagtgccagtgtccgcagaagacaaatcgtatcgaattatctataatttgtttcataaaacagtgccagaattcaaatacagaattttacaaatcctgagggtacaaaatcaattcctgtgggagaaatataaaaggaagaaggaatacatgaataggaagatgtttggacgggatagaatcattaatgaacggcatctgttccatggaaccagtcaggacgtggtggatggaatctgcaaacataatttcgacccacgggtatgtgggaaacatgcaacaatgttcggacagggatcgtattttgccaaaaaggcttcttattctcataactttagcaagaaatccagtaagggagtgcactttatgtttcttgctaaagtcctgacgggcagatatacaatgggtagccacggaatgcgcaggcctcctccagttaatcccggtagcgtcacctctgatctgtatgatagttgtgtggacaatttttttgaaccacagatattcgttatttttaatgatgaccagtcttatccctatttcgtgatccagtacgaggaggtttctaatacagttagtatctag

SEQ ID NO: 71134 - DNA, 4109 bp, Artificial Sequence
  derived and/or modified sequence
agacgcggaccctcagggacactgcggacgcgagaaaggacacgccccctcgcgggagcataagtccaccgcacagaactcgcgcgcctcccctcgaacgaacgcgcacgcgcgcgcagggggcgggtcttcttcccgacacccactgagcgcccggcctcctcaccccaccccaccgaactccggccgcccaggctccgcctccgcgacgggccgtcgggaggaggcgaccggaagccacttaaagcagagatcgaggtgacaggcgagctggctggactcggagcgcggtcgaggctttctgcgttcgcggcggcggaatggcccgtgcgcggctcgccgcgtcgcggctctgtggtccctagacgtcggctcccgccctcggcgctgatctccggcgcgggcactgctttccactcggctcctgtcgtccgttctctcaggctcccgttcaggatttttagactctgaggagcagttggagctaatccacattatggaaatggaaaccaccgaacctgagccagactgtgtagtgcagcctccctctcctcctgatgacttttcatgccaaatgagactctctgagaagatcactccattgaagacttgttttaagaaaaaggatcagaaaagattgggaactggaaccctgaggtctttgaggccaatattaaacactcttctagaatctggctcacttgatggggtttttagatctaggaaccagagtacagatgagaacagcttacatgaacctatgatgaagaaagccatggaaatcaattcatcatgcccaccagcagaaaataatatgtctgttctgattcctgataggacaaatgttggggaccagataccggaagcccatccttccactgaagctccagaacgagtggttccaatccaagatcacagctttccatcagaaaccctcagtgggacggtggcagattccacaccagctcacttccagactgatcttttgcacccagtttcaagtgatgttcctactagtcctgactgcttagacaaagtcatagattatgttccaggcattttccaagaaaacagttttacaatccaatacattctggacaccagtgataagctgagtactgagctctttcaggacaaaagtgaagaggcttcccttgacctcgtgtttgagctggtgaaccagttgcagtaccacactcaccaagagaacggaattgaaatttgcatggactttctgcaaggcacttgtatttatggcagggattgtttgaagcaccacactgtcttgccatatcattggcagatcaaaaggacaactactcaaaagtggcagagtgtattcaatgattctcaggagcacttggaaagattttactgtaacccagaaaatgatagaatgagaatgaagtatggaggacaagaattttgggcagatttgaatgccatgaacgtgtatgaaacaactgaatttgaccaactacgaaggctgtccacaccaccctctagcaatgtcaactctatttaccacacagtctggaaattcttctgtagggaccactttggatggagagagtatcccgagtctgtcattcgattgattgaagaagccaactctcggggtctgaaagaggttcgatttatgatgtggaataaccactacatcctccacaattcattcttcaggagagagataaaaaggagacccctcttccgctcctgttttatactgcttccatatttacagacacttggtggggttcccacacaagctcctccacctcttgaagcaacttcatcatcacaaattatctgcccagatggggtcacttcagcaaacttttaccctgaaacttgggtttatatgcatccatctcaggacttcatccaagtccctgtttctgcagaggataaaagttatcggatcatttacaatctttttcataagactgtgcctgagtttaaatacagaattttgcagatattgagagtccaaaaccagtttctttgggagaaatataaaaggaaaaaggaatatatgaacaggaaaatgtttggccgtgacaggataataaatgagagacatttatttcatggaacatcccaggatgtggtagatggaatctgcaaacacaactttgaccctcgagtctgtggaaagcatgctacaatgtttggacaaggcagttattttgcaaagaaggcaagctactctcataacttttctaagaagtcctccaaaggagtccacttcatgtttctggccaaagtgctgacgggcagatacacaatgggcagtcatggcatgagaaggcccccgccagtcaatcctggcagtgtcaccagtgacctttatgactcttgtgtggataatttctttgagcctcagatttttgtcatttttaatgatgaccagagttacccttattttgttatccaatatgaagaagtcagtaacactgtttccatttgaaaaatcttggtactgctaaattatttgatatgaactcaatccagcatttgtagcaggttttgaatgggtgggactgggtggggaacagcattggacattaatagggcacttttcagacccattttttaaagtgctagaaaatgctttttttaaaaaaaaaatacaagttttaaaatgaccacttactctttaattatttactaattgctagtgtactcagtgtggaaaagactacagattacacactcttttcattcacacttgtacatatagacagcaatgttattaggagcattaaattaaaaaactgaacagcctaatttaaatgtggcttgggcctggtagaagtttgaccaaatggaatggaggctgtgagcaatgtgaggattctatttatttatttacgtttgataaaacttactggaactagtactaccatgcgtattccctgtccaaagcatcactgctttggtatagtataagttcatgaaattctggtgggtagaaagaaatttttatttctatcagcagtactaaaatgtatcagccaaccagagaacatcagtgactttaacttctgcagagtttgccccagaattcagagttctatttagaggaagttaaaacaacaacaaaaaacaaccatttgaaaaatttttgtcaccagcaaaacttttcactaattagtgatatgaaatgtgatttttgtgttgttaaacttcagctttggaaaactcagtctctttcattatcatccattccaatttgaaggagttgggcagctaatttggttaaaggcagtcttgagggttagaagtattacttccttttcgggttccagacctagcttgtgactgaaagttttagaaaaaggaagtacatctatagccaaattgataaggttattactgtgttttgcacaaagtatattagcaaaagtatttgctggaattattggtagatggcagtcccactcctacacctgctttgtcagatacagctgggttccctggctgactctgtaccttacttacactacttacttaatagaaacacaaacttggaaattgtgccagtggtccagctggagcacaacgtttggtgaatatgctgtttcctcagttcagagaggtagcaactaggtaaactccttataaaaagcaaatacctggatttacaaaagtgaaagtagttgttcacaaaagaattcgccatggaattctttcagttaccaagctctcctggtaatgtttgtggttatatcatttacacaaaacttttcaggaacttctgtgttgtttaagcaagatgtatctgtactgatgtctcagtgaatcagtctgtttattaagcacttatcagggcttccacacacttatttattttgccctagttaatcctgttgtttgctgccattggcatgaaatggccaactgtggctgttacagttctttcattcaattataacttgtaaaccagtgactcctaatctttttcaagttaagacaccttaccattgcttatttggttttatgagacttgttcctttttttctccctaaggaaaaagaaagctttatgacatatttatttttttaataaaactaagcaaaaataaaacttatggtaattctttaaaa

SEQ ID NO: 71135 - DNA, 4181 bp, Artificial Sequence
  derived and/or modified sequence
agtgcgagcgccggcctcgcggctccggccccggccccggccccgcgccggcagtgtgcggggctctcgcggatcggggtgattgattttgagactgccctttgtaccgaattcactcgggtcccgtcagcatgaagatggaattggtttacacttcttaggcacttagagcctgtggcaggtgtatacatcagaccgaggcgccgaaggatttagttggggtcgcaggcgcctgccccttccccgttcgtcagggtgggggcgcgtctatgcggcctcccccgcgggccgaccccgggtgctctgaggcgcctaggagcccttcccagaccccgggggggagggcacggcagctacgggagccttccggctaccccgcgtttcgggctgcagcccagaagtttggaagatgttttcacattaactttgagagcgcacaagtcttcgtcttcctccccgccgccgcgggaagcgctcgccgcctttcccccgcgcttcgcggctcagttctgcgagcccccaagacccgttggacgctcctcgggaggatttttagactctgaggagcagttggagctaatccacattatggaaatggaaaccaccgaacctgagccagactgtgtagtgcagcctccctctcctcctgatgacttttcatgccaaatgagactctctgagaagatcactccattgaagacttgttttaagaaaaaggatcagaaaagattgggaactggaaccctgaggtctttgaggccaatattaaacactcttctagaatctggctcacttgatggggtttttagatctaggaaccagagtacagatgagaacagcttacatgaacctatgatgaagaaagccatggaaatcaattcatcatgcccaccagcagaaaataatatgtctgttctgattcctgataggacaaatgttggggaccagataccggaagcccatccttccactgaagctccagaacgagtggttccaatccaagatcacagctttccatcagaaaccctcagtgggacggtggcagattccacaccagctcacttccagactgatcttttgcacccagtttcaagtgatgttcctactagtcctgactgcttagacaaagtcatagattatgttccaggcattttccaagaaaacagttttacaatccaatacattctggacaccagtgataagctgagtactgagctctttcaggacaaaagtgaagaggcttcccttgacctcgtgtttgagctggtgaaccagttgcagtaccacactcaccaagagaacggaattgaaatttgcatggactttctgcaaggcacttgtatttatggcagggattgtttgaagcaccacactgtcttgccatatcattggcagatcaaaaggacaactactcaaaagtggcagagtgtattcaatgattctcaggagcacttggaaagattttactgtaacccagaaaatgatagaatgagaatgaagtatggaggacaagaattttgggcagatttgaatgccatgaacgtgtatgaaacaactgaatttgaccaactacgaaggctgtccacaccaccctctagcaatgtcaactctatttaccacacagtctggaaattcttctgtagggaccactttggatggagagagtatcccgagtctgtcattcgattgattgaagaagccaactctcggggtctgaaagaggttcgatttatgatgtggaataaccactacatcctccacaattcattcttcaggagagagataaaaaggagacccctcttccgctcctgttttatactgcttccatatttacagacacttggtggggttcccacacaagctcctccacctcttgaagcaacttcatcatcacaaattatctgcccagatggggtcacttcagcaaacttttaccctgaaacttgggtttatatgcatccatctcaggacttcatccaagtccctgtttctgcagaggataaaagttatcggatcatttacaatctttttcataagactgtgcctgagtttaaatacagaattttgcagatattgagagtccaaaaccagtttctttgggagaaatataaaaggaaaaaggaatatatgaacaggaaaatgtttggccgtgacaggataataaatgagagacatttatttcatggaacatcccaggatgtggtagatggaatctgcaaacacaactttgaccctcgagtctgtggaaagcatgctacaatgtttggacaaggcagttattttgcaaagaaggcaagctactctcataacttttctaagaagtcctccaaaggagtccacttcatgtttctggccaaagtgctgacgggcagatacacaatgggcagtcatggcatgagaaggcccccgccagtcaatcctggcagtgtcaccagtgacctttatgactcttgtgtggataatttctttgagcctcagatttttgtcatttttaatgatgaccagagttacccttattttgttatccaatatgaagaagtcagtaacactgtttccatttgaaaaatcttggtactgctaaattatttgatatgaactcaatccagcatttgtagcaggttttgaatgggtgggactgggtggggaacagcattggacattaatagggcacttttcagacccattttttaaagtgctagaaaatgctttttttaaaaaaaaaatacaagttttaaaatgaccacttactctttaattatttactaattgctagtgtactcagtgtggaaaagactacagattacacactcttttcattcacacttgtacatatagacagcaatgttattaggagcattaaattaaaaaactgaacagcctaatttaaatgtggcttgggcctggtagaagtttgaccaaatggaatggaggctgtgagcaatgtgaggattctatttatttatttacgtttgataaaacttactggaactagtactaccatgcgtattccctgtccaaagcatcactgctttggtatagtataagttcatgaaattctggtgggtagaaagaaatttttatttctatcagcagtactaaaatgtatcagccaaccagagaacatcagtgactttaacttctgcagagtttgccccagaattcagagttctatttagaggaagttaaaacaacaacaaaaaacaaccatttgaaaaatttttgtcaccagcaaaacttttcactaattagtgatatgaaatgtgatttttgtgttgttaaacttcagctttggaaaactcagtctctttcattatcatccattccaatttgaaggagttgggcagctaatttggttaaaggcagtcttgagggttagaagtattacttccttttcgggttccagacctagcttgtgactgaaagttttagaaaaaggaagtacatctatagccaaattgataaggttattactgtgttttgcacaaagtatattagcaaaagtatttgctggaattattggtagatggcagtcccactcctacacctgctttgtcagatacagctgggttccctggctgactctgtaccttacttacactacttacttaatagaaacacaaacttggaaattgtgccagtggtccagctggagcacaacgtttggtgaatatgctgtttcctcagttcagagaggtagcaactaggtaaactccttataaaaagcaaatacctggatttacaaaagtgaaagtagttgttcacaaaagaattcgccatggaattctttcagttaccaagctctcctggtaatgtttgtggttatatcatttacacaaaacttttcaggaacttctgtgttgtttaagcaagatgtatctgtactgatgtctcagtgaatcagtctgtttattaagcacttatcagggcttccacacacttatttattttgccctagttaatcctgttgtttgctgccattggcatgaaatggccaactgtggctgttacagttctttcattcaattataacttgtaaaccagtgactcctaatctttttcaagttaagacaccttaccattgcttatttggttttatgagacttgttcctttttttctccctaaggaaaaagaaagctttatgacatatttatttttttaataaaactaagcaaaaataaaa

SEQ ID NO: 71136 - DNA, 1770 bp, Artificial Sequence
  derived and/or modified sequence
agagccgggcggcgcctcagctgcactgcgcggagttggcgcggcccgggaccaggagctgagcaaaccgccgcggccaacaggaggcgtcactcggacccgggctcggcgccggggtgtcgcgcggcggcgggcgggcaggctttggagcggcagttttttcggaaagtgcttttggccgggagtgccgcagaaccccagcgtcacgaggatttttagactctgaggagcagttggagctaatccacattatggaaatggaaaccaccgaacctgagccagactgtgtagtgcagcctccctctcctcctgatgacttttcatgccaaatgagactctctgagaagatcactccattgaagacttgttttaagaaaaaggatcagaaaagattgggaactggaaccctgaggtctttgaggccaatattaaacactcttctagaatctggctcacttgatggggtttttagatctaggaaccagagtacagatgagaacagcttacatgaacctatgatgaagaaagccatggaaatcaattcatcatgcccaccagcagaaaataatatgtctgttctgattcctgataggacaaatgttggggaccagataccggaagcccatccttccactgaagctccagaacgagtggttccaatccaagatcacagctttccatcagaaaccctcagtgggacggtggcagattccacaccagctcacttccagactgatcttttgcacccagtttcaagtgatgttcctactagtcctgactgcttagacaaagtcatagattatgttccaggcattttccaagaaaacagttttacaatccaatacattctggacaccagtgataagctgagtactgagctctttcaggacaaaagtgaagaggcttcccttgacctcgtgtttgagctggtgaaccagttgcagtaccacactcaccaagagaacggaattgaaatttgcatggactttctgcaaggcacttgtatttatggcagggattgtttgaagcaccacactgtcttgccatatcattggcagatcaaaaggacaactactcaaaagtggcagagtgtattcaatgattctcaggagcacttggaaagattttactgtaacccagaaaatgatagaatgagaatgaagtatggaggacaagaattttgggcagatttgaatgccatgaacgtgtatgaaacaactgaatttgaccaactacgaaggctgtccacaccaccctctagcaatgtcaactctatttaccacacagtctggaaattcttctgtagggaccactttggatggagagagtatcccgagtctgtcattcgattgattgaagaagccaactctcggggtctgaaagaggttcgatttatgatgtggaataaccactacatcctccacaattcattcttcaggagagagataaaaaggagacccctcttccgctcctgttttatactgcttccatatttacagacacttggtggggttcccacacaagctcctccacctcttgaagcaacttcatcatcacaaattatctgcccagatggggtcacttcagcaaacttttaccctgaaacttgggtttatatgcatccatctcaggacttcatccaagtccctgtttctgcagaggataaaagttatcggatcatttacaatctttttcataagactgtgcctgagtttaaatacagaattttgcagatattgagagtccaaaaccagtttctttgggagaaat

SEQ ID NO: 71137 - DNA, 2035 bp, Artificial Sequence
  derived and/or modified sequence
caccattcctttctcacctggcacaatctcagatttttagactctgaggagcagttggagctaatccacattatggaaatggaaaccaccgaacctgagccagactgtgtagtgcagcctccctctcctcctgatgacttttcatgccaaatgagactctctgagaagatcactccattgaagacttgttttaagaaaaaggatcagaaaagattgggaactggaaccctgaggtctttgaggccaatattaaacactcttctagaatctggctcacttgatggggtttttagatctaggaaccagagtacagatgagaacagcttacatgaacctatgatgaagaaagccatggaaatcaattcatcatgcccaccagcagaaaataatatgtctgttctgattcctgataggacaaatgttggggaccagataccggaagcccatccttccactgaagctccagaacgagtggttccaatccaagatcacagctttccatcagaaaccctcagtgggacggtggcagattccacaccagctcacttccagactgatcttttgcacccagtttcaagtgatgttcctactagtcctgactgcttagacaaagtcatagattatgttccaggcattttccaagaaaacagttttacaatccaatacattctggacaccagtgataagctgagtactgagctctttcaggacaaaagtgaagaggcttcccttgacctcgtgtttgagctggtgaaccagttgcagtaccacactcaccaagagaacggaattgaaatttgcatggactttctgcaaggcacttgtatttatggcagggattgtttgaagcaccacactgtcttgccatatcattggcagatcaaaaggacaactactcaaaagtggcagagtgtattcaatgattctcaggagcacttggaaagattttactgtaacccagaaaatgatagaatgagaatgaagtatggaggacaagaattttgggcagatttgaatgccatgaacgtgtatgaaacaactgaatttgaccaactacgaaggctgtccacaccaccctctagcaatgtcaactctatttaccacacagtctggaaattcttctgtagggaccactttggatggagagagtatcccgagtctgtcattcgattgattgaagaagccaactctcggggtctgaaagaggttcgatttatgatgtggaataaccactacatcctccacaattcattcttcaggagagagataaaaaggagacccctcttccgctcctgttttatactgcttccatatttacagacacttggtggggttcccacacaagctcctccacctcttgaagcaacttcatcatcacaaattatctgcccagatggggtcacttcagcaaacttttaccctgaaacttgggtttatatgcatccatctcaggacttcatccaagtccctgtttctgcagaggataaaagttatcggatcatttacaatctttttcataagactgtgcctgagtttaaatacagaattttgcagatattgagagtccaaaaccagtttctttgggagaaatataaaaggaaaaaggaatatatgaacaggaaaatgtttggccgtgacaggataataaatgagagacatttatttcatggaacatcccaggatgtggtagatggaatctgcaaacacaactttgaccctcgagtctgtggaaagcatgctacaatgtttggacaaggcagttattttgcaaagaaggcaagctactctcataacttttctaagaagtcctccaaaggagtccacttcatgtttctggccaaagtgctgacgggcagatacacaatgggcagtcatggcatgagaaggcccccgccagtcaatcctggcagtgtcaccagtgacctttatgactcttgtgtggataatttctttgagcctcagatttttgtcatttttaatgatgaccagagttacccttattttgttatccaatatgaagaagtcagtaacactg

SEQ ID NO: 71138 - DNA, 2150 bp, Artificial Sequence
  derived and/or modified sequence
aaaagcataaagaatgtataacaacctaattgttacaagggagtggaattaataatctacaagaaggcacaaaaggacagaaaagaaacagaacaaatgagaaaaatagaaagccaacagtaatatggatttttagactctgaggagcagttggagctaatccacattatggaaatggaaaccaccgaacctgagccagactgtgtagtgcagcctccctctcctcctgatgacttttcatgccaaatgagactctctgagaagatcactccattgaagacttgttttaagaaaaaggatcagaaaagattgggaactggaaccctgaggtctttgaggccaatattaaacactcttctagaatctggctcacttgatggggtttttagatctaggaaccagagtacagatgagaacagcttacatgaacctatgatgaagaaagccatggaaatcaattcatcatgcccaccagcagaaaataatatgtctgttctgattcctgataggacaaatgttggggaccagataccggaagcccatccttccactgaagctccagaacgagtggttccaatccaagatcacagctttccatcagaaaccctcagtgggacggtggcagattccacaccagctcacttccagactgatcttttgcacccagtttcaagtgatgttcctactagtcctgactgcttagacaaagtcatagattatgttccaggcattttccaagaaaacagttttacaatccaatacattctggacaccagtgataagctgagtactgagctctttcaggacaaaagtgaagaggcttcccttgacctcgtgtttgagctggtgaaccagttgcagtaccacactcaccaagagaacggaattgaaatttgcatggactttctgcaaggcacttgtatttatggcagggattgtttgaagcaccacactgtcttgccatatcattggcagatcaaaaggacaactactcaaaagtggcagagtgtattcaatgattctcaggagcacttggaaagattttactgtaacccagaaaatgatagaatgagaatgaagtatggaggacaagaattttgggcagatttgaatgccatgaacgtgtatgaaacaactgaatttgaccaactacgaaggctgtccacaccaccctctagcaatgtcaactctatttaccacacagtctggaaattcttctgtagggaccactttggatggagagagtatcccgagtctgtcattcgattgattgaagaagccaactctcggggtctgaaagaggttcgatttatgatgtggaataaccactacatcctccacaattcattcttcaggagagagataaaaaggagacccctcttccgctcctgttttatactgcttccatatttacagacacttggtggggttcccacacaagctcctccacctcttgaagcaacttcatcatcacaaattatctgcccagatggggtcacttcagcaaacttttaccctgaaacttgggtttatatgcatccatctcaggacttcatccaagtccctgtttctgcagaggataaaagttatcggatcatttacaatctttttcataagactgtgcctgagtttaaatacagaattttgcagatattgagagtccaaaaccagtttctttgggagaaatataaaaggaaaaaggaatatatgaacaggaaaatgtttggccgtgacaggataataaatgagagacatttatttcatggaacatcccaggatgtggtagatggaatctgcaaacacaactttgaccctcgagtctgtggaaagcatgctacaatgtttggacaaggcagttattttgcaaagaaggcaagctactctcataacttttctaagaagtcctccaaaggagtccacttcatgtttctggccaaagtgctgacgggcagatacacaatgggcagtcatggcatgagaaggcccccgccagtcaatcctggcagtgtcaccagtgacctttatgactcttgtgtggataatttctttgagcctcagatttttgtcatttttaatgatgaccagagttacccttattttgttatccaatatgaagaagtcagtaacactgtttccatttgaaaaatctt

SEQ ID NO: 71139 - DNA, 3681 bp, Artificial Sequence
  derived and/or modified sequence
caccattcctttctcacctggcacaatctcagatttttagactctgaggagcagttggagctaatccacattatggaaatggaaaccaccgaacctgagccagactgtgtagtgcagcctccctctcctcctgatgacttttcatgccaaatgagactctctgagaagatcactccattgaagacttgttttaagaaaaaggatcagaaaagattgggaactggaaccctgaggtctttgaggccaatattaaacactcttctagaatctggctcacttgatggggtttttagatctaggaaccagagtacagatgagaacagcttacatgaacctatgatgaagaaagccatggaaatcaattcatcatgcccaccagcagaaaataatatgtctgttctgattcctgataggacaaatgttggggaccagataccggaagcccatccttccactgaagctccagaacgagtggttccaatccaagatcacagctttccatcagaaaccctcagtgggacggtggcagattccacaccagctcacttccagactgatcttttgcacccagtttcaagtgatgttcctactagtcctgactgcttagacaaagtcatagattatgttccaggcattttccaagaaaacagttttacaatccaatacattctggacaccagtgataagctgagtactgagctctttcaggacaaaagtgaagaggcttcccttgacctcgtgtttgagctggtgaaccagttgcagtaccacactcaccaagagaacggaattgaaatttgcatggactttctgcaaggcacttgtatttatggcagggattgtttgaagcaccacactgtcttgccatatcattggcagatcaaaaggacaactactcaaaagtggcagagtgtattcaatgattctcaggagcacttggaaagattttactgtaacccagaaaatgatagaatgagaatgaagtatggaggacaagaattttgggcagatttgaatgccatgaacgtgtatgaaacaactgaatttgaccaactacgaaggctgtccacaccaccctctagcaatgtcaactctatttaccacacagtctggaaattcttctgtagggaccactttggatggagagagtatcccgagtctgtcattcgattgattgaagaagccaactctcggggtctgaaagaggttcgatttatgatgtggaataaccactacatcctccacaattcattcttcaggagagagataaaaaggagacccctcttccgctcctgttttatactgcttccatatttacagacacttggtggggttcccacacaagctcctccacctcttgaagcaacttcatcatcacaaattatctgcccagatggggtcacttcagcaaacttttaccctgaaacttgggtttatatgcatccatctcaggacttcatccaagtccctgtttctgcagaggataaaagttatcggatcatttacaatctttttcataagactgtgcctgagtttaaatacagaattttgcagatattgagagtccaaaaccagtttctttgggagaaatataaaaggaaaaaggaatatatgaacaggaaaatgtttggccgtgacaggataataaatgagagacatttatttcatggaacatcccaggatgtggtagatggaatctgcaaacacaactttgaccctcgagtctgtggaaagcatgctacaatgtttggacaaggcagttattttgcaaagaaggcaagctactctcataacttttctaagaagtcctccaaaggagtccacttcatgtttctggccaaagtgctgacgggcagatacacaatgggcagtcatggcatgagaaggcccccgccagtcaatcctggcagtgtcaccagtgacctttatgactcttgtgtggataatttctttgagcctcagatttttgtcatttttaatgatgaccagagttacccttattttgttatccaatatgaagaagtcagtaacactgtttccatttgaaaaatcttggtactgctaaattatttgatatgaactcaatccagcatttgtagcaggttttgaatgggtgggactgggtggggaacagcattggacattaatagggcacttttcagacccattttttaaagtgctagaaaatgctttttttaaaaaaaaaatacaagttttaaaatgaccacttactctttaattatttactaattgctagtgtactcagtgtggaaaagactacagattacacactcttttcattcacacttgtacatatagacagcaatgttattaggagcattaaattaaaaaactgaacagcctaatttaaatgtggcttgggcctggtagaagtttgaccaaatggaatggaggctgtgagcaatgtgaggattctatttatttatttacgtttgataaaacttactggaactagtactaccatgcgtattccctgtccaaagcatcactgctttggtatagtataagttcatgaaattctggtgggtagaaagaaatttttatttctatcagcagtactaaaatgtatcagccaaccagagaacatcagtgactttaacttctgcagagtttgccccagaattcagagttctatttagaggaagttaaaacaacaacaaaaaacaaccatttgaaaaatttttgtcaccagcaaaacttttcactaattagtgatatgaaatgtgatttttgtgttgttaaacttcagctttggaaaactcagtctctttcattatcatccattccaatttgaaggagttgggcagctaatttggttaaaggcagtcttgagggttagaagtattacttccttttcgggttccagacctagcttgtgactgaaagttttagaaaaaggaagtacatctatagccaaattgataaggttattactgtgttttgcacaaagtatattagcaaaagtatttgctggaattattggtagatggcagtcccactcctacacctgctttgtcagatacagctgggttccctggctgactctgtaccttacttacactacttacttaatagaaacacaaacttggaaattgtgccagtggtccagctggagcacaacgtttggtgaatatgctgtttcctcagttcagagaggtagcaactaggtaaactccttataaaaagcaaatacctggatttacaaaagtgaaagtagttgttcacaaaagaattcgccatggaattctttcagttaccaagctctcctggtaatgtttgtggttatatcatttacacaaaacttttcaggaacttctgtgttgtttaagcaagatgtatctgtactgatgtctcagtgaatcagtctgtttattaagcacttatcagggcttccacacacttatttattttgccctagttaatcctgttgtttgctgccattggcatgaaatggccaactgtggctgttacagttctttcattcaattataacttgtaaaccagtgactcctaatctttttcaagttaagacaccttaccattgcttatttggttttatgagacttgttcctttttttctccctaaggaaaaagaaagctttatgacatatttatttttttaataaaactaagcaaaaataaaacttatggtaattcttt

SEQ ID NO: 71140 - protein, 333 aa, Artificial Sequence
  derived and/or modified sequence
MTDQAFVTLTTNDAYAKGALVLGSSLKQHRTTRRLVVLATPQVSDSMRKVLETVFDEVIMVDVLDSGDSAHLTLMKRPELGVTLTKLHCWSLTQYSKCVFMDADTLVLANIDDLFDREELSAAPDPGWPDCFNSGVFVYQPSVETYNQLLHLASEQGSFDGGDQGILNTFFSSWATTDIRKHLPFIYNLSSISIYSYLPAFKVFGASAKVVHFLGRVKPWNYTYDPKTKSVKSEAHDPNMTHPEFLILWWNIFTTNVLPLLQQFGLVKDTCSYVNVEDVSGAISHLSLGEIPAMAQPFVSSEERKERWEQGQADYMGADSFDNIKRKLDTYLQ

SEQ ID NO: 71141 - DNA, 1002 bp, Artificial Sequence
  derived and/or modified sequence
atgactgatcaggcctttgttaccctgacaacaaatgatgcatacgcaaaaggagctctcgtacttggctcctctctgaagcagcatcggacaaccagacggcttgttgtgctggccacgcctcaggtgagtgacagcatgcgtaaggtgttggaaaccgtgttcgatgaggtgattatggtcgacgtcctagactccggtgatagtgcccaccttacacttatgaaacgacccgagctgggagtgactttgaccaaactgcactgttggagcctaacacagtattctaagtgtgtgttcatggatgcagacactttagttcttgcaaatattgacgatctgtttgaccgggaggagctgtctgcggcccccgatcccggttggcctgactgcttcaactcaggagtctttgtctaccaaccttctgtcgagacatataatcagcttctgcacctcgcctctgagcagggatcttttgacggtggagatcaggggatactcaacacttttttttccagctgggccaccacggatatccggaagcacttgccctttatatacaacctatcttccatctcaatttactcctacctccccgcctttaaggtctttggcgcaagtgctaaggtggtgcatttcctgggccgggtaaaaccttggaactatacctacgacccaaaaacgaaatccgtgaaaagtgaagctcatgatccaaacatgactcatccggagttcttaattctttggtggaacatcttcaccaccaatgtgctgccactccttcagcaatttgggctggttaaggatacgtgcagctatgtgaatgttgaagacgtctcaggagccatcagccatctgagtcttggagagatcccggccatggcgcagcctttcgtgtctagtgaggagaggaaagagcggtgggaacagggacaggccgattacatgggagcagattcctttgataatataaagcggaaactagacacctaccttcagtag

SEQ ID NO: 71142 - DNA, 1890 bp, Artificial Sequence
  derived and/or modified sequence
ccgcgcagctgggaggatgcggacggcagcgagagcgtgcgcggccacgtgacggccgctataagagcgcacggggcagacgctcggttccccgccgtgcctcctcgctggccgcgctccctcccggtgccggcttctctgagtcaccaacctgaggctgccccggccgcctgcgcacccggcagcaccatgacagatcaggcctttgtgacactaaccacaaacgatgcctacgccaaaggtgccctggtcctgggatcatctctgaaacagcacaggaccaccaggaggctggtcgtgctcgccacccctcaggtctcagactccatgagaaaagttttagagacagtctttgatgaagtcatcatggtagatgtcttggacagtggcgattctgctcatctaaccttaatgaagaggccagagttgggtgtcacgctgacaaagctccactgctggtcgcttacacagtattcaaaatgtgtattcatggatgcagatactctggtcctagcaaatattgatgatctttttgacagagaagaattgtcagcagcaccagacccagggtggcctgactgcttcaattccggagtcttcgtttatcagccttcagttgaaacatacaatcagctgttgcatcttgcttctgagcaaggtagttttgatggtggggaccaaggcatactgaacacattttttagcagctgggcaacaacagatatcagaaaacacctgccgtttatttataacctaagcagcatctctatatactcctacctcccggcatttaaagtgtttggtgcaagtgccaaagttgtgcatttcctgggacgagtcaaaccatggaattatacttatgatcccaaaacaaaaagtgtcaaaagtgaggcccatgatcccaacatgactcatccagagtttctcatcctgtggtggaacatctttaccaccaacgttttacctctgcttcaacaatttggccttgtcaaagacacctgctcatatgtaaatgtggaagatgtctcaggagccatatcacatctgtcccttggggagatcccagctatggcacagccgtttgtatcctcggaagaacggaaggaacgatgggaacagggccaggctgattatatgggagcagattcctttgacaacatcaagaggaaacttgacacttacctccagtagaaacactgcatttttctgtgaacacatccacttcacaagccttgtttctgatacttagtatctagagctgggttgagaaaagtctgttacagttgctagaggttttcattaaaacttatcagatgagaggcttttttaggataagaggtgagaactgggcaaaagttgtgaagcagcaattctgttatatggacagtgttctgctttttaatcctatttagcttgtttcagaaattctcacttttgttgactgccaacatacaaagtaagggaaactcaagatattaagatggctgtatcagttcttaaaatctgcagagcctggttcaaaatcagtcactcccttcagaagcagacatggcatctgttccttgcttgcttgttggttgtgtacctttcacgagacctgaattttagaattgcccagtgctgccagagtgagtgagtgtaattctcctttcaggtaaagataggctatctcaacactgctgagtgattcataaacatatcaaccaatagcattaacccattttatttcctgtccttagtgtctgaagatgctcaccagttttctgtgtacagtaaggcagcatgctaaaatgcttttgttcagttctgtatatttgaaaatagcagtgtgttctctgatggttacctgcagtggcaccctgtacaaaaaataaaagacttattgctgta

SEQ ID NO: 71143 - DNA, 1002 bp, Artificial Sequence
  derived and/or modified sequence
atgacagaccaggcctttgtgaccctgaccaccaatgatgcctatgccaagggggccctggtgctgggcagcagcctgaagcagcacaggaccacccggcggctggtggtgctggccaccccccaggtgtctgacagcatgaggaaggtgctggagaccgtgtttgatgaggtgatcatggtggatgtgctggacagcggggacagcgcccacctgaccctgatgaagaggcctgagctgggcgtgaccctgaccaagctgcactgctggagcctgacccagtacagcaaatgtgtgttcatggatgctgacaccctggtgctggccaacattgatgacctgtttgaccgggaggagctgtctgctgccccagaccccggctggccagactgcttcaacagcggcgtgtttgtgtaccagcccagcgtggagacctacaaccagctgctgcacctggccagcgagcagggcagctttgatggaggagaccagggcatcctgaacaccttcttcagctcctgggccaccacagacatcaggaagcacctgcccttcatctacaacctgagcagcatcagcatctacagctacctgcctgccttcaaggtgtttggagccagcgccaaggtggtgcacttcctgggccgggtgaagccctggaactacacctatgaccccaagaccaagtctgtgaagtctgaggcccatgaccccaacatgacccaccctgagttcctgatcctgtggtggaacatcttcaccaccaacgtgctgcccctgctgcagcagtttggcctggtgaaggacacctgcagctatgtgaatgtggaggatgtgtctggggccatcagccacctgagcctgggggagatcccagccatggcccagccctttgtgtcctctgaggagaggaaggagcgctgggagcagggccaggccgactacatgggcgctgacagctttgacaacatcaagaggaagctggacacctacctgcagtag

SEQ ID NO: 71144 - DNA, 1002 bp, Artificial Sequence
  derived and/or modified sequence
atgaccgaccaggccttcgtgaccctgaccaccaacgacgcctacgccaagggagccctcgtgctgggttcgtccctgaagcagcacagaacaactcgccgactagtggtactggctacccctcaggtttctgactccatgaggaaggtactggagacggttttcgacgaggtcataatggttgacgttttagattctggagactcagcccatcttaccctcatgaagagacccgaactcggcgtgacattgaccaaacttcattgctggtctctcacacagtacagtaagtgtgtcttcatggacgccgacactctggtgctggctaatattgatgatttgtttgaccgagaagaactgtccgccgccccagatcccggctggcccgattgtttcaattcgggagtgtttgtatatcagccaagcgtagagacctacaatcagctgctccacctggcatctgagcagggctccttcgacggaggggaccagggtatcctgaacacattcttcagctcatgggccacgactgatatcagaaaacacctgccgtttatctacaatttaagtagcatttcgatatattcctatctccccgcctttaaagtcttcggcgccagtgctaaagtggtacattttctcggcagagtgaagccttggaattacacatacgacccaaagactaaatccgtgaagtccgaagcacacgacccgaacatgactcaccctgagttcctgatcctgtggtggaacatcttcactactaacgtgttgcctctgctgcaacagttcgggctggtgaaggacacttgttcttatgttaacgtcgaggacgtgtctggcgccatttctcaccttagcctgggggagattcctgcaatggcccagccgttcgtttcatctgaggagcggaaagagcgctgggaacagggccaggctgattatatgggagctgactcatttgacaacataaaaaggaagctggacacttatttgcagtag

SEQ ID NO: 71145 - DNA, 1002 bp, Artificial Sequence
  derived and/or modified sequence
atgacagaccaagcttttgtcactttgaccacaaacgatgcctatgccaagggcgctctcgttctgggctcttccctcaagcagcaccgcacgacccgaagattggtggttctggcgacaccacaggtgagcgattcaatgcgcaaggtcctcgaaacagttttcgatgaggtaatcatggtcgacgtgctcgacagtggcgactctgcccacctgacacttatgaagcgcccagagctcggtgtgaccctcaccaagctgcactgctggtcgcttactcagtactctaaatgtgttttcatggatgccgacacccttgtgctcgccaatatagacgatttatttgaccgcgaagagctgtcagctgcgcctgatcctggatggccagactgctttaattccggcgtcttcgtgtatcaaccttcagtggagacttataatcagctcctgcatctagctagtgaacaagggagtttcgatggtggagaccagggcattttaaacactttcttctcatcctgggcaaccactgacatcagaaaacaccttccatttatctacaatctgtcctccataagcatttatagctatctgccagccttcaaggtgtttggggcatccgccaaagttgttcactttctcggcagggtgaaaccctggaactacacctacgatcccaagaccaaatcagtgaaatctgaggctcatgacccaaacatgacccatccggaatttctaatcctgtggtggaacatttttactacaaatgtcctccctcttttacagcagttcggccttgttaaggacacttgctcctatgttaacgttgaggacgtctcaggcgcaatctctcacctctctctcggtgagatccccgctatggcccagccatttgtgagtagtgaggaacggaaggagcggtgggaacagggtcaggcagactacatgggagctgacagctttgacaacatcaagcgcaagctggacacatatttgcagtag

SEQ ID NO: 71146 - DNA, 1002 bp, Artificial Sequence
  derived and/or modified sequence
atgaccgaccaggccttcgtgaccctgaccaccaacgacgcctacgccaagggcgccctggtgctgggcagcagcctgaagcagcacagaaccaccagaagactggtggtgctggccaccccccaggtgagcgacagcatgagaaaggtgctggagaccgtgttcgacgaggtgatcatggtggacgtgctggacagcggcgacagcgcccacctgaccctgatgaagagacccgagctgggcgtgaccctgaccaagctgcactgctggagcctgacccagtacagcaagtgcgtgttcatggacgccgacaccctggtgctggccaacatcgacgacctgttcgacagagaggagctgagcgccgcccccgaccccggctggcccgactgcttcaacagcggcgtgttcgtgtaccagcccagcgtggagacctacaaccagctgctgcacctggccagcgagcagggcagcttcgacggcggcgaccagggcatcctgaacaccttcttcagcagctgggccaccaccgacatcagaaagcacctgcccttcatctacaacctgagcagcatcagcatctacagctacctgcccgccttcaaggtgttcggcgccagcgccaaggtggtgcacttcctgggcagagtgaagccctggaactacacctacgaccccaagaccaagagcgtgaagagcgaggcccacgaccccaacatgacccaccccgagttcctgatcctgtggtggaacatcttcaccaccaacgtgctgcccctgctgcagcagttcggcctggtgaaggacacctgcagctacgtgaacgtggaggacgtgagcggcgccatcagccacctgagcctgggcgagatccccgccatggcccagcccttcgtgagcagcgaggagagaaaggagagatgggagcagggccaggccgactacatgggcgccgacagcttcgacaacatcaagagaaagctggacacctacctgcagtag

SEQ ID NO: 71147 - protein, 279 aa, Artificial Sequence
  derived and/or modified sequence
MTDQAFVTLTTNDAYAKGALVLGSSLKQHRTTRRLVVLATPQVSDSMRKVLETVFDEVIMVDVLDSGDSAHLTLMKRPELGVTLTKLHCWSLTQYSKCVFMDADTLVLANIDDLFDREELSAAPDPGWPDCFNSGVFVYQPSVETYNQLLHLASEQGSFDGGDQGILNTFFSSWATTDIRKHLPFIYNLSSISIYSYLPAFKVKMSQEPYHICPLGRSQLWHSRLYPRKNGRNDGNRARLIIWEQIPLTTSRGNLTLTSSRNTAFFCEHIHFTSLVSDT

SEQ ID NO: 71148 - DNA, 840 bp, Artificial Sequence
  derived and/or modified sequence
atgaccgatcaggcctttgtcaccctcactaccaatgacgcttatgccaagggcgccctcgtgctgggtagcagcttgaaacaacaccgcaccacgagaagactggtggtgctggcaactccacaggtttctgatagcatgagaaaagtacttgaaaccgtgtttgacgaggtcattatggttgatgtattggactccggggatagtgcgcacttgaccctgatgaagaggccggaactgggagtgacactcaccaagttacattgctggagcctgactcagtattctaagtgcgtattcatggatgctgacacgctggtgctggccaacatcgacgacttgtttgaccgggaagaactctccgcagcacccgacccgggctggcctgattgttttaacagtggggtcttcgtttaccaaccgagtgtcgaaacttataatcagctcttgcacctcgccagcgaacaggggagtttcgacggcggcgaccagggcatacttaatactttcttcagcagctgggccacaactgacatcagaaagcaccttccttttatttataacctgtcctcaattagcatttatagttacttgccagcttttaaagtgaagatgtcacaagagccatatcacatctgcccccttgggagaagccagctgtggcatagtcgtctctatcccaggaaaaatgggcggaacgacggcaatagggccaggctcatcatttgggaacagattcctctcacgacatctcgtggcaacctgaccctgaccagtagtaggaacaccgcgttcttttgcgaacacatccattttaccagtttggtcagcgacacatag

SEQ ID NO: 71149 - DNA, 1563 bp, Artificial Sequence
  derived and/or modified sequence
gctggccgcgctccctcccggtgccggcttctctgagtcaccaacctgaggctgccccggccgcctgcgcacccggcagcaccatgacagatcaggcctttgtgacactaaccacaaacgatgcctacgccaaaggtgccctggtcctgggatcatctctgaaacagcacaggaccaccaggaggctggtcgtgctcgccacccctcaggtctcagactccatgagaaaagttttagagacagtctttgatgaagtcatcatggtagatgtcttggacagtggcgattctgctcatctaaccttaatgaagaggccagagttgggtgtcacgctgacaaagctccactgctggtcgcttacacagtattcaaaatgtgtattcatggatgcagatactctggtcctagcaaatattgatgatctttttgacagagaagaattgtcagcagcaccagacccagggtggcctgactgcttcaattccggagtcttcgtttatcagccttcagttgaaacatacaatcagctgttgcatcttgcttctgagcaaggtagttttgatggtggggaccaaggcatactgaacacattttttagcagctgggcaacaacagatatcagaaaacacctgccgtttatttataacctaagcagcatctctatatactcctacctcccggcatttaaagtgaagatgtctcaggagccatatcacatctgtcccttggggagatcccagctatggcacagccgtttgtatcctcggaagaacggaaggaacgatgggaacagggccaggctgattatatgggagcagattcctttgacaacatcaagaggaaacttgacacttacctccagtagaaacactgcatttttctgtgaacacatccacttcacaagccttgtttctgatacttagtatctagagctgggttgagaaaagtctgttacagttgctagaggttttcattaaaacttatcagatgagaggcttttttaggataagaggtgagaactgggcaaaagttgtgaagcagcaattctgttatatggacagtgttctgctttttaatcctatttagcttgtttcagaaattctcacttttgttgactgccaacatacaaagtaagggaaactcaagatattaagatggctgtatcagttcttaaaatctgcagagcctggttcaaaatcagtcactcccttcagaagcagacatggcatctgttccttgcttgcttgttggttgtgtacctttcacgagacctgaattttagaattgcccagtgctgccagagtgagtgagtgtaattctcctttcaggtaaagataggctatctcaacactgctgagtgattcataaacatatcaaccaatagcattaacccattttatttcctgtccttagtgtctgaagatgctcaccagttttctgtgtacagtaaggcagcatgctaaaatgcttttgttcagttctgtatatttgaaaatagcagtgtgttctctgatggttacctgcagtggcaccctgtacaaaaaataaaagacttattgctgt

SEQ ID NO: 71150 - DNA, 840 bp, Artificial Sequence
  derived and/or modified sequence
atgacagaccaggcctttgtgaccctgaccaccaatgatgcctatgccaagggggccctggtgctgggcagcagcctgaagcagcacaggaccacccggcggctggtggtgctggccaccccccaggtgtctgacagcatgaggaaggtgctggagaccgtgtttgatgaggtgatcatggtggatgtgctggacagcggggacagcgcccacctgaccctgatgaagaggcctgagctgggcgtgaccctgaccaagctgcactgctggagcctgacccagtacagcaaatgtgtgttcatggatgctgacaccctggtgctggccaacattgatgacctgtttgaccgggaggagctgtctgctgccccagaccccggctggccagactgcttcaacagcggcgtgtttgtgtaccagcccagcgtggagacctacaaccagctgctgcacctggccagcgagcagggcagctttgatggaggagaccagggcatcctgaacaccttcttcagctcctgggccaccacagacatcaggaagcacctgcccttcatctacaacctgagcagcatcagcatctacagctacctgcctgccttcaaggtgaagatgagccaggagccctaccacatctgccccctgggccgcagccagctgtggcacagccggctgtaccccaggaagaatggaagaaatgatggcaacagagcccggctcatcatctgggagcagatccccctgaccaccagccggggcaacctgaccctgaccagcagcaggaacacagccttcttctgtgagcacatccacttcaccagcctggtgtctgacacctag

SEQ ID NO: 71151 - DNA, 840 bp, Artificial Sequence
  derived and/or modified sequence
atgaccgaccaggccttcgtgaccctgaccaccaacgacgcctacgccaaaggggctctggtgctcgggtcatctcttaagcaacacagaacgacacgaagactcgtcgtgctggccacaccccaggtaagcgatagtatgagaaaagtcctggagaccgtttttgacgaagtgatcatggtggatgtgctggacagcggggacagtgcccacctcactcttatgaagcgccccgaactgggggtcacactcactaaattgcactgttggagtcttacccagtattccaaatgtgtttttatggatgctgacacactcgtgttggcaaatattgatgatttgtttgacagagaggagctgagtgcagccccagaccctgggtggccagactgtttcaactctggagtgtttgtctaccagccttctgtcgaaacttacaatcagcttctccacttagcttcagagcaggggagcttcgacggaggcgaccagggtatccttaatacctttttttccagttgggcgaccacagacattcgcaaacatcttccttttatctacaacctgagctccataagcatctacagctacttgccggctttcaaggttaaaatgtctcaggaaccataccacatatgcccactaggtcggagtcaactttggcatagcaggctgtacccccggaaaaacggacgtaacgatggtaatcgggcccgtctgatcatttgggaacaaattccactcactaccagcagaggcaacctgaccctaacatcaagtcggaatacagctttcttctgcgagcacatccacttcacctctcttgtgtctgatacttag

SEQ ID NO: 71152 - DNA, 840 bp, Artificial Sequence
  derived and/or modified sequence
atgaccgatcaagcgtttgtgacactaaccactaatgatgcatacgccaaaggggcactggtccttggcagctcattgaagcagcaccggaccactagacggctggtggtcctcgccacgcctcaggtctccgatagcatgcgcaaagttctggagacggtttttgacgaggtgattatggtggacgtgcttgactctggcgactcagcacacttgacgctgatgaagagaccagaactgggggttacactaactaaattacattgctggagcctgactcaatatagcaagtgcgtgtttatggatgcagacacactggtcctggccaacattgatgatctcttcgaccgcgaggaactgtctgccgcacctgaccctggttggccagactgttttaattctggcgtctttgtctatcagccgagtgtggaaacatacaatcagcttctgcacctcgcaagtgagcagggcagcttcgacggcggagaccagggcatccttaacaccttcttctcttcttgggctacgaccgacattcgtaagcacctgccattcatctacaatttgagttctatcagcatctattcgtacctcccagccttcaaagttaagatgagtcaggaaccatatcacatctgtccattggggcgttcccagttgtggcatagcaggttgtatcccagaaagaacggaaggaacgatggcaatcgggctagacttatcatatgggagcagatccctctgactacatcccggggtaatctgacactgacatctagcagaaacaccgcctttttctgtgaacatatccacttcacaagcttagtgagcgacacatag

SEQ ID NO: 71153 - DNA, 840 bp, Artificial Sequence
  derived and/or modified sequence
atgaccgaccaggccttcgtgaccctgaccaccaacgacgcctacgccaagggcgccctggtgctgggcagcagcctgaagcagcacagaaccaccagaagactggtggtgctggccaccccccaggtgagcgacagcatgagaaaggtgctggagaccgtgttcgacgaggtgatcatggtggacgtgctggacagcggcgacagcgcccacctgaccctgatgaagagacccgagctgggcgtgaccctgaccaagctgcactgctggagcctgacccagtacagcaagtgcgtgttcatggacgccgacaccctggtgctggccaacatcgacgacctgttcgacagagaggagctgagcgccgcccccgaccccggctggcccgactgcttcaacagcggcgtgttcgtgtaccagcccagcgtggagacctacaaccagctgctgcacctggccagcgagcagggcagcttcgacggcggcgaccagggcatcctgaacaccttcttcagcagctgggccaccaccgacatcagaaagcacctgcccttcatctacaacctgagcagcatcagcatctacagctacctgcccgccttcaaggtgaagatgagccaggagccctaccacatctgccccctgggcagaagccagctgtggcacagcagactgtaccccagaaagaacggcagaaacgacggcaacagagccagactgatcatctgggagcagatccccctgaccaccagcagaggcaacctgaccctgaccagcagcagaaacaccgccttcttctgcgagcacatccacttcaccagcctggtgagcgacacctag

SEQ ID NO: 71154 - protein, 569 aa, Artificial Sequence
  derived and/or modified sequence
MVALCSLQHLGSSDPRALPTLPTATSGQRPAKRRRKSPAMAALTRDPQFQKLQQWYREHRSELNLRRLFDANKDRFNHFSLTLNTNHGHILVDYSKNLVTEDVMRMLVDLAKSRGVEAARERMFNGEKINYTEGRAVLHVALRNRSNTPILVDGKDVMPEVNKVLDKMKSFCQGPLMVTEALKPYSSGGPRVWYVSNIDGTHIAKTLAQLNPESSLFIIASKTFTTQETITNAETAKEWFLQAAKDPSAVAKHFVALSTNTTKVKEFGIDPQNMFEFWDWVGGRYSLWSAIGLSIALHVGFDNFEQLLSGAHWMDQHFRTTPLEKNAPVLLALLGIWYINCFGCETHAMLPYDQYLHRFAAYFQQGDMESNGKYITKSGTRVDHQTGPIVWGEPGTNGQHAFYQLIHQGTKMIPCDFLIPVQTQHPIRKGLHHKILLANFLAQTEALMRGKSTEEARKELQAAGKSPEDLERLLPHKVFEGNRPTNSIVFTKLTPFMLGALVAMYEHKIFVQGIIWDINSFDQWGVELGKQLAKKIEPELDGSAQVTSHDASTNGLINFIKQQREARVQ

SEQ ID NO: 71155 - DNA, 1710 bp, Artificial Sequence
  derived and/or modified sequence
atggtggccttatgttctttgcaacaccttggatcatcagatcctagggccctacccacattacctactgccaccagtggccagcgacccgctaaaagaaggagaaagagcccggccatggccgctcttacccgcgatccacagttccaaaagcttcagcagtggtatcgtgagcacagatcagagctgaacctgagacgcttatttgatgcgaataaggacagattcaatcacttctccttaacacttaacaccaaccatggccacatcctagtggattatagcaagaacctcgtaaccgaggatgttatgaggatgcttgtcgacctcgctaagagtagaggtgtggaggctgctcgcgaacggatgttcaacggcgaaaagattaactatacggaagggagggctgtactgcacgtcgcacttaggaacagaagtaatactccgatcctggtggatggtaaggatgttatgcctgaggtcaataaggtgctggataagatgaaatctttctgtcagggacccctgatggttacagaggccctaaagccttattcctctggcggcccgagggtgtggtacgtgagcaatatcgacgggacgcacatcgctaaaacgctggcacaactcaacccggagagttctctgttcataatagcatctaagacatttacaacacaagagacaataaccaacgccgaaactgcaaaggaatggttcttgcaggcagcaaaagaccccagcgcggtggccaaacatttcgtggccttaagcaccaacacaacgaaggtcaaggaattcggcatcgaccctcagaatatgtttgaattctgggattgggtgggtggtcgctatagcctttggtctgccatcggcctgtccattgccctgcacgtcggcttcgacaacttcgaacagctcctgtcaggcgctcattggatggaccagcactttcggacaacccctctggagaagaatgccccagttcttctcgctctgctcggaatttggtacattaactgtttcggatgcgaaacccacgccatgctcccctatgatcagtacctacatcggtttgccgcctatttccagcagggtgacatggagagtaacgggaagtacatcaccaaatccggcacccgcgttgaccatcaaaccggccctattgtgtggggggaaccagggacaaacggacagcatgccttttatcagctaatccatcaggggacaaaaatgatcccttgcgattttctcatccccgttcagactcagcaccccatccggaaaggcctgcaccacaagattctcctcgcgaattttctggcccaaaccgaggccttaatgagggggaaatctacagaggaggctaggaaggaactgcaagctgccggaaaatctccagaggatcttgagcgactacttccccataaggtcttcgaaggaaatagacctaccaactccattgtgttcacgaagctgacgccgttcatgctgggcgcactagtcgctatgtatgaacacaaaatcttcgtgcagggtataatttgggacataaatagtttcgatcagtggggcgtggaattgggaaaacagcttgccaagaaaattgaaccggaattggacggatctgcccaggtcacatcacacgacgcatcgacaaatggccttattaacttcatcaagcagcagagggaagctcgagtccagtag

SEQ ID NO: 71156 - DNA, 4257 bp, Artificial Sequence
  derived and/or modified sequence
aatagcccttaccaccagcagacacacatcatctgttgtacttgcttatttggcacatatgtatccacagcgcctagaacactgcctgtaacgtggaaggtgttcgatctatagagttttgtcgaatgaatgaatgaagccgactagtgcacagggagtgcagcggcgcgatggtagctctctgcagcctccaacacctgggctccagtgatccccgggctctgcccaccctccccactgccacttccgggcagaggccagcaaagcggcggcgcaagagtcccgccatggccgctctcacccgggacccccagttccagaagctgcagcaatggtaccgcgagcaccgctccgagctgaacctgcgccgcctcttcgatgccaacaaggaccgcttcaaccacttcagcttgaccctcaacaccaaccatgggcatatcctggtggattactccaagaacctggtgacggaggacgtgatgcggatgctggtggacttggccaagtccaggggcgtggaggccgcccgggagcggatgttcaatggtgagaagatcaactacaccgagggtcgagccgtgctgcacgtggctctgcggaaccggtcaaacacacccatcctggtagacggcaaggatgtgatgccagaggtcaacaaggttctggacaagatgaagtctttctgccagggacccctcatggtgactgaagcccttaagccatactcttcaggaggtccccgcgtctggtatgtctccaacattgatggaactcacattgccaaaaccctggcccagctgaaccccgagtcctccctgttcatcattgcctccaagacctttactacccaggagaccatcacgaatgcagagacggcgaaggagtggtttctccaggcggccaaggatccttctgcagtggcgaagcactttgttgccctgtctactaacacaaccaaagtgaaggagtttggaattgaccctcaaaacatgttcgagttctgggattgggtgggaggacgctactcgctgtggtcggccatcggactctccattgccctgcacgtgggttttgacaacttcgagcagctgctctcgggggctcactggatggaccagcacttccgcacgacgcccctggagaagaacgcccccgtcttgctggccctgctgggtatctggtacatcaactgctttgggtgtgagacacacgccatgctgccctatgaccagtacctgcaccgctttgctgcgtacttccagcagggcgacatggagtccaatgggaaatacatcaccaaatctggaacccgtgtggaccaccagacaggccccattgtgtggggggagccagggaccaatggccagcatgctttttaccagctcatccaccaaggcaccaagatgataccctgtgacttcctcatcccggtccagacccagcaccccatacggaagggtctgcatcacaagatcctcctggccaacttcttggcccagacagaggccctgatgaggggaaaatcgacggaggaggcccgaaaggagctccaggctgcgggcaagagtccagaggaccttgagaggctgctgccacataaggtctttgaaggaaatcgcccaaccaactctattgtgttcaccaagctcacaccattcatgcttggagccttggtcgccatgtatgagcacaagatcttcgttcagggcatcatctgggacatcaacagctttgaccagtggggagtggagctgggaaagcagctggctaagaaaatagagcctgagcttgatggcagtgctcaagtgacctctcacgacgcttctaccaatgggctcatcaacttcatcaagcagcagcgcgaggccagagtccaataaactcgtgctcatctgcagcctcctctgtgactcccctttctcttctcgtccctcctccccggagccggcactgcatgttcctggacaccacccagagcaccctctggttgtgggcttggaccacgagcccttagcagggaaggctggtctcccccagcctaacccccagcccctccatgtctatgctccctctgtgttagaattggctgaagtgtttttgtgcagctgacttttctgacccatgttcacgttgttcacatcccatgtagaaaaataaagatgccacggaggaggttgtaggctcagcctctgattttttttttcctgtgatggtgctttatgtagcagagggcaggagcgctcagcaggacgcaggctgtgcctctgcggacacttaacactaagtggtgagcgggtctagagtggagcaaggtgccctgagaagacaatagtggggtgggggcacaatcagtcaggacggcaacttggcctgtgtcaccaaatcccaagactgttttccactcctcacctctgtgactgcagaaattggatactctgttcactcgatggttctaaaaactgcattgagattatgtttgtttcgggtgaattcctggacaagaccgaggatgactgccatctcctggcaagacgctcaggtagttcttttgctttaaaaggcagatattgaaaactggaattttttttttttgagtctcgctctgtcacccagactggagtgcagtggtgcaatctcggctcactgcaacctccgcctcccgggttcaagctattctcctgcctcagcctcccgagtagctgggattacacggcgcacaccaccatacccagctaatttttgtatttttagtagtgaaggggttttaccatgttgggcaggctggtcttgaactcctgacctcaggtgatctgcccgcctcagcctcccacagtgctgggattacaggtatgagccaccacgcccggcccattttttttttttttttgacaacttttttttttttttgagacagggtcttgttccattgcccagactggagtgcagtggcatgatcacagctcactgcagccagtaatcctcttgcctcagcctcccaagtagttgagactacaggttgtaccactatgccctgctagttttttcattttttgtagagagacgggtcttttttttttttgagacggagtctcgctctgtcgcccaagctggagtgcagtagcacggtctcagctcattgcaagctccgcctcccaggttcacgccattctcctgcctcagactcctgtgtagctgggagtacaggcacctgccaccatgcccggctaattttttatatatttttttagcagagacagtgtctcactgtgttagtcaggatggtctcgatctcctgacctcgtgatccgcccgcctcagcctcccaaagtgctgggattacaggcgtgagccaccgcgcccagcaaggcgggtcttgctgtgtttcccagactagactggtcttgaattccagggctcaagagatctcccacctcagcctcccacagtgctgggattacaggcgtgagccgccacacccagcctattcaaaatttttttttcttagagacagggtctttgttgcccaggctggactgcagtgatacaatcatagctgactgaagcctcaaattcccaggctaaggtgatcttctcacctcagccttccaagtagctgggtccgcagatgcatgccagtacacccagctcatttaaaaaaaaatttttttcttttttgagagtcttgctttgttgcccaggctggagtgcagtggtgtgatctcggctcactgcaagctccacctcccggcttcacgccattctcctgcctcagcctcccgagtagctgggactacaggtgcccgccaccacacccggctaattttttgtatttttagtagagacggggtttcaccgtgttagccaggatggtcttgatctcctgacctcatgatccgcctgctttggcctcccaaagtgctgggattacaggcgtgagtcaccgcgcccggctcattttaaaatttttgtagatcagtgtactgttgtaaaaaaaaaaaaataagaaaaataaaaaataaatttttgtagtgataggatcccactgaggccagagaatagggtctggagacaaaggagcattcacttcagcctctgactggtggcaggccaagtctttatttacatagggtgtaaccaaataggaaacctctaaagggtacttaaaccccagattttctacacagggcacttgcttgagcctcatcccgctttctggaatgtacttttgcttcaataaatctgtgcttttgttccttc

SEQ ID NO: 71157 - DNA, 1710 bp, Artificial Sequence
  derived and/or modified sequence
atggtggccctgtgcagcctgcagcacctgggcagcagtgacccccgggccctgcccaccctgcccacagccaccagcggccagaggcctgccaagagaagaaggaagagccctgccatggccgccctgacccgggacccccagttccagaagctgcagcagtggtaccgggagcacaggtctgagctgaacctgcggcggctgtttgatgccaacaaggaccgcttcaaccacttcagcctgaccctgaacaccaaccacggccacatcctggtggactacagcaagaacctggtgacagaagatgtgatgaggatgctggtggacctggccaagagcagaggagtggaggccgcccgggagaggatgtttaatggagagaagatcaactacacagagggccgggctgtgctgcacgtggccctgaggaacagaagcaacacccccatcctggtggatggcaaggatgtgatgcctgaggtgaacaaggtgctggacaagatgaagagcttctgccagggccccctgatggtgacagaggccctgaagccctacagcagcggcggcccccgggtgtggtacgtgagcaacattgatggcacccacatcgccaagaccctggcccagctgaaccctgagagcagcctcttcatcatcgccagcaagaccttcaccacccaggagaccatcaccaatgctgagacagccaaggagtggttcctgcaggccgccaaggaccccagcgctgtggccaagcactttgtggccctgagcaccaacaccaccaaggtgaaggagtttggaattgacccccagaacatgtttgagttctgggactgggtgggcggccgctacagcctgtggagcgccatcggcctgagcatcgccctgcacgtgggctttgacaactttgagcagctgctgagcggggcccactggatggaccagcacttccgcaccacccccctggagaagaatgcccctgtgctgctggccctgctgggcatctggtacatcaactgcttcggctgtgagacccacgccatgctgccctatgaccagtacctgcacagatttgctgcctacttccagcagggcgacatggagagcaatggcaagtacatcaccaagagcggcaccagggtggaccaccagacaggccccatcgtgtggggcgagcccggcaccaacggccagcacgccttctaccagctgatccaccagggcaccaagatgatcccctgtgacttcctgatccctgtgcagacccagcaccccatcaggaagggcctgcaccacaagatcctgctggccaacttcctggcccagacagaggccctgatgaggggcaagagcacagaggaggccaggaaggagctgcaggccgccggcaagagccctgaggacctggagcggctgctgccccacaaggtgtttgagggcaaccggcccaccaacagcatcgtgttcaccaagctgacccccttcatgctgggcgccctggtggccatgtatgagcacaagatctttgtgcagggcatcatctgggacatcaacagctttgaccagtggggcgtggagctgggcaagcagctggccaagaagattgagcctgagctggatggcagcgcccaggtgaccagccatgatgccagcaccaacggcctcatcaacttcatcaagcagcagcgggaggcccgggtgcagtag

SEQ ID NO: 71158 - DNA, 1710 bp, Artificial Sequence
  derived and/or modified sequence
atggtggccctgtgcagcctgcagcacctgggcagcagcgaccccagggccctacctaccttgccaacggccacatcgggccagaggcctgctaaacgtaggagaaagagccctgccatggctgcgctgaccagggacccccagtttcagaagctgcagcagtggtacagagaacaccgttctgaacttaacctgaggaggctgttcgatgcaaacaaagatcgcttcaaccacttttcccttaccctcaacacaaaccacggccacatcctcgtggactactccaaaaatcttgtgaccgaagacgtgatgcgtatgctagtcgacttggcgaagtctagaggagtcgaagcggcccgggagcggatgtttaacggcgaaaagattaactatactgaagggagggcagtcctacacgtcgcactgagaaatcgctctaacactcccatcctggttgatggaaaagacgtgatgccagaggttaataaggtgctggataaaatgaagagcttttgtcagggcccactaatggtgacagaagctcttaagccttattcttccggaggacccagggtctggtatgtttcaaacatagacggaacacatattgctaagacgctggcccagcttaatccggagtcttccctctttattattgcttctaaaacctttacgacacaagagacaattactaacgctgagacagccaaggaatggtttctgcaagctgccaaagacccgagcgcagttgctaaacattttgtggcattgtccaccaacaccaccaaggtgaaagaatttggcatcgaccctcaaaacatgttcgaattctgggactgggttggaggaagatactccctctggagcgcgatcggtctcagtatcgccctccacgtggggtttgacaattttgagcagctgttaagtggcgcacactggatggaccagcattttcgcaccacacccttggagaaaaatgcaccagttttgctggcactgttgggtatctggtacatcaattgcttcggttgtgagacgcatgccatgttgccctatgaccagtacctgcatcgttttgcggcctattttcagcaaggtgacatggagagtaacgggaagtacatcacaaaaagtggaacaagagttgaccatcagacagggcccattgtctggggagagcctggaacgaatggccagcacgctttctaccagcttatccaccaggggacaaagatgatcccctgcgattttttgattccagtccagacacagcatccaatccggaaaggactgcatcataagattctcctggctaacttcctagcccaaacagaagcgttgatgcgcgggaagtcaacagaggaggcacgtaaagagctccaggctgcaggcaaatcacccgaggatttggaacggcttctcccgcataaagtgtttgaaggcaatcgtccaaccaactctatcgtctttacaaagttgactccattcatgctaggcgctctggtcgcaatgtacgagcataagatattcgtgcaaggtattatctgggacatcaactcttttgaccaatggggcgttgaactcggaaaacagctggctaagaaaatagagcctgagctggatggctccgcacaggtgacttcacacgacgcatccaccaatggcctcatcaactttattaaacagcagagagaagcccgcgtgcagtag

SEQ ID NO: 71159 - DNA, 1710 bp, Artificial Sequence
  derived and/or modified sequence
atggtggccttatgcagtctccaacacttaggcagctccgacccgagggctctgcccacgctaccaaccgcgacaagtggccagagacctgctaagaggcggagaaagagtccggcaatggccgcactgactcgcgacccgcagttccagaagctccaacagtggtatagagagcaccggagtgaattgaacctgcgcaggctcttcgacgctaacaaggacaggttcaaccatttttccctcactctgaataccaatcacggtcatatcctggtggactatagtaagaacctagttaccgaggacgttatgaggatgctggtcgacctggctaagtccaggggggtggaggctgcgagagagagaatgtttaacggagaaaaaattaattatactgagggtagggcggtgctgcacgtcgcattaaggaacagatccaacactcctatcttggtggacggcaaagacgtgatgcccgaggtgaacaaggtgttggacaagatgaaatccttttgccaaggtccgctgatggtaacagaagccttaaagccctactccagtggaggacctagagtttggtacgtttctaatatcgatgggacccatatcgctaagacgttggctcagctgaatcctgaatctagccttttcattatagcttccaagacctttaccacgcaggagaccatcacaaatgcagagactgcaaaggaatggttcctgcaggccgctaaggaccctagcgcagttgccaaacacttcgtggccctgtccacaaatacaaccaaagttaaggagttcgggattgaccctcagaacatgttcgagttctgggattgggtcgggggtaggtattctctctggtccgcaataggcctctctatcgctctccacgtgggattcgacaactttgagcagctactgtctggcgcacattggatggatcagcatttcaggaccaccccactcgagaagaatgccccagtgctcctggctctgctggggatctggtacataaattgcttcggttgcgaaacacacgccatgttgccatacgaccaataccttcaccgatttgccgcatatttccaacagggcgacatggagtctaacggcaagtacatcacaaagagcggaacaagagtcgaccatcagacgggccctatcgtttggggcgagcctgggaccaatggccaacacgctttctaccaactcatccaccaaggtacaaagatgattccctgcgatttccttattcctgtgcagactcagcaccccattcgcaagggcttacatcacaagatcctgttggccaacttcctcgcccaaacagaagccctgatgagggggaagagcaccgaggaggcacggaaggaattgcaggcagccggtaaaagcccggaggatctggagagactcttaccccacaaagtctttgaggggaatcgtcctactaattcaatcgtgttcaccaagctcaccccattcatgcttggggcactggtggctatgtatgaacacaagattttcgtgcagggaataatctgggacattaacagttttgatcagtggggcgtcgaattagggaaacaactggccaagaagatcgagcccgagttagacggttcggcacaggtcaccagccacgatgcgagcaccaatggccttatcaacttcattaagcagcagagggaagctagagttcagtag

SEQ ID NO: 71160 - DNA, 1710 bp, Artificial Sequence
  derived and/or modified sequence
atggtggccctgtgcagcctgcagcacctgggcagcagcgaccccagagccctgcccaccctgcccaccgccaccagcggccagagacccgccaagagaagaagaaagagccccgccatggccgccctgaccagagacccccagttccagaagctgcagcagtggtacagagagcacagaagcgagctgaacctgagaagactgttcgacgccaacaaggacagattcaaccacttcagcctgaccctgaacaccaaccacggccacatcctggtggactacagcaagaacctggtgaccgaggacgtgatgagaatgctggtggacctggccaagagcagaggcgtggaggccgccagagagagaatgttcaacggcgagaagatcaactacaccgagggcagagccgtgctgcacgtggccctgagaaacagaagcaacacccccatcctggtggacggcaaggacgtgatgcccgaggtgaacaaggtgctggacaagatgaagagcttctgccagggccccctgatggtgaccgaggccctgaagccctacagcagcggcggccccagagtgtggtacgtgagcaacatcgacggcacccacatcgccaagaccctggcccagctgaaccccgagagcagcctgttcatcatcgccagcaagaccttcaccacccaggagaccatcaccaacgccgagaccgccaaggagtggttcctgcaggccgccaaggaccccagcgccgtggccaagcacttcgtggccctgagcaccaacaccaccaaggtgaaggagttcggcatcgacccccagaacatgttcgagttctgggactgggtgggcggcagatacagcctgtggagcgccatcggcctgagcatcgccctgcacgtgggcttcgacaacttcgagcagctgctgagcggcgcccactggatggaccagcacttcagaaccacccccctggagaagaacgcccccgtgctgctggccctgctgggcatctggtacatcaactgcttcggctgcgagacccacgccatgctgccctacgaccagtacctgcacagattcgccgcctacttccagcagggcgacatggagagcaacggcaagtacatcaccaagagcggcaccagagtggaccaccagaccggccccatcgtgtggggcgagcccggcaccaacggccagcacgccttctaccagctgatccaccagggcaccaagatgatcccctgcgacttcctgatccccgtgcagacccagcaccccatcagaaagggcctgcaccacaagatcctgctggccaacttcctggcccagaccgaggccctgatgagaggcaagagcaccgaggaggccagaaaggagctgcaggccgccggcaagagccccgaggacctggagagactgctgccccacaaggtgttcgagggcaacagacccaccaacagcatcgtgttcaccaagctgacccccttcatgctgggcgccctggtggccatgtacgagcacaagatcttcgtgcagggcatcatctgggacatcaacagcttcgaccagtggggcgtggagctgggcaagcagctggccaagaagatcgagcccgagctggacggcagcgcccaggtgaccagccacgacgccagcaccaacggcctgatcaacttcatcaagcagcagagagaggccagagtgcagtag

SEQ ID NO: 71161 - protein, 400 aa, Artificial Sequence
  derived and/or modified sequence
MRHLGAFLFLLGVLGALTEMCEIPEMDSHLVEKLGQHLLPWMDRLSLEHLNPSIYVGLRLSSLQAGTKEDLYLHSLKLGYQQCLLGSAFSEDDGDCQGKPSMGQLALYLLALRANWHDHKGHPHTSYYQYGLGILALCLHQKRVHDSVVDKLLYAVEPFHQGHHSVDTAAMAGLAFTCLKRSNFNPGRRQRITMAIRTVREEILKAQTPEGHFGNVYSTPLALQFLMTSPMRGAELGTACLKARVALLASLQDGAFQNALMISQLLPVLNHKTYIDLIFPDCLAPRVMLEPAAETIPQTQEIISVTLQVLSLLPPYRQSISVLAGSTVEDVLKKAHELGGFTYETQASLSGPYLTSVMGKAAGEREFWQLLRDPNTPLLQGIADYRPKDGETIELRLVSW

SEQ ID NO: 71162 - DNA, 1203 bp, Artificial Sequence
  derived and/or modified sequence
atgagacacctgggcgccttcctgttcctgctgggcgtgctgggcgccctgaccgagatgtgcgagatccccgagatggacagccacctggtggagaagctgggccagcacctgctgccctggatggacagactgagcctggagcacctgaaccccagcatctacgtgggcctgagactgagcagcctgcaggccggcaccaaggaggacctgtacctgcacagcctgaagctgggctaccagcagtgcctgctgggcagcgccttcagcgaggacgacggcgactgccagggcaagcccagcatgggccagctggccctgtacctgctggccctgagagccaactggcacgaccacaagggccacccccacaccagctactaccagtacggcctgggcatcctggccctgtgcctgcaccagaagagagtgcacgacagcgtggtggacaagctgctgtacgccgtggagcccttccaccagggccaccacagcgtggacaccgccgccatggccggcctggccttcacctgcctgaagagaagcaacttcaaccccggcagaagacagagaatcaccatggccatcagaaccgtgagagaggagatcctgaaggcccagacccccgagggccacttcggcaacgtgtacagcacccccctggccctgcagttcctgatgaccagccccatgagaggcgccgagctgggcaccgcctgcctgaaggccagagtggccctgctggccagcctgcaggacggcgccttccagaacgccctgatgatcagccagctgctgcccgtgctgaaccacaagacctacatcgacctgatcttccccgactgcctggcccccagagtgatgctggagcccgccgccgagaccatcccccagacccaggagatcatcagcgtgaccctgcaggtgctgagcctgctgcccccctacagacagagcatcagcgtgctggccggcagcaccgtggaggacgtgctgaagaaggcccacgagctgggcggcttcacctacgagacccaggccagcctgagcggcccctacctgaccagcgtgatgggcaaggccgccggcgagagagagttctggcagctgctgagagaccccaacacccccctgctgcagggcatcgccgactacagacccaaggacggcgagaccatcgagctgagactggtgagctggtag

SEQ ID NO: 71163 - DNA, 1203 bp, Artificial Sequence
  derived and/or modified sequence
atgagacatctgggagccttcctcttcctcctgggggtcctgggtgccctgaccgaaatgtgtgagattcccgagatggactcccatctcgtggagaagctgggacaacatcttctgccatggatggatagattgagcttagagcacttaaacccatcaatctatgtgggcctgcgcctgagctcactgcaggctggcacgaaggaagacctgtacctacatagcctgaagttgggataccagcaatgtctcctgggaagtgcattttccgaggatgacggagactgccagggaaagccctctatggggcagctcgctctatatctgcttgctctccgggccaactggcacgaccacaaagggcatccacacacgagctactatcagtatggcctggggatccttgcactgtgtttacatcagaaacgagttcacgattcagtcgtagacaagctactctatgccgttgaaccattccatcaagggcatcattcggtggacacagcagctatggcagggctggcatttacctgccttaaacgctcgaattttaatccgggacggaggcagagaatcaccatggcaattagaaccgtgagagaagaaatcctgaaggctcagacccccgagggccactttggaaacgtgtactccacccccctggcccttcagttcttaatgacgagccccatgcgtggagctgaactaggcacggcctgcctgaaagcgcgagtcgctctcttggctagccttcaggacggtgctttccagaatgccctgatgatcagccagctgttgcctgtcctcaatcataaaacctacatcgatttaatcttccccgactgcttggctccccgagtaatgttggaacctgccgccgaaacaatccctcaaacacaggaaatcatcagcgtgactttacaagtcctctccctgctacccccttaccgccagtcaatcagcgtgttggctgggagcacagtggaggacgtcttaaagaaagctcacgagctcggcggctttacatatgagacgcaagcatctttgtcgggtccatacctgacatctgtcatggggaaggccgcaggagaacgcgaattctggcaactcctcagagacccaaacaccccattgctccaggggatcgccgactaccgcccaaaggacggtgagaccatcgaactccggttggtttcatggtag

SEQ ID NO: 71164 - DNA, 1203 bp, Artificial Sequence
  derived and/or modified sequence
atgaggcacctgggcgccttcctgttcctgctgggcgtgctgggcgccctgacagagatgtgtgagatccctgagatggacagccacctggtggagaagctgggccagcacctgctgccctggatggaccggctgagcctggagcacctgaaccccagcatctacgtgggcctgcggctgagcagcctgcaggccggcaccaaggaggacctgtacctgcacagcctgaagctgggctaccagcagtgcctgctgggcagcgccttctctgaagatgatggagactgccagggcaagcccagcatgggccagctggccctgtacctgctggccctgcgggccaactggcatgaccacaagggccacccccacaccagctactaccagtatggcctgggcatcctggccctgtgcctgcaccagaagagggtgcatgattctgtggtggacaagctgctgtatgctgtggagcccttccaccagggccaccacagcgtggacacagctgccatggccggcctggccttcacctgcctgaagaggagcaacttcaaccctggccggcggcagaggatcaccatggccatcagaacagtgcgggaggagatcctgaaggcccagaccccagagggccactttggaaatgtgtacagcacccccctggccctgcagttcctgatgaccagccccatgagaggagctgagctgggcacagcctgcctgaaggcccgggtggccctgctggccagcctgcaggatggagccttccagaatgccctgatgatcagccagctgctgcctgtgctgaaccacaagacctacatcgacctgatcttcccagactgcctggccccccgggtgatgctggagcctgctgctgagaccatcccccagacccaggagatcatctctgtgaccctgcaggtgctgagcctgctgcccccctaccggcagagcatctctgtgctggccggcagcacagtggaggatgtgctgaagaaggcccacgagctgggcggcttcacctatgagacccaggccagcctgagcggcccctacctgacctctgtgatgggcaaggccgccggggagcgggagttctggcagctgctgcgggaccccaacacccccctgctgcagggcattgctgactaccggcccaaggatggagagaccatcgagctgcggctggtgtcctggtag

SEQ ID NO: 71165 - DNA, 1203 bp, Artificial Sequence
  derived and/or modified sequence
atgcggcacctgggcgccttcctgttcctgctgggcgtgctgggcgctttgaccgaaatgtgtgaaatcccggaaatggatagccacttagtggagaaattgggacagcaccttttgccatggatggaccggctctccctggaacacctcaatccctcgatatatgtaggccttcgcctctcaagtctgcaggctgggactaaagaggacctgtatctgcactccctaaaactgggctaccaacaatgcctattagggagcgctttttcagaggacgacggggactgtcaaggcaaaccttccatgggtcagcttgctctttacctgttggcgttgagggcaaattggcacgaccacaagggtcacccccatacaagctattaccagtacggccttggtatcttggccctgtgcctgcaccagaagcgagtgcacgactcagtggtggataagctcctgtatgctgtcgagccctttcatcaagggcatcactccgtagataccgccgctatggcaggactggccttcacgtgtctgaagagatccaattttaacccagggcgccggcagcggataaccatggccatacgcacagtgagagaagagatcctgaaagctcaaacccctgagggacatttcggaaatgtgtactctacaccattggcgctgcagttccttatgacatctcctatgcgcggggcagagctaggcacagcatgtctgaaagctagggtcgcccttctggcttcactacaggacggggcttttcagaatgcactcatgattagccagctcctgcccgtactgaatcataagacgtacattgacctgatcttcccagactgtctcgctcctcgggtgatgttggagccagctgcagaaactattccccagacacaggaaatcatctcagtaacgctgcaagtgctcagccttctgcctccctaccgccagagcatcagtgtgctggccggcagtaccgtcgaagacgtacttaaaaaggcccatgaactgggcgggttcacatatgagacacaagcatcactgagtgggccataccttactagtgttatgggaaaagcagctggggagcgcgaattttggcagctgctccgggaccccaacacgcccctgttacagggaatcgcggactaccgacccaaggatggagaaacaatcgaattacgactcgtctcctggtag

SEQ ID NO: 71166 - DNA, 1203 bp, Artificial Sequence
  derived and/or modified sequence
atgagacatctcggcgcatttctcttccttctgggcgtgctcggagctttgaccgaaatgtgtgagatacccgagatggactctcacctggttgagaagctcggacagcaccttctcccttggatggatagactgagtttagagcatttaaatccctctatctacgtgggtctgagactgtcatctttgcaggcaggaaccaaggaggacctgtacctgcacagcttgaagctggggtatcagcagtgcctgcttgggagcgccttctcagaagacgatggagactgccagggcaagcctagtatgggtcaactggctttatatctgctggcattacgggcaaattggcatgatcacaagggacacccgcacacatcatactaccagtacgggctgggaattctcgccctgtgcctacaccagaagcgagttcatgattccgtggtcgacaaactactgtatgcagtggaaccattccatcaggggcatcattcggtggatactgccgcaatggccggactggcttttacctgcttgaaacgctccaactttaatccgggacgacgtcagcggattaccatggccatcaggactgtgcgtgaggaaatcctcaaggcacagacaccagagggccacttcggcaacgtgtattcaacgcccttggcattacagtttctgatgacatctccaatgcgaggagccgaattgggaactgcgtgcctgaaagcaagggtggcgctgctggccagcctgcaggacggtgctttccaaaatgccctaatgatctctcagctgctgcctgttcttaaccacaaaacgtatatagatctgatttttcccgattgtctggcccctcgagtcatgttagaaccggctgccgagacaattcctcaaacgcaagagatcataagcgtgactctgcaggtattgtcgctcctcccaccctataggcagtctatatctgtgcttgccggatcaacagttgaggatgtcctcaagaaagcccacgagctgggtggttttacatatgaaacacaagctagtctaagcgggccatatcttacctccgtgatgggcaaggccgctggggaaagggagttttggcagcttcttagagaccctaacactccgctcctgcaggggatagccgattacagaccaaaggatggtgaaaccattgaattgagattggtgtcctggtag

SEQ ID NO: 71167 - DNA, 1870 bp, Artificial Sequence
  derived and/or modified sequence
ggattaatcagtgacaggaagctgcgtctctcggagcggtgaccagctgtggtcaggagagcctcagcagggccagccccaggagtctttcccgattcttgctcactgctcacccacctgctgctgccatgaggcaccttggggccttcctcttccttctgggggtcctgggggccctcactgagatgtgtgaaataccagagatggacagccatctggtagagaagttgggccagcacctcttaccttggatggaccggctttccctggagcacttgaaccccagcatctatgtgggcctacgcctctccagtctgcaggctgggaccaaggaagacctctacctgcacagcctcaagcttggttaccagcagtgcctcctagggtctgccttcagcgaggatgacggtgactgccagggcaagccttccatgggccagctggccctctacctgctcgctctcagagccaactggcatgatcacaagggccacccccacactagctactaccagtatggcctgggcattctggccctgtgtctccaccagaagcgggtccatgacagcgtggtggacaaacttctgtatgctgtggaacctttccaccagggccaccattctgtggacacagcagccatggcaggcttggcattcacctgtctgaagcgctcaaacttcaaccctggtcggagacaacggatcaccatggccatcagaacagtgcgagaggagatcttgaaggcccagacccccgagggccactttgggaatgtctacagcaccccattggcattacagttcctcatgacttcccccatgcgtggggcagaactgggaacagcatgtctcaaggcgagggttgctttgctggccagtctgcaggatggagccttccagaatgctctcatgatttcccagctgctgcccgttctgaaccacaagacctacattgatctgatcttcccagactgtctggcaccacgagtcatgttggaaccagctgctgagaccattcctcagacccaagagatcatcagtgtcacgctgcaggtgcttagtctcttgccgccgtacagacagtccatctctgttctggccgggtccaccgtggaagatgtcctgaagaaggcccatgagttaggaggattcacatatgaaacacaggcctccttgtcaggcccctacttaacctccgtgatggggaaagcggccggagaaagggagttctggcagcttctccgagaccccaacaccccactgttgcaaggtattgctgactacagacccaaggatggagaaaccattgagctgaggctggttagctggtagcccctgagctccctcatcccagcagcctcgcacactccctaggcttctaccctccctcctgatgtccctggaacaggaactcgcctgaccctgctgccacctcctgtgcactttgagcaatgccccctgggatcaccccagccacaagcccttcgagggccctataccatggcccaccttggagcagagagccaagcatcttccctgggaagtctttctggccaagtctggccagcctggccctgcaggtctcccatgaaggccaccccatggtctgatgggcatgaagcatctcagactccttggcaaaaaacggagtccgcaggccgcaggtgttgtgaagaccactcgttctgtggttggggtcctgcaagaaggcctcctcagcccgggggctatggccctgaccccagctctccactctgctgttagagtggcagctccgagctggttgtggcacagtagctggggagacctcagcagggctgctcagtgcctgcctctgacaaaattaaagcattgatggcctgtggacctgc

SEQ ID NO: 71168 - protein, 522 aa, Artificial Sequence
  derived and/or modified sequence
MAAAMPLALLVLLLLGPGGWCLAEPPRDSLREELVITPLPSGDVAATFQFRTRWDSELQREGVSHYRLFPKALGQLISKYSLRELHLSFTQGFWRTRYWGPPFLQAPSDTDHYFLRYAVLPREVVCTENLTPWKKLLPCSSKAGLSVLLKADRLFHTSYHSQAVHIRPVCRNARCTSISWELRQTLSVVFDAFITGQGKKDWSLFRMFSRTLTEPCPLASESRVYVDITTYNQDNETLEVHPPPTTTYQDVILGTRKTYAIYDLLDTAMINNSRNLNIQLKWKRPPENEAPPVPFLHAQRYVSGYGLQKGELSTLLYNTHPYRAFPVLLLDTVPWYLRLYVHTLTITSKGKENKPSYIHYQPAQDRLQPHLLEMLIQLPANSVTKVSIQFERALLKWTEYTPDPNHGFYVSPSVLSALVPSMVAAKPVDWEESPLFNSLFPVSDGSNYFVRLYTEPLLVNLPTPDFSMPYNVICLTCTVVAVCYGSFYNLLTRTFHIEEPRTGGLAKRLANLIRRARGVPPL

SEQ ID NO: 71169 - DNA, 1569 bp, Artificial Sequence
  derived and/or modified sequence
atggccgccgccatgcccctggccctgctggtgctgctgctgctgggccccggcggctggtgcctggccgagccccccagagacagcctgagagaggagctggtgatcacccccctgcccagcggcgacgtggccgccaccttccagttcagaaccagatgggacagcgagctgcagagagagggcgtgagccactacagactgttccccaaggccctgggccagctgatcagcaagtacagcctgagagagctgcacctgagcttcacccagggcttctggagaaccagatactggggcccccccttcctgcaggcccccagcgacaccgaccactacttcctgagatacgccgtgctgcccagagaggtggtgtgcaccgagaacctgaccccctggaagaagctgctgccctgcagcagcaaggccggcctgagcgtgctgctgaaggccgacagactgttccacaccagctaccacagccaggccgtgcacatcagacccgtgtgcagaaacgccagatgcaccagcatcagctgggagctgagacagaccctgagcgtggtgttcgacgccttcatcaccggccagggcaagaaggactggagcctgttcagaatgttcagcagaaccctgaccgagccctgccccctggccagcgagagcagagtgtacgtggacatcaccacctacaaccaggacaacgagaccctggaggtgcaccccccccccaccaccacctaccaggacgtgatcctgggcaccagaaagacctacgccatctacgacctgctggacaccgccatgatcaacaacagcagaaacctgaacatccagctgaagtggaagagaccccccgagaacgaggccccccccgtgcccttcctgcacgcccagagatacgtgagcggctacggcctgcagaagggcgagctgagcaccctgctgtacaacacccacccctacagagccttccccgtgctgctgctggacaccgtgccctggtacctgagactgtacgtgcacaccctgaccatcaccagcaagggcaaggagaacaagcccagctacatccactaccagcccgcccaggacagactgcagccccacctgctggagatgctgatccagctgcccgccaacagcgtgaccaaggtgagcatccagttcgagagagccctgctgaagtggaccgagtacacccccgaccccaaccacggcttctacgtgagccccagcgtgctgagcgccctggtgcccagcatggtggccgccaagcccgtggactgggaggagagccccctgttcaacagcctgttccccgtgagcgacggcagcaactacttcgtgagactgtacaccgagcccctgctggtgaacctgcccacccccgacttcagcatgccctacaacgtgatctgcctgacctgcaccgtggtggccgtgtgctacggcagcttctacaacctgctgaccagaaccttccacatcgaggagcccagaaccggcggcctggccaagagactggccaacctgatcagaagagccagaggcgtgccccccctgtag

SEQ ID NO: 71170 - DNA, 1569 bp, Artificial Sequence
  derived and/or modified sequence
atggccgccgccatgcctctagctctgttggtgctgctgctcctaggaccaggagggtggtgtttggcagaaccaccaagggattcacttcgggaagagctggtgatcaccccactacctagcggagatgttgccgccacatttcaatttcgcacacggtgggactctgagctccaaagagagggcgtgtcccactacagacttttcccaaaagcgctgggtcagctcatatctaaatacagcttacgggagcttcatctttcttttacccagggattttggagaactaggtactgggggcctccttttctacaggcacccagtgatacggatcattactttctgcgttacgctgttctgcctagggaagtggtgtgcaccgaaaacctgactccatggaaaaaactccttccatgttcatccaaggctggactttccgtgctcctgaaggccgatcggttattccatacatcttaccactctcaagcggtacatatcagaccagtgtgcagaaatgccaggtgcaccagcatctcatgggaactacgtcaaactctttcagttgttttcgacgcctttatcaccggtcagggtaaaaaagattggtccctgtttaggatgttttcccggacgctgactgaaccatgtccactcgcaagtgagtcccgggtgtacgtggatattactacctataaccaagacaacgagactctggaggtgcatcctcctcctacgacaacttatcaggacgtgattctgggcacgcgaaagacgtacgctatttatgatctgctggacactgcaatgattaacaatagccgaaatctgaacatccagttgaaatggaagagaccacctgaaaatgaggcccctcccgtgccgtttttacacgcacaaagatacgtctccggctacggactgcagaagggggaactgagcactctcttgtacaatactcatccttaccgggcttttcctgtcctgctcttggacacagtgccttggtacctcagactgtacgtccatactcttacaattacttccaaaggcaaggagaataagccctcctacatccactaccagccagcacaggatcgcctccaaccacacctgctggagatgcttattcagctgccggctaatagcgttaccaaagtaagtatccagttcgagagagctctcctgaagtggaccgaatatacccctgacccaaatcacgggttttacgtgtctccttctgtgttgtccgccctggtacccagcatggtagccgccaagcccgtggattgggaggagagcccgttgtttaacagtctttttcctgtgtcagacgggagcaactactttgtacgcttatacacagagccgctcctcgtgaatcttccaactcccgacttttctatgccttacaacgtgatttgtctgacatgcacggtcgtagcagtgtgttatgggagcttctacaacctgcttacaaggaccttccacatagaagaaccccgcaccggaggactggcaaagcggttggcaaaccttatccgtagagccaggggtgtgcctccattatag

SEQ ID NO: 71171 - DNA, 1569 bp, Artificial Sequence
  derived and/or modified sequence
atggctgctgccatgcccctggccctgctggtgctgctgctgctgggccctgggggctggtgcctggccgagcccccccgggacagcctgcgggaggagctggtgatcacccccctgcccagcggagatgtggccgccaccttccagttccgcacccgctgggacagcgagctgcagcgggagggcgtgagccactaccgcctcttccccaaggccctgggccagctgatcagcaagtacagcctgcgggagctgcacctgtccttcacccagggcttctggaggacccgctactggggcccccccttcctgcaggcccccagcgacacagaccactacttcctgcgctatgctgtgctgccccgggaggtggtgtgcacagagaacctgaccccctggaagaagctgctgccctgcagcagcaaggccggcctgtctgtgctgctgaaggctgacaggctcttccacaccagctaccacagccaggccgtgcacatccggcctgtgtgcagaaatgcccgctgcaccagcatctcctgggagctgcggcagaccctgtctgtggtgtttgatgccttcatcaccggccagggcaagaaggactggagcctcttcaggatgttcagcaggaccctgacagagccctgccccctggccagcgagagccgggtgtatgtggacatcaccacctacaaccaggacaatgagaccctggaggtgcaccccccacccaccaccacctaccaggacgtcatcctgggcaccaggaagacctacgccatctatgacctgctggacacagccatgatcaacaacagcaggaacctgaacatccagctgaagtggaagaggcccccagaaaatgaggcccctcctgtgcccttcctgcacgcccagagatatgtgtctggctacggcctgcagaagggggagctgagcaccctgctgtacaacacccacccctaccgggccttccctgtgctgctgctggacacagtgccctggtacctgcggctgtatgtgcacaccctgaccatcaccagcaagggcaaggagaacaagcccagctacatccactaccagcctgcccaggaccggctgcagccccacctgctggagatgctgatccagctgcctgccaacagcgtgaccaaggtgtccatccagtttgagcgggccctgctgaagtggacagagtacaccccagaccccaaccacggcttctacgtgagccccagcgtgctgagcgccctggtgcccagcatggtggccgccaagcctgtggactgggaggagagccccctcttcaacagcctcttccctgtgtctgatggcagcaactactttgtgcggctgtacacagagcccctgctggtgaacctgcccaccccagacttctccatgccctacaacgtcatctgcctgacctgcaccgtggtggccgtgtgctacggcagcttctacaacctgctgaccaggaccttccacatcgaggagcccaggactggaggcctggccaagaggctggccaacctgatccggcgggcccggggcgtgccccccctgtag

SEQ ID NO: 71172 - DNA, 1569 bp, Artificial Sequence
  derived and/or modified sequence
atggccgccgccatgcccctggccctgctggtgctgctgctgctggggccaggtggatggtgcctggccgagccaccacgcgatagcctgagggaagaattggtcattaccccactgccttctggtgatgtcgcggccactttccagtttagaacacggtgggactctgagctacaacgggagggggtgagtcactatcgcctcttccccaaagccctgggtcagttaattagtaaatactcactgcgcgagctgcatctgtcttttacccaggggttttggcggacccgctactggggacctccctttctccaagcgccctccgacaccgaccattattttctacgttacgccgtgttgccgcgcgaggtcgtctgcacagaaaaccttaccccttggaaaaagttgctgccttgttcatcgaaagctgggctcagcgttttgctaaaggctgaccgcctgttccacacatcctaccactcccaagccgtacacatcagacccgtatgccgcaatgcccgctgtacttccatctcatgggagctgaggcagaccctaagtgtggtgtttgatgcctttataaccggccagggtaagaaggactggtcccttttccgcatgttttccaggacgctcaccgagccatgccccctcgcgagcgagtcaagggtctatgtcgatattaccacctacaatcaggataatgagaccctagaggtgcacccccctccaaccactacttatcaagacgtgatcctcggtaccaggaaaacctatgccatctacgacctgctggacacagcaatgataaataattctcgaaatcttaacatacagttaaagtggaaacgccccccagagaatgaagccccccccgtgccgttcctgcatgctcagagatatgtgtccggttacgggcttcaaaagggagagctctccactttactctataacactcacccctacagggcttttccagtgctgttacttgatacggtgccctggtatctaaggctctatgtgcacactctgacgatcactagtaaagggaaggagaataagcccagttatattcactatcagccagcccaagatcgtcttcagccccatctactggaaatgctgatccaactccctgctaatagtgtcacaaaagtcagcatccaatttgagagagccctgctgaaatggacagaatacacacctgacccgaaccatggcttctacgtcagtcccagcgtcctgagtgcattagtgccctcaatggtggccgcaaagcccgtggactgggaagagagccctctgtttaacagtctgttcccggtgagcgatggttccaattatttcgtgagactgtatacggagcctcttcttgtgaacctgcctacaccagatttctccatgccttataacgtgatatgtcttacatgtacggtcgtggccgtctgttacggctcattttataatctgctgacgaggacattccacatagaagagcctcgaacgggtggcctggcaaaaagactggctaacctcattagacgggcccggggagtcccgcccttgtag

SEQ ID NO: 71173 - DNA, 2077 bp, Artificial Sequence
  derived and/or modified sequence
agcggaagtcacttctcacacgcctttcttattggataccggcttttcatggggccgagcgccgctgggtaggcggaagtagccgcaggcatggcggcggctatgccgcttgctctgctcgtcctgttgctcctggggcccggcggctggtgccttgcagaacccccacgcgacagcctgcgggaggaacttgtcatcaccccgctgccttccggggacgtagccgccacattccagttccgcacgcgctgggattcggagcttcagcgggaaggagtgtcccattacaggctctttcccaaagccctggggcagctgatctccaagtattctctacgggagctgcacctgtcattcacacaaggcttttggaggacccgatactgggggccacccttcctgcaggccccatcagacactgaccactactttctgcgctatgctgtgctgccgcgggaggtggtctgcaccgaaaacctcaccccctggaagaagctcttgccctgtagttccaaggcaggcctctctgtgctgctgaaggcagatcgcttgttccacaccagctaccactcccaggcagtgcatatccgccctgtttgcagaaatgcacgctgtactagcatctcctgggagctgaggcagaccctgtcagttgtatttgatgccttcatcacggggcagggaaagaaagactggtccctcttccggatgttctcccgaaccctcacggagccctgccccctggcttcagagagccgagtctatgtggacatcaccacctacaaccaggacaacgagacattagaggtgcacccacccccgaccactacatatcaggacgtcatcctaggcactcggaagacctatgccatctatgacttgcttgacaccgccatgatcaacaactctcgaaacctcaacatccagctcaagtggaagagacccccagagaatgaggcccccccagtgcccttcctgcatgcccagcggtacgtgagtggctatgggctgcagaagggggagctgagcacactgctgtacaacacccacccataccgggccttcccggtgctgctgctggacaccgtaccctggtatctgcggctgtatgtgcacaccctcaccatcacctccaagggcaaggagaacaaaccaagttacatccactaccagcctgcccaggaccggctgcaaccccacctcctggagatgctgattcagctgccggccaactcagtcaccaaggtttccatccagtttgagcgggcgctgctgaagtggaccgagtacacgccagatcctaaccatggcttctatgtcagcccatctgtcctcagcgcccttgtgcccagcatggtagcagccaagccagtggactgggaagagagtcccctcttcaacagcctgttcccagtctctgatggctctaactactttgtgcggctctacacggagccgctgctggtgaacctgccgacaccggacttcagcatgccctacaacgtgatctgcctcacgtgcactgtggtggccgtgtgctatggctccttctacaatctcctcacccgaaccttccacatcgaggagccccgcacaggtggcctggccaagcggctggccaaccttatccggcgcgcccgaggtgtccccccactctgattcttgccctttccagcagctgcagctgccgtttctctctggggaggggagcccaagggctgtttctgccacttgctctcctcagagttggcttttgaaccaaagtgccctggaccaggtcagggcctacagctgtgttgtccagtacaggagccacgagccaaatgtggcatttgaatttgaattaacttagaaattcatttcctcacctgtagtggccacctctatattgaggtgctcaataagcaaaagtggtcggtggctgctgtattggacagcacagaaaaagatttccatcaccacagaaaggtcggctggcagcactggccaaggtgatggggtgtgctacacagtgtatgtcactgtgtagtggatggagtttactgtttgtggaataaaaacggctgtttccgtggtt

SEQ ID NO: 71174 - DNA, 1569 bp, Artificial Sequence
  derived and/or modified sequence
atggccgctgcaatgcctctcgcccttttggtgctgctgcttttagggccaggaggttggtgcctagctgaaccccctcgggacagccttcgggaggaattggtgattacgcctctgccgtcaggggatgtggctgcaacattccagtttagaacgaggtgggacagcgaattgcaaagggaaggcgtaagccactataggctgttccccaaagccctgggccagctgataagtaagtactctcttcgcgaacttcacctgtccttcacgcaaggcttctggcggacccgctattggggccctccttttctccaggccccttctgataccgaccattacttcctgcggtatgccgtgctgcctagagaagtcgtgtgtactgaaaacctgacaccatggaaaaaacttctcccttgttcttccaaagccggattgtcagtgcttctgaaggcagatcgccttttccatacatcgtatcactcccaggctgttcacatccggccagtctgtcgtaatgctagatgtaccagtatctcttgggaactcaggcaaactctgagtgtagtatttgacgcctttatcacgggtcagggaaagaaagattggagcttgtttagaatgtttagccggacactcacagagccatgtccactggcatccgagagcagagtgtacgttgacatcaccacctataaccaggacaatgagacactcgaggtgcacccaccacccactaccacttatcaggatgtcatcctcgggactcggaaaacctacgcaatctacgatctgcttgatacggcaatgataaataatagtcgcaatctcaatatacagcttaagtggaagcgaccgccagagaatgaagccccacctgtgccttttctgcatgcccagagatacgtgtccgggtacggactacagaagggcgaactgtccacactgctttataatacacacccgtatcgagctttccccgtgttgttgctggatactgtgccttggtatctgaggctgtatgttcacacactgacaattacctctaagggcaaagagaataagccctcatacattcactatcagcctgctcaggacagattgcagcctcatttgctagagatgctgatccagctccctgccaattccgtgaccaaggttagcatccagtttgagcgtgccctcttaaaatggacagaatatacgcccgacccaaatcacggcttttatgttagcccttctgttctctcagccctcgtgcccagtatggtggcagccaagcctgtggattgggaggaaagccccctcttcaattctctattcccagtgagtgacgggtcaaactatttcgtcaggctctatacggaacctctgctagtgaatctaccaacccctgattttagcatgccctacaatgtgatctgtctgacatgcactgtcgttgctgtttgctacggctccttttacaacttgttaactcggaccttccacattgaggagcctcggactgggggacttgctaagaggctcgctaatctgattaggagagctcgtggagtgccccctctatag

SEQ ID NO: 71175 - protein, 511 aa, Artificial Sequence
  derived and/or modified sequence
MAAAMPLALLVLLLLGPGGWCLAEPPRDSLREELVITPLPSGDVAATFQFRTRWDSELQREGVSHYRLFPKALGQLISKYSLRELHLSFTQGFWRTRYWGPPFLQAPSGAELWVWFQDTVTDVDKSWKELSNVLSGIFCASLNFIDSTNTVTPTASFKPLGLANDTDHYFLRYAVLPREVVCTENLTPWKKLLPCSSKAGLSVLLKADRLFHTSYHSQAVHIRPVCRNARCTSISWELRQTLSVVFDAFITGQGKKDWSLFRMFSRTLTEPCPLASESRVYVDITTYNQDNETLEVHPPPTTTYQDVILGTRKTYAIYDLLDTAMINNSRNLNIQLKWKRPPENGYIHYQPAQDRLQPHLLEMLIQLPANSVTKVSIQFERALLKWTEYTPDPNHGFYVSPSVLSALVPSMVAAKPVDWEESPLFNSLFPVSDGSNYFVRLYTEPLLVNLPTPDFSMPYNVICLTCTVVAVCYGSFYNLLTRTFHIEEPRTGGLAKRLANLIRRARGVPPL

SEQ ID NO: 71176 - DNA, 1536 bp, Artificial Sequence
  derived and/or modified sequence
atggccgccgccatgcccctggccctgctggtgctgctgctgctgggccccggcggctggtgcctggccgagccccccagagacagcctgagagaggagctggtgatcacccccctgcccagcggcgacgtggccgccaccttccagttcagaaccagatgggacagcgagctgcagagagagggcgtgagccactacagactgttccccaaggccctgggccagctgatcagcaagtacagcctgagagagctgcacctgagcttcacccagggcttctggagaaccagatactggggcccccccttcctgcaggcccccagcggcgccgagctgtgggtgtggttccaggacaccgtgaccgacgtggacaagagctggaaggagctgagcaacgtgctgagcggcatcttctgcgccagcctgaacttcatcgacagcaccaacaccgtgacccccaccgccagcttcaagcccctgggcctggccaacgacaccgaccactacttcctgagatacgccgtgctgcccagagaggtggtgtgcaccgagaacctgaccccctggaagaagctgctgccctgcagcagcaaggccggcctgagcgtgctgctgaaggccgacagactgttccacaccagctaccacagccaggccgtgcacatcagacccgtgtgcagaaacgccagatgcaccagcatcagctgggagctgagacagaccctgagcgtggtgttcgacgccttcatcaccggccagggcaagaaggactggagcctgttcagaatgttcagcagaaccctgaccgagccctgccccctggccagcgagagcagagtgtacgtggacatcaccacctacaaccaggacaacgagaccctggaggtgcaccccccccccaccaccacctaccaggacgtgatcctgggcaccagaaagacctacgccatctacgacctgctggacaccgccatgatcaacaacagcagaaacctgaacatccagctgaagtggaagagaccccccgagaacggctacatccactaccagcccgcccaggacagactgcagccccacctgctggagatgctgatccagctgcccgccaacagcgtgaccaaggtgagcatccagttcgagagagccctgctgaagtggaccgagtacacccccgaccccaaccacggcttctacgtgagccccagcgtgctgagcgccctggtgcccagcatggtggccgccaagcccgtggactgggaggagagccccctgttcaacagcctgttccccgtgagcgacggcagcaactacttcgtgagactgtacaccgagcccctgctggtgaacctgcccacccccgacttcagcatgccctacaacgtgatctgcctgacctgcaccgtggtggccgtgtgctacggcagcttctacaacctgctgaccagaaccttccacatcgaggagcccagaaccggcggcctggccaagagactggccaacctgatcagaagagccagaggcgtgccccccctgtag

SEQ ID NO: 71177 - DNA, 1536 bp, Artificial Sequence
  derived and/or modified sequence
atggccgcagctatgccgctcgccctgttggtcctgctactgctggggcccggagggtggtgtctcgcggaaccaccaagggacagcttgcgagaagagcttgtgatcaccccgctgccctcaggcgacgtggctgcaacttttcagttccggactcggtgggactccgaattgcagagagaaggagtgagtcattatcgcctttttccgaaggctctgggtcagctgatatctaagtacagcttaagggagctacacctgtcattcacgcaaggcttctggcgcacgcgttactggggccctccatttcttcaggctccctccggtgccgagctctgggtctggttccaggacactgtcactgatgtggataagtcatggaaagaactgtcaaatgtcctgagcgggatattctgcgcatccttgaattttattgactcaacaaacactgttacaccgacagccagctttaaacctctggggctggcaaatgacacagaccactatttcctgcgctacgcagtgctgcccagagaagtggtgtgcaccgaaaacctcactccctggaaaaaactgctgccttgctcctcaaaggctggccttagcgtgttgcttaaggctgataggctgtttcatacttcgtaccacagccaagcagtgcacattaggccggtatgcaggaacgctcgctgcacatccatctcctgggagttgcggcaaacccttagtgtcgtgtttgacgcttttatcacaggtcaggggaaaaaagactggagcctctttagaatgttctcaagaacactcacagagccttgccctcttgccagcgagagtagggtatatgtggatatcaccacttataatcaggataacgagacattagaggtgcatccgccccctacaactacttaccaggatgttattctgggtacgcgcaaaacatatgccatttacgacctcctcgacacagcaatgattaataacagccggaatctgaatatccagctgaagtggaagcgtccacccgaaaatggctacatacactatcagcccgcccaggatagattgcaacctcatctcctcgagatgctgatacagctcccagccaattccgtcactaaggtttctattcagttcgagcgtgccttgctcaaatggacggagtatacccccgaccccaatcacggcttctatgtgtcaccgtccgtgttatcggccctggtgccatctatggtcgccgctaagcccgtggactgggaggaatcccccctctttaactcactttttcccgtgagtgacgggtccaattactttgttagactgtacactgagcctctactggtgaatctaccgacgcctgattttagcatgccttacaacgtgatatgcctgacttgcacagtagtggcagtctgttatggttctttttacaatcttttgacccgaactttccacatcgaagagcccagaacaggtgggctagctaaacgccttgctaacctgatccggagggcccggggagtgcccccgctgtag

SEQ ID NO: 71178 - DNA, 1536 bp, Artificial Sequence
  derived and/or modified sequence
atggctgctgccatgcccctggccctgctggtgctgctgctgctgggccctgggggctggtgcctggccgagcccccccgggacagcctgcgggaggagctggtgatcacccccctgcccagcggagatgtggccgccaccttccagttccgcacccgctgggacagcgagctgcagcgggagggcgtgagccactaccgcctcttccccaaggccctgggccagctgatcagcaagtacagcctgcgggagctgcacctgtccttcacccagggcttctggaggacccgctactggggcccccccttcctgcaggcccccagcggggctgagctgtgggtgtggttccaggacacagtgacagatgtggacaagtcctggaaggagctgagcaatgtgctgagcggcatcttctgtgccagcctgaacttcatcgacagcaccaacacagtgacccccacagccagcttcaagcccctgggcctggccaatgacacagaccactacttcctgcgctatgctgtgctgccccgggaggtggtgtgcacagagaacctgaccccctggaagaagctgctgccctgcagcagcaaggccggcctgtctgtgctgctgaaggctgacaggctcttccacaccagctaccacagccaggccgtgcacatccggcctgtgtgcagaaatgcccgctgcaccagcatctcctgggagctgcggcagaccctgtctgtggtgtttgatgccttcatcaccggccagggcaagaaggactggagcctcttcaggatgttcagcaggaccctgacagagccctgccccctggccagcgagagccgggtgtatgtggacatcaccacctacaaccaggacaatgagaccctggaggtgcaccccccacccaccaccacctaccaggacgtcatcctgggcaccaggaagacctacgccatctatgacctgctggacacagccatgatcaacaacagcaggaacctgaacatccagctgaagtggaagaggcccccagaaaatggctacatccactaccagcctgcccaggaccggctgcagccccacctgctggagatgctgatccagctgcctgccaacagcgtgaccaaggtgtccatccagtttgagcgggccctgctgaagtggacagagtacaccccagaccccaaccacggcttctacgtgagccccagcgtgctgagcgccctggtgcccagcatggtggccgccaagcctgtggactgggaggagagccccctcttcaacagcctcttccctgtgtctgatggcagcaactactttgtgcggctgtacacagagcccctgctggtgaacctgcccaccccagacttctccatgccctacaacgtcatctgcctgacctgcaccgtggtggccgtgtgctacggcagcttctacaacctgctgaccaggaccttccacatcgaggagcccaggactggaggcctggccaagaggctggccaacctgatcagaagagcccggggcgtgccccccctgtag

SEQ ID NO: 71179 - DNA, 1536 bp, Artificial Sequence
  derived and/or modified sequence
atggccgccgccatgcccctggccctgctggtgctgctgctgctggggccaggggggtggtgccttgccgagcctccacgcgacagtctccgtgaagagcttgtgataacgccgctcccttcaggtgacgtcgcagcaacatttcagttccgtactcggtgggattctgagctgcaacgggaaggagtgtcccattaccgattgtttccaaaggccttaggtcagctgattagtaaatatagtctgcgtgagttgcacctgtccttcacccagggcttttggcgtacccggtattggggacccccatttctgcaggcccctagcggagctgagctgtgggtgtggttccaggatacagtcacagacgtggataagagttggaaggagctttcaaatgtcctgagcgggatcttttgtgcctcactgaacttcattgactcgaccaataccgtgacaccaacagcatcctttaagcccttggggctggctaacgacaccgaccattactttctccgctacgccgtgctgccccgagaggtggtgtgcacagagaacctgacaccatggaagaaactcctgccttgcagtagcaaagccggtctttctgtactgctcaaagcagaccggctgttccacacctcttaccactcccaggctgtccacattcggccggtgtgccggaacgcgagatgcacgtcaatctcctgggaattgaggcaaactttgtcagtggttttcgacgcatttattaccggtcagggcaagaaggactggtccctctttcgtatgttctccaggacactgactgagccctgtccacttgccagtgaatctagggtgtacgtggatatcaccacctacaatcaggacaacgagacgctcgaagtccatccaccaccaaccactacgtatcaggatgttatactgggcacccgcaagacctatgcgatttatgacctactcgacaccgctatgattaataactcccggaacctgaatattcagctcaagtggaaacgacctcctgagaatggatatatacattatcaacccgcccaggataggctccaaccgcacctgctcgagatgctgatccaactgccggcaaatagtgtgactaaagtgtccatccaatttgagcgggcgctgctgaagtggacagaatacactcccgaccctaatcatggcttctacgtttctcccagcgtgttgtccgctctagtgccctcaatggtggccgccaaaccagtcgattgggaagagagccctctgtttaactccctgtttcccgtgtcagacggatcaaattactttgtaagactgtatacagaacccctcttggttaatttacctactcccgatttcagcatgccctataatgtaatctgcttgacttgcaccgtagtggccgtctgctatggcagcttttacaacctgctaacacggacattccacattgaggagcctcggacaggcggactcgctaaacggctggccaatctgatccgaagggcccggggagtgcccccactttag

SEQ ID NO: 71180 - DNA, 2044 bp, Artificial Sequence
  derived and/or modified sequence
agcggaagtcacttctcacacgcctttcttattggataccggcttttcatggggccgagcgccgctgggtaggcggaagtagccgcaggcatggcggcggctatgccgcttgctctgctcgtcctgttgctcctggggcccggcggctggtgccttgcagaacccccacgcgacagcctgcgggaggaacttgtcatcaccccgctgccttccggggacgtagccgccacattccagttccgcacgcgctgggattcggagcttcagcgggaaggagtgtcccattacaggctctttcccaaagccctggggcagctgatctccaagtattctctacgggagctgcacctgtcattcacacaaggcttttggaggacccgatactgggggccacccttcctgcaggccccatcaggtgcagagctgtgggtctggttccaagacactgtcactgatgtggataaatcttggaaggagctcagtaatgtcctctcagggatcttctgcgcctctctcaacttcatcgactccaccaacacagtcactcccactgcctccttcaaacccctgggtctggccaatgacactgaccactactttctgcgctatgctgtgctgccgcgggaggtggtctgcaccgaaaacctcaccccctggaagaagctcttgccctgtagttccaaggcaggcctctctgtgctgctgaaggcagatcgcttgttccacaccagctaccactcccaggcagtgcatatccgccctgtttgcagaaatgcacgctgtactagcatctcctgggagctgaggcagaccctgtcagttgtatttgatgccttcatcacggggcagggaaagaaagactggtccctcttccggatgttctcccgaaccctcacggagccctgccccctggcttcagagagccgagtctatgtggacatcaccacctacaaccaggacaacgagacattagaggtgcacccacccccgaccactacatatcaggacgtcatcctaggcactcggaagacctatgccatctatgacttgcttgacaccgccatgatcaacaactctcgaaacctcaacatccagctcaagtggaagagacccccagagaatggttacatccactaccagcctgcccaggaccggctgcaaccccacctcctggagatgctgattcagctgccggccaactcagtcaccaaggtttccatccagtttgagcgggcgctgctgaagtggaccgagtacacgccagatcctaaccatggcttctatgtcagcccatctgtcctcagcgcccttgtgcccagcatggtagcagccaagccagtggactgggaagagagtcccctcttcaacagcctgttcccagtctctgatggctctaactactttgtgcggctctacacggagccgctgctggtgaacctgccgacaccggacttcagcatgccctacaacgtgatctgcctcacgtgcactgtggtggccgtgtgctatggctccttctacaatctcctcacccgaaccttccacatcgaggagccccgcacaggtggcctggccaagcggctggccaaccttatccggcgcgcccgaggtgtccccccactctgattcttgccctttccagcagctgcagctgccgtttctctctggggaggggagcccaagggctgtttctgccacttgctctcctcagagttggcttttgaaccaaagtgccctggaccaggtcagggcctacagctgtgttgtccagtacaggagccacgagccaaatgtggcatttgaatttgaattaacttagaaattcatttcctcacctgtagtggccacctctatattgaggtgctcaataagcaaaagtggtcggtggctgctgtattggacagcacagaaaaagatttccatcaccacagaaaggtcggctggcagcactggccaaggtgatggggtgtgctacacagtgtatgtcactgtgtagtggatggagtttactgtttgtggaataaaaacggctgtttccgtggtt

SEQ ID NO: 71181 - DNA, 1536 bp, Artificial Sequence
  derived and/or modified sequence
atggctgcagccatgccattggctctgctggtgttgcttttgctcggccctggagggtggtgcttggcagagcctcctcgagattcgcttcgagaagagttggtcatcacccctctgccttctggggatgttgccgctaccttccagtttaggacacgctgggactccgagctgcagcgcgagggggtcagccactatcggttgtttccgaaagccctgggccagctaatctccaagtacagcctccgcgaactgcacttgagcttcacccaggggttttggcgcacccggtattgggggcctccctttctgcaggccccatcaggtgccgagctgtgggtatggtttcaagataccgtgacggacgtggacaaatcgtggaaggaactgagcaatgttctctctgggatcttctgtgccagcctaaatttcatcgacagcacaaacacagtgaccccaactgcctcatttaagccactcggtctggccaatgatacagaccactacttccttaggtacgcggttctgcctagggaggttgtgtgcacggagaatttaacaccttggaaaaagttgcttccctgcagttccaaagctggactcagcgttctgctcaaggccgacagactgtttcacactagctaccactcgcaagccgttcacatccggcctgtgtgtcgcaacgccaggtgcaccagtatcagctgggaattaagacaaacactttctgtcgtttttgacgccttcattacaggacagggcaaaaaagattggagtcttttccggatgttctcacggactcttaccgaaccttgtcccttggcttctgaaagccgggtgtacgtcgatattaccacgtataaccaggacaacgagacacttgaagtccatccgccaccaaccacaacctatcaggacgtaatcctaggcactagaaagacgtatgcgatctatgatcttttggatactgccatgattaataattcacgcaacttaaacatccagctcaagtggaaacgccctcctgagaacgggtacatccactaccagcccgctcaggatcgactgcagcctcatttgctggaaatgctaattcaactcccagctaacagtgtgaccaaggttagcatccagttcgagagagccctcctcaagtggactgagtacaccccagacccgaaccacggattctatgtgtcgcctagcgtcttgagcgcactggtgccaagcatggtggcagcgaaaccagtggattgggaagaaagccccttattcaactccctgttccctgtgagtgacgggtcaaattacttcgtgcgcctttacacggagcctctgctggtgaatctgcctacacctgatttctcaatgccatacaatgtgatctgtctgacctgtaccgtggttgccgtctgctacggaagcttttacaacttactgaccagaactttccacatagaggaaccacggaccggcggtcttgcgaagagactggctaatttgattcgtcgcgcacgaggcgtccctcccctctag

SEQ ID NO: 71182 - protein, 476 aa, Artificial Sequence
  derived and/or modified sequence
MAAAMPLALLVLLLLGPGGWCLAEPPRDSLREELVITPLPSGDVAATFQFRTRWDSELQREGDTDHYFLRYAVLPREVVCTENLTPWKKLLPCSSKAGLSVLLKADRLFHTSYHSQAVHIRPVCRNARCTSISWELRQTLSVVFDAFITGQGKKDWSLFRMFSRTLTEPCPLASESRVYVDITTYNQDNETLEVHPPPTTTYQDVILGTRKTYAIYDLLDTAMINNSRNLNIQLKWKRPPENEAPPVPFLHAQRYVSGYGLQKGELSTLLYNTHPYRAFPVLLLDTVPWYLRLYVHTLTITSKGKENKPSYIHYQPAQDRLQPHLLEMLIQLPANSVTKVSIQFERALLKWTEYTPDPNHGFYVSPSVLSALVPSMVAAKPVDWEESPLFNSLFPVSDGSNYFVRLYTEPLLVNLPTPDFSMPYNVICLTCTVVAVCYGSFYNLLTRTFHIEEPRTGGLAKRLANLIRRARGVPPL

SEQ ID NO: 71183 - protein, 384 aa, Artificial Sequence
  derived and/or modified sequence
MAAAMPLALLVLLLLGPGGWCLAEPPRDSLREELVITPLPSGDVAATFQFRTRWDSELQREGDWSLFRMFSRTLTEPCPLASESRVYVDITTYNQDNETLEVHPPPTTTYQDVILGTRKTYAIYDLLDTAMINNSRNLNIQLKWKRPPENEAPPVPFLHAQRYVSGYGLQKGELSTLLYNTHPYRAFPVLLLDTVPWYLRLYVHTLTITSKGKENKPSYIHYQPAQDRLQPHLLEMLIQLPANSVTKVSIQFERALLKWTEYTPDPNHGFYVSPSVLSALVPSMVAAKPVDWEESPLFNSLFPVSDGSNYFVRLYTEPLLVNLPTPDFSMPYNVICLTCTVVAVCYGSFYNLLTRTFHIEEPRTGGLAKRLANLIRRARGVPPL

SEQ ID NO: 71184 - protein, 423 aa, Artificial Sequence
  derived and/or modified sequence
MWINLGRSSVMSSQGSSAPLSTSSTPPTQSLPLPPSNPWVWPMAGLSVLLKADRLFHTSYHSQAVHIRPVCRNARCTSISWELRQTLSVVFDAFITGQGKKDWSLFRMFSRTLTEPCPLASESRVYVDITTYNQDNETLEVHPPPTTTYQDVILGTRKTYAIYDLLDTAMINNSRNLNIQLKWKRPPENEAPPVPFLHAQRYVSGYGLQKGELSTLLYNTHPYRAFPVLLLDTVPWYLRLYVHTLTITSKGKENKPSYIHYQPAQDRLQPHLLEMLIQLPANSVTKVSIQFERALLKWTEYTPDPNHGFYVSPSVLSALVPSMVAAKPVDWEESPLFNSLFPVSDGSNYFVRLYTEPLLVNLPTPDFSMPYNVICLTCTVVAVCYGSFYNLLTRTFHIEEPRTGGLAKRLANLIRRARGVPPL

SEQ ID NO: 71185 - DNA, 1431 bp, Artificial Sequence
  derived and/or modified sequence
atggccgccgccatgcccctggccctgctggtgctgctgctgctgggccccggcggctggtgcctggccgagccccccagagacagcctgagagaggagctggtgatcacccccctgcccagcggcgacgtggccgccaccttccagttcagaaccagatgggacagcgagctgcagagagagggcgacaccgaccactacttcctgagatacgccgtgctgcccagagaggtggtgtgcaccgagaacctgaccccctggaagaagctgctgccctgcagcagcaaggccggcctgagcgtgctgctgaaggccgacagactgttccacaccagctaccacagccaggccgtgcacatcagacccgtgtgcagaaacgccagatgcaccagcatcagctgggagctgagacagaccctgagcgtggtgttcgacgccttcatcaccggccagggcaagaaggactggagcctgttcagaatgttcagcagaaccctgaccgagccctgccccctggccagcgagagcagagtgtacgtggacatcaccacctacaaccaggacaacgagaccctggaggtgcaccccccccccaccaccacctaccaggacgtgatcctgggcaccagaaagacctacgccatctacgacctgctggacaccgccatgatcaacaacagcagaaacctgaacatccagctgaagtggaagagaccccccgagaacgaggccccccccgtgcccttcctgcacgcccagagatacgtgagcggctacggcctgcagaagggcgagctgagcaccctgctgtacaacacccacccctacagagccttccccgtgctgctgctggacaccgtgccctggtacctgagactgtacgtgcacaccctgaccatcaccagcaagggcaaggagaacaagcccagctacatccactaccagcccgcccaggacagactgcagccccacctgctggagatgctgatccagctgcccgccaacagcgtgaccaaggtgagcatccagttcgagagagccctgctgaagtggaccgagtacacccccgaccccaaccacggcttctacgtgagccccagcgtgctgagcgccctggtgcccagcatggtggccgccaagcccgtggactgggaggagagccccctgttcaacagcctgttccccgtgagcgacggcagcaactacttcgtgagactgtacaccgagcccctgctggtgaacctgcccacccccgacttcagcatgccctacaacgtgatctgcctgacctgcaccgtggtggccgtgtgctacggcagcttctacaacctgctgaccagaaccttccacatcgaggagcccagaaccggcggcctggccaagagactggccaacctgatcagaagagccagaggcgtgccccccctgtag

SEQ ID NO: 71186 - DNA, 1155 bp, Artificial Sequence
  derived and/or modified sequence
atggccgccgccatgcccctggccctgctggtgctgctgctgctgggccccggcggctggtgcctggccgagccccccagagacagcctgagagaggagctggtgatcacccccctgcccagcggcgacgtggccgccaccttccagttcagaaccagatgggacagcgagctgcagagagagggcgactggagcctgttcagaatgttcagcagaaccctgaccgagccctgccccctggccagcgagagcagagtgtacgtggacatcaccacctacaaccaggacaacgagaccctggaggtgcaccccccccccaccaccacctaccaggacgtgatcctgggcaccagaaagacctacgccatctacgacctgctggacaccgccatgatcaacaacagcagaaacctgaacatccagctgaagtggaagagaccccccgagaacgaggccccccccgtgcccttcctgcacgcccagagatacgtgagcggctacggcctgcagaagggcgagctgagcaccctgctgtacaacacccacccctacagagccttccccgtgctgctgctggacaccgtgccctggtacctgagactgtacgtgcacaccctgaccatcaccagcaagggcaaggagaacaagcccagctacatccactaccagcccgcccaggacagactgcagccccacctgctggagatgctgatccagctgcccgccaacagcgtgaccaaggtgagcatccagttcgagagagccctgctgaagtggaccgagtacacccccgaccccaaccacggcttctacgtgagccccagcgtgctgagcgccctggtgcccagcatggtggccgccaagcccgtggactgggaggagagccccctgttcaacagcctgttccccgtgagcgacggcagcaactacttcgtgagactgtacaccgagcccctgctggtgaacctgcccacccccgacttcagcatgccctacaacgtgatctgcctgacctgcaccgtggtggccgtgtgctacggcagcttctacaacctgctgaccagaaccttccacatcgaggagcccagaaccggcggcctggccaagagactggccaacctgatcagaagagccagaggcgtgccccccctgtag

SEQ ID NO: 71187 - DNA, 1272 bp, Artificial Sequence
  derived and/or modified sequence
atgtggatcaacctgggcagaagcagcgtgatgagcagccagggcagcagcgcccccctgagcaccagcagcaccccccccacccagagcctgcccctgccccccagcaacccctgggtgtggcccatggccggcctgagcgtgctgctgaaggccgacagactgttccacaccagctaccacagccaggccgtgcacatcagacccgtgtgcagaaacgccagatgcaccagcatcagctgggagctgagacagaccctgagcgtggtgttcgacgccttcatcaccggccagggcaagaaggactggagcctgttcagaatgttcagcagaaccctgaccgagccctgccccctggccagcgagagcagagtgtacgtggacatcaccacctacaaccaggacaacgagaccctggaggtgcaccccccccccaccaccacctaccaggacgtgatcctgggcaccagaaagacctacgccatctacgacctgctggacaccgccatgatcaacaacagcagaaacctgaacatccagctgaagtggaagagaccccccgagaacgaggccccccccgtgcccttcctgcacgcccagagatacgtgagcggctacggcctgcagaagggcgagctgagcaccctgctgtacaacacccacccctacagagccttccccgtgctgctgctggacaccgtgccctggtacctgagactgtacgtgcacaccctgaccatcaccagcaagggcaaggagaacaagcccagctacatccactaccagcccgcccaggacagactgcagccccacctgctggagatgctgatccagctgcccgccaacagcgtgaccaaggtgagcatccagttcgagagagccctgctgaagtggaccgagtacacccccgaccccaaccacggcttctacgtgagccccagcgtgctgagcgccctggtgcccagcatggtggccgccaagcccgtggactgggaggagagccccctgttcaacagcctgttccccgtgagcgacggcagcaactacttcgtgagactgtacaccgagcccctgctggtgaacctgcccacccccgacttcagcatgccctacaacgtgatctgcctgacctgcaccgtggtggccgtgtgctacggcagcttctacaacctgctgaccagaaccttccacatcgaggagcccagaaccggcggcctggccaagagactggccaacctgatcagaagagccagaggcgtgccccccctgtag

SEQ ID NO: 71188 - DNA, 1431 bp, Artificial Sequence
  derived and/or modified sequence
atggcagcggcaatgcccctagctctgctcgtgttattgctactggggccggggggctggtgcctcgccgaacctccccgggacagtttgcgagaggaacttgtgataacacccctgcctagtggggatgtggccgccacctttcaatttaggacccgttgggattctgagctgcagagagagggggatactgatcactactttctccgctatgccgtcctgcctagggaagtcgtctgtactgagaacctgaccccttggaaaaagctgcttccctgctcgagcaaggctggcctgagcgtactgctgaaggctgaccgcctcttccatacttcttaccattcccaagctgtgcatatcagaccagtgtgtcggaacgcgagatgcaccagcatttcctgggaactgaggcagaccctgtctgtggtcttcgatgcattcatcacaggccagggtaagaaagactggagcctcttccgaatgttcagtcgaaccctgacagaaccttgccccttggcctcggaaagtcgcgtgtacgtggatattactacttataatcaagataacgaaactctagaggtgcatccgcctccgactacaacttatcaggatgtgattttaggcacaaggaagacctacgcaatatacgacttgttggataccgcgatgattaacaacagccgcaacttgaatatacaactcaaatggaagaggcctccagaaaatgaggccccacccgtacctttcctgcacgcacagcgctacgtgtcgggctatggcctccagaaaggggagcttagcaccttgctctacaatacacacccgtacagggctttccccgtgctattattggacacggttccctggtatctgaggctctacgtccataccctaaccatcacttcgaaaggcaaggagaataagccctcctacattcattaccaacctgctcaggacagactgcagcctcatttacttgagatgctgattcagctgcccgccaattcagttacaaaagtcagcatccagttcgaacgggctctattgaagtggacggaatatacaccggaccctaatcacggtttttacgtgtcccccagtgtgttgtctgccttagttccaagtatggtggctgccaaaccagttgactgggaagaatctcctctgttcaactcactctttccagtaagcgacgggagcaactatttcgtccgactttatacagagcctctgctggttaatttgcccactccagacttttctatgccttataacgtcatctgcctgacatgcaccgtggtggcggtgtgttatggcagtttctacaatcttcttacccggacctttcatatagaggaaccgagaactggcggcctggctaaaaggcttgcgaatctcatccgcagggcaagaggcgttccgccgttgtag

SEQ ID NO: 71189 - DNA, 1155 bp, Artificial Sequence
  derived and/or modified sequence
atggccgccgcaatgcctctggcacttctcgtcttgttgttattgggaccaggagggtggtgcctggcagaaccccccagagattcgttgagggaggaacttgtcatcacccctctgccgtctggggatgtggcagcaaccttccagttccgcacccgatgggattccgagctccaacgggagggggactggagcttattccgcatgttctcacgaacactcaccgagccctgtccactcgcctcagaatcgcgtgtgtatgtggacatcactacctataaccaggataatgagaccttagaggtccaccctccacccacgaccacctatcaagacgttattctgggaaccagaaagacttacgcaatttacgacctgttggacacagccatgataaataacagcagaaacttgaatatccagctaaagtggaaaaggcctccagaaaatgaggcaccccccgtcccattcctgcacgcacaacggtacgtgagtggatatgggctccagaagggcgagctctctacgttgttgtacaacactcacccatatagagcctttccagtactgcttctagacaccgtgccctggtatttgcgcctgtacgtccacaccctcacaatcacttctaagggaaaagaaaacaagccctcatatatccactaccagccagcccaggaccgattgcagcctcatttattggagatgctcatccagctccctgccaacagtgttacaaaggtgagtatacagttcgaacgcgcgctgctgaaatggaccgaatacaccccggatccgaatcacggcttctatgtgtctccctctgttctttccgcgctggtgcccagtatggtcgccgccaagcccgttgactgggaggagagccctttgtttaatagcctgtttcctgtcagcgacggctctaactatttcgtgcggctctacaccgaacccctccttgtgaacttgccaacccccgatttctcaatgccgtataatgtgatatgcctgacatgtacggtcgtcgctgtctgctatgggtccttttacaatctgttgactcgcacttttcacatagaagagccaagaactggcggtctggcgaaacgcctggccaacttaataagacgagccaggggcgtccccccactctag

SEQ ID NO: 71190 - DNA, 1272 bp, Artificial Sequence
  derived and/or modified sequence
atgtggataaacctgggacgttccagtgtgatgagcagccagggctccagcgcccccttgagtacaagctccactccccccactcaaagcctcccattacctccatccaacccatgggtctggcccatggccggtcttagcgtactccttaaggcagaccgactctttcacacctcctaccactctcaggctgtgcatatcagaccggtgtgccgaaacgcaaggtgcacatccatctcatgggaattgcggcagaccctgagcgtggtcttcgacgcattcataacaggccagggcaagaaagattggagtctcttccggatgttctccaggaccctgactgagccttgtcccctcgctagtgagagtagagtatacgtggacatcactacttataatcaggataatgagactcttgaggtccaccctccgcctactacaacatatcaggatgtcatactgggcacccgaaaaacatacgctatatacgacctgctagataccgccatgatcaataattcccgcaatctgaatattcagctgaagtggaaaagaccacccgaaaacgaggcccctcctgttcccttcctacacgctcagcggtacgtaagcggctacgggctccagaaaggggagctcagcactctgctgtacaatactcacccttatagggcatttcccgtgctgttgttggacaccgtgccttggtatctgcggctgtatgtccacaccctgactataaccagcaagggaaaggaaaacaaacccagctatatccactatcagcccgcccaggaccgactgcagccccatttacttgagatgctcatccaactacccgctaattctgtgacaaaggtaagcatccaattcgagcgggccctgctgaagtggactgagtacactcccgatcccaaccacggcttctacgtgagcccttccgtgttgtctgccctcgtgccctcaatggtcgccgctaagcctgtggattgggaggaatctccactgtttaactctctgtttcctgtctccgacgggagtaactatttcgtacggctgtacaccgaacctctgctggttaaccttccaaccccagatttctctatgccctacaacgtcatttgccttacttgcaccgtagttgccgtctgttatgggtccttctacaacctcctcaccaggacatttcacatagaggagcctagaacggggggcctggctaagcgcctggctaatctgattagacgagcgagaggcgtgccccctttgtag

SEQ ID NO: 71191 - DNA, 1431 bp, Artificial Sequence
  derived and/or modified sequence
atggctgctgccatgcccctggccctgctggtgctgctgctgctgggccctgggggctggtgcctggccgagcccccccgggacagcctgcgggaggagctggtgatcacccccctgcccagcggagatgtggccgccaccttccagttccgcacccgctgggacagcgagctgcagcgggagggggacacagaccactacttcctgcgctatgctgtgctgccccgggaggtggtgtgcacagagaacctgaccccctggaagaagctgctgccctgcagcagcaaggccggcctgtctgtgctgctgaaggctgacaggctcttccacaccagctaccacagccaggccgtgcacatccggcctgtgtgcagaaatgcccgctgcaccagcatctcctgggagctgcggcagaccctgtctgtggtgtttgatgccttcatcaccggccagggcaagaaggactggagcctcttcaggatgttcagcaggaccctgacagagccctgccccctggccagcgagagccgggtgtatgtggacatcaccacctacaaccaggacaatgagaccctggaggtgcaccccccacccaccaccacctaccaggacgtcatcctgggcaccaggaagacctacgccatctatgacctgctggacacagccatgatcaacaacagcaggaacctgaacatccagctgaagtggaagaggcccccagaaaatgaggcccctcctgtgcccttcctgcacgcccagagatatgtgtctggctacggcctgcagaagggggagctgagcaccctgctgtacaacacccacccctaccgggccttccctgtgctgctgctggacacagtgccctggtacctgcggctgtatgtgcacaccctgaccatcaccagcaagggcaaggagaacaagcccagctacatccactaccagcctgcccaggaccggctgcagccccacctgctggagatgctgatccagctgcctgccaacagcgtgaccaaggtgtccatccagtttgagcgggccctgctgaagtggacagagtacaccccagaccccaaccacggcttctacgtgagccccagcgtgctgagcgccctggtgcccagcatggtggccgccaagcctgtggactgggaggagagccccctcttcaacagcctcttccctgtgtctgatggcagcaactactttgtgcggctgtacacagagcccctgctggtgaacctgcccaccccagacttctccatgccctacaacgtcatctgcctgacctgcaccgtggtggccgtgtgctacggcagcttctacaacctgctgaccaggaccttccacatcgaggagcccaggactggaggcctggccaagaggctggccaacctgatccggcgggcccggggcgtgccccccctgtag

SEQ ID NO: 71192 - DNA, 1155 bp, Artificial Sequence
  derived and/or modified sequence
atggctgctgccatgcccctggccctgctggtgctgctgctgctgggccctgggggctggtgcctggccgagcccccccgggacagcctgcgggaggagctggtgatcacccccctgcccagcggagatgtggccgccaccttccagttccgcacccgctgggacagcgagctgcagcgggagggggactggagcctcttcaggatgttcagcaggaccctgacagagccctgccccctggccagcgagagccgggtgtatgtggacatcaccacctacaaccaggacaatgagaccctggaggtgcaccccccacccaccaccacctaccaggacgtcatcctgggcaccaggaagacctacgccatctatgacctgctggacacagccatgatcaacaacagcaggaacctgaacatccagctgaagtggaagaggcccccagaaaatgaggcccctcctgtgcccttcctgcacgcccagagatatgtgtctggctacggcctgcagaagggggagctgagcaccctgctgtacaacacccacccctaccgggccttccctgtgctgctgctggacacagtgccctggtacctgcggctgtatgtgcacaccctgaccatcaccagcaagggcaaggagaacaagcccagctacatccactaccagcctgcccaggaccggctgcagccccacctgctggagatgctgatccagctgcctgccaacagcgtgaccaaggtgtccatccagtttgagcgggccctgctgaagtggacagagtacaccccagaccccaaccacggcttctacgtgagccccagcgtgctgagcgccctggtgcccagcatggtggccgccaagcctgtggactgggaggagagccccctcttcaacagcctcttccctgtgtctgatggcagcaactactttgtgcggctgtacacagagcccctgctggtgaacctgcccaccccagacttctccatgccctacaacgtcatctgcctgacctgcaccgtggtggccgtgtgctacggcagcttctacaacctgctgaccaggaccttccacatcgaggagcccaggactggaggcctggccaagaggctggccaacctgatccggcgggcccggggcgtgccccccctgtag

SEQ ID NO: 71193 - DNA, 1272 bp, Artificial Sequence
  derived and/or modified sequence
atgtggatcaacctgggccgcagctctgtgatgagcagccagggcagcagcgcccccctgagcaccagcagcaccccacccacccagagcctgcccctgccccccagcaacccctgggtgtggcccatggccggcctgtctgtgctgctgaaggctgacaggctcttccacaccagctaccacagccaggccgtgcacatccggcctgtgtgcagaaatgcccgctgcaccagcatctcctgggagctgcggcagaccctgtctgtggtgtttgatgccttcatcaccggccagggcaagaaggactggagcctcttcaggatgttcagcaggaccctgacagagccctgccccctggccagcgagagccgggtgtatgtggacatcaccacctacaaccaggacaatgagaccctggaggtgcaccccccacccaccaccacctaccaggatgtgatcctgggcaccaggaagacctacgccatctatgacctgctggacacagccatgatcaacaacagcaggaacctgaacatccagctgaagtggaagaggcccccagaaaatgaggcccctcctgtgcccttcctgcacgcccagcgctacgtgtctggctacggcctgcagaagggggagctgagcaccctgctgtacaacacccacccctaccgggccttccctgtgctgctgctggacacagtgccctggtacctgcggctgtatgtgcacaccctgaccatcaccagcaagggcaaggagaacaagcccagctacatccactaccagcctgcccaggaccggctgcagccccacctgctggagatgctgatccagctgcctgccaacagcgtgaccaaggtgtccatccagtttgagcgggccctgctgaagtggacagagtacaccccagaccccaaccacggcttctacgtgagccccagcgtgctgagcgccctggtgcccagcatggtggccgccaagcctgtggactgggaggagagccccctcttcaacagcctcttccctgtgtctgatggcagcaactactttgtgcggctgtacacagagcccctgctggtgaacctgcccaccccagacttctccatgccctacaacgtcatctgcctgacctgcaccgtggtggccgtgtgctacggcagcttctacaacctgctgaccaggaccttccacatcgaggagcccaggactggaggcctggccaagaggctggccaacctgatcagaagagcccggggcgtgccccccctgtag

SEQ ID NO: 71194 - DNA, 1431 bp, Artificial Sequence
  derived and/or modified sequence
atggccgccgccatgcccctggccctgctggtgctgctgctgctgggaccgggaggttggtgcctggccgaaccacccagagactccctccgagaagaactggtgataacccctcttccttctggagacgtggctgctacatttcaattcaggacaagatgggactcagagctgcagcgggaaggagacacggatcactactttctgcgctatgcggtcctcccccgggaggtagtgtgcactgaaaacttgactccatggaagaagctacttccatgctcatcaaaggctggcctcagtgtcctgctcaaggctgaccgccttttccacacatcgtaccactctcaagcagtgcacattcggccagtctgcaggaatgcccgctgtactagtatcagctgggagctccggcagaccctctccgtggtcttcgatgcctttatcacagggcagggtaagaaagactggtccctctttagaatgttcagccgcaccctgacggaaccttgtcccctcgccagtgaatcacgtgtctacgtggacattacaacctacaatcaggataatgagaccctggaagtccaccctcctcctactaccacgtatcaagacgtcatcctagggacgaggaaaacatacgccatctatgacctgctcgataccgctatgatcaacaatagccgcaatcttaatattcagcttaagtggaaaagacctcctgaaaacgaggctcccccggtgcctttcttgcatgcacagagatacgtgtctggatacggactccagaaaggagagctatcaaccctgctctataacacacacccataccgagccttcccggtgctcttactggacactgtcccttggtatctgagattgtacgttcacacccttactatcacctctaagggcaaggagaacaagccgtcatatattcattaccagccggcccaagatcgactccagccccacttgctcgagatgctgattcagctgcccgccaactctgtaacaaaagtttcaattcaatttgaacgtgccctgctgaaatggacggaatatacaccggaccctaaccatggcttctatgtgtcaccatctgttctctccgcactcgtgccaagtatggtggctgctaaacccgtggattgggaagaaagtcccctgttcaacagtctctttcccgtaagcgatggtagtaattactttgtgcgcctgtacaccgaaccactcttagtgaacctgcctactccagattttagtatgccttataatgtgatttgcttaacatgcacagtggtcgcagtttgttacggctccttctataaccttctgactagaacatttcacattgaagagccccggacggggggtctggctaaaaggctagccaacctgatcagacgcgctagaggcgtgccacccctctag

SEQ ID NO: 71195 - DNA, 1155 bp, Artificial Sequence
  derived and/or modified sequence
atggccgccgccatgcccctggccctgctggtgctgctgctgctggggcccggcggttggtgtctggccgaacctccccgggattctctgagggaagaacttgtcatcaccccgctcccctccggtgatgtggccgctactttccaatttaggactaggtgggattctgagctgcaacgagagggggactggtcattgtttcgcatgttctcaaggacccttaccgagccatgcccactggcaagcgagagtagggtgtacgtggatattacaacgtacaaccaggacaatgagacgttggaggtgcatcctccccccacaactacctatcaagacgttatactgggaacaagaaagacatacgccatttacgatctgttggatacagccatgataaacaactctaggaatctgaacattcaattgaagtggaaaaggcctccagaaaacgaggcaccacctgtgccatttctgcacgcccagcggtatgtctccggctatggactgcagaaaggcgaactaagtacacttctgtataacacccacccataccgtgcttttcccgttctgctgctggacacagtcccttggtacctcaggttgtatgtgcacaccctgacaatcacctccaagggaaaggagaacaagccctcttacatccattaccagccagcccaggacagattgcagccgcacctattggagatgctcattcagctccctgccaacagcgtgactaaggtttccatacaatttgagagggccctgcttaagtggaccgagtacacccccgacccaaatcatgggttttacgtatccccatcagtgctctccgccctggtccctagcatggtagccgccaagccagtggactgggaagagagccctctattcaatagcctgtttcccgtttctgatggctccaattatttcgttagactgtatactgagccgctgctggttaatttgccaactcccgatttcagtatgccatacaacgtcatctgtttgacctgtactgtcgtagctgtgtgttatggttcgttttataacctgctgacaagaacgttccacatagaggagcctagaactgggggactggcaaaaaggttggctaatttgatacgacgcgctcgcggagtgccgccactgtag

SEQ ID NO: 71196 - DNA, 1272 bp, Artificial Sequence
  derived and/or modified sequence
atgtggatcaacctgggccggagcagcgtgatgagcagccagggctcttctgctccactctccacatcctcaactcccccaactcagtcactgcccttgcccccgtcaaacccctgggtttggccgatggccggcctaagtgtgctcctcaaggctgaccgtttgtttcacactagctatcattcccaggctgtccatattcgacctgtatgccgaaatgcacggtgcacgtccatctcttgggaactgcgacaaacactcagcgttgtcttcgatgcttttattacgggccagggtaagaaagactggtctctgttcagaatgtttagccgcactctaacggagccgtgtcctctcgcctcggagagccgtgtttatgttgatatcaccacttacaaccaggacaatgaaacactcgaagtacaccccccacctactacaacctatcaggatgtgatattggggactcgaaaaacctacgctatctatgatctgttagacaccgctatgatcaacaactctcgaaatctaaatattcagctcaagtggaagcgcccacccgagaacgaggcccccccggtgccatttttacacgctcagcggtatgtctctggctatgggctacaaaagggagagctgtctaccttactgtataacacgcatccctaccgcgcgtttcccgttcttcttttagacacggttccgtggtatctccgattgtatgtgcacacactgactatcacctctaaagggaaagagaataaacctagctacattcactatcaaccggcacaggatagactgcagccacatctactggagatgttgattcagctgcccgctaattcagtaaccaaggtgtcaatacaattcgaaagggcgttgctcaaatggaccgaatatacacccgaccccaatcacggattttatgtgtcgcccagcgttctgagcgcactcgtaccctccatggtcgcggcaaaaccagtggactgggaagaaagtccccttttcaacagcctgtttcccgtgagcgatggaagtaattactttgtcaggctttatactgaacctctgctagtgaatctgcctacacccgacttctccatgccgtacaatgttatttgtctgacgtgtactgttgtggctgtatgctacgggtccttttataatctgctgacacgaaccttccacattgaggaaccccggacggggggactggctaagagattagctaacctcatacgacgcgcaaggggggttccgcctctctag

SEQ ID NO: 71197 - DNA, 1939 bp, Artificial Sequence
  derived and/or modified sequence
agcggaagtcacttctcacacgcctttcttattggataccggcttttcatggggccgagcgccgctgggtaggcggaagtagccgcaggcatggcggcggctatgccgcttgctctgctcgtcctgttgctcctggggcccggcggctggtgccttgcagaacccccacgcgacagcctgcgggaggaacttgtcatcaccccgctgccttccggggacgtagccgccacattccagttccgcacgcgctgggattcggagcttcagcgggaaggagacactgaccactactttctgcgctatgctgtgctgccgcgggaggtggtctgcaccgaaaacctcaccccctggaagaagctcttgccctgtagttccaaggcaggcctctctgtgctgctgaaggcagatcgcttgttccacaccagctaccactcccaggcagtgcatatccgccctgtttgcagaaatgcacgctgtactagcatctcctgggagctgaggcagaccctgtcagttgtatttgatgccttcatcacggggcagggaaagaaagactggtccctcttccggatgttctcccgaaccctcacggagccctgccccctggcttcagagagccgagtctatgtggacatcaccacctacaaccaggacaacgagacattagaggtgcacccacccccgaccactacatatcaggacgtcatcctaggcactcggaagacctatgccatctatgacttgcttgacaccgccatgatcaacaactctcgaaacctcaacatccagctcaagtggaagagacccccagagaatgaggcccccccagtgcccttcctgcatgcccagcggtacgtgagtggctatgggctgcagaagggggagctgagcacactgctgtacaacacccacccataccgggccttcccggtgctgctgctggacaccgtaccctggtatctgcggctgtatgtgcacaccctcaccatcacctccaagggcaaggagaacaaaccaagttacatccactaccagcctgcccaggaccggctgcaaccccacctcctggagatgctgattcagctgccggccaactcagtcaccaaggtttccatccagtttgagcgggcgctgctgaagtggaccgagtacacgccagatcctaaccatggcttctatgtcagcccatctgtcctcagcgcccttgtgcccagcatggtagcagccaagccagtggactgggaagagagtcccctcttcaacagcctgttcccagtctctgatggctctaactactttgtgcggctctacacggagccgctgctggtgaacctgccgacaccggacttcagcatgccctacaacgtgatctgcctcacgtgcactgtggtggccgtgtgctatggctccttctacaatctcctcacccgaaccttccacatcgaggagccccgcacaggtggcctggccaagcggctggccaaccttatccggcgcgcccgaggtgtccccccactctgattcttgccctttccagcagctgcagctgccgtttctctctggggaggggagcccaagggctgtttctgccacttgctctcctcagagttggcttttgaaccaaagtgccctggaccaggtcagggcctacagctgtgttgtccagtacaggagccacgagccaaatgtggcatttgaatttgaattaacttagaaattcatttcctcacctgtagtggccacctctatattgaggtgctcaataagcaaaagtggtcggtggctgctgtattggacagcacagaaaaagatttccatcaccacagaaaggtcggctggcagcactggccaaggtgatggggtgtgctacacagtgtatgtcactgtgtagtggatggagtttactgtttgtggaataaaaacggctgtttccgtggtt

SEQ ID NO: 71198 - DNA, 1585 bp, Artificial Sequence
  derived and/or modified sequence
aagtagccgcaggcatggcggcggctatgccgcttgctctgctcgtcctgttgctcctggggcccggcggctggtgccttgcagaacccccacgcgacagcctgcgggaggaacttgtcatcaccccgctgccttccggggacgtagccgccacattccagttccgcacgcgctgggattcggagcttcagcgggaaggagactggtccctcttccggatgttctcccgaaccctcacggagccctgccccctggcttcagagagccgagtctatgtggacatcaccacctacaaccaggacaacgagacattagaggtgcacccacccccgaccactacatatcaggacgtcatcctaggcactcggaagacctatgccatctatgacttgcttgacaccgccatgatcaacaactctcgaaacctcaacatccagctcaagtggaagagacccccagagaatgaggcccccccagtgcccttcctgcatgcccagcggtacgtgagtggctatgggctgcagaagggggagctgagcacactgctgtacaacacccacccataccgggccttcccggtgctgctgctggacaccgtaccctggtatctgcggctgtatgtgcacaccctcaccatcacctccaagggcaaggagaacaaaccaagttacatccactaccagcctgcccaggaccggctgcaaccccacctcctggagatgctgattcagctgccggccaactcagtcaccaaggtttccatccagtttgagcgggcgctgctgaagtggaccgagtacacgccagatcctaaccatggcttctatgtcagcccatctgtcctcagcgcccttgtgcccagcatggtagcagccaagccagtggactgggaagagagtcccctcttcaacagcctgttcccagtctctgatggctctaactactttgtgcggctctacacggagccgctgctggtgaacctgccgacaccggacttcagcatgccctacaacgtgatctgcctcacgtgcactgtggtggccgtgtgctatggctccttctacaatctcctcacccgaaccttccacatcgaggagccccgcacaggtggcctggccaagcggctggccaaccttatccggcgcgcccgaggtgtccccccactctgattcttgccctttccagcagctgcagctgccgtttctctctggggaggggagcccaagggctgtttctgccacttgctctcctcagagttggcttttgaaccaaagtgccctggaccaggtcagggcctacagctgtgttgtccagtacaggagccacgagccaaatgtggcatttgaatttgaattaacttagaaattcatttcctcacctgtagtggccacctctatattgaggtgctcaataagcaaaagtggtcggtggctgctgtattggacagcacagaaaaagatttccatcaccacagaaaggtcggctggcagcactggccaaggtgatggggtgtgctacacagtgtatgtcactgtgtagtggatggagtttactgtttgtggaataaaaacggctgtttccgtgg

SEQ ID NO: 71199 - DNA, 1429 bp, Artificial Sequence
  derived and/or modified sequence
ggaagtagccgcaggcatggcggcggctatgccgcttgctctgctcgtcctgttgctcctggggcccggcggctggtgccttgcagaacccccacgcgacagcctgcgggaggaacttgtcatcaccccgctgccttccggggacgtagccgccacattccagttccgcacgcgctgggattcggagcttcagcgggaaggaggcaggcctctctgtgctgctgaaggcagatcgcttgttccacaccagctaccactcccaggcagtgcatatccgccctgtttgcagaaatgcacgctgtactagcatctcctgggagctgaggcagaccctgtcagttgtatttgatgccttcatcacggggcagggaaagaaagactggtccctcttccggatgttctcccgaaccctcacggagccctgccccctggcttcagagagccgagtctatgtggacatcaccacctacaaccaggacaacgagacattagaggtgcacccacccccgaccactacatatcaggacgtcatcctaggcactcggaagacctatgccatctatgacttgcttgacaccgccatgatcaacaactctcgaaacctcaacatccagctcaagtggaagagacccccagagaatgaggcccccccagtgcccttcctgcatgcccagcggtacgtgagtggctatgggctgcagaagggggagctgagcacactgctgtacaacacccacccataccgggccttcccggtgctgctgctggacaccgtaccctggtatctgcggctgtatgtgcacaccctcaccatcacctccaagggcaaggagaacaaaccaagttacatccactaccagcctgcccaggaccggctgcaaccccacctcctggagatgctgattcagctgccggccaactcagtcaccaaggtttccatccagtttgagcgggcgctgctgaagtggaccgagtacacgccagatcctaaccatggcttctatgtcagcccatctgtcctcagcgcccttgtgcccagcatggtagcagccaagccagtggactgggaagagagtcccctcttcaacagcctgttcccagtctctgatggctctaactactttgtgcggctctacacggagccgctgctggtgaacctgccgacaccggacttcagcatgccctacaacgtgatctgcctcacgtgcactgtggtggccgtgtgctatggctccttctacaatctcctcacccgaaccttccacatcgaggagccccgcacaggtggcctggccaagcggctggccaaccttatccggcgcgcccgaggtgtccccccactctgattcttgccctttccagcagctgcagctgccgtttctctctggggaggggagcccaagggctgtttctgccacttgctctcctc

SEQ ID NO: 71200 - DNA, 1431 bp, Artificial Sequence
  derived and/or modified sequence
atggctgccgctatgcctctggccctgctcgtgcttctcctcttaggacccggagggtggtgtttagctgagccgcctcgcgacagcctcagagaagaactcgtgatcacacctttacccagtggcgacgtggcagccacctttcagtttcgcactcgttgggatagcgaacttcagcgcgagggagatactgaccactactttctgcgttatgccgtcctgccaagggaagtggtgtgtactgagaatctaaccccctggaaaaagctcctcccatgttcttcaaaagcgggattgagcgtgctcctcaaagccgatcggctttttcatacctcctatcacagccaggcagtgcacatccgtccagtttgccgcaatgcacgctgtacttccatcagctgggaattgaggcagaccctctctgtggtttttgatgcgttcataaccggccaggggaagaaggactggtctctgttccgcatgttttccagaacgctgactgaaccctgccccctggcctcagagagtcgcgtgtacgttgacattaccacatataaccaagacaatgaaacactcgaggtccatccaccgccaactaccacctaccaggatgtcatcttggggacacgtaaaacctacgcaatatatgatctgctggataccgccatgattaataacagcagaaacctgaatattcagctgaagtggaagaggcctcccgaaaacgaggcaccgccagtgccctttctccatgcacagagatacgttagtgggtatggattacagaagggggaattatcaactttgctctataacactcatccttacagagccttcccagtcctgcttctggacaccgtgccgtggtacctccgactgtatgtacacaccctgactatcacttccaagggaaaagagaataagccatcctacattcattaccaacccgcacaggatcggttgcaacctcaccttttggagatgctcatacagcttccagcgaactcggtcacaaaggtaagcatccagttcgaacgagctctgctgaagtggaccgagtacactccggatcccaaccacggcttctacgtcagcccttccgttctgtccgccctcgtccccagcatggtggcagctaagcctgtggattgggaagaatcaccactatttaatagcctgtttcccgtcagtgatggaagtaattactttgtgcgattgtatactgaacctctactagtgaatctccccacccccgacttttctatgccatacaatgttatatgcctcacttgcactgtcgtagccgtttgctatggctcgttttacaatctgcttacaagaactttccacatagaagaacccagaactggcggattggctaaacgtttagctaatctgatccgtagagcccgtggtgtcccaccattgtag

SEQ ID NO: 71201 - DNA, 1155 bp, Artificial Sequence
  derived and/or modified sequence
atggccgcagccatgccacttgcgctcctagtactccttttgctcgggccagggggatggtgcctggctgagccaccgagagatagcctgagggaggagctagttattacccctctaccatcaggggacgtggcagcgacgtttcagttcagaacccgctgggattcagaactgcaacgggaaggagattggtcccttttccggatgttttcccgtacactgacagagccatgcccacttgcgtccgagtccagggtgtatgttgacattaccacgtataatcaggataatgagacgcttgaagtgcatccaccacctacgacaacctatcaggacgtgatattaggcacaagaaagacttacgcgatctacgacctgctggacactgcgatgatcaataatagtcgcaatctcaatattcagctcaaatggaagcggcctcccgagaatgaagcgcctccagtacccttcttgcacgcgcagaggtacgtgtcgggatacggcctgcagaagggcgagctgtccacactgctgtacaatacccatccctatagagcctttcctgtcctgttattggatacagtgccctggtacctgaggttatacgtgcacacgcttaccattacttcgaaagggaaagaaaacaaaccctcgtacatacactatcagccagctcaagaccgattgcaaccacacctcttggaaatgctgatacaactccctgcaaatagcgtgactaaagtgtccatccagttcgagagagcactgctgaaatggactgagtatacacctgatccaaatcatggcttttatgtttcgccgtcagtactctctgcgctggttccttccatggtcgcagcaaaacctgtggactgggaagagagcccactcttcaattcattatttcctgtgagtgatggcagcaactacttcgtacgattatacacagagccgctgctcgtgaacctgccgacgcccgatttttctatgccatacaatgtgatctgcctgacctgtactgtcgttgctgtgtgttatggctccttctacaatctgctgaccagaaccttccatatcgaggaaccacggactggcggtcttgcgaagagactggctaaccttattaggagagctaggggcgtgccacctctctag

SEQ ID NO: 71202 - DNA, 1272 bp, Artificial Sequence
  derived and/or modified sequence
atgtggataaatctggggcgttcctctgtgatgtcgtctcaggggagcagtgccccattgagcacctcctccacgcctcctacacagagtctgccacttccaccatctaacccctgggtttggccaatggccggactcagcgttctgctgaaggcagaccgcctgttccacacctcttatcattcccaggccgtgcacattcgcccagtctgtcgtaacgcacggtgcacaagcattagttgggagctgagacagaccctgagcgttgtgttcgacgcctttataacaggacagggaaaaaaggactggagcttattcagaatgttcagccggacactcaccgagccgtgccccttagcaagtgagtctcgggtgtacgtcgatattactacctacaatcaggacaacgaaaccctggaggtccacccacccccaactaccacctaccaggatgtgatactcggcacccgaaagacatacgctatctacgatctgctggataccgccatgattaacaactcacgcaatttaaatatccagttgaaatggaagaggcctcccgagaatgaggctcctccggtgccattcctccacgcccagagatatgtgtccggttacgggttgcagaagggagaattgagtacccttctgtacaacacgcatccatatcgcgctttccctgtgctcctattagacacagttccatggtacttacggctgtacgtccacacactgacaataacttccaaggggaaggagaataaaccttcctacattcactaccagcccgcacaggaccgtctacagccccatttgttggaaatgctcatccaactccccgctaactctgttaccaaggtgagtattcagttcgagcgggctctattaaagtggactgaatatacaccagacccaaatcatggcttctatgtctctcctagtgttctgtctgcccttgtgccatcaatggtagcagctaagcctgtcgattgggaagaaagccctctgtttaactctctgttccccgtctcagacggatcgaattatttcgtgaggctgtacactgaaccccttctcgttaacctccccacccctgatttttccatgccctataacgtaatttgcctcacttgcaccgtcgtcgcagtgtgttacggttccttctataacctcttgacaagaacttttcacatcgaggaacctagaaccggcggtttggccaaacggttggcaaatctgatccgccgagcacggggagttcctcccctgtag

SEQ ID NO: 71203 - protein, 542 aa, Artificial Sequence
  derived and/or modified sequence
MTFSEILDRVGSMGHFQFLHVAILGLPILNMANHNLLQIFTAATPVHHCRPPHNASTGPWVLPMGPNGKPERCLRFVHPPNASLPNDTQRAMEPCLDGWVYNSTKDSIVTEWDLVCNSNKLKEMAQSIFMAGILIGGLVLGDLSDRFGRRPILTCSYLLLAASGSGAAFSPTFPIYMVFRFLCGFGISGITLSTVILNVEWVPTRMRAIMSTALGYCYTFGQFILPGLAYAIPQWRWLQLTVSIPFFVFFLSSWWTPESIRWLVLSGKSSKALKILRRVAVFNGKKEEGERLSLEELKLNLQKEISLAKAKYTASDLFRIPMLRRMTFCLSLAWFATGFAYYSLAMGVEEFGVNLYILQIIFGGVDVPAKFITILSLSYLGRHTTQAAALLLAGGAILALTFVPLDLQTVRTVLAVFGKGCLSSSFSCLFLYTSELYPTVIRQTGMGVSNLWTRVGSMVSPLVKITGEVQPFIPNIIYGITALLGGSAALFLPETLNQPLPETIEDLENWSLRAKKPKQEPEVEKASQRIPLQPHGPGLGSS

SEQ ID NO: 71204 - protein, 528 aa, Artificial Sequence
  derived and/or modified sequence
MTFSEILDRVGSMGHFQFLHVAILGLPILNMANHCRPPHNASTGPWVLPMGPNGKPERCLRFVHPPNASLPNDTQRAMEPCLDGWVYNSTKDSIVTEWDLVCNSNKLKEMAQSIFMAGILIGGLVLGDLSDRFGRRPILTCSYLLLAASGSGAAFSPTFPIYMVFRFLCGFGISGITLSTVILNVEWVPTRMRAIMSTALGYCYTFGQFILPGLAYAIPQWRWLQLTVSIPFFVFFLSSWWTPESIRWLVLSGKSSKALKILRRVAVFNGKKEEGERLSLEELKLNLQKEISLAKAKYTASDLFRIPMLRRMTFCLSLAWFATGFAYYSLAMGVEEFGVNLYILQIIFGGVDVPAKFITILSLSYLGRHTTQAAALLLAGGAILALTFVPLDLQTVRTVLAVFGKGCLSSSFSCLFLYTSELYPTVIRQTGMGVSNLWTRVGSMVSPLVKITGEVQPFIPNIIYGITALLGGSAALFLPETLNQPLPETIEDLENWSLRAKKPKQEPEVEKASQRIPLQPHGPGLGSS

SEQ ID NO: 71205 - DNA, 1629 bp, Artificial Sequence
  derived and/or modified sequence
atgacattctctgagatacttgatagggttggatccatgggccactttcagtttctgcatgttgcgattttaggcctccccattcttaacatggctaaccataacttactgcagattttcacagccgctacgcccgtacatcactgccgcccacctcacaacgcttcaacggggccttgggttctgccgatgggcccaaacgggaagcccgaaagatgtctccggttcgtgcacccaccaaacgcaagtctgccaaatgacacacagagagctatggaaccttgtttggatgggtgggtatataacagtacaaaagacagtatcgttaccgaatgggacctggtctgcaattctaataagctcaaggaaatggcacagagcatctttatggccggcatcctgatcggcggtttagtgctcggagacctgtcggatcgcttcggccgccggcctatcctgacttgctcatacctcctcctagctgcctctggctccggtgcagctttctcccccacgttccccatctatatggtcttccgctttttatgcggattcggaatcagtggcatcacactcagcactgttatcctgaatgtggagtgggtgcctactcggatgcgagctataatgtcgacagcactcggctactgttacacctttggccagttcattctgcctggactggcctacgccatacctcaatggcgctggctgcaactgacagtgtcaatcccattctttgtctttttcctgagtagctggtggactcctgaatctattaggtggctggtgctgtcagggaaatcttcgaaagcactgaagatcctgcgcagggtggccgtatttaatggcaagaaggaggaaggagagaggctgagcttggaggaacttaagctgaatctccagaaggaaattagtttggccaaagctaagtatactgctagtgacctgttcagaatacctatgttgcgccgcatgacattctgtctttcactagcttggtttgccactggcttcgcttattactccctggctatgggtgtggaggagttcggagttaatttgtatatacttcaaattatttttggtggagtcgatgttccagccaagttcatcaccatcctcagcctgtcttaccttggacgacacaccacacaggcggccgccctgctccttgccgggggggctattctcgccctcaccttcgttcctctggacctgcagactgtccgcacggtactagcagtgtttggaaaaggttgtttatcaagcagtttcagctgtctcttcctttacacctcggaactctaccccactgtgataagacaaactgggatgggggtgtcgaacctgtggacccgggtggggagcatggtgagcccactggtcaagataacaggggaggtgcagccatttatcccaaacatcatctacgggataaccgcgcttttgggaggatccgctgcattgtttctacctgagactttgaaccaaccactgcccgagacaattgaagacctcgagaattggagtctacgcgctaagaagcccaaacaggagccagaagtggaaaaggccagccagcgcattcctctccagccacatggaccgggactcggtagcagttag

SEQ ID NO: 71206 - DNA, 1629 bp, Artificial Sequence
  derived and/or modified sequence
atgacatttagtgaaattctcgatcgcgtaggcagtatgggtcactttcagtttctccacgttgccatacttgggttacccatcttgaacatggcaaatcataatctactgcaaatcttcactgcagctaccccggtgcaccattgtagacctcctcacaacgcatcaactgggccctgggtgctgccaatgggccctaatggaaagcctgagcggtgcctgcggtttgtgcatcctcctaatgcatccctgccaaatgatactcagcgagctatggagccctgcctcgacgggtgggtctacaattcaacaaaagacagcatcgtcactgagtgggatctagtttgcaatagtaataagctcaaggaaatggcccagtccatctttatggccggcatcctcattgggggtcttgtgctgggcgatctgagcgatcggtttggccgccggcctattctgacctgtagctacctgctgctcgcagcatccgggtcaggggctgccttttccccaacatttccgatctacatggtttttcgttttttgtgcgggtttggcatcagtggcattaccttgtccacagttattctgaacgtggagtgggtccccaccaggatgcgcgccataatgtctaccgcactaggatattgctacacgttcgggcagttcatcctgcccggactggcctacgctattccccagtggagatggctgcagctcacagtctctattcccttctttgtgttctttttgagttcttggtggactccagaaagcattaggtggctggtcctgtctggaaagtcttctaaagccctgaaaatcctcagacgagtggctgtcttcaatggcaagaaagaagaaggcgaacgactgagcctggaagaattaaaacttaatctccaaaaggagatatccttggcaaaggccaaatacacagcctccgacctgtttaggattccaatgttgcgtcgcatgacattctgtctgtccctggcatggttcgccactggattcgcctactactcacttgctatgggagtcgaagagtttggtgtgaatctctatatccttcaaatcattttcggaggagtcgacgtgccggccaaattcattacaattctgagcctcagctacctcggtagacataccacacaagcagccgcccttctgttggcagggggcgcgattctggcgttgactttcgtgccgctggacttgcagactgtacggacagttctggctgtgtttggcaagggctgcctatcatcgtcatttagttgcctgtttttgtacacaagtgaactgtaccccactgtcatcagacagacgggtatgggcgtcagcaatctgtggacaagagttgggtctatggtcagtcctctggtgaagatcacaggcgaggtacagccatttataccaaacatcatctacgggatcacagctctcctcggaggcagcgcagccttgtttctccccgagactttaaatcagccactcccggaaaccatcgaggatcttgagaattggagcctacgggcaaaaaagccaaagcaggagcctgaagtcgaaaaagctagtcaacggattccactgcagccacatgggccggggttaggatccagctag

SEQ ID NO: 71207 - DNA, 1587 bp, Artificial Sequence
  derived and/or modified sequence
atgacattctctgaaatcctggaccgcgtcgggtccatgggccattttcaatttctccatgttgctattctcggcttgccgattcttaacatggccaaccattgcagaccaccccataacgcttcaacaggaccatgggtcttaccaatgggtcctaacgggaaaccggagagatgtttgagatttgtacacccaccgaacgcttcactgccaaacgacactcagcgtgccatggaaccttgcctggacggttgggtgtacaatagcaccaaagacagcatcgtcacggagtgggaccttgtatgtaatagtaataaactgaaggaaatggctcagagcatttttatggcaggtatcttgataggggggctggtccttggagatttatccgatcgctttgggcggcgcccaattctgacatgtagttacttgctactcgccgcatctggttccggagccgctttcagtcctacattcccgatctacatggtcttcaggttcttatgcggcttcgggatctcagggataaccttatctactgtgatcttaaacgtggagtgggttcctacaagaatgagggctataatgagcaccgcactaggttattgctatacctttgggcaatttattcttcctggcctggcctacgccataccacagtggaggtggctgcaattgacagtttctataccattttttgtgttttttctaagttcatggtggacacctgagagtattcgctggttagtactctccggcaagtcatccaaagccttaaagattcttcggagagtagcagtatttaacggaaagaaggaagagggggagaggctaagtttggaggaactcaagttgaacctgcagaaggagatttcattggcaaaggcaaaatataccgccagcgaccttttcaggatccccatgctcagaaggatgaccttttgtctaagcctcgcgtggtttgctacaggttttgcctactatagcttggctatgggcgttgaggagttcggtgtgaacctgtacatcctccaaatcattttcgggggcgtggacgtcccagcgaagttcatcaccattctgagcttaagttacctggggcgccatactacccaggccgccgccctcctgttggcgggcggggcgatcctggccctgacgtttgtgccactggacctgcaaaccgtccgtaccgtgctggccgttttcggtaaaggctgcctcagcagctctttctcatgtctattcctgtatacatcagaactttatcctaccgtgatccgacagacaggaatgggtgtgtccaacctttggacacgcgtgggcagcatggtttcgcctttggtgaagattacaggcgaggtccagccctttatccctaatatcatctacggcatcacggccttgctcggaggttccgccgctctgtttttacctgaaacgttaaatcagcctctccctgaaacaattgaggatcttgagaactggtctttgagggccaagaagcctaagcaggagccagaggtcgaaaaagcgtctcagagaatacccctccagccccacggccccggcctgggatctagctag

SEQ ID NO: 71208 - DNA, 1629 bp, Artificial Sequence
  derived and/or modified sequence
atgaccttcagcgagatcctggacagagtgggctccatgggccacttccagttcctgcacgtggccatcctgggcctgcccatcctgaacatggccaaccacaacctgctgcagatcttcaccgctgccacccctgtgcaccactgcaggcctccccacaatgccagcacaggcccctgggtgctgcccatgggccccaacgggaagccagagcgctgcctgcgctttgtgcaccccccaaatgccagcctgcccaatgacacccagagggccatggagccctgcctggatggctgggtgtacaacagcaccaaggacagcatcgtgacagagtgggacctggtgtgcaacagcaacaagctgaaggagatggcccagagcatcttcatggccggcatcctgattggaggcctggtgctgggggacctgagtgacagatttggaagaagacccatcctgacctgcagctacctgctgctggccgccagcggcagcggggccgccttcagccccaccttccccatctacatggtgttccgcttcctgtgtggcttcggcatcagcggcatcaccctgagcaccgtcatcctgaatgtggagtgggtgcccaccaggatgagggccatcatgagcacagccctgggctactgctacaccttcggccagttcatcctgcccggcctggcctatgccatcccccagtggcgctggctgcagctgactgtgtccatccccttctttgtgttcttcctgagctcctggtggaccccagagagcatccgctggctggtgctgagcggcaagagcagcaaggccctgaagatcctgcggcgggtggccgtgttcaacgggaagaaggaggagggggagcggctgagcctggaggagctgaagctgaacctgcagaaggagatcagcctggccaaggccaagtacacagccagtgacctcttccgcatccccatgctgcggaggatgaccttctgcctgagcctggcctggtttgccactggatttgcctactacagcctggccatgggcgtggaggagtttggagtgaacctgtacatcctgcagatcatctttggaggagtggatgtgcctgccaagttcatcaccatcctgagcctgagctacctgggccgccacaccacccaggccgccgccctgctgctggccggcggggccatcctggccctgacctttgtgcccctggacctgcagacagtgaggacagtgctggccgtgtttgggaagggctgcctgagcagcagcttcagctgcctcttcctgtacaccagcgagctgtaccccaccgtcatccggcagacaggcatgggcgtgagcaacctgtggaccagggtgggctccatggtgagccccctggtgaagatcaccggggaggtgcagcccttcatccccaacatcatctacggcatcacagccctgctgggcggcagcgctgccctcttcctgcctgagaccctgaaccagcccctgcctgagaccatcgaggacctggagaactggagcctgcgggccaagaagcccaagcaggagcctgaggtggagaaggccagccagaggatccccctgcagccccacggccctggcctgggcagcagctag

SEQ ID NO: 71209 - DNA, 1587 bp, Artificial Sequence
  derived and/or modified sequence
atgaccttcagcgagatcctggacagagtgggctccatgggccacttccagttcctgcacgtggccatcctgggcctgcccatcctgaacatggccaaccactgcaggcctccccacaatgccagcacaggcccctgggtgctgcccatgggccccaacgggaagccagagcgctgcctgcgctttgtgcaccccccaaatgccagcctgcccaatgacacccagagggccatggagccctgcctggatggctgggtgtacaacagcaccaaggacagcatcgtgacagagtgggacctggtgtgcaacagcaacaagctgaaggagatggcccagagcatcttcatggccggcatcctgattggaggcctggtgctgggggacctgagtgacagatttggaagaagacccatcctgacctgcagctacctgctgctggccgccagcggcagcggggccgccttcagccccaccttccccatctacatggtgttccgcttcctgtgtggcttcggcatcagcggcatcaccctgagcaccgtcatcctgaatgtggagtgggtgcccaccaggatgagggccatcatgagcacagccctgggctactgctacaccttcggccagttcatcctgcccggcctggcctatgccatcccccagtggcgctggctgcagctgactgtgtccatccccttctttgtgttcttcctgagctcctggtggaccccagagagcatccgctggctggtgctgagcggcaagagcagcaaggccctgaagatcctgcggcgggtggccgtgttcaacgggaagaaggaggagggggagcggctgagcctggaggagctgaagctgaacctgcagaaggagatcagcctggccaaggccaagtacacagccagtgacctcttccgcatccccatgctgcggaggatgaccttctgcctgagcctggcctggtttgccactggatttgcctactacagcctggccatgggcgtggaggagtttggagtgaacctgtacatcctgcagatcatctttggaggagtggatgtgcctgccaagttcatcaccatcctgagcctgagctacctgggccgccacaccacccaggccgccgccctgctgctggccggcggggccatcctggccctgacctttgtgcccctggacctgcagacagtgaggacagtgctggccgtgtttgggaagggctgcctgagcagcagcttcagctgcctcttcctgtacaccagcgagctgtaccccaccgtcatccggcagacaggcatgggcgtgagcaacctgtggaccagggtgggctccatggtgagccccctggtgaagatcaccggggaggtgcagcccttcatccccaacatcatctacggcatcacagccctgctgggcggcagcgctgccctcttcctgcctgagaccctgaaccagcccctgcctgagaccatcgaggacctggagaactggagcctgcgggccaagaagcccaagcaggagcctgaggtggagaaggccagccagaggatccccctgcagccccacggccctggcctgggcagcagctag

SEQ ID NO: 71210 - DNA, 1629 bp, Artificial Sequence
  derived and/or modified sequence
atgaccttcagcgagatcctggaccgggtgggcagcatgggccactttcagttcctgcacgtggccatcttgggcctgccaatcttgaacatggccaaccataatctgctccagatctttactgcagcaacacccgtgcaccactgcaggccgcctcataatgcctctactgggccgtgggtcttgcctatgggtcccaacggaaagcccgagaggtgtctgagattcgtgcacccccccaatgccagtttaccaaatgacactcagagggccatggagccgtgcctagatggatgggtctacaatagtaccaaagattccattgtcacggaatgggacttagtgtgtaattctaacaagcttaaggagatggcacagagtatatttatggccggcatcctgattggtgggctagttttgggtgacttgtcagaccggttcggaaggcgccccattctgacctgctcatatttgcttctagcagcctctggaagtggcgctgcattttcccccacatttcccatctacatggtctttagatttctgtgcggctttggaattagtggcatcactttatccactgtgatcttaaatgtagagtgggtcccaaccaggatgcgagcgatcatgtcgaccgctctaggctactgctatacgtttggccagttcatcctgcccggcctggcctacgctatcccccagtggagatggctacagctgaccgtgtcaattccattctttgtattcttcttgagctcttggtggacacccgagagcatacgctggttagttttatctggcaaatccagcaaggcactaaagatcctcagaagagtggcagtttttaacggcaaaaaggaggaaggagagaggctaagcttggaggaactgaagctcaacctccaaaaggaaatcagtctagccaaagccaaatatactgcgtccgacctctttcgaatcccaatgctgcgacgaatgacattctgtctgtcccttgcctggtttgctaccggattcgcctactattcactagccatgggcgtagaggagtttggagtgaacctttacatcctccagataatcttcgggggtgtggatgtgcctgctaagtttataaccatcctgtcactgtcctacttgggccggcatactacgcaggctgctgcgctgctgctagctggaggagcgatattagcccttacatttgttcccctagatttacagaccgtgcgtacggtgctggccgtgttcggtaaggggtgtctgtctagctctttcagctgcttgtttctctatacctccgaactctatccaacagtcattagacagaccggcatgggggtcagtaatttgtggacccgagtcggcagcatggtgagcccattggtgaagataaccggtgaagtgcagcctttcattcccaatattatatatggaataaccgccttgcttggaggctctgctgcccttttcctgcctgaaacactgaaccagccactcccagagactatcgaggatctggagaattggtccttgagagccaagaaacctaaacaggaaccagaggtcgagaaggcctcccagcggattcccctccagcctcacggccctggcctggggtcctcctag

SEQ ID NO: 71211 - DNA, 1629 bp, Artificial Sequence
  derived and/or modified sequence
atgaccttcagcgagatcctggaccgggtgggcagcatgggccacttccagttcctgcacgtcgctatcctcgggctgcccatactgaacatggccaaccataatctcctccaaatcttcaccgccgccacacccgttcaccactgtcgaccaccccacaacgcctctacgggtccctgggtgctgcctatgggcccaaacgggaagccagagaggtgcctcagattcgtgcacccaccaaacgcttccctgcccaatgatacacagcgcgccatggaaccttgcctggacggatgggtttataactcgaccaaagattcaattgtgacagagtgggacctagtgtgtaattctaataagctgaaggagatggctcagtctattttcatggcagggattttgatcggcggtctggtgttgggtgatctatccgatcgatttggacgaaggcccattctgacctgcagctaccttctcctggccgcgtccggctcaggtgccgccttcagcccgaccttccccatatacatggttttccggtttctgtgtggctttggcattagcggaatcaccctgtctaccgtgattttaaatgtagagtgggtgccaacccgcatgcgcgccattatgtccaccgccctcggctactgttatactttcgggcaattcattcttcccggactggcctacgccatcccacagtggcgctggcttcagttaacagtgagcattccatttttcgtttttttccttagctcctggtggactccagaatctattagatggctggttctcagtggtaaaagttccaaggctctcaagattctgagacgggttgcagtgttcaatggcaaaaaagaggagggcgaaagattgtcccttgaggaactgaaactgaacctgcagaaggagatttcccttgcaaaggctaagtatacagcctctgacctgtttagaatccccatgcttcggcgcatgaccttctgcttgagtttagcatggtttgctaccggctttgcttattactcactggcaatgggggtggaagagtttggagtaaatttatacatcctgcagatcatttttggcggtgtggacgtgcccgccaagtttatcactatcctcagcctgagctatctcggccgccacaccactcaagctgccgcccttctactggccggaggggctattctcgcactaactttcgtgcctctggatctgcaaactgtgcgcaccgttttggctgtgttcgggaagggatgtcttagcagttcattcagttgcctttttctgtacaccagtgagttataccctacggttatcagacagacaggcatgggtgtttctaatctttggaccagagtaggatctatggtctctcctctggtgaagataactggagaggtccaaccctttatccctaacatcatttatgggataactgctctcctgggcggatccgccgctctttttctccctgaaactttaaatcaacctctgcctgaaacaattgaggatttggagaactggagtttacgtgcaaagaaaccaaagcaggagccagaggtggagaaagctagtcagagaatacctctgcagccccacgggcctgggctgggatccagctag

SEQ ID NO: 71212 - DNA, 1587 bp, Artificial Sequence
  derived and/or modified sequence
atgaccttcagcgagatcctggaccgggtgggcagcatgggccactttcagttcctgcatgtggcgattctcggcctgccgatactcaacatggctaaccactgtcgcccaccccacaacgcaagtacgggcccatgggtcctccctatgggacctaatggcaagccagaacgttgtttacggtttgtccatcccccaaatgccagtctgccaaacgacacacagagagccatggagccctgccttgacggatgggtttacaatagtactaaggacagtattgtcaccgagtgggatctggtctgtaacagtaataaactgaaggaaatggctcaatcgatttttatggccggaatccttattggaggactggtgcttggggacctgagtgatcggtttggcaggcgcccgatcctcacctgtagttacttattgcttgccgcatccggctctggagcagcatttagtcccaccttccccatctacatggtttttcggtttctctgcggatttggcatcagcgggatcacgcttagtactgtcatcctgaacgtggaatgggtccccacccgtatgcgcgctatcatgtcaaccgccctgggctactgctacacattcggccagtttatccttcccgggcttgcttacgcaatccctcaatggcgctggttgcagctgacagtgagcatccctttcttcgtgttcttccttagctcctggtggacgcctgagagcatacgttggcttgtgctcagcggcaagtcctcaaaggcactcaagatcctgcgtcgggtggctgtgttcaatgggaaaaaagaagaaggcgagaggctgtcgctcgaggagctgaagctcaatctccagaaagagatcagccttgcgaaggccaaatacaccgctagcgacctttttagaatccccatgttgaggaggatgactttttgcttatcacttgcgtggtttgctacaggctttgcttattatagcttggccatgggcgtagaagaattcggggtgaatctctacatccttcaaattatcttcggaggcgtggacgttcctgctaagtttataactattctgtccttatcctacctggggaggcacacaacacaggcagctgctctgctcctggccggaggggccattcttgccctaacctttgttcctttggatcttcagacagtgaggaccgtcttggcagtgttcggtaagggttgcctcagcagcagcttctcatgtttatttctctatacaagcgaactgtatcccacagtgattagacagaccggcatgggagtcagcaatctttggacgagggtcggatctatggtgtcccccctggttaagatcaccggcgaggttcaaccatttattccaaacattatatatggaattaccgctctcctggggggatctgcagccctgtttttgccagaaaccctaaatcagccattaccagaaactatcgaagatcttgagaattggtccttgagagcaaaaaaacccaagcaagagcctgaagtcgaaaaagcatctcagcggattcccctccagcctcacgggccaggcctggggagcagttag

SEQ ID NO: 71213 - DNA, 1629 bp, Artificial Sequence
  derived and/or modified sequence
atgaccttcagcgaaatactggatcgggtggggtcaatggggcattttcagttcttgcacgtagccattcttggtttgcctatcctcaatatggctaatcacaatctgctgcagatttttacggcagcaacccctgtgcaccattgtagacccccacataacgcaagcacaggaccttgggtgctacccatggggcctaatgggaagcccgagcggtgtctcaggttcgttcatcccccaaatgcatccctgcctaatgatacccaaagagctatggagccttgcctcgacggctgggtatacaatagcactaaggatagcatagtgacagagtgggaccttgtatgtaactccaataaactgaaggagatggcacagtctatattcatggcaggaatcctgattggcggtctggtgctcggggacttatcagaccgctttggacggcgacctattctcacgtgtagctacttactactcgctgcgtctggctcaggcgcagccttttctccaactttccccatatatatggtcttccgatttttatgtggcttcggaatctccggcattaccttatctaccgtgattctaaatgtggagtgggtcccaacacgcatgcgcgcaattatgtctaccgcattgggctactgttacacattcggccagtttatcctccccggtctggcctacgcaatccctcaatggaggtggttgcagctcacggtgagcataccgttttttgtgtttttcctgagctcttggtggacccctgagtccatcaggtggttggtgctctccggcaaaagttccaaagccttaaaaatcctccgtcgcgtcgccgtgttcaacgggaagaaagaagagggggagcgactcagcttggaggaactgaagcttaacctgcagaaagaaatatcgctggcgaaagcaaagtacaccgcttcagacctcttccgtatccctatgctgaggcgtatgaccttttgtctatccttggcctggtttgcaactgggtttgcatactatagtcttgccatgggcgtagaagaatttggcgtgaacctatacatcttgcagataatctttggcggagtggacgtgcctgcaaagttcataaccatcctcagcttgagttatttgggacgacacactactcaggcagcggctcttctcctggccggaggagctatcctcgccctcacattcgtgcccctggatctccagaccgtgcgtacagtcctggccgttttcgggaagggatgcctttctagctcatttagctgtttatttctgtatacctcagagctgtaccctaccgtcattcgacaaaccggaatgggggtctctaatctctggacccgagtcggtagcatggtgtcaccgctcgtaaaaattactggtgaggtacagccgtttatacccaacataatttatggcataactgccctgctcgggggatcagccgctctttttctgcccgagaccctcaatcaacccctgccggaaacgatcgaagacctggaaaattggagtctgcgcgctaagaagccaaagcaggagcctgaggtggaaaaggctagtcagcgaattccactgcaaccccacggcccaggcctgggctcatcctag

SEQ ID NO: 71214 - DNA, 1629 bp, Artificial Sequence
  derived and/or modified sequence
atgacattttctgaaatcctggaccgggtgggctcaatgggccattttcagttcctgcacgttgccattttagggctgccgattcttaatatggctaaccataacctgcttcagatcttcaccgctgctacccccgtccatcactgccgacccccacataacgcatccaccggcccatgggtactacctatgggtcccaacggaaaacctgagcggtgtctaagatttgtgcatcctccaaatgcttcattgcccaatgatacccaacgggcaatggaaccatgtctcgacgggtgggtgtacaatagcactaaagactcaatcgtgacagagtgggaccttgtctgtaatagcaacaagctaaaggagatggcccagtcaattttcatggccggaatccttattgggggtctggttcttggggatctatcggatagatttggaagacgcccaatcttaacatgctcataccttctgctcgcggcttcgggctcaggagcagccttctcacctacctttcccatctacatggtcttccgattcttatgtggatttggcatctcagggatcaccctcagcaccgtgatcttaaatgtggaatgggtgcccactcggatgcgtgcgatcatgtctacagcccttggctattgctacacgtttggacaattcattttgccgggactggcgtacgcaatcccacaatggcgctggttgcagctgacggtttctatccccttctttgtatttttcctgagtagctggtggacgccagagtctatccggtggttggtcctttctggtaaatcctccaaggctttgaaaatcctccgacgcgtcgctgtatttaacggaaagaaagaggagggcgagaggctgagccttgaagagctcaagctgaaccttcaaaaagaaatttcccttgcaaaggcaaaatacactgcctcagacctctttcggattcctatgctgaggcggatgacattttgcttgtctctggcatggtttgctaccggctttgcatactactcgctggctatgggtgtggaggaatttggggtcaacctgtatatattgcagataatttttgggggagttgatgtcccagccaaatttattaccatactctcactctcctatctgggcagacacacaacacaagccgctgctcttctccttgcgggaggcgcaattctagctctgacattcgtaccacttgacttgcagacagtacgcacggttttggccgtgttcggcaaaggttgccttagctcctccttctcatgcttgtttttgtacacctccgaactttacccgaccgtgattcgccagacgggcatgggagttagcaacctgtggacgcgggtgggttcaatggtttcccctcttgtgaaaattactggcgaggtccaaccctttatcccaaacatcatttatgggatcaccgcgctcctgggagggtcagctgccttgttcctcccagagaccctcaaccagcctcttcctgagacgattgaagatcttgaaaattggtcgttacgggcaaagaagcctaagcaggagccagaagtggagaaggctagccagaggattcccctgcagcctcacggcccaggcctcgggagtagctag

SEQ ID NO: 71215 - DNA, 1587 bp, Artificial Sequence
  derived and/or modified sequence
atgaccttctccgagatcctggatagggtgggtagtatggggcacttccaatttctgcatgtggccatcttagggctccctatattgaacatggctaatcactgccgtccccctcataacgcctccacaggcccatgggtgctacccatggggccaaacgggaagccagagaggtgcctccgattcgtccatcctcctaatgcctcccttccaaacgacactcagcgcgcaatggaaccttgcctagacggctgggtatacaatagtacaaaagactctatcgtcaccgaatgggacctggtgtgcaactccaacaaactgaaggagatggcacaaagcatttttatggcgggaattcttattggaggcttggtcctcggcgacctgtctgacaggtttggcaggcgtccaatcctgacctgcagctatcttctgctcgcagcgagcggctcaggcgcagcttttagcccgaccttccctatttatatggtatttaggtttctgtgcggcttcggaattagcggcataactctgagtaccgttatcctcaatgttgaatgggtgcccacaaggatgagagcaattatgagcacagccttggggtattgctacactttcgggcaattcatactccccggtctagcctacgctattccccagtggcggtggctgcagttgactgtctctattcctttctttgtattcttcctgagcagttggtggacacccgagtcaatcaggtggcttgtgttgtccggcaagtcgtcaaaagcgctaaagatcctaaggagggtagccgtgttcaacggaaaaaaggaagaaggcgagagactgtccctggaggagcttaagctgaacctccaaaaagagattagcctcgctaaagctaaatataccgcatctgatctctttagaatacccatgttaagaaggatgacattctgcttgagtctcgcctggttcgcgactggctttgcctactactcactggctatgggcgtggaggagttcggcgtgaatctctatatcttacagattatctttggcggagtggacgtgccggctaaattcatcaccatcctttccctgtcatatctgggcaggcatactacccaagctgccgctttgctgctggccggaggtgcaatcctcgcgttgaccttcgtgcctctggatctgcaaaccgtgagaactgtcttggctgtgtttgggaaggggtgcctgagctccagtttctcttgtctgttcctttatacaagtgagctgtacccaaccgtgatccgccagactgggatgggtgtctctaacctttggaccagggtaggcagcatggtgagcccactggttaagattaccggcgaggtccagccctttatcccaaatattatctatggtatcacagctctgctgggcggtagtgctgccctcttcctgccggagaccctgaatcaacctttgccagagacgatcgaggacctggagaactggtcactccgcgctaagaagccaaagcaggaacctgaagtcgaaaaggcctcccagaggatacccttgcagcctcacggaccagggctgggatcttcctag

SEQ ID NO: 71216 - DNA, 1622 bp, Artificial Sequence
  derived and/or modified sequence
actacagcagctgccggcccctaggacagagcagggacctcaactacactgatcaccagccccatcggatccagacccggccaccagcctgcccaatgacacccagagggccatggagccatgcctggatggctgggtctacaacagcaccaaggactccattgtgacagagtgggacttggtgtgcaactccaacaaactgaaggagatggcccagtctatcttcatggcaggtatactgattggagggctcgtgcttggagacctgtctgacaggtttggccgcaggcccatcctgacctgcagctacctgctgctggcagccagcggctccggtgcagccttcagccccaccttccccatctacatggtcttccgcttcctgtgtggctttggcatctcaggcattaccctgagcaccgtcatcttgaatgtggaatgggtgcctacccggatgcgggccatcatgtcgacagcactcgggtactgctacacctttggccagttcattctgcccggcctggcctacgccatcccccagtggcgttggctgcagttaactgtgtccattcccttcttcgtcttcttcctatcatcctggtggacaccagagtccatacgctggttggtcttgtctggaaagtcctcgaaggccctgaagatactccggcgggtggctgtcttcaatggcaagaaggaagagggagaaaggctcagcttggaggagctcaaactcaacctgcagaaggagatctccttggccaaggccaagtacaccgcaagtgacctgttccggatacccatgctgcgccgcatgaccttctgtctttccctggcctggtttgctaccggttttgcctactatagtttggctatgggtgtggaagaatttggagtcaacctctacatcctccagatcatctttggtggggtcgatgtcccagccaagttcatcaccatcctctccttaagctacctgggccggcataccactcaggccgctgccctgctcctggcaggaggggccatcttggctctcacctttgtgcccttggacttgcagaccgtgaggacagtattggctgtgtttgggaagggatgcctatccagctccttcagctgcctcttcctctacacaagtgaattataccccacagtcatcaggcaaacaggtatgggcgtaagtaacctgtggacccgcgtgggaagcatggtgtccccgctggtgaaaatcacgggtgaggtacagcccttcatccccaatatcatctacgggatcaccgccctcctcgggggcagtgctgccctcttcctgcctgagaccctgaatcagcccttgccagagactatcgaagacctggaaaactggtccctgcgggcaaagaagccaaagcaggagccagaggtggaaaaggcctcccagaggatccctctacagcctcacggaccaggcctgggctccagctgaggacaacggaaccccctttccctgccctccagagactgatcctagccaggcaccttaggagtatagggaggccccatataggtccatcctcctaggatgaagccttctgagagcttggtgaaggtgtctccatcaccaccaccagagcctcctg

SEQ ID NO: 71217 - DNA, 2178 bp, Artificial Sequence
  derived and/or modified sequence
agcttgttagagctgagctgccctactacagcagctgccggcccctaggacagagcagggacctcaactacactgatcaccagccccatcggatccagacccggccaccagctctggctcgtcttgccccagtgccatgaccttctcggagatcctggaccgtgtgggaagcatgggccatttccagttcctgcatgtagccatactgggcctcccgatcctcaacatggccaaccacaacctgctgcagatcttcacagccgccacccctgtccaccactgtcgcccgccccacaatgcctccacagggccttgggtgctccccatgggcccaaatgggaagcctgagaggtgcctccgttttgtacatccgcccaatgccagcctgcccaatgacacccagagggccatggagccatgcctggatggctgggtctacaacagcaccaaggactccattgtgacagagtgggacttggtgtgcaactccaacaaactgaaggagatggcccagtctatcttcatggcaggtatactgattggagggctcgtgcttggagacctgtctgacaggtttggccgcaggcccatcctgacctgcagctacctgctgctggcagccagcggctccggtgcagccttcagccccaccttccccatctacatggtcttccgcttcctgtgtggctttggcatctcaggcattaccctgagcaccgtcatcttgaatgtggaatgggtgcctacccggatgcgggccatcatgtcgacagcactcgggtactgctacacctttggccagttcattctgcccggcctggcctacgccatcccccagtggcgttggctgcagttaactgtgtccattcccttcttcgtcttcttcctatcatcctggtggacaccagagtccatacgctggttggtcttgtctggaaagtcctcgaaggccctgaagatactccggcgggtggctgtcttcaatggcaagaaggaagagggagaaaggctcagcttggaggagctcaaactcaacctgcagaaggagatctccttggccaaggccaagtacaccgcaagtgacctgttccggatacccatgctgcgccgcatgaccttctgtctttccctggcctggtttgctaccggttttgcctactatagtttggctatgggtgtggaagaatttggagtcaacctctacatcctccagatcatctttggtggggtcgatgtcccagccaagttcatcaccatcctctccttaagctacctgggccggcataccactcaggccgctgccctgctcctggcaggaggggccatcttggctctcacctttgtgcccttggacttgcagaccgtgaggacagtattggctgtgtttgggaagggatgcctatccagctccttcagctgcctcttcctctacacaagtgaattataccccacagtcatcaggcaaacaggtatgggcgtaagtaacctgtggacccgcgtgggaagcatggtgtccccgctggtgaaaatcacgggtgaggtacagcccttcatccccaatatcatctacgggatcaccgccctcctcgggggcagtgctgccctcttcctgcctgagaccctgaatcagcccttgccagagactatcgaagacctggaaaactggtccctgcgggcaaagaagccaaagcaggagccagaggtggaaaaggcctcccagaggatccctctacagcctcacggaccaggcctgggctccagctgaggacaacggaaccccctttccctgccctccagagactgatcctagccaggcaccttaggagtatagggaggccccatataggtccatcctcctaggatgaagccttctgagagcttggtgaaggtgtctccatcaccaccaccagagcctcctgcccagccctggccagttcaaaggttcagccatccctgcccttgttctccctgcaacccaggccctgccattcttctgtctagcccttccccactggccaccttcccccactgtcccggtcctcttcccctgaggtcccctgatatcccctggctcagtcctaacaagactgagtcttaacaagatgagaagtcctccccttcttgcctcccacacttttctttgatgggaggtttcaataaacagcgataagaactcta

SEQ ID NO: 71218 - DNA, 1744 bp, Artificial Sequence
  derived and/or modified sequence
agcttgttagagctgagctgccctactacagcagctgccggcccctaggacagagcagggacctcaactacactgatcaccagccccatcggatccagacccggccaccagtgccatgaccttctcggagatcctggaccgtgtgggaagcatgggccatttccagttcctgcatgtagccatactgggcctcccgatcctcaacatggccaaccacaacctgctgcagatcttcacagccgccacccctgtccaccactgtcgcccgccccacaatgcctccacagggccttgggtgctccccatgggcccaaatgggaagcctgagaggtgcctccgttttgtacatccgcccaatgccagcctgcccaatgacacccagagggccatggagccatgcctggatggctgggtctacaacagcaccaaggactccattgtgacagagtgggacttggtgtgcaactccaacaaactgaaggagatggcccagtctatcttcatggcaggtatactgattggagggctcgtgcttggagacctgtctgacaggtttggccgcaggcccatcctgacctgcagctacctgctgctggcagccagcggctccggtgcagccttcagccccaccttccccatctacatggtcttccgcttcctgtgtggctttggcatctcaggcattaccctgagcaccgtcatcttgaatgtggaatgggtgcctacccggatgcgggccatcatgtcgacagcactcgggtactgctacacctttggccagttcattctgcccggcctggcctacgccatcccccagtggcgttggctgcagttaactgtgtccattcccttcttcgtcttcttcctatcatcctggtggacaccagagtccatacgctggttggtcttgtctggaaagtcctcgaaggccctgaagatactccggcgggtggctgtcttcaatggcaagaaggaagagggagaaaggctcagcttggaggagctcaaactcaacctgcagaaggagatctccttggccaaggccaagtacaccgcaagtgacctgttccggatacccatgctgcgccgcatgaccttctgtctttccctggcctggtttgctaccggttttgcctactatagtttggctatgggtgtggaagaatttggagtcaacctctacatcctccagatcatctttggtggggtcgatgtcccagccaagttcatcaccatcctctccttaagctacctgggccggcataccactcaggccgctgccctgctcctggcaggaggggccatcttggctctcacctttgtgcccttggacttgcagaccgtgaggacagtattggctgtgtttgggaagggatgcctatccagctccttcagctgcctcttcctctacacaagtgaattataccccacagtcatcaggcaaacaggtatgggcgtaagtaacctgtggacccgcgtgggaagcatggtgtccccgctggtgaaaatcacgggtgaggtacagcccttcatccccaatatcatctacgggatcaccgccctcctcgggggcagtgctgccctcttcctgcctgagaccctgaatcagcccttgccagagactatcgaagacctggaaaactggtccctgcgggcaaagaagccaaagcaggagccagaggtggaaaaggcctcccagaggatccctctacagcctcacggaccaggcctgggctccagctga

SEQ ID NO: 71219 - DNA, 2135 bp, Artificial Sequence
  derived and/or modified sequence
agcttgttagagctgagctgccctactacagcagctgccggcccctaggacagagcagggacctcaactacactgatcaccagccccatcggatccagacccggccaccagctctggctcgtcttgccccagtgccatgaccttctcggagatcctggaccgtgtgggaagcatgggccatttccagttcctgcatgtagccatactgggcctcccgatcctcaacatggccaaccactgtcgcccgccccacaatgcctccacagggccttgggtgctccccatgggcccaaatgggaagcctgagaggtgcctccgttttgtacatccgcccaatgccagcctgcccaatgacacccagagggccatggagccatgcctggatggctgggtctacaacagcaccaaggactccattgtgacagagtgggacttggtgtgcaactccaacaaactgaaggagatggcccagtctatcttcatggcaggtatactgattggagggctcgtgcttggagacctgtctgacaggtttggccgcaggcccatcctgacctgcagctacctgctgctggcagccagcggctccggtgcagccttcagccccaccttccccatctacatggtcttccgcttcctgtgtggctttggcatctcaggcattaccctgagcaccgtcatcttgaatgtggaatgggtgcctacccggatgcgggccatcatgtcgacagcactcgggtactgctacacctttggccagttcattctgcccggcctggcctacgccatcccccagtggcgttggctgcagttaactgtgtccattcccttcttcgtcttcttcctatcatcctggtggacaccagagtccatacgctggttggtcttgtctggaaagtcctcgaaggccctgaagatactccggcgggtggctgtcttcaatggcaagaaggaagagggagaaaggctcagcttggaggagctcaaactcaacctgcagaaggagatctccttggccaaggccaagtacaccgcaagtgacctgttccggatacccatgctgcgccgcatgaccttctgtctttccctggcctggtttgctaccggttttgcctactatagtttggctatgggtgtggaagaatttggagtcaacctctacatcctccagatcatctttggtggggtcgatgtcccagccaagttcatcaccatcctctccttaagctacctgggccggcataccactcaggccgctgccctgctcctggcaggaggggccatcttggctctcacctttgtgcccttggacttgcagaccgtgaggacagtattggctgtgtttgggaagggatgcctatccagctccttcagctgcctcttcctctacacaagtgaattataccccacagtcatcaggcaaacaggtatgggcgtaagtaacctgtggacccgcgtgggaagcatggtgtccccgctggtgaaaatcacgggtgaggtacagcccttcatccccaatatcatctacgggatcaccgccctcctcgggggcagtgctgccctcttcctgcctgagaccctgaatcagcccttgccagagactatcgaagacctggaaaactggtccctgcgggcaaagaagccaaagcaggagccagaggtggaaaaggcctcccagaggatccctctacagcctcacggaccaggcctgggctccagctgaggacaacggaaccccctttccctgccctccagagactgatcctagccaggcaccttaggagtatagggaggccccatataggtccatcctcctaggatgaagccttctgagagcttggtgaaggtgtctccatcaccaccaccagagcctcctgcccagccctggccagttcaaaggttcagccatccctgcccttgttctccctgcaacccaggccctgccattcttctgtctagcccttccccactggccaccttcccccactgtcccggtcctcttcccctgaggtcccctgatatcccctggctcagtcctaacaagactgagtcttaacaagatgagaagtcctccccttcttgcctcccacacttttctttgatgggaggtttcaataaacagcgataagaactct

SEQ ID NO: 71220 - DNA, 1629 bp, Artificial Sequence
  derived and/or modified sequence
atgaccttcagcgagatcctggacagagtgggcagcatgggccacttccagttcctgcacgtggccatcctgggcctgcccatcctgaacatggccaaccacaacctgctgcagatcttcaccgccgccacccccgtgcaccactgcagacccccccacaacgccagcaccggcccctgggtgctgcccatgggccccaacggcaagcccgagagatgcctgagattcgtgcacccccccaacgccagcctgcccaacgacacccagagagccatggagccctgcctggacggctgggtgtacaacagcaccaaggacagcatcgtgaccgagtgggacctggtgtgcaacagcaacaagctgaaggagatggcccagagcatcttcatggccggcatcctgatcggcggcctggtgctgggcgacctgagcgacagattcggcagaagacccatcctgacctgcagctacctgctgctggccgccagcggcagcggcgccgccttcagccccaccttccccatctacatggtgttcagattcctgtgcggcttcggcatcagcggcatcaccctgagcaccgtgatcctgaacgtggagtgggtgcccaccagaatgagagccatcatgagcaccgccctgggctactgctacaccttcggccagttcatcctgcccggcctggcctacgccatcccccagtggagatggctgcagctgaccgtgagcatccccttcttcgtgttcttcctgagcagctggtggacccccgagagcatcagatggctggtgctgagcggcaagagcagcaaggccctgaagatcctgagaagagtggccgtgttcaacggcaagaaggaggagggcgagagactgagcctggaggagctgaagctgaacctgcagaaggagatcagcctggccaaggccaagtacaccgccagcgacctgttcagaatccccatgctgagaagaatgaccttctgcctgagcctggcctggttcgccaccggcttcgcctactacagcctggccatgggcgtggaggagttcggcgtgaacctgtacatcctgcagatcatcttcggcggcgtggacgtgcccgccaagttcatcaccatcctgagcctgagctacctgggcagacacaccacccaggccgccgccctgctgctggccggcggcgccatcctggccctgaccttcgtgcccctggacctgcagaccgtgagaaccgtgctggccgtgttcggcaagggctgcctgagcagcagcttcagctgcctgttcctgtacaccagcgagctgtaccccaccgtgatcagacagaccggcatgggcgtgagcaacctgtggaccagagtgggcagcatggtgagccccctggtgaagatcaccggcgaggtgcagcccttcatccccaacatcatctacggcatcaccgccctgctgggcggcagcgccgccctgttcctgcccgagaccctgaaccagcccctgcccgagaccatcgaggacctggagaactggagcctgagagccaagaagcccaagcaggagcccgaggtggagaaggccagccagagaatccccctgcagccccacggccccggcctgggcagcagctag

SEQ ID NO: 71221 - DNA, 1587 bp, Artificial Sequence
  derived and/or modified sequence
atgaccttcagcgagatcctggacagagtgggcagcatgggccacttccagttcctgcacgtggccatcctgggcctgcccatcctgaacatggccaaccactgcagacccccccacaacgccagcaccggcccctgggtgctgcccatgggccccaacggcaagcccgagagatgcctgagattcgtgcacccccccaacgccagcctgcccaacgacacccagagagccatggagccctgcctggacggctgggtgtacaacagcaccaaggacagcatcgtgaccgagtgggacctggtgtgcaacagcaacaagctgaaggagatggcccagagcatcttcatggccggcatcctgatcggcggcctggtgctgggcgacctgagcgacagattcggcagaagacccatcctgacctgcagctacctgctgctggccgccagcggcagcggcgccgccttcagccccaccttccccatctacatggtgttcagattcctgtgcggcttcggcatcagcggcatcaccctgagcaccgtgatcctgaacgtggagtgggtgcccaccagaatgagagccatcatgagcaccgccctgggctactgctacaccttcggccagttcatcctgcccggcctggcctacgccatcccccagtggagatggctgcagctgaccgtgagcatccccttcttcgtgttcttcctgagcagctggtggacccccgagagcatcagatggctggtgctgagcggcaagagcagcaaggccctgaagatcctgagaagagtggccgtgttcaacggcaagaaggaggagggcgagagactgagcctggaggagctgaagctgaacctgcagaaggagatcagcctggccaaggccaagtacaccgccagcgacctgttcagaatccccatgctgagaagaatgaccttctgcctgagcctggcctggttcgccaccggcttcgcctactacagcctggccatgggcgtggaggagttcggcgtgaacctgtacatcctgcagatcatcttcggcggcgtggacgtgcccgccaagttcatcaccatcctgagcctgagctacctgggcagacacaccacccaggccgccgccctgctgctggccggcggcgccatcctggccctgaccttcgtgcccctggacctgcagaccgtgagaaccgtgctggccgtgttcggcaagggctgcctgagcagcagcttcagctgcctgttcctgtacaccagcgagctgtaccccaccgtgatcagacagaccggcatgggcgtgagcaacctgtggaccagagtgggcagcatggtgagccccctggtgaagatcaccggcgaggtgcagcccttcatccccaacatcatctacggcatcaccgccctgctgggcggcagcgccgccctgttcctgcccgagaccctgaaccagcccctgcccgagaccatcgaggacctggagaactggagcctgagagccaagaagcccaagcaggagcccgaggtggagaaggccagccagagaatccccctgcagccccacggccccggcctgggcagcagctag

SEQ ID NO: 71222 - protein, 451 aa, Artificial Sequence
  derived and/or modified sequence
MEPCLDGWVYNSTKDSIVTEWDLVCNSNKLKEMAQSIFMAGILIGGLVLGDLSDRFGRRPILTCSYLLLAASGSGAAFSPTFPIYMVFRFLCGFGISGITLSTVILNVEWVPTRMRAIMSTALGYCYTFGQFILPGLAYAIPQWRWLQLTVSIPFFVFFLSSWWTPESIRWLVLSGKSSKALKILRRVAVFNGKKEEGERLSLEELKLNLQKEISLAKAKYTASDLFRIPMLRRMTFCLSLAWFATGFAYYSLAMGVEEFGVNLYILQIIFGGVDVPAKFITILSLSYLGRHTTQAAALLLAGGAILALTFVPLDLQTVRTVLAVFGKGCLSSSFSCLFLYTSELYPTVIRQTGMGVSNLWTRVGSMVSPLVKITGEVQPFIPNIIYGITALLGGSAALFLPETLNQPLPETIEDLENWSLRAKKPKQEPEVEKASQRIPLQPHGPGLGSS

SEQ ID NO: 71223 - DNA, 1356 bp, Artificial Sequence
  derived and/or modified sequence
atggagccgtgtctcgacggttgggtttataatagcaccaaggacagcatcgttacagagtgggacttggtctgtaatagtaataagcttaaggagatggctcagagcatctttatggccggaatcctcatcggcggtcttgttttgggcgacctgagcgaccgattcgggcggaggcctatattgacctgtagctatttgctgctggctgcatccggcagcggagcagcgttttctccaactttcccaatttacatggtcttcagatttctttgtggcttcgggatcagcgggattactctgagtactgtaattctcaacgtggaatgggtgccaactagaatgagggcaatcatgtcaaccgcactgggctattgttatacatttggacaatttatcctgccgggacttgcctatgctatcccacagtggagatggctccagctgacagtttccataccttttttcgtgtttttcctgagcagctggtggacacctgaatcaattcgttggctggtacttagcggtaagagctctaaagctttaaaaattctgaggcgggtggccgtgtttaatggtaagaaggaagagggtgagcgcctttcattggaggagttgaaattgaatctccagaaggagatcagcctagccaaagctaagtatacggcttctgatctatttcgcatcccaatgctccgccgcatgaccttctgtctgagtctggcttggttcgcaactggctttgcctactatagccttgccatgggagtcgaagagtttggagtaaacctctatatcctccagataatattcggcggggtggatgtgcccgccaaattcataaccatcctgtctctgtcttacttggggcggcatacaactcaggcagctgctttgctattggctggcggcgcaatcttagctctaacttttgtccccttggatctgcaaaccgttagaactgtgctggccgtcttcggaaaaggatgcctttccagcagtttcagctgtctgtttctgtatacttctgaactgtatccaaccgtcatcagacagacgggcatgggcgtgagtaacctgtggacgagagtgggctcaatggtttcccccctggtgaagattacaggcgaagtgcagcccttcatcccgaacatcatatacggcataactgcactgctgggaggtagcgctgccctgtttctgccggagaccctgaaccagcctctccccgagaccatagaggatttggagaactggagtcttcgcgccaaaaagccaaaacaggagccggaggtggaaaaagcaagccagcggattcccctgcagcctcatggtcccggcttgggctcttcatag

SEQ ID NO: 71224 - DNA, 1356 bp, Artificial Sequence
  derived and/or modified sequence
atggagccctgcctggatggctgggtgtacaacagcaccaaggacagcatcgtgacagagtgggacctggtgtgcaacagcaacaagctgaaggagatggcccagagcatcttcatggccggcatcctgattggaggcctggtgctgggggacctgagtgaccgcttcggccggcggcccatcctgacctgcagctacctgctgctggccgccagcggcagcggggccgccttcagccccaccttccccatctacatggtgttccgcttcctgtgtggcttcggcatcagcggcatcaccctgagcaccgtcatcctgaatgtggagtgggtgcccaccaggatgagggccatcatgagcacagccctgggctactgctacaccttcggccagttcatcctgcccggcctggcctatgccatcccccagtggcgctggctgcagctgactgtgtccatccccttctttgtgttcttcctgagctcctggtggaccccagagagcatccgctggctggtgctgagcggcaagagcagcaaggccctgaagatcctgcggcgggtggccgtgttcaacgggaagaaggaggagggggagcggctgagcctggaggagctgaagctgaacctgcagaaggagatcagcctggccaaggccaagtacacagccagtgacctcttccgcatccccatgctgcggaggatgaccttctgcctgagcctggcctggtttgccaccggctttgcctactacagcctggccatgggcgtggaggagtttggagtgaacctgtacatcctgcagatcatctttggaggagtggatgtgcctgccaagttcatcaccatcctgagcctgagctacctgggccgccacaccacccaggccgccgccctgctgctggccggcggggccatcctggccctgacctttgtgcccctggacctgcagacagtgaggacagtgctggccgtgtttgggaagggctgcctgagcagcagcttcagctgcctcttcctgtacaccagcgagctgtaccccaccgtcatccggcagacaggcatgggcgtgagcaacctgtggaccagggtgggctccatggtgagccccctggtgaagatcactggagaggtgcagcccttcatccccaacatcatctacggcatcacagccctgctgggcggcagcgctgccctcttcctgcctgagaccctgaaccagcccctgcctgagaccatcgaggacctggagaactggagcctgcgggccaagaagcccaagcaggagcctgaggtggagaaggccagccagaggatccccctgcagccccacggccctggcctgggcagcagctag

SEQ ID NO: 71225 - DNA, 1356 bp, Artificial Sequence
  derived and/or modified sequence
atggagccctgcctggacggctgggtgtacaacagcaccaaggacagcattgtgaccgaatgggacctggtctgtaatagtaacaaactaaaggaaatggcacagagcatcttcatggctgggattctcatcggtgggttggtcctaggagacctgagcgataggttcggaagaaggcctatcctgacctgctcctatctgctgttagctgcctctggatccggtgctgccttcagtcccaccttccccatttacatggtttttagatttttgtgtggattcggaatttccggtatcacactgtctacagttatactcaatgtagagtgggtacccacacggatgcgagctataatgtcgactgcattggggtattgttacaccttcggtcaattcatactgcccggactggcgtacgcaatccctcagtggcggtggcttcagctcaccgtatcgattccgtttttcgtatttttcttatcttcctggtggacgcccgaaagcattagatggctggtcctgtccgggaagtcctcaaaggcgttaaaaatcttaagaagagttgcagtgtttaacgggaagaaggaagaaggcgagcgcctctcattagaggaactcaaactcaatctacagaaggagatatccttggctaaggccaaatatacagcgagtgatctttttaggatcccaatgcttagacgcatgacgttttgtctcagcttggcttggtttgcaactggattcgcgtattatagtttggcaatgggagtggaggagttcggcgtgaacctttacatacttcaaattattttcggcggagtagatgtgccggccaagtttattactatactgtctctgtcttacttgggtagacatacgactcaagccgccgcacttctgctggctgggggagccatcctggctctcacgttcgtaccactggaccttcagacagtgcgcactgttcttgcagtgttcggaaaagggtgtctctcctctagtttttcctgcttgttcttatacacttccgagctgtaccctaccgttattcgccagacaggaatgggcgtgagcaacctgtggacacgtgttggttctatggttagcccactcgtcaagatcaccggcgaagtgcagcccttcatacctaacatcatatatgggattacagccctccttgggggttctgcagcactgttcttacccgaaacgttgaaccagccactgcctgagaccattgaagacctggagaactggtccctccgggcaaagaaaccaaagcaagagcctgaggtggagaaggcctcccagaggatcccactgcagccccacggccccggcttgggctctagctag

SEQ ID NO: 71226 - DNA, 1356 bp, Artificial Sequence
  derived and/or modified sequence
atggaaccttgtttagacggttgggtttataacagtacgaaagatagtatagttactgaatgggacctagtgtgtaacagcaataaactgaaagaaatggctcagagcatttttatggcaggcatcctaattggtggcctcgtgctgggcgatctcagcgaccggtttggacgcagacccatacttacctgcagttaccttctgctggcggcttccggatctggcgctgcgtttagccccacgttcccgatttatatggtgttccgattcctgtgcggattcggaatctcggggattaccctctcaaccgttatcctgaacgtggagtgggtccccactcgcatgcgtgcaattatgagcacagccttaggatactgttacactttcgggcagttcattctgcctggcttagcatacgccattccccagtggaggtggctgcagctgactgtcagcatccctttcttcgtgttcttcttgtccagttggtggacgcccgagagtatcaggtggctggttctctcaggaaaatcttcaaaggccttgaagattcttaggcgtgtggcggtgttcaacggcaagaaggaggaaggcgagcggctgagcttggaagaattaaaacttaacctacagaaggaaattagtctggcaaaggctaagtacactgctagcgatttgtttaggataccaatgctacggcgaatgaccttctgcctaagcctggcctggttcgctaccgggtttgcgtactactctctggctatgggagtcgaggagttcggcgtgaacctgtacatcttgcagatcatttttggtggcgttgatgtgcctgcaaaattcataaccatcctgtcactgagctatctgggtcgccacactactcaagcagccgctctcctgttagccggtggtgcgattctggctctgacctttgttccactggatctccagacagtgcgcactgtcctggccgtgttcggcaagggctgcttgagcagctcattcagctgtctgtttctgtacaccagtgagctgtatcccaccgtcatccgccaaactggtatgggtgtgagtaacctttggactagggtcgggagtatggtctccccgcttgttaagattactggagaagttcaacccttcataccaaacattatttacgggattaccgctctgctgggcggttcggctgcactctttcttccagagaccttaaaccagccattacccgagacaattgaagatctggagaattggtctctgcgggcaaagaagccaaaacaggagcccgaggttgagaaagcgagtcaacggattccgctgcagccacacggcccagggctgggatccagctag

SEQ ID NO: 71227 - DNA, 1387 bp, Artificial Sequence
  derived and/or modified sequence
agcagctgccggcccctaggacagagcagggacctcaactacactgatcaccagccccatcggatccagacccggccaccagtgggacttggtgtgcaactccaacaaactgaaggagatggcccagtctatcttcatggcaggtatactgattggagggctcgtgcttggagacctgtctgacaggtttggccgcaggcccatcctgacctgcagctacctgctgctggcagccagcggctccggtgcagccttcagccccaccttccccatctacatggtcttccgcttcctgtgtggctttggcatctcaggcattaccctgagcaccgtcatcttgaatgtggaatgggtgcctacccggatgcgggccatcatgtcgacagcactcgggtactgctacacctttggccagttcattctgcccggcctggcctacgccatcccccagtggcgttggctgcagttaactgtgtccattcccttcttcgtcttcttcctatcatcctggtggacaccagagtccatacgctggttggtcttgtctggaaagtcctcgaaggccctgaagatactccggcgggtggctgtcttcaatggcaagaaggaagagggagaaaggctcagcttggaggagctcaaactcaacctgcagaaggagatctccttggccaaggccaagtacaccgcaagtgacctgttccggatacccatgctgcgccgcatgaccttctgtctttccctggcctggtttgctaccggttttgcctactatagtttggctatgggtgtggaagaatttggagtcaacctctacatcctccagatcatctttggtggggtcgatgtcccagccaagttcatcaccatcctctccttaagctacctgggccggcataccactcaggccgctgccctgctcctggcaggaggggccatcttggctctcacctttgtgcccttggacttgcagaccgtgaggacagtattggctgtgtttgggaagggatgcctatccagctccttcagctgcctcttcctctacacaagtgaattataccccacagtcatcaggcaaacaggtatgggcgtaagtaacctgtggacccgcgtgggaagcatggtgtccccgctggtgaaaatcacgggtgaggtacagcccttcatccccaatatcatctacgggatcaccgccctcctcgggggcagtgctgccctcttcctgcctgagaccctgaatcagcccttgccagagactatcgaagacctggaaaactggtccctgcgggcaaagaagccaaagcaggagccagaggtggaaaaggcctcccagaggatccctctacagcctcacggaccaggcctgggctccagctgaggacaacgg

SEQ ID NO: 71228 - DNA, 1356 bp, Artificial Sequence
  derived and/or modified sequence
atggagccctgcctggacggctgggtgtacaacagcaccaaggacagcatcgtgaccgagtgggacctggtgtgcaacagcaacaagctgaaggagatggcccagagcatcttcatggccggcatcctgatcggcggcctggtgctgggcgacctgagcgacagattcggcagaagacccatcctgacctgcagctacctgctgctggccgccagcggcagcggcgccgccttcagccccaccttccccatctacatggtgttcagattcctgtgcggcttcggcatcagcggcatcaccctgagcaccgtgatcctgaacgtggagtgggtgcccaccagaatgagagccatcatgagcaccgccctgggctactgctacaccttcggccagttcatcctgcccggcctggcctacgccatcccccagtggagatggctgcagctgaccgtgagcatccccttcttcgtgttcttcctgagcagctggtggacccccgagagcatcagatggctggtgctgagcggcaagagcagcaaggccctgaagatcctgagaagagtggccgtgttcaacggcaagaaggaggagggcgagagactgagcctggaggagctgaagctgaacctgcagaaggagatcagcctggccaaggccaagtacaccgccagcgacctgttcagaatccccatgctgagaagaatgaccttctgcctgagcctggcctggttcgccaccggcttcgcctactacagcctggccatgggcgtggaggagttcggcgtgaacctgtacatcctgcagatcatcttcggcggcgtggacgtgcccgccaagttcatcaccatcctgagcctgagctacctgggcagacacaccacccaggccgccgccctgctgctggccggcggcgccatcctggccctgaccttcgtgcccctggacctgcagaccgtgagaaccgtgctggccgtgttcggcaagggctgcctgagcagcagcttcagctgcctgttcctgtacaccagcgagctgtaccccaccgtgatcagacagaccggcatgggcgtgagcaacctgtggaccagagtgggcagcatggtgagccccctggtgaagatcaccggcgaggtgcagcccttcatccccaacatcatctacggcatcaccgccctgctgggcggcagcgccgccctgttcctgcccgagaccctgaaccagcccctgcccgagaccatcgaggacctggagaactggagcctgagagccaagaagcccaagcaggagcccgaggtggagaaggccagccagagaatccccctgcagccccacggccccggcctgggcagcagctag

SEQ ID NO: 71229 - DNA, 297 bp, Artificial Sequence
  derived and/or modified sequence
tgaatggcctacaacactctgatggaagtatccgcctcaatgttatttcgagttcaacaccactacaattcccactacgaaaagtttggagactttgtgtggagatccgaagacgagttaggcccatccctgcttgagagttttatgagtctgcaagatattaatttgctggagcgccggccaggccggccccagcggcccggcaaccctctgagtaacgtatcgtggaggatcagcgagattgctccaacttcacacactgatatgtcagccgggatcaaggaaactgcgtcctag

SEQ ID NO: 71230 - DNA, 297 bp, Artificial Sequence
  derived and/or modified sequence
tgaatggcctacaacaccctgatggaggtgtctgcctccatgctgttccgggtgcagcaccactacaacagccactatgagaagtttggagactttgtgtggaggagtgaagatgagctgggccccagcctgctggagagcttcatgagcctgcaggacatcaacctgctggagaggaggcctggccggccccagaggcctggcaaccccctgagcaatgtgtcctggaggatcagcgagatcgcccccaccagccacacagacatgtctgctggcatcaaggagacagccagctag

SEQ ID NO: 71231 - DNA, 297 bp, Artificial Sequence
  derived and/or modified sequence
tgaatggcctacaacaccctgatggaggtgagcgccagcatgctgttccgggtgcagcaccattataacagccattacgagaagtttggcgacttcgtgtggcgaagcgaggatgagctgggtccctccttactggaaagttttatgtcattgcaagacatcaatctgctcgaacgccgccccggcaggccacagcgccccggaaaccccctctctaacgtgtcctggcggatatctgaaatcgcgccaacctcacacacagacatgagcgctggaataaaggagactgccagctag

SEQ ID NO: 71232 - DNA, 297 bp, Artificial Sequence
  derived and/or modified sequence
tagatggcatacaatacgctcatggaggtgagtgcatccatgctcttcagagtccagcatcattataattctcactatgaaaagttcggagatttcgtgtggcgcagcgaagatgagcttggaccttcacttctagaaagctttatgtcactccaggatatcaatttgctagaacggagacctggtagaccccagaggcccggaaacccattatcaaacgtttcctggcgtatctcggagattgctccgacttcacacaccgacatgtctgcagggataaaggagactgcaagctag

SEQ ID NO: 71233 - DNA, 395 bp, Artificial Sequence
  derived and/or modified sequence
agatggcctacaacacactgatggaggtctcagcctcgatgctgttccgagtccagcaccactacaactctcactatgaaaagtttggcgacttcgtctggagaagtgaggatgagctggggcccagcctcctggaatcctttatgagcctccaggacataaatcttctggaaaggcggccgggccgcccacagaggccaggcaatccactcagtaatgtctcctggaggatatctgagattgctccaacatcccacactgatatgtcagcaggaatcaaggaaactgcctcctaatctatcctggtgctgctaataagctcactgtgcaaccctgggctctgccgctttctggccctcagtctcctcacctataacatgataaggacgaactag

SEQ ID NO: 71234 - DNA, 297 bp, Artificial Sequence
  derived and/or modified sequence
tgaatggcctacaacaccctgatggaggtgagcgccagcatgctgttcagagtgcagcaccactacaacagccactacgagaagttcggcgacttcgtgtggagaagcgaggacgagctgggccccagcctgctggagagcttcatgagcctgcaggacatcaacctgctggagagaagacccggcagaccccagagacccggcaaccccctgagcaacgtgagctggagaatcagcgagatcgcccccaccagccacaccgacatgagcgccggcatcaaggagaccgccagctag

SEQ ID NO: 71235 - protein, 194 aa, Artificial Sequence
  derived and/or modified sequence
MPFITYLSGLLTAQMLSDDQLISGVEIRCEEKGRCPSTCHLCRRPGKEQLSPTPVLLEINRVVPLYTLIQDNGTKEAFKSALMSSYWCSGKGDVIDDWCRCDLSAFDANGLPNCSPLLQPVLRLSPTVEPSSTVVSLEWVDVQPAIGTKVSDYILQHKKVDEYTDTDLYTVYCWITFIDLRILNQPCIPGMKPT

SEQ ID NO: 71236 - DNA, 90 bp, Artificial Sequence
  derived and/or modified sequence
aatatacgcaaatcaataaatgtaatccagcatataaacagtactaaagacaaaaaccacatgattatctcaatagatgcagaaaaggcc

SEQ ID NO: 71237 - DNA, 585 bp, Artificial Sequence
  derived and/or modified sequence
atgccttttataacatatctttctgggttactgacagcccagatgttaagcgacgaccagctgatttctggagtagagataagatgcgaagagaaaggtcgttgcccgagcacgtgtcacctctgcagaaggccaggaaaggaacagctgtcccctacccctgtgctgctagaaattaaccgcgtggtaccgctatatacgctgattcaggataacggcacaaaagaggccttcaagtcagctcttatgagtagttattggtgttcgggtaaaggtgacgtgatcgatgactggtgtcggtgtgatctatctgccttcgatgctaatgggctcccgaattgcagcccattgttgcaacctgtcttacggctctctcctacggtagaaccgtcttctaccgtggtgtcactggaatgggtcgatgtccagcccgccattggtactaaagtctcagattacattcttcaacacaagaaggtggatgagtatacagacaccgacctctacaccgtttactgctggataacgttcattgacttgaggatcctcaatcaaccatgtataccaggaatgaaacctacctag

SEQ ID NO: 71238 - DNA, 585 bp, Artificial Sequence
  derived and/or modified sequence
atgcccttcatcacctacctgagcggcctgctgacagcccagatgctgagtgatgaccagctgatctctggagtggagatccgctgtgaggagaagggccgctgccccagcacctgccacctgtgcagaagacctgggaaggagcagctgagccccacccctgtgctgctggagatcaacagagtggtgcccctgtacaccctcatccaggacaatggcaccaaggaggccttcaagagcgccctgatgagcagctactggtgcagcgggaaaggagatgtgattgatgactggtgccgctgtgacctgagcgcctttgatgccaacggcctgcccaactgcagccccctgctgcagcctgtgctgcggctgagccccaccgtggagcccagcagcacagtggtgtccctggagtgggtggatgtgcagcctgccatcggcaccaaggtgtctgactacatcctgcagcacaagaaggtggatgagtacacagacacagacctgtacacagtgtactgctggatcaccttcatcgacctgcgcatcctgaaccagccctgcatccctggcatgaagcccacctag

SEQ ID NO: 71239 - DNA, 585 bp, Artificial Sequence
  derived and/or modified sequence
atgcccttcatcacctacctgagcggcctgctgaccgcccagatgctctcggacgaccagctgatcagtggtgtcgagatccggtgcgaggaaaaaggacgctgcccctcaacctgtcacttgtgcaggcggccaggcaaggagcagctctcccccacccctgtgctacttgagataaatcgcgtggtgccactgtacaccctgatccaagataacggcaccaaagaagcttttaagtccgccctgatgtcatcgtactggtgcagcggaaaaggtgacgtgatagacgactggtgtagatgtgatctctctgcttttgatgccaatggacttccgaactgttccccgctcctgcagccagtgttgcgactttcacctacagttgaacccagttctactgtagtctcccttgaatgggtcgacgtgcagccagcaatcgggacgaaggtaagcgactatattttgcagcacaagaaagtggacgaatacacagacaccgatttgtatacagtatattgttggatcaccttcatcgatctgaggattttaaaccaaccatgcatccctggaatgaagcccacttag

SEQ ID NO: 71240 - DNA, 585 bp, Artificial Sequence
  derived and/or modified sequence
atgccattcatcacttacctatcgggcctcctcaccgcccagatgctctctgacgaccagttaatctccggcgttgagattaggtgtgaagaaaaagggagatgcccaagtacatgccacttatgtcgccgacccggtaaggagcaactctctccaaccccagtgctactagagattaaccgggttgtgcccttgtatacactcattcaggataacggcacaaaggaggcgttcaagtcagctcttatgtccagctattggtgctcagggaaaggggatgtaattgatgattggtgtaggtgtgacttaagcgcctttgacgccaatgggctgccgaactgcagcccacttttacagccagtgctccgactcagccccactgtcgagccttcctccacagttgtgagtctagagtgggtggacgtgcagcccgcaatcggcacaaaggtttcagattacatccttcaacacaagaaagtggacgagtacaccgacacggacttgtacacagtgtactgctggatcaccttcatcgacctccgaatcctgaatcaaccgtgtattccaggaatgaaacccacctag

SEQ ID NO: 71241 - DNA, 3411 bp, Artificial Sequence
  derived and/or modified sequence
ctggccccaagcgcgcggggcaaggcggccctgcaggggtgagctttcctctgagaacccggggccttagcgacacgtaatccagttttccgtctccttggtgcagatgaagaaaccgacgcccatgggcgaaagggacctgctcaagttcactcaagaccacagagctgggcagcaagaaggagctcaagtccatgcccttcatcacctacctctcaggtttgctgacagcccagatgctgtcagatgaccagctcatttcaggtgtggagattcgctgtgaggagaaggggcgctgtccatctacctgtcacctttgccgccggccaggcaaggagcagctgagccccacaccagtgctgctggaaatcaaccgtgtggtgccactttataccctcatccaagacaatggcacaaaggaggccttcaagagtgcactgatgagttcctactggtgctcagggaaaggggatgtgatcgatgactggtgcaggtgtgacctcagcgcctttgatgccaatgggctccccaactgcagcccccttctgcagccggtgctgcggctgtccccaacagtggagccctccagtactgtggtctccttggagtgggtggatgttcagccagctattgggaccaaggtctccgactatattctgcagcataagaaagtggatgaatacacagacactgacctgtacacagtttattgctggattacatttattgatttgcggatattgaaccagccttgcatcccagggatgaagccaacttgattgtggtggataagctttttgatgtgctgctggatttggtttgccaatattttattgaagatttttgcatcgatgttcatcagggatattggtctaaaattctctttttttgttgtgtctctgccaggctttggtatcaggatgatgttggcctcataaaatgaattagggaggattccctctttttctattgatttgaatagtttcagaaggaatggtaccagctcatctttgtacctctggtagaattcggctgtgaatccatctggtcctggacttattttggttagtaggctattaattatggcctcaatttcagaacctgttattggtctattcagggattcaacttcttcctggtttagtcttgggaggaggctgtatgtgtccaggaatttatccatttcttctagattttctagtttatttgcatagaggtgtttatagtattctctaatggtagtttgtatttctgtgggatcggtggtgatatcccctttatcattttttattgcgtctatttgattcttctctcttttattctttatgagtcttgctagtagtctatcaattttgttgattttttcaaaaaaccagctcctggattcattgattttttgaagggtttttttttttttgtctctatctccttcagttctgctctcatcttagttatttcttgccttctgctagcttttgtgtgtttgctcttgcttctctagttcttttaattatgatgttagggtgtcagtttcagatctttcttgctttctcctgtgggcatttagtgctataaatctccctctacacactgctttaaatgtgtcccagagattctggtatgttgtgtcctgttctcattggtttcaaagaacatctttatttccgctttcatttcgttatgtacccagtagtcattcaggagcaagttgttcagtttccatgtagttgagcggttttgagtgagtttcttaatcctgagttctagtttgattgcactgtgttctgagagacagtttgttataatttctttcttttacatttgctgaggagtgctttacttcccactgtgtgatcaattttggaataactgcgatgtggtgctgagaagaatgtatattctgttgattggggtggatagttctgtagatgtctattaggtccgcttggtgcagagctgagttcaattcctggatatccttgttaactttctgtctcattgatctatctaatgttgacagtggggtgttaaagtctcccattattattgtgtgggagtctaagtctctttgtaagtctctaaggacttgctttatgaatctgggtgctcctatattgggtgcatatatatttaggatagttagctcgaagaaggtatcttctatttctagtctgctgcaaaggctctgttttgtttccattggaaacagatgttgaattttctgtgtctattaaaatgattgtatagtttatctctctaaatttgttaatatgataagtcacattgatagattttcatattataaaacaacctactatgtgagatttatcccaggaatgtgtaggttgttttatctgtttgttttaattaggatcattctggtctcacaaaatgaattataaaatattttctccttttcagttttctgaagtgtatctgtcttctcagagaatcactgtggttaaaattgatagtatttttttcttaatcattttttagaattcaccagtgaaggcatctgggcttagaccttttcttgcaagaaggtttttaactactaatttagttatttaatagatatagatttacttagattatctgtttcttcttgagtgatctttggcagcttgtgtgttttaaggaacttgttcattccatgtaaattatcaaatttattggaaaaagttgtttatgacattccgttactattcttttgaaatctgttgagattatagtgatattagtctcatcttgatattggtaatgtgtgtctcctctgttttttttctagatcagtttggctagatagctatgacatttatttgtattttcaaagaatcaactttcggttttatctgtttttgcttattgtttcctatttcattgatttatcctctaatttttattataattttctttgtttggcttactttgagtttggttttctccgcattttaatttttgaaatggtagctgaggctattgatttgagacctttcttgtaatgtagtcattccctcttaactactgctttagtagtatctcaaagattgtgttatgttgcgttttcattttcattcagttcaaagtatttccaatttcacttttgttttcttctttgacttatgagttatttagaggcatgccacttcgttttcaaatatttgggagttttttcagaaatttttgttgttgatttttgattccgctatagtcagaaaatatgtttttatgactttaaacattttaaatttattgagactagtttttggtctagatggtctattgctgtattcagtgttcactttaaaataatgtgtatccacttatttatgggtattttataaatgcctgttagataaaatcggttaattatgttattcaagtcttctggagcctttctgattttct

SEQ ID NO: 71242 - DNA, 585 bp, Artificial Sequence
  derived and/or modified sequence
atgcccttcatcacctacctgagcggcctgctgaccgcccagatgctgagcgacgaccagctgatcagcggcgtggagatcagatgcgaggagaagggcagatgccccagcacctgccacctgtgcagaagacccggcaaggagcagctgagccccacccccgtgctgctggagatcaacagagtggtgcccctgtacaccctgatccaggacaacggcaccaaggaggccttcaagagcgccctgatgagcagctactggtgcagcggcaagggcgacgtgatcgacgactggtgcagatgcgacctgagcgccttcgacgccaacggcctgcccaactgcagccccctgctgcagcccgtgctgagactgagccccaccgtggagcccagcagcaccgtggtgagcctggagtgggtggacgtgcagcccgccatcggcaccaaggtgagcgactacatcctgcagcacaagaaggtggacgagtacaccgacaccgacctgtacaccgtgtactgctggatcaccttcatcgacctgagaatcctgaaccagccctgcatccccggcatgaagcccacctag

SEQ ID NO: 71243 - protein, 338 aa, Artificial Sequence
  derived and/or modified sequence
MGKGDVLEAAPTTTAYHSLMDEYGYEVGKAIGHGSYGSVYEAFYTKQKVMVAVKIISKKKASDDYLNKFLPREIQVMKVLRHKYLINFYRAIESTSRVYIILELAQGGDVLEWIQRYGACSEPLAGKWFSQLTLGIAYLHSKSIVHRLMPSLSAAGRDLKLENLLLDKWENVKISDFGFAKMVPSNQPVGCSPSYRQVNCFSHLSQTYCGSFAYACPEILRGLPYNPFLSDTWSMGVILYTLVVAHLPFDDTNLKKLLRETQKEVTFPANHTISQECKNLILQMLRQATKRATILDIIKDSWVLKFQPEQPTHEIRLLEAMCQLHNTTKQHQSLQITT

SEQ ID NO: 71244 - DNA, 1017 bp, Artificial Sequence
  derived and/or modified sequence
atgggcaagggcgacgtgctggaggccgcccccaccaccaccgcctaccacagcctgatggacgagtacggctacgaggtgggcaaggccatcggccacggcagctacggcagcgtgtacgaggccttctacaccaagcagaaggtgatggtggccgtgaagatcatcagcaagaagaaggccagcgacgactacctgaacaagttcctgcccagagagatccaggtgatgaaggtgctgagacacaagtacctgatcaacttctacagagccatcgagagcaccagcagagtgtacatcatcctggagctggcccagggcggcgacgtgctggagtggatccagagatacggcgcctgcagcgagcccctggccggcaagtggttcagccagctgaccctgggcatcgcctacctgcacagcaagagcatcgtgcacagactgatgcccagcctgagcgccgccggcagagacctgaagctggagaacctgctgctggacaagtgggagaacgtgaagatcagcgacttcggcttcgccaagatggtgcccagcaaccagcccgtgggctgcagccccagctacagacaggtgaactgcttcagccacctgagccagacctactgcggcagcttcgcctacgcctgccccgagatcctgagaggcctgccctacaaccccttcctgagcgacacctggagcatgggcgtgatcctgtacaccctggtggtggcccacctgcccttcgacgacaccaacctgaagaagctgctgagagagacccagaaggaggtgaccttccccgccaaccacaccatcagccaggagtgcaagaacctgatcctgcagatgctgagacaggccaccaagagagccaccatcctggacatcatcaaggacagctgggtgctgaagttccagcccgagcagcccacccacgagatcagactgctggaggccatgtgccagctgcacaacaccaccaagcagcaccagagcctgcagatcaccacctag

SEQ ID NO: 71245 - DNA, 1017 bp, Artificial Sequence
  derived and/or modified sequence
atgggcaagggcgatgtgctggaggctgcccctaccactacagcttaccacagtcttatggatgaatatgggtacgaagttggcaaagctatcggtcatggcagctacgggtccgtttacgaagcgttttacactaagcagaaggttatggtcgcggttaaaatcattagcaagaagaaagccagcgacgactacctgaacaaatttctgccacgtgagatccaggtgatgaaagtccttagacataaataccttatcaacttctaccgcgcaattgagagtacctcaagagtgtatataattctggaattagcccaagggggagatgtattagagtggatccagcggtacggggcctgcagcgagccactggcaggaaagtggttttcacagctgactttaggtatcgcctacctccactccaagtcaatcgttcacagactaatgccttctctctcagcagccgggcgtgacctcaagctggagaaccttttactcgataaatgggagaatgtgaaaatcagcgacttcggatttgcaaagatggtgccatcaaaccaacctgttggatgctcaccctcttatcgccaggtcaattgcttttctcatttgtctcagacctactgtggctctttcgcttatgcttgcccagagatcctcaggggtttaccatacaacccctttttatctgatacctggtccatgggagtcatactctacacgctagtggtggcacacctgcctttcgatgacacaaacctcaagaagcttcttagagagacccaaaaagaagtaacattccccgcaaatcacaccatctcacaggaatgtaaaaacctgattctccagatgctccgacaggcaacaaagagagcgactatcttggatatcattaaggatagctgggttcttaagtttcaacctgagcaacctacccacgagatacgtttgctggaggcaatgtgtcagctgcataacacaaccaaacagcatcagtcactccaaattacaacttag

SEQ ID NO: 71246 - DNA, 1017 bp, Artificial Sequence
  derived and/or modified sequence
atgggcaaaggagatgtgctggaggccgcccccaccaccacagcctaccacagcctgatggatgaatatggctatgaggtgggcaaggccatcggccacggcagctatggctctgtgtatgaggccttctacaccaagcagaaggtgatggtggccgtgaagatcatcagcaagaagaaggccagtgatgactacctgaacaagttcctgccccgggagatccaggtgatgaaggtgctgcggcacaagtacctgatcaacttctaccgggccatcgagagcaccagccgggtgtacatcatcctggagctggcccagggcggagatgtgctggagtggatccagagatatggagcctgcagcgagcccctggccggcaagtggttcagccagctgaccctgggcatcgcctacctgcacagcaagagcatcgtgcaccggctgatgcccagcctgtctgctgctggccgggacctgaagctggagaacctgctgctggacaagtgggagaatgtgaagatcagtgactttggatttgccaagatggtgcccagcaaccagcctgtgggctgcagccccagctaccggcaggtgaactgcttcagccacctgagccagacctactgcggcagctttgcctatgcctgcccagagatcctgcggggcctgccctacaaccccttcctgagtgacacctggagcatgggcgtcatcctgtacaccctggtggtggcccacctgccctttgatgacaccaacctgaagaagctgctgcgggagacccagaaggaggtgaccttccctgccaaccacaccatcagccaggagtgcaagaacctgatcctgcagatgctgcggcaggccaccaagagggccaccatcctggacatcatcaaggacagctgggtgctgaagttccagcctgagcagcccacccatgagatccggctgctggaggccatgtgccagctgcacaacaccaccaagcagcaccagagcctgcagatcaccacctag

SEQ ID NO: 71247 - DNA, 1017 bp, Artificial Sequence
  derived and/or modified sequence
atgggcaagggcgacgtgctggaggccgcccccaccaccaccgcctaccactcgttaatggacgaatacggctacgaagtgggcaaggctatcggtcacggctcttacgggtccgtgtatgaggccttctatacaaagcagaaagtgatggtggccgttaaaataataagcaaaaagaaagcatcagatgactacctcaataagttcctcccaagggagatacaagtcatgaaggttctaagacacaaataccttattaatttttaccgggccatcgagagcacatcaagagtatacataatcctcgaactggcccagggcggagacgtgctagagtggattcaaaggtatggagcctgttctgaaccgctggctggaaaatggttctcacagctaaccctcggcatcgcttatctgcacagtaagagcatcgtccaccgcctgatgccgtcactgagcgctgcaggacgggaccttaagctggaaaatttactgctggacaagtgggagaatgtaaagatctcggactttggctttgccaagatggtcccgtctaatcaaccagtcgggtgttcccccagttaccggcaggtgaactgtttctcccacctgagccaaacctactgcggtagcttcgcctatgcttgtccagagattcttaggggcctgccgtacaatccattcctctccgacacttggtccatgggcgtaattctctacactctcgtcgtggcccacctacctttcgacgacaccaatttgaagaaacttctacgcgagacacaaaaagaggtgactttccctgctaatcatacaatcagccaggagtgtaagaacctgatcctccagatgctgagacaggccactaagagggccacgattctcgacatcatcaaggatagctgggttctgaaattccagcccgagcaacctactcacgagatcagactgcttgaggctatgtgtcaactacataatacgacaaaacagcaccagagtctacagattactacctag

SEQ ID NO: 71248 - DNA, 1017 bp, Artificial Sequence
  derived and/or modified sequence
atgggtaaaggcgatgtgttggaggctgcccctaccaccaccgcgtaccactcgctaatggacgagtatggatatgaggtgggcaaggccattggccacggaagttatgggagtgtctacgaggcattctacacgaagcagaaagtcatggtggccgtgaagattatcagtaaaaagaaagccagcgatgattacctcaacaagttcctccctagagaaatccaggtcatgaaagtcctgagacacaagtacctaatcaatttttacagagcgatagagtccactagcagggtgtatattattctagaactcgctcagggaggcgacgtccttgaatggatccaaagatacggagcttgtagtgagcctcttgctggcaagtggttctcccagttgaccctgggtatagcgtatctgcacagtaaatctatagtgcatcggctgatgccctccctctcagccgcaggtagggacctcaaattggagaatttactgctagacaaatgggaaaatgtgaagatcagcgatttcggattcgcaaagatggtcccatcgaaccaacctgtagggtgctctccatcctatagacaggttaattgcttcagccatttgtcgcagacctactgtggaagctttgcttatgcgtgccctgaaatccttcgtggcttgccctacaacccttttctgagtgatacctggtctatgggggtgatcctctacactttagtagttgctcatcttcctttcgatgatacaaacctgaaaaagctgctgcgcgaaactcagaaggaagtcacctttcccgctaaccataccattagccaggagtgcaaaaacctcattctccagatgctaaggcaggccaccaagcgagcaaccattcttgacatcattaaagattcctgggtgctcaagtttcagccagagcagccaactcatgaaataaggctccttgaagccatgtgccagcttcataatacaactaaacaacaccagtcactgcagataaccacttag

SEQ ID NO: 71249 - DNA, 1321 bp, Artificial Sequence
  derived and/or modified sequence
aaaaagaactgcttctctttctttccccctccaagttcctagtggagggctgagtccagcatcccagactcgtgtgactatataggcaagcatttggggacctacttcactttgataccctagccttcagcagctcaaggtgttggcctttggataggaggcttccaagtagtaaagctccctgctctcagcaagcccaacaccatggggaagggagatgtcttagaggcagcaccaaccaccacagcctaccattccctcatggatgaatatggttatgaggtgggcaaggccattggccatggctcctatgggtcggtatatgaggctttctacacaaagcagaaggttatggtggcagtcaagatcatctcaaagaagaaggcctctgatgactatcttaacaagttcctgccccgtgaaatacaggtaatgaaagtcttgcggcacaagtacctcatcaacttctatcgggccattgagagcacatctcgagtatacatcattctggaactggctcagggtggtgatgtccttgaatggatccagcgctacggggcctgctctgagccccttgctggcaagtggttctcccagctgaccctgggcattgcctacctgcacagcaagagcatcgtgcaccgcctgatgcccagcctttctgctgctggtagggacttaaagttggagaacctgttgctggacaagtgggagaatgtgaagatatcagactttggctttgccaagatggtgccttctaaccagcctgtgggttgtagcccttcttaccgccaagtgaactgcttttcccacctcagccagacttactgtggcagctttgcttacgcttgcccagagatcttacgaggcttgccctacaaccctttcctgtctgacacctggagcatgggcgtcatcctttacactctagtggtcgcccatctgccctttgatgacaccaatctcaaaaagctgctaagagagactcagaaggaggtcactttcccagctaaccataccatctcccaggagtgcaagaacctgatcctccagatgctacgccaagccactaagcgtgccaccattctggacatcatcaaggattcctgggtgctcaagttccagcctgagcaacccacccatgagatcaggctgcttgaggccatgtgccagctccacaacaccactaaacagcaccaatccttgcaaattacgacctgaaaatggctgagggagggggctaagagaggagcaaagcaggaggtcttgggctaaaaatcttttttaccaaaaataaatctaagtctgatttagtttcatc

SEQ ID NO: 71250 - protein, 634 aa, Artificial Sequence
  derived and/or modified sequence
MWKASAGHAVSIAQDDAGADDWETDPDFVNDVSEKEQRWGAKTVQGSGHQEHINIHKLRENVFQEHQTLKEKELETGPKASHGYGGKFGVEQDRMDKSAVGHEYQSKLSKHCSQVDSVRGFGGKFGVQMDRVDQSAVGFEYQGKTEKHASQKDYSSGFGGKYGVQADRVDKSAVGFDYQGKTEKHESQRDYSKGFGGKYGIDKDKVDKSAVGFEYQGKTEKHESQKDYVKGFGGKFGVQTDRQDKCALGWDHQEKLQLHESQKDYSKGFGGKYGVQKDRMDKNASTFEDVTQVSSAYQKTVPVEAVTSKTSNIRANFENLAKEKEQEDRRKAEAERAQRMAKERQEQEEARRKLEEQARAKTQTPPVSPAPQPTEERLPSSPVYEDAASFKAELSYRGPVSGTEPEPVYSMEAADYREASSQQGLAYATEAVYESAEAPGHYPAEDSTYDEYENDLGITAVALYDYQAAGDDEISFDPDDIITNIEMIDDGWWRGVCKGRFRELAFSCVRVALVPIKCSRDLPGQARGLRSALWRVGRKDCPRRGASSRVSLLGRRGLGLMEVNPELSHPEHRSCHVRWEICLCHTVTARRIRKLISFLRSREAGPVPSCSQVGGVSFQKVTWKCLGTWVPECP

SEQ ID NO: 71251 - protein, 314 aa, Artificial Sequence
  derived and/or modified sequence
MDKNASTFEDVTQVSSAYQKTVPVEAVTSKTSNIRANFENLAKEKEQEDRRKAEAERAQRMAKERQEQEEARRKLEEQARAKTQTPPVSPAPQPTEERLPSSPVYEDAASFKAELSYRGPVSGTEPEPVYSMEAADYREASSQQGLAYATEAVYESAEAPGHYPAEDSTYDEYENDLGITAVALYDYQAAGDDEISFDPDDIITNIEMIDDGWWRGVCKGRFRELAFSCVRVALVPIKCSRDLPGQARGLRSALWRVGRKDCPRRGASSRVSLLGRRGLGLMEVNPELSHPEHRSCHVRWEICLCHTVTARRIR

SEQ ID NO: 71252 - DNA, 1905 bp, Artificial Sequence
  derived and/or modified sequence
atgtggaaggccagcgccggccacgccgtgagcatcgcccaggacgacgccggcgccgacgactgggagaccgaccccgacttcgtgaacgacgtgagcgagaaggagcagagatggggcgccaagaccgtgcagggcagcggccaccaggagcacatcaacatccacaagctgagagagaacgtgttccaggagcaccagaccctgaaggagaaggagctggagaccggccccaaggccagccacggctacggcggcaagttcggcgtggagcaggacagaatggacaagagcgccgtgggccacgagtaccagagcaagctgagcaagcactgcagccaggtggacagcgtgagaggcttcggcggcaagttcggcgtgcagatggacagagtggaccagagcgccgtgggcttcgagtaccagggcaagaccgagaagcacgccagccagaaggactacagcagcggcttcggcggcaagtacggcgtgcaggccgacagagtggacaagagcgccgtgggcttcgactaccagggcaagaccgagaagcacgagagccagagagactacagcaagggcttcggcggcaagtacggcatcgacaaggacaaggtggacaagagcgccgtgggcttcgagtaccagggcaagaccgagaagcacgagagccagaaggactacgtgaagggcttcggcggcaagttcggcgtgcagaccgacagacaggacaagtgcgccctgggctgggaccaccaggagaagctgcagctgcacgagagccagaaggactacagcaagggcttcggcggcaagtacggcgtgcagaaggacagaatggacaagaacgccagcaccttcgaggacgtgacccaggtgagcagcgcctaccagaagaccgtgcccgtggaggccgtgaccagcaagaccagcaacatcagagccaacttcgagaacctggccaaggagaaggagcaggaggacagaagaaaggccgaggccgagagagcccagagaatggccaaggagagacaggagcaggaggaggccagaagaaagctggaggagcaggccagagccaagacccagaccccccccgtgagccccgccccccagcccaccgaggagagactgcccagcagccccgtgtacgaggacgccgccagcttcaaggccgagctgagctacagaggccccgtgagcggcaccgagcccgagcccgtgtacagcatggaggccgccgactacagagaggccagcagccagcagggcctggcctacgccaccgaggccgtgtacgagagcgccgaggcccccggccactaccccgccgaggacagcacctacgacgagtacgagaacgacctgggcatcaccgccgtggccctgtacgactaccaggccgccggcgacgacgagatcagcttcgaccccgacgacatcatcaccaacatcgagatgatcgacgacggctggtggagaggcgtgtgcaagggcagattcagagagctggccttcagctgcgtgagagtggccctggtgcccatcaagtgcagcagagacctgcccggccaggccagaggcctgagaagcgccctgtggagagtgggcagaaaggactgccccagaagaggcgccagcagcagagtgagcctgctgggcagaagaggcctgggcctgatggaggtgaaccccgagctgagccaccccgagcacagaagctgccacgtgagatgggagatctgcctgtgccacaccgtgaccgccagaagaatcagaaagctgatcagcttcctgagaagcagagaggccggccccgtgcccagctgcagccaggtgggcggcgtgagcttccagaaggtgacctggaagtgcctgggcacctgggtgcccgagtgcccctag

SEQ ID NO: 71253 - DNA, 945 bp, Artificial Sequence
  derived and/or modified sequence
atggacaagaacgccagcaccttcgaggacgtgacccaggtgagcagcgcctaccagaagaccgtgcccgtggaggccgtgaccagcaagaccagcaacatcagagccaacttcgagaacctggccaaggagaaggagcaggaggacagaagaaaggccgaggccgagagagcccagagaatggccaaggagagacaggagcaggaggaggccagaagaaagctggaggagcaggccagagccaagacccagaccccccccgtgagccccgccccccagcccaccgaggagagactgcccagcagccccgtgtacgaggacgccgccagcttcaaggccgagctgagctacagaggccccgtgagcggcaccgagcccgagcccgtgtacagcatggaggccgccgactacagagaggccagcagccagcagggcctggcctacgccaccgaggccgtgtacgagagcgccgaggcccccggccactaccccgccgaggacagcacctacgacgagtacgagaacgacctgggcatcaccgccgtggccctgtacgactaccaggccgccggcgacgacgagatcagcttcgaccccgacgacatcatcaccaacatcgagatgatcgacgacggctggtggagaggcgtgtgcaagggcagattcagagagctggccttcagctgcgtgagagtggccctggtgcccatcaagtgcagcagagacctgcccggccaggccagaggcctgagaagcgccctgtggagagtgggcagaaaggactgccccagaagaggcgccagcagcagagtgagcctgctgggcagaagaggcctgggcctgatggaggtgaaccccgagctgagccaccccgagcacagaagctgccacgtgagatgggagatctgcctgtgccacaccgtgaccgccagaagaatcagatag

SEQ ID NO: 71254 - DNA, 2247 bp, Artificial Sequence
  derived and/or modified sequence
agagcctggtgcctgggagcggctggcgcggcggaatccagggccgacccgggccggaccgaccccaggcggcgacggaatcagtccccaatgcctggaaattcctcattggattactgtgttttaaacagaatttcgtgaacagccttttatctccaagcggaaagaaagatgtggaaagcttcagcaggccacgctgtgtccatcgcccaggatgacgcgggggccgatgactgggagaccgaccctgattttgtgaatgatgtgagtgagaaggagcaaagatggggtgccaagacggtgcagggctccgggcaccaggagcatatcaacatacacaagctgagggagaatgtctttcaagagcatcagacccttaaggagaaggaacttgaaacaggaccaaaagcttcccatggctatggagggaaatttggtgtggaacaagaccgaatggataagtcagctgtcggccacgaatatcagtcgaaactttccaagcactgctcgcaggtggactcggtccgtggcttcggaggcaagtttggtgtccagatggacagagttgatcagtctgctgtaggctttgaataccaggggaagactgagaagcatgcctcccagaaagactactccagtggttttggcggcaagtatggcgtgcaggccgaccgagtagacaagagcgcggtgggcttcgactaccagggcaagacggagaagcacgagtcacagagagattactccaaaggtttcggcggcaaatacggtatcgacaaggacaaagtggataagagcgccgttggctttgagtatcaaggcaaaacggagaagcacgagtcccagaaagactatgtgaaagggtttggaggaaaatttggtgtgcagacagacagacaagacaaatgtgcccttggctgggatcaccaggagaaattgcagctgcatgaatcccaaaaagactactccaaaggattcggcgggaagtatggggtgcagaaggatcggatggataagaatgcgtcaacctttgaggatgtcacccaggtgtcctctgcctaccagaagacagtacctgtcgaagctgtgaccagcaaaacaagtaacatcagagctaactttgaaaacctcgctaaggagaaagagcaggaggacaggcggaaggcggaggcggagagagcccagcggatggccaaggagcggcaggagcaggaagaggccaggaggaagctggaggagcaagccagagccaaaacgcaaacgccccctgtgtcgcccgcacctcagccaaccgaggagaggctgccctcgagccccgtctatgaggatgcggcttccttcaaggcagagctgagctacagaggccctgtgagtgggacggagccggagcccgtgtacagcatggaggccgctgactaccgagaggccagcagccagcagggcctggcctatgccacagaggctgtctatgaaagcgcagaggccccgggccactatcccgcagaggacagcacctacgatgagtacgagaacgatctggggatcacagccgtcgccctgtacgactaccaggctgcgggcgatgatgagatctcatttgaccctgatgacatcatcaccaacatcgagatgattgacgacggctggtggcgcggggtgtgcaagggccgcttcagggagctcgcattctcttgtgttcgtgttgccctcgtgcccatcaagtgcagtcgggacctcccaggacaagcacgaggcctcaggtcggccctgtggcgggtaggcaggaaggactgtcccagacgaggggcttcctctagagtctcactgctggggaggagaggactgggcctgatggaagttaacccggagctaagtcacccagagcacaggagctgccatgtcagatgggaaatctgcctatgtcataccgtgacagcccgcaggatcaggaaactcatctccttcctgaggagccgggaggctggaccagtcccgtcgtgcagtcaggtgggcggtgtgtctttccagaaggtcacgtggaaatgtctcgggacttgggtcccggagtgcccgtgaagcgtgtttttgctcctgaggtgcattttctcatcatccttgctttaccacaatgagcaatgaggtcgggttttatatgcaacttattgtatctgaattcctgtagcacacctcataggtatgatttttttaaattaaagaattcagaataaacattttttgatccacttg

SEQ ID NO: 71255 - DNA, 1326 bp, Artificial Sequence
  derived and/or modified sequence
gcatgaatcccaaaaagcaagagaacaaactgcgattgagcctctttttagcgctcagtagagcaggcgcacaggaagcagatgagaataagcccgtgctgactactccaaaggattcggcgggaagtatggggtgcagaaggatcggatggataagaatgcgtcaacctttgaggatgtcacccaggtgtcctctgcctaccagaagacagtacctgtcgaagctgtgaccagcaaaacaagtaacatcagagctaactttgaaaacctcgctaaggagaaagagcaggaggacaggcggaaggcggaggcggagagagcccagcggatggccaaggagcggcaggagcaggaagaggccaggaggaagctggaggagcaagccagagccaaaacgcaaacgccccctgtgtcgcccgcacctcagccaaccgaggagaggctgccctcgagccccgtctatgaggatgcggcttccttcaaggcagagctgagctacagaggccctgtgagtgggacggagccggagcccgtgtacagcatggaggccgctgactaccgagaggccagcagccagcagggcctggcctatgccacagaggctgtctatgaaagcgcagaggccccgggccactatcccgcagaggacagcacctacgatgagtacgagaacgatctggggatcacagccgtcgccctgtacgactaccaggctgcgggcgatgatgagatctcatttgaccctgatgacatcatcaccaacatcgagatgattgacgacggctggtggcgcggggtgtgcaagggccgcttcagggagctcgcattctcttgtgttcgtgttgccctcgtgcccatcaagtgcagtcgggacctcccaggacaagcacgaggcctcaggtcggccctgtggcgggtaggcaggaaggactgtcccagacgaggggcttcctctagagtctcactgctggggaggagaggactgggcctgatggaagttaacccggagctaagtcacccagagcacaggagctgccatgtcagatgggaaatctgcctatgtcataccgtgacagcccgcaggatcaggtgacttctagcagagaccctggtttttttcctgtgcccactccggcttgtcctcatctctacccatcccctgatgcccaggtcaccgggagggctgctgggagcctctcctgtccccgccgggcagtgtcactgagtccttgaaatcctcccctgccccgcgggtctctggattgggacgcacagtgcagttgaggtctgcgtcgggcttggcttttcacaaaggctgatgtctta

SEQ ID NO: 71256 - DNA, 1905 bp, Artificial Sequence
  derived and/or modified sequence
atgtggaaagcttctgctggtcatgccgtgagcattgctcaggacgatgcaggggccgatgattgggaaaccgaccctgacttcgttaacgatgttagtgaaaaagagcagcggtggggcgcaaaaacagttcagggaagcgggcaccaggaacatatcaacatacataagctccgtgagaatgtgttccaggaacaccaaactctcaaggaaaaggaattggagacaggccccaaagcctcccacggatatggaggcaagtttggagtagaacaagaccggatggacaagagtgccgttgggcacgaatatcaaagcaagcttagtaagcactgcagccaagtcgactcagtgcgagggttcggcgggaaatttggggtgcaaatggacagggttgatcaaagcgctgttggattcgagtatcagggaaagacggagaagcacgcttctcagaaggactatagcagcggatttggaggcaagtatggggttcaggccgatcgagtagacaaatcagccgtcggttttgactaccaaggaaaaacagagaaacatgaatcgcagcgcgattattcaaaaggatttggggggaagtatgggatcgataaggacaaggtggacaaaagcgcagtgggcttcgaatatcaaggtaagactgagaagcacgaaagtcagaaagattacgttaagggattcggcggcaaatttggcgttcagacagaccggcaggataaatgcgcgctggggtgggatcaccaggaaaaacttcaactccacgaatcacagaaagattacagcaaaggctttgggggtaaatacggcgtgcagaaggacaggatggacaagaatgcttccacatttgaggatgtgacacaggtcagctctgcctatcagaaaactgtgccagtggaagccgtgacatcgaaaacctctaacattcgcgctaatttcgaaaatctggccaaagagaaggagcaagaggatcgaagaaaagctgaggccgagcgggcacaacggatggcaaaggaaaggcaggagcaggaggaggctagaaggaagttggaggagcaggctagggcaaaaacccagaccccccccgtgtcccctgctcctcagccaaccgaggagcgtctaccgtccagccctgtgtatgaagatgccgcgtccttcaaggcagagctgagttaccgcggacccgtgagcggaactgagccagaacctgtctactcaatggaggctgcagactatcgggaggcgagttctcaacagggtctcgcctatgcgactgaggcagtgtacgagagtgccgaagccccaggacattacccggcggaggacagtacgtatgatgaatacgaaaacgatcttggtattacggcggtcgccctttacgactatcaggcggccggggacgatgagatctcattcgaccctgacgatattataaccaacatagaaatgattgacgatgggtggtggaggggagtgtgtaagggtagatttagggaactggccttttcctgcgtgcgcgttgcgctggttccaattaagtgctccagagatcttccaggccaggctagaggcctgaggtcagccttatggcgagtgggccgcaaagactgtcctcgtcggggtgccagcagccgcgtgagtcttctgggacgaagaggactgggcctgatggaggtgaacccagagctctctcaccccgagcatcgcagttgccatgtccgatgggaaatctgtctgtgtcatacagtgacggccagacgcatcaggaagcttatttccttcttaagatccagggaagctggtcccgtaccaagttgttcacaggttggtggagtcagttttcagaaagtgacctggaaatgcctagggacctgggtgccagagtgtccttag

SEQ ID NO: 71257 - DNA, 945 bp, Artificial Sequence
  derived and/or modified sequence
atggataagaacgcttctacatttgaagacgtgacacaagtgtctagcgcgtaccaaaaaacagttccagtggaggccgtgacatctaaaacaagcaatattcgggcaaactttgaaaatctcgcaaaggaaaaagaacaagaagatagacggaaagctgaggcggagcgagcacaacgcatggcaaaggagcgtcaggagcaggaggaagccaggcgaaagctcgaagagcaggcccgcgccaaaactcagacccctcctgtgtcccccgccccgcaacctacagaggagaggttgccctccagtccggtgtatgaggatgccgcaagcttcaaggccgagctgagctacagaggtcctgtgtcgggtacagagccggagcccgtgtacagcatggaagcggccgactacagagaagcgtccagtcagcaagggttagcttacgcaaccgaggcagtgtacgagtctgccgaagccccgggccactacccagctgaggatagcacctacgacgagtacgagaatgatctcggcatcacagcggttgccctgtatgattatcaggctgccggagatgacgaaatttcattcgatcccgatgacatcatcacaaacatagagatgatagatgacgggtggtggcgaggcgtctgtaaaggcagattccgagagctagcatttagttgtgtccgcgtggccttggtccccatcaagtgcagtcgagacctccctggccaggcccgggggctcaggagcgctttatggcgagtgggacgcaaagattgcccacgccgcggcgcaagtagccgggtttccctccttggcaggcgtggtctcgggctgatggaggtgaacccagaactgtctcatccagaacatcgctcatgtcacgtgcgatgggagatctgtctgtgtcacacggttactgccaggagaatccgctag

SEQ ID NO: 71258 - DNA, 1905 bp, Artificial Sequence
  derived and/or modified sequence
atgtggaaggccagcgctggccatgctgtgtccatcgcccaggatgatgctggagcagatgactgggagacagatcctgactttgtgaatgatgtgtctgagaaggagcagcgctggggcgccaagacagtgcagggcagcggccaccaggagcacatcaacatccacaagctgcgggagaatgtgttccaggagcaccagaccctgaaggagaaggagctggagaccggccccaaggccagccacggctacggcggcaagtttggagtggagcaggacaggatggacaagtctgctgtgggccacgagtaccagagcaagctgagcaagcactgcagccaggtggacagcgtgcggggctttggaggcaagtttggagtgcagatggacagagtggaccagagcgctgtgggctttgagtaccagggcaagacagagaagcacgccagccagaaggactacagcagcggctttggaggcaagtatggagtgcaggccgacagagtggacaagtctgctgtgggctttgactaccagggcaagacagagaagcatgagagccagagggactacagcaaaggatttggaggcaagtatggaattgacaaggacaaggtggacaagtctgctgtgggctttgagtaccagggcaagacagagaagcatgagagccagaaggactatgtgaagggctttggaggcaagtttggagtgcagacagaccggcaggacaagtgtgccctgggctgggaccaccaggagaagctgcagctgcacgagagccagaaggactacagcaaaggatttggaggcaagtatggagtgcagaaggacaggatggacaagaatgccagcacctttgaagatgtgacccaggtgtcctctgcctaccagaagacagtgcctgtggaggccgtgaccagcaagaccagcaacatccgggccaactttgagaacctggccaaggagaaggagcaggaggacaggaggaaggccgaggccgagcgggcccagaggatggccaaggagcggcaggagcaggaggaggcccggaggaagctggaggagcaggcccgggccaagacccagaccccacctgtgtccccagccccccagcccacagaggagcggctgcccagcagccctgtgtatgaagatgctgccagcttcaaggccgagctgagctaccggggccctgtgtctggaacagagcctgagcctgtgtacagcatggaggccgctgactaccgggaggccagcagccagcagggcctggcctatgccacagaagctgtgtatgaatctgctgaggcccctggccactacccagctgaggacagcacctatgatgaatatgaaaatgacctgggcatcacagctgtggccctgtatgactaccaggccgctggagatgatgagatcagctttgatcctgatgacatcatcaccaacatcgagatgattgatgatggctggtggaggggcgtgtgcaagggccgcttccgggagctggccttcagctgtgtgcgggtggccctggtgcccatcaagtgcagccgggacctgcccggccaggcccggggcctgcggagcgccctgtggagggtgggcaggaaggactgccccaggagaggagccagcagccgggtgtccctgctgggcagaagaggcctgggcctgatggaggtgaaccctgagctgagccaccctgagcacaggagctgccacgtgcgctgggagatctgcctgtgccacacagtgacagcccggcgcatcaggaagctgatctccttcctgcggagccgggaggccggccctgtgcccagctgcagccaggtgggcggcgtgtccttccagaaggtgacctggaagtgcctgggcacctgggtgcctgagtgcccctag

SEQ ID NO: 71259 - DNA, 945 bp, Artificial Sequence
  derived and/or modified sequence
atggacaagaatgccagcacctttgaagatgtgacccaggtgagcagcgcctaccagaagacagtgcctgtggaggccgtgaccagcaagaccagcaacatccgggccaactttgagaacctggccaaggagaaggagcaggaggacaggaggaaggccgaggccgagcgggcccagaggatggccaaggagcggcaggagcaggaggaggcccggaggaagctggaggagcaggcccgggccaagacccagaccccacctgtgtccccagccccccagcccacagaggagcggctgcccagcagccctgtgtatgaagatgctgccagcttcaaggccgagctgagctaccggggccctgtgtctggaacagagcctgagcctgtgtacagcatggaggccgctgactaccgggaggccagcagccagcagggcctggcctatgccacagaggccgtgtatgagagcgctgaggcccctggccactacccagctgaggacagcacctatgatgaatatgaaaatgacctgggcatcacagctgtggccctgtatgactaccaggccgctggagatgatgagatcagctttgatcctgatgacatcatcaccaacatcgagatgattgatgatggctggtggaggggcgtgtgcaagggccgcttccgggagctggccttcagctgtgtgcgggtggccctggtgcccatcaagtgcagccgggacctgcccggccaggcccggggcctgcggagcgccctgtggagggtgggcaggaaggactgcccccggcggggggccagcagccgggtgtccctgctgggccggcggggcctgggcctgatggaggtgaaccctgagctgagccaccctgagcacaggagctgccacgtgcgctgggagatctgcctgtgccacacagtgacagcccggcgcatcagatag

SEQ ID NO: 71260 - DNA, 1905 bp, Artificial Sequence
  derived and/or modified sequence
atgtggaaggccagcgccggccacgccgtgagcatcgcccaggacgatgcaggggccgacgattgggagacggatcccgattttgtgaatgacgtgagtgaaaaggagcagcggtggggcgcaaagacagtgcagggctccggccaccaggaacatatcaacatacataagcttagggagaacgtcttccaagagcatcagaccctcaaagaaaaagagcttgagaccggcccaaaggccagtcatggatacggtgggaaatttggagtggaacaggatcgcatggataaaagtgcagtggggcatgagtatcaatcaaagctaagcaaacactgttctcaagtcgatagcgttagggggtttggggggaagttcggggtacagatggatcgagtagaccagtccgctgttggctttgaatatcagggcaaaaccgagaaacatgcatctcagaaggattactcctctggctttggaggcaagtacggcgtgcaggctgatcgcgtggataaaagcgctgtcggctttgactaccaggggaagacagaaaaacacgaaagccagcgagattactcgaaagggttcggtggcaaatacggcatcgataaagataaagttgacaagtccgccgtgggatttgagtaccagggcaaaactgaaaagcatgagtcgcagaaagactacgttaagggctttggcggcaaatttggagtgcagacagatcgacaggacaagtgtgctcttgggtgggaccaccaggaaaagctgcagctgcacgagtctcaaaaggattattcaaagggctttggcggcaagtacggcgttcagaaggaccgaatggacaagaacgccagcaccttcgaagatgttacacaggtgtcttctgcataccagaagacggtccctgtggaggctgtgaccagcaagaccagtaatatcagagccaacttcgagaacctggcaaaagagaaagagcaggaggaccgacgaaaagccgaggccgaacgggcacaaaggatggcgaaagaacggcaagagcaggaggaggccagaaggaaattggaagagcaagcacgcgctaagacacagaccccacctgttagccccgccccacagccaacggaggagagactgcccagtagccccgtctacgaagacgccgccagcttcaaagccgaactgtcctacaggggtccagtcagcggcactgaaccagaacccgtatattctatggaagccgcggactaccgtgaggcttcctcgcagcagggcctggcctatgccactgaggccgtgtatgaaagcgccgaggcaccaggccactacccagccgaggactctacatatgacgagtatgaaaatgatctggggattactgcagtcgctctttacgactaccaggccgccggggacgatgagattagctttgatcccgatgacattatcacgaacattgagatgatcgatgatggctggtggaggggcgtgtgcaagggcagattccgtgagctcgccttctcatgcgtgagagttgctctggttcctattaaatgtagcagagatctgcctggccaggctcgcgggctgagaagcgcattgtggcgtgttgggcgcaaagactgtccgcggcgtggggcaagttcacgagtgtcactattgggtagaagggggttaggtctgatggaggtgaatcctgaactgtctcaccccgaacaccggagttgccacgttagatgggaaatctgcttgtgtcatacagttactgcgcgtcggatcagaaagctgatttccttcttgaggtctcgggaggcaggccctgttccaagctgttctcaggtcggcggagtaagctttcagaaggtcacctggaagtgcctcggcacttgggttccggagtgtccctag

SEQ ID NO: 71261 - DNA, 945 bp, Artificial Sequence
  derived and/or modified sequence
atggacaagaacgccagcaccttcgaggacgtgacccaggtgagcagcgcatatcagaagaccgtccccgttgaggctgtcacctccaagaccagtaacatcagggcgaacttcgaaaacctggcaaaggagaaggaacaggaggaccgccgcaaggcggaggccgaaagggcccagaggatggccaaagaacgacaggagcaggaggaggcccgaagaaaactcgaagagcaggccagagccaaaacccagacacccccagtatcacccgcaccacaaccaacagaggagcggctgcctagctcccctgtgtacgaggacgcagcctcatttaaggcggagctcagctaccgggggcccgtgtcgggcaccgagcctgagccagtgtattccatggaggcagccgactatagagaggcttcgtcacagcaggggctggcatacgcaaccgaggcggtctacgagagcgcggaagccccggggcactaccccgctgaagattcaacctatgatgagtatgaaaatgatctcggaatcacagccgtagctttgtacgattaccaagctgccggtgacgacgaaatctcattcgatccagacgatattataacaaacattgaaatgattgatgacgggtggtggcggggagtctgtaaggggcgcttcagggaactcgcattcagctgcgtgagagtggccttagtccctatcaagtgcagcagagatttacccggacaggctcggggattgagaagcgcgttgtggagagtgggtcggaaggattgcccccgcagaggagcctcttcaagagtgtcgttactaggaaggaggggactcggattgatggaagtcaacccagagcttagccacccggagcatcgcagctgccatgtgcggtgggagatatgtctgtgtcacacggtgaccgctcgtcggattaggtag

SEQ ID NO: 71262 - DNA, 1905 bp, Artificial Sequence
  derived and/or modified sequence
atgtggaaagcgtctgctggacacgctgtctccattgcgcaggacgacgctggcgctgatgattgggaaactgatccggacttcgtgaacgatgtcagtgaaaaggagcagcggtggggcgctaagactgttcagggttcagggcaccaagagcacatcaatattcataagcttcgggaaaacgtctttcaagagcatcagactctgaaggagaaggagctagaaacgggcccaaaagccagccatggatatggtggcaaatttggcgtagagcaggatagaatggataaaagtgcagttgggcacgagtatcagtccaagttgagcaaacattgtagccaggtggactcagtacgcggattcggcggaaagttcggcgtgcagatggaccgtgttgaccagtcagccgtggggttcgagtatcaggggaaaaccgagaagcatgccagtcagaaggattactcgtccgggtttggagggaagtatggtgttcaggctgatcgggtggacaaatctgctgtgggctttgattatcaaggcaaaacggagaagcatgagtcccaacgggactacagtaagggcttcggcggtaaatatggtattgataaggataaagtggacaaatccgccgtggggtttgagtaccagggaaagactgagaagcacgagagccagaaagattacgtgaagggcttcggcggtaagtttggagtccaaaccgatcgacaagataagtgtgcattgggctgggatcaccaagaaaaactccaactgcacgagtctcagaaggattatagcaagggatttgggggtaagtatggtgttcaaaaggatcgcatggacaagaacgcgagtacgttcgaggacgttactcaggtctcttcggcctaccagaaaacagtgccagtcgaggccgtcacgtcaaaaacctctaatattcgagctaacttcgagaatctggctaaagagaaggaacaggaagatagacgcaaggccgaggcggagagagctcagagaatggccaaagagcggcaggagcaggaggaggcccgaaggaagctagaagagcaagctagggcaaagacacagactccaccagtatccccagccccacagcctacagaggaacgacttccgagttcaccagtttatgaagacgccgcatcattcaaggccgagctatcctacagaggacctgtatcaggcacagaacccgaacccgtgtattctatggaggctgcagattacagagaagctagttctcagcagggacttgcttatgccactgaggctgtctacgagagcgccgaagctcccggacactatcctgccgaagacagtacctatgatgagtatgaaaacgatctggggattactgctgttgccctgtatgattaccaagcggcaggggatgacgagatcagtttcgacccggatgacataattactaacatagagatgatcgacgacggctggtggcgaggggtgtgtaagggaaggtttcgtgaactcgcctttagttgtgtcagggttgctctggtgcccatcaagtgttctagagatctgccaggacaggccaggggattgagaagcgccttatggcgggtgggtagaaaggactgtcctagacggggagcgtcctcgcgagtatccctcttaggcagaagaggtttgggtctcatggaggtgaatcccgagctgagccaccctgagcacaggtcctgccacgtcaggtgggagatctgtctgtgtcataccgtcacagcccgtagaattcgcaaactaatttccttccttagatcgagggaggccggacccgttccttcttgctcacaagtaggaggggtctcattccagaaggtcacctggaagtgtctaggcacgtgggttcctgagtgtccgtag

SEQ ID NO: 71263 - DNA, 945 bp, Artificial Sequence
  derived and/or modified sequence
atggataaaaacgcctccacattcgaggacgtgactcaggtgagcagcgcatatcagaaaacagtgcctgtggaggcagtgaccagtaaaacatcaaatatccgagccaactttgaaaatttggccaaggaaaaagagcaggaagataggaggaaggcggaggccgaaagagcccagcgaatggcaaaagagcgccaggaacaggaggaagcccgaagaaaactcgaggagcaggctcgagccaagacccagacaccccctgtgagtcccgctcctcaacctaccgaggaacgcttacccagctcaccagtgtacgaggatgctgcttcttttaaggcagagctaagttatcgtggtccagtgagcgggacagaacccgaaccagtctacagcatggaagccgcagactaccgggaagccagctcacagcagggactggcctacgctacagaggcggtttatgaatccgcggaggcacccggtcattacccggctgaagacagtacctacgacgaatacgagaatgatctcggcatcaccgccgtagctctctatgattaccaggccgcaggtgacgatgaaatctcttttgatcccgatgatattattaccaacatagaaatgattgacgacggttggtggagaggtgtgtgcaagggcaggttccgagaactggcgttttcatgtgtgcgtgtcgcattggtccccattaagtgctcccgagatcttcccggacaagctcgtgggctccggtcagcactttggagggtcggaagaaaagactgtcctagacggggagcttcctccagggtgtccctcctcgggaggcggggtctgggcttgatggaggtgaaccccgagctttcccacccggagcatagaagctgccacgtgagatgggaaatttgcctctgtcacacagtgactgccagaaggattcgatag

SEQ ID NO: 71264 - protein, 809 aa, Artificial Sequence
  derived and/or modified sequence
MYEALPGPAPENEDGLVKVKEEDPTWEQVCNSQEGSSHTQEICRLRFRHFCYQEAHGPQEALAQLRELCHQWLRPEMHTKEQIMELLVLEQFLTILPKELQPCVKTYPLESGEEAVTVLENLETGSGDTGQQASVYIQGQDMHPMVAEYQGVSLECQSLQLLPGITTLKCEPPQRPQGNPQEVSGPVPHGSAHLQEKNPRDKAVVPVFNPVRSQTLVKTEEETAQAVAAEKWSHLSLTRRNLCGNSAQETVMSLSPMTEEIVTKDRLFKAKQETSEEMEQSGEASGKPNRECAPQIPCSTPIATERTVAHLNTLKDRHPGDLWARMHISSLEYAAGDITRKGRKKDKARVSELLQGLSFSGDSDVEKDNEPEIQPAQKKLKVSCFPEKSWTKRDIKPNFPSWSALDSGLLNLKSEKLNPVELFELFFDDETFNLIVNETNNYASQKNVSLEVTVQEMRCVFGVLLLSGFMRHPRREMYWEVSDTDQNLVRDAIRRDRFELIFSNLHFADNGHLDQKDKFTKLRPLIKQMNKNFLLYAPLEEYYCFDKSMCECFDSDQFLNGKPIRIGYKIWCGTTTQGYLVWFEPYQEESTMKVDEDPDLGLGGNLVMNFADVLLERGQYPYHLCFDSFFTSVKLLSALKKKGVRATGTIRENRTEKCPLMNVEHMKKMKRGYFDFRIEENNEIILCRWYGDGIISLCSNAVGIEPVNEVSCCDADNEEIPQISQPSIVKVYDECKEGVAKMDQIISKYRVRIRSKKWYSILVSYMIDVAMNNAWQLHRACNPGASLDPLDFRRFVAHFYLEHNAHLSD

SEQ ID NO: 71265 - DNA, 2430 bp, Artificial Sequence
  derived and/or modified sequence
atgtatgaggcgcttccgggaccggcccccgagaatgaagacggactggtgaaggtgaaagaggaagatccgacttgggaacaagtctgtaactcccaggagggctcctcccacacccaggaaatctgccgcctcaggttccgccacttctgctaccaagaggcccatgggccccaggaagctcttgcccaactacgagagctgtgtcaccagtggctgaggcccgaaatgcatactaaggaacagattatggaactgcttgtcctggaacagttcttgacaatcctgcctaaagagctccagccatgtgttaagacatatccactagagagcggagaagaagctgtgaccgtgcttgaaaatcttgagacaggctcaggagacactggtcagcaggcctcggtgtacatccagggccaggacatgcatccaatggtggccgagtaccaaggcgtgagcctagagtgccaatccctccaactcctgcctggtatcacgaccctgaagtgcgaacctcctcagcgcccacagggaaaccctcaggaggtgtcaggccctgtgcctcacggcagtgcacacttacaggagaagaacccccgcgacaaggctgtggtcccagtgttcaaccctgtgagatctcagacccttgttaagactgaggaagagacagcccaggccgtggctgccgagaagtggtctcacttatccctcactagaaggaacctctgcggcaactccgcacaggaaacagtgatgtctctatcccccatgacggaagaaattgttacaaaagacaggttgtttaaggccaaacaagagaccagtgaggaaatggagcaatcaggcgaggccagtggtaagcccaaccgtgagtgcgcgcctcagattccgtgctccactcccatcgccacagagaggaccgttgcacacctcaataccctgaaggacaggcacccaggcgacttatgggcacggatgcacatttctagtctggaatacgccgctggagatattacacggaaggggaggaagaaggacaaggcacgagtgtcggagttgctccagggcctgagcttctccggggattccgacgtagaaaaggataatgagcctgagattcagccagctcagaagaaactgaaagtttcctgtttccccgaaaagagttggacaaaacgggatatcaagcccaatttcccgagctggtccgcattagatagcggattgctcaaccttaagagtgagaagcttaatcccgtggaattgtttgagctattcttcgacgatgagacctttaatttgatcgtcaacgagaccaacaactacgctagccaaaagaatgtttcactggaggtaacagttcaggaaatgagatgcgtgttcggcgtgctgctgctctctgggttcatgaggcatcccagaagggagatgtactgggaagtatccgacaccgatcaaaacctcgtgagggacgcgattaggagagaccgctttgaactgattttctctaatctacacttcgctgataatggccatcttgaccagaaagataaattcacaaaactccgccctctgatcaagcagatgaacaagaactttctgctgtacgcgcccttggaggaatactactgcttcgacaagtcgatgtgtgagtgctttgatagtgatcagtttctgaatggcaagcccattcggattgggtacaaaatctggtgcggcacaacaacacaaggatacctggtgtggtttgagccataccaggaggagtccaccatgaaggttgacgaagatccagatcttggcttaggcggcaatctggtgatgaattttgctgacgttctgctcgaacgaggacagtatccgtaccatctttgcttcgatagcttctttacaagcgtgaaattgttgtccgccctgaaaaagaagggcgtgcgagccaccggtacaattagggagaatcgcacagaaaagtgtcctctcatgaacgtggaacatatgaagaaaatgaagagaggttatttcgatttcagaatcgaggagaacaacgagattatactctgtcgctggtacggggacggcattatatccttgtgcagcaatgctgtaggaatagaaccagttaatgaggtgagctgttgtgatgccgataacgaagagatcccccagatcagccagccatccattgttaaggtgtacgatgagtgcaaggagggggtggctaaaatggatcagataataagcaaataccgtgttcgcatccggagcaaaaaatggtactcaatcctcgtgagttacatgatcgatgtagccatgaacaatgcttggcagctgcaccgggcatgcaacccaggtgcgtcacttgatcctctggatttcagacgattcgtggctcacttttacctcgagcacaacgctcacttgagtgactag

SEQ ID NO: 71266 - DNA, 2430 bp, Artificial Sequence
  derived and/or modified sequence
atgtacgaggccttgcctgggcccgcgccggaaaacgaggatgggctggtcaaggtgaaggaagaggaccccacctgggagcaagtgtgtaattcccaggaagggtcgagccacacacaggagatatgccgccttcggtttcggcatttttgctaccaggaggcccacggcccacaggaagcactggcccagcttcgcgagctgtgtcaccagtggctgcgaccagagatgcatactaaggagcagattatggaactgcttgttcttgagcagttcctgacaatcctacctaaggagctgcaaccgtgcgtgaagacttatccgctggaatctggcgaggaagcggtgaccgtcctggaaaacctcgagactggctctggggatacagggcagcaagcctctgtgtacattcaggggcaagatatgcatcccatggtggccgagtatcaaggagtctccctagagtgtcaatctttgcagctcctacccggcattacaacactaaagtgtgagcccccacaacggccccagggaaatccgcaagaggtcagcggccccgttccacatgggagcgcccacctgcaggagaaaaaccctagagacaaagctgtggtgccagtattcaatcccgtccggtctcaaacactcgtgaagaccgaagaagaaacggctcaggctgtggcggccgaaaagtggagtcatctctcactaacaagacgaaacctgtgcggcaactctgcacaggagactgtcatgagcctgagtcccatgaccgaggagattgtgaccaaagatcgcctgttcaaagcaaagcaggaaacaagtgaagagatggagcaatccggcgaggcatccgggaagcccaacagagaatgcgctcctcagattccttgttctacgcccatcgccaccgagagaacagtggcgcacctgaatactttaaaagatcgacacccgggtgacctgtgggctagaatgcatatttccagtttggaatatgccgccggcgatatcaccaggaagggaaggaagaaagacaaggctagagtgtcagagctgctgcagggactgtcctttagtggcgactccgacgtcgagaaggataacgagccagagatccagccagcccaaaaaaaactcaaggtgagctgctttcccgagaagtcatggacaaagagagacattaagccaaacttccccagttggagtgccctggactccggcctcctgaacctaaagagtgaaaagctgaacccagtcgaactgttcgagctgttttttgatgacgagacatttaatcttattgtaaatgaaactaacaactatgccagccaaaagaacgtgtctttagaagtaacagtgcaagaaatgcgctgcgtctttggggtcctgttactgagtggctttatgcgccaccccagacgagaaatgtactgggaggtcagcgacaccgaccagaatctggtcagagacgctatccgtcgcgaccggtttgaactgattttcagtaatcttcacttcgccgacaatggccaccttgaccagaaggacaagttcactaagctgcgacccctgataaagcagatgaacaaaaactttctgctctatgccccactcgaggagtattactgctttgataaaagcatgtgtgagtgcttcgactccgaccagtttctcaacggaaaaccgatcagaatcggttataaaatttggtgcggcaccaccactcagggttatctggtgtggtttgaaccatatcaggaagaaagtactatgaaagtggacgaggatcccgatctcggcctgggtggaaacctggtcatgaatttcgccgatgtcctcctcgagcgggggcagtacccgtaccacctgtgctttgatagtttctttactagcgttaaactcttgagcgcactgaaaaaaaaaggcgttcgcgccactgggaccatcagagagaaccggacggagaaatgtccattaatgaatgttgaacacatgaagaagatgaagcggggctattttgattttcgcatagaagagaacaatgagataattctttgcagatggtacggggacggaattatttccttgtgttccaatgccgtagggatcgaacccgtgaacgaagtatcatgttgtgatgccgacaacgaggagatccctcagatcagccagcctagcattgtcaaagtgtatgacgagtgcaaggagggggtcgccaaaatggaccaaatcatcagcaagtaccgagttcgcattcgctccaaaaaatggtatagtatcctcgtttcatatatgatcgatgtcgcaatgaataatgcttggcagctccacagagcctgcaatcccggcgcgtccctggaccccttagattttcgccgctttgtcgcgcacttttacttggaacataacgctcatctgtccgattag

SEQ ID NO: 71267 - DNA, 3100 bp, Artificial Sequence
  derived and/or modified sequence
gtacccgcccagctgctggaggcgccggcagcgcccgccagacccgccagcccagcggcccgggctctggggaaaccggcgctcccgacaggggagcaccgggcctctgagctccctcgggagcctttcacgaggtcagctacgtctttgttgtgcgcgttcctgaacttttggtccattaaccaacaattagacacgccggtattcagtgcctggcgcggtgctagatgctgggtgtaatctcagaaaaatacattcaggggcgcgcctgagggtgctggctgctggcatctcaggtgctttacgtgcattcgtgaagaagcccatcagtatttcttgaataccagatctctatttctgaatatagaccccaagctaagtgaagctttagcctctaagctcaacatgtatgaagctttgccaggccctgctcctgaaaatgaagatggccttgtgaaagtgaaggaggaagatcccacctgggagcaggtgtgcaactcacaggagggcagctcccacactcaggagatttgccgcctgcgctttcggcacttctgctaccaggaggctcacggaccccaggaagctctggcccaactccgagaactttgtcatcaatggctgagaccggagatgcacaccaaggaacagataatggaactgctggtgctggagcagttcctgaccatcctgcccaaggagctccagccctgtgtgaagacatatcctctggagagtggagaggaggcagtgacagtgctggagaatctagagacaggaagtggagacacaggacaacaggcctctgtctatattcagggacaggacatgcacccaatggtggcagaatatcaaggagtctctttggagtgtcagagcctccagctcctgcctgggataaccaccctgaagtgtgaacctccacagcgtcctcaagggaacccccaagaagtgagtgggcctgttccccacggatcagctcatctccaggaaaaaaaccccagagacaaggctgtagtgcctgtgtttaacccagtcaggtcccagacattggtgaagactgaggaagaaacagcccaggccgttgctgcagagaagtggtcacatctgagtctgactcggaggaacctctgtgggaactcagctcaggagacagttatgagcctcagtccgatgactgaagaaattgtaactaaagatagattgtttaaagcaaagcaagaaacttctgaagaaatggaacaaagtggagaagcctcaggaaagcccaacagagagtgtgcaccccagattccttgtagtactcctattgctactgaaaggacagttgcacatttgaacactctgaaggaccgtcacccaggtgatttgtgggcccgcatgcacatctcatccctggaatatgctgcaggagacattacccgaaaagggagaaaaaaagacaaagctcgagtgagtgaactgctccaaggcctctcattctctggtgactcagatgtggaaaaagataatgagcctgagatccagcctgctcaaaagaagttaaaggtatcatgtttcccagaaaagagttggaccaaaagagacattaaacccaattttccaagctggtcagcactggattctggacttttgaatctcaagagcgaaaagttgaacccagtagagctttttgaattattttttgatgatgaaacattcaacttaattgtcaatgaaaccaataattatgcttctcagaaaaatgtcagcttggaagtcacagttcaggaaatgaggtgtgtgtttggtgtcttacttttgagtggatttatgaggcatcctagaagggaaatgtattgggaagtctctgacaccgatcagaacctggttagagatgcaatcagaagggacagatttgaattgattttctcaaacctgcactttgcagataatggccacctagatcaaaaagataagtttacaaagttgagacctctcataaaacaaatgaataaaaatttcctcttgtatgctcccctggaagaatactattgctttgataagtcaatgtgtgaatgctttgatagtgaccaattcctgaatggaaagcctattagaattggctataaaatttggtgtggtacaaccacacagggttatctggtttggtttgaaccctatcaagaagaatcaactatgaaggtagatgaggatcctgatcttgggttaggtggaaatctagtgatgaacttcgctgatgttcttttagagagaggtcagtatccctatcacctgtgttttgatagcttctttacaagtgtcaaattgttgtcagccttgaaaaagaagggggtgagggcaacaggaacaattcgtgagaacaggaccgaaaaatgtccccttatgaatgtagaacatatgaaaaaaatgaagagagggtattttgatttccgaatagaagaaaacaatgagataattttgtgtcgttggtatggggatggcattatcagtctgtgctccaatgctgtgggcatagaaccagtcaatgaggtaagctgttgtgatgctgataacgaagaaatccctcagataagtcaaccatccatagtaaaagtgtatgatgaatgcaaggaaggtgtagctaaaatggatcaaattatttcgaaatacagggtgaggataagaagcaagaaatggtactcaattttggtgagctacatgattgatgtagccatgaacaatgcatggcaactacacagagcctgtaacccaggtgcttctctagaccccttggattttcggagatttgttgcacatttctacttggaacacaatgctcatctgtcagattagggtacataaaatggacatagtgcagacattaataagacatagaaaaataataattatacatgctgttgtaccctcccaaagtaaatctgatatatgtaatgaagttattaaataatacttttaaaaatcagacatttatatagagtttcaaagactattgtaacaagtaatgttaaaaattgtctgtgagaatgttgaactgtagtacctttctctatgtcaagttttgtgtcagacatgggaaatcatgtatttgttcaattga

SEQ ID NO: 71268 - DNA, 3114 bp, Artificial Sequence
  derived and/or modified sequence
actccgctgcgggcgcggcgcagggagaagcttttgtacccgcccagctgctggaggcgccggcagcgcccgccagacccgccagcccagcggcccgggctctggggaaaccggcgctcccgacaggggagcaccgggcctctgagctccctcgggagcctttcacgaggtcagctacgtctttgttgtgcgcgttcctgaacttttggtccattaaccaacaattagacacgccggtattcagtgcctggcgcggtgctagatgctgggtgtaatctcagaaaaatacattcaggggcgcgcctgagggtgctggctgctggcatctcaggtgctttacgtgcattcgtgaagaagcccatcagtatttcttgaataccagaccccaagctaagtgaagctttagcctctaagctcaacatgtatgaagctttgccaggccctgctcctgaaaatgaagatggccttgtgaaagtgaaggaggaagatcccacctgggagcaggtgtgcaactcacaggagggcagctcccacactcaggagatttgccgcctgcgctttcggcacttctgctaccaggaggctcacggaccccaggaagctctggcccaactccgagaactttgtcatcaatggctgagaccggagatgcacaccaaggaacagataatggaactgctggtgctggagcagttcctgaccatcctgcccaaggagctccagccctgtgtgaagacatatcctctggagagtggagaggaggcagtgacagtgctggagaatctagagacaggaagtggagacacaggacaacaggcctctgtctatattcagggacaggacatgcacccaatggtggcagaatatcaaggagtctctttggagtgtcagagcctccagctcctgcctgggataaccaccctgaagtgtgaacctccacagcgtcctcaagggaacccccaagaagtgagtgggcctgttccccacggatcagctcatctccaggaaaaaaaccccagagacaaggctgtagtgcctgtgtttaacccagtcaggtcccagacattggtgaagactgaggaagaaacagcccaggccgttgctgcagagaagtggtcacatctgagtctgactcggaggaacctctgtgggaactcagctcaggagacagttatgagcctcagtccgatgactgaagaaattgtaactaaagatagattgtttaaagcaaagcaagaaacttctgaagaaatggaacaaagtggagaagcctcaggaaagcccaacagagagtgtgcaccccagattccttgtagtactcctattgctactgaaaggacagttgcacatttgaacactctgaaggaccgtcacccaggtgatttgtgggcccgcatgcacatctcatccctggaatatgctgcaggagacattacccgaaaagggagaaaaaaagacaaagctcgagtgagtgaactgctccaaggcctctcattctctggtgactcagatgtggaaaaagataatgagcctgagatccagcctgctcaaaagaagttaaaggtatcatgtttcccagaaaagagttggaccaaaagagacattaaacccaattttccaagctggtcagcactggattctggacttttgaatctcaagagcgaaaagttgaacccagtagagctttttgaattattttttgatgatgaaacattcaacttaattgtcaatgaaaccaataattatgcttctcagaaaaatgtcagcttggaagtcacagttcaggaaatgaggtgtgtgtttggtgtcttacttttgagtggatttatgaggcatcctagaagggaaatgtattgggaagtctctgacaccgatcagaacctggttagagatgcaatcagaagggacagatttgaattgattttctcaaacctgcactttgcagataatggccacctagatcaaaaagataagtttacaaagttgagacctctcataaaacaaatgaataaaaatttcctcttgtatgctcccctggaagaatactattgctttgataagtcaatgtgtgaatgctttgatagtgaccaattcctgaatggaaagcctattagaattggctataaaatttggtgtggtacaaccacacagggttatctggtttggtttgaaccctatcaagaagaatcaactatgaaggtagatgaggatcctgatcttgggttaggtggaaatctagtgatgaacttcgctgatgttcttttagagagaggtcagtatccctatcacctgtgttttgatagcttctttacaagtgtcaaattgttgtcagccttgaaaaagaagggggtgagggcaacaggaacaattcgtgagaacaggaccgaaaaatgtccccttatgaatgtagaacatatgaaaaaaatgaagagagggtattttgatttccgaatagaagaaaacaatgagataattttgtgtcgttggtatggggatggcattatcagtctgtgctccaatgctgtgggcatagaaccagtcaatgaggtaagctgttgtgatgctgataacgaagaaatccctcagataagtcaaccatccatagtaaaagtgtatgatgaatgcaaggaaggtgtagctaaaatggatcaaattatttcgaaatacagggtgaggataagaagcaagaaatggtactcaattttggtgagctacatgattgatgtagccatgaacaatgcatggcaactacacagagcctgtaacccaggtgcttctctagaccccttggattttcggagatttgttgcacatttctacttggaacacaatgctcatctgtcagattagggtacataaaatggacatagtgcagacattaataagacatagaaaaataataattatacatgctgttgtaccctcccaaagtaaatctgatatatgtaatgaagttattaaataatacttttaaaaatcagacatttatatagagtttcaaagactattgtaacaagtaatgttaaaaattgtctgtgagaatgttgaactgtagtacctttctctatgtcaagttttgtgtcagacatgggaaatcatgtatttgttcaattg

SEQ ID NO: 71269 - DNA, 2430 bp, Artificial Sequence
  derived and/or modified sequence
atgtatgaggccctgcccggccctgccccagaaaatgaagatggcctggtgaaggtgaaggaggaggaccccacctgggagcaggtgtgcaacagccaggagggcagcagccacacccaggagatctgccgcctgcgcttccgccacttctgctaccaggaggcccacggcccccaggaggccctggcccagctgcgggagctgtgccaccagtggctgcggcctgagatgcacaccaaggagcagatcatggagctgctggtgctggagcagttcctgaccatcctgcccaaggagctgcagccctgtgtgaagacctaccccctggagagcggggaggaggccgtgacagtgctggagaacctggagaccggcagcggggacaccggccagcaggcctctgtgtacatccagggccaggacatgcaccccatggtggccgagtaccagggcgtgtccctggagtgccagagcctgcagctgctgcccggcatcaccaccctgaagtgtgagcccccccagaggccccagggcaacccccaggaggtgtctggccctgtgccccacggcagcgcccacctgcaggagaagaacccccgggacaaggctgtggtgcctgtgttcaaccctgtgcgcagccagaccctggtgaagacagaggaggagacagcccaggccgtggccgctgagaagtggagccacctgagcctgaccaggaggaacctgtgtggcaacagcgcccaggagaccgtgatgagcctgagccccatgacagaggagatcgtgaccaaggacaggctcttcaaggccaagcaggagaccagcgaggagatggagcagagcggggaggccagcggcaagcccaacagagaatgtgccccccagatcccctgcagcacccccatcgccacagagaggacagtggcccacctgaacaccctgaaggacagacaccctggggacctgtgggccaggatgcacatcagcagcctggagtatgctgctggggacatcaccaggaaaggaaggaagaaggacaaggcccgggtgtctgagctgctgcagggcctgtccttcagcggggacagtgatgtggagaaggacaatgaacctgagatccagcctgcccagaagaagctgaaggtgtcctgcttccctgagaagtcctggaccaagagggacatcaagcccaacttccccagctggagcgccctggacagcggcctgctgaacctgaagtctgagaagctgaaccctgtggagctgtttgagctgttctttgatgatgagaccttcaacctgattgtgaatgagaccaacaactatgccagccagaagaatgtgtccctggaggtgacagtgcaggagatgagatgtgtgtttggagtgctgctgctgagcggcttcatgaggcacccccggcgggagatgtactgggaggtgtctgacacagaccagaacctggtgagagatgccatccggcgggacagatttgagctgatcttcagcaacctgcactttgctgacaatggccacctggaccagaaggacaagttcaccaagctgcggcccctcatcaagcagatgaacaagaacttcctgctgtatgcccccctggaggagtactactgctttgacaagtccatgtgtgaatgttttgacagcgaccagttcctgaatggcaagcccatccgcatcggctacaagatctggtgtggcaccaccacccagggctacctggtgtggtttgagccctaccaggaggagagcaccatgaaggtggatgaggaccctgacctgggcctgggcggcaacctggtgatgaactttgctgatgtgctgctggagcggggccagtacccctaccacctgtgctttgacagcttcttcacctctgtgaagctgctgagcgccctgaagaagaagggcgtgcgggccaccggcaccatccgggagaacagaacagagaagtgccccctgatgaatgtggagcacatgaagaagatgaagaggggctactttgacttccgcatcgaggagaacaatgagatcatcctgtgccgctggtatggagatggcatcatcagcctgtgcagcaatgctgtgggcatcgagcctgtgaatgaggtgtcctgctgtgatgctgacaatgaggagatcccccagatcagccagcccagcatcgtgaaggtgtatgatgagtgcaaggagggcgtggccaagatggaccagatcatcagcaagtacagagtgcgcatccgcagcaagaagtggtacagcatcctggtgtcctacatgattgatgtggccatgaacaatgcctggcagctgcaccgggcctgcaaccctggggccagcctggaccccctggacttcagaagatttgtggcccacttctacctggagcacaatgcccacctgagtgactag

SEQ ID NO: 71270 - DNA, 2430 bp, Artificial Sequence
  derived and/or modified sequence
atgtacgaggccctgcccggccccgcccccgagaacgaggacggcctggttaaagtgaaggaagaggatccaacctgggagcaggtgtgtaacagccaagagggttcaagtcacacacaggagatatgcaggctacgcttccggcacttttgctatcaggaagcccacgggccccaggaggcccttgctcagctacgggagctctgtcaccagtggctccgccccgagatgcatactaaggagcaaataatggaactgctcgtactggagcagttcctgacgatcctgcccaaggagctccagccctgcgtgaaaacatatccactcgaaagcggtgaggaggccgtcacggtgctggagaacctcgagaccgggtcaggtgacacaggccagcaagcttcagtgtacattcaggggcaggatatgcatcccatggttgctgaatatcagggagtgagtttggagtgccagagcctccagctcctgccaggtatcacaacattgaaatgtgagcctcctcagcgaccgcaggggaacccacaagaggtttctgggccagtgccacatgggagtgcacatttgcaagagaaaaatccccgtgataaggctgtcgtcccagttttcaaccccgtgagaagccagaccctcgtgaagaccgaggaagagaccgcacaagctgtggccgccgagaagtggtcccacttgagcctcaccaggcgaaacttgtgcgggaatagcgcacaggaaacagtgatgtccctctcccctatgacagaagaaattgtcacaaaagacaggctctttaaggccaaacaggagacatccgaggaaatggagcagtcaggagaggcgtcaggaaaacctaaccgggaatgtgccccacagatcccctgcagcaccccaattgctacggagagaactgttgcccaccttaacacattgaaagatcgacaccctggcgacttatgggcccgtatgcatattagttccctggaatacgccgcgggggacattacaagaaaagggagaaagaaggataaggcacgagtgagtgaactgctgcaggggctcagcttctcaggcgattctgacgttgagaaagataacgaacctgagattcaaccggcccagaagaagctcaaggtcagctgtttccctgaaaagtcttggacgaagcgggatattaagcccaatttccccagctggagtgcactggactccggcctgctgaatctgaaaagcgagaaactgaacccggtcgaattgtttgagctctttttcgacgatgaaacctttaacttgatcgtgaatgaaactaataattacgcctctcagaagaacgtgagtctcgaggtcactgtccaggaaatgagatgtgtgttcggagttctgctgctcagcgggttcatgaggcaccctaggagagaaatgtactgggaggtatccgacaccgatcaaaaccttgtgcgagacgcgattagaagggaccgctttgagctgattttcagcaatctccactttgctgataacggccacttagaccaaaaagacaaattcacaaagctgagaccactgatcaaacagatgaacaagaattttttgctgtacgcacctctcgaggaatactattgcttcgacaaatccatgtgcgagtgctttgatagcgaccagttcctcaatgggaagccaatcaggatcggctacaagatctggtgtgggaccacgactcaaggatatctcgtatggttcgaaccctaccaggaagagagtacaatgaaggtggacgaagacccagacctgggtcttggcggaaatttggtgatgaactttgccgacgtcctgcttgagcggggtcagtatccctatcacctatgttttgattcattcttcacgagtgtgaagcttctatctgctcttaaaaaaaaaggtgtccgcgctaccggcacgatccgcgagaaccgtacagagaagtgtcccctgatgaatgtagagcacatgaaaaagatgaaacggggctactttgactttcggatcgaggagaacaacgagatcatcctgtgccgttggtacggtgatggaatcatttccctgtgctcaaacgccgtgggtatcgagccggtcaatgaagtgtcctgctgtgatgcggacaatgaagagataccgcagatttctcagccgtcaatcgtgaaggtttacgacgaatgtaaggagggcgtcgccaagatggaccagattatcagcaagtatcgcgtgagaatcaggtcaaaaaagtggtactcaattctggtgagctatatgattgatgtggctatgaataacgcatggcagctgcaccgagcatgcaacccaggggcttctctcgaccctctcgacttccggcgctttgtggcacatttctatctcgagcacaatgcccatctgtcagactag

SEQ ID NO: 71271 - DNA, 2430 bp, Artificial Sequence
  derived and/or modified sequence
atgtacgaggccctgcccggccccgcccccgagaacgaggacggccttgtgaaggtgaaggaggaggacccaacttgggagcaagtgtgtaactctcaggaagggtcctcccacactcaggagatttgccgcctccggtttcgacacttctgctaccaggaggcacatggaccccaagaagctctcgctcagctccgggagctctgtcatcaatggctcagacccgagatgcacacaaaggaacagatcatggaactgctggtgctcgagcagtttctcacgatcctgcccaaagagctgcagccctgcgtgaaaacataccccctcgagagcggggaggaagccgtgactgtgttagaaaacctggaaactggcagtggggacaccggacagcaggccagcgtctatatccagggccaggacatgcatcccatggtggccgaataccagggcgtctctctcgagtgccaatcacttcagctgcttcctgggatcaccactttgaaatgtgagcccccacagcggccccagggtaaccctcaggaggtgagcggtcccgtcccacatggaagtgcacacttgcaggagaaaaaccccagagacaaagccgtagtgccggtctttaaccccgtacggagtcagaccctggtgaagaccgaagaggaaactgctcaagctgttgcagctgagaaatggtcccatcttagtctcactcgacgcaatctatgtgggaactccgcccaggaaactgtcatgagcttaagtcccatgacggaggagatagtgaccaaagatagattattcaaagcaaagcaggagactagcgaggagatggagcagagtggcgaagcatccgggaagcctaatcgggaatgtgcacctcagattccatgttccactcccattgcgaccgagagaacagtggctcacctcaataccctgaaggataggcaccctggcgacctctgggcaagaatgcacatcagttctctcgaatacgctgcaggggacataaccaggaagggtcgcaagaaggataaggcaagggtgagcgagctcctgcagggcctctcattctccggtgacagtgatgttgagaaagataatgagccagagattcagcccgctcagaaaaaactgaaagtctcctgtttcccggagaaatcctggactaagcgcgatatcaagccaaactttccaagctggtctgctttggactctggattgctgaatctcaaaagcgaaaagctgaacccagtcgagctgtttgagttatttttcgatgacgagacgttcaatttaattgtcaatgagactaacaactatgcctcccaaaaaaacgtttcactcgaagtgacagtgcaggagatgcgctgcgtattcggcgtgctgctgctctccggcttcatgaggcaccctcgaagggaaatgtactgggaagtctctgacactgatcagaatcttgttagagatgcgattcggagagaccgatttgagctgatcttttccaatctgcactttgccgataacgggcacctcgatcaaaaggataagttcacaaagctgaggccactcatcaagcagatgaacaagaattttctgctctacgcacccctggaggagtattattgttttgataagtccatgtgtgaatgtttcgactcagatcagttcttgaatggtaagccaattaggataggatacaagatctggtgtgggactacaacccagggatatctagtatggtttgaaccgtaccaggaggagtcaacaatgaaagtggacgaagatcctgatcttggccttggcggtaacctcgttatgaacttcgccgatgtccttctggagcgcgggcagtacccgtaccacctctgtttcgattcattttttacaagcgtaaaattgctgtctgctctgaaaaaaaaaggcgtccgggccaccgggactatccgtgagaataggaccgagaagtgtccactcatgaatgttgaacatatgaaaaagatgaaaagagggtacttcgactttagaatcgaggagaataacgagatcatcctctgccgatggtacggagatggaattataagtctgtgcagcaatgcggttggtattgagcccgtgaatgaggtctcttgttgtgacgccgacaacgaagagatcccccagatttcccagcctagcatcgtgaaggtatatgatgaatgtaaggagggagtggcaaaaatggaccagataatctccaagtacagggtgcgaattcggagcaaaaagtggtacagtatcctggtgagctacatgatcgatgttgctatgaacaatgcttggcagctgcacagggcttgtaaccccggagcttccctggacccacttgattttcgtaggtttgtggcgcatttctatctggagcacaatgcacacctgtctgattag

SEQ ID NO: 71272 - DNA, 2430 bp, Artificial Sequence
  derived and/or modified sequence
atgtacgaggccttgcccggacctgcaccagaaaacgaagacggtctcgtcaaagtcaaggaggaagacccaacctgggagcaggtgtgtaacagccaagaaggaagttcccacacccaagagatatgtcgtttgcgcttcaggcacttttgttatcaagaagcacacgggccacaggaggctctggcccagctgagggaactatgtcatcagtggcttcgaccggagatgcataccaaagagcagattatggagctgctggttctagagcaatttttaaccatattgcctaaggagctgcagccgtgcgtcaagacttatcctctggagagcggtgaggaggccgtcacggttttagaaaaccttgagacagggtcaggcgacacggggcagcaggcttccgtgtatatccaaggccaggatatgcatcctatggtggcggagtatcagggcgtctccttggagtgtcagtctctgcagctgctgccgggtatcacgactctaaaatgtgaaccgccacagcggcctcaggggaaccctcaggaagtcagcggacccgtaccacacggtagcgcccacctccaggagaaaaaccccagagacaaagctgtggtgcccgtcttcaaccctgttcggtcacagacgttggtgaaaaccgaagaagagaccgcacaggccgttgccgcagagaagtggagccatttgtctctgacccgacgcaacctatgcgggaactctgcccaggagaccgtgatgtccctgtcccccatgaccgaagaaatcgtgactaaagacagactctttaaagctaaacaggagacctccgaggagatggaacagtccggtgaggcttccggtaaacctaaccgggagtgtgccccacagatcccctgcagtacccctatcgccacggagcgaactgtggcacacctcaacacactgaaggaccgccaccctggcgacctctgggcccgaatgcatatttcaagccttgagtatgccgcaggcgatatcacccgaaagggacgcaaaaaagataaggccagggtgtcagagctgctgcagggtctctctttcagtggtgactctgatgtggaaaaggataatgagcctgagatccagcccgctcagaaaaagctgaaggtgtcatgttttccagaaaagagctggacaaaaagagatatcaaaccgaatttcccctcatggagcgctctcgactcaggcttgctgaatttgaaatcagaaaagctgaaccctgtcgagctgtttgaattatttttcgatgatgagaccttcaacctgattgttaatgaaacgaacaactacgcaagccagaaaaatgtctcactggaggtgacagtgcaggaaatgagatgtgtctttggcgttctactgctgagtggctttatgcgacacccccgtcgggagatgtactgggaagtgagcgatactgatcagaatctggtgcgagatgcgatccggcgtgatcggtttgagctcatcttctctaacctgcacttcgcagataatggacacctggaccaaaaagataagttcacaaaactgcgtccactgattaaacagatgaacaagaatttcttgttatatgcacccctagaggaatattactgtttcgacaagtcaatgtgcgagtgcttcgacagtgaccagttcctgaatggtaagcctattagaataggctacaaaatttggtgcggcaccaccacacagggatatttggtgtggttcgagccttaccaggaggagagcacaatgaaggtggatgaagatcccgacctggggctggggggaaatcttgtcatgaactttgctgacgtcctgcttgagagaggacagtacccttatcacctgtgcttcgatagttttttcacatcggtgaaactactctccgcattaaaaaaaaagggtgtgagagctacgggaaccatacgtgaaaacaggactgagaagtgtcccttgatgaacgtggaacacatgaaaaaaatgaaaaggggctatttcgattttaggatcgaggaaaacaatgagattatcttgtgtcgatggtatggcgatggtatcatttcactctgcagcaatgcggtgggcatcgagcctgtgaacgaggttagttgctgtgacgccgataatgaggagatcccccagatatctcagccaagcattgttaaggtgtacgatgagtgcaaagagggagtggcaaaaatggatcaaatcatcagtaaatatagagtacggatcagatcgaaaaagtggtactcaatcttggtatcctacatgatcgacgtggcaatgaacaatgcctggcagctgcaccgggcatgtaaccccggagccagcctggaccccctggattttcggaggtttgtggcccacttttatctggaacataacgcgcacctcagcgattag

SEQ ID NO: 71273 - DNA, 2430 bp, Artificial Sequence
  derived and/or modified sequence
atgtacgaagccctgccaggtcccgcaccagagaacgaagatggcctggtcaaggtaaaagaggaggatcctacctgggagcaggtgtgtaactcacaagagggcagctcccacacccaagagatctgtcgcctgagattccgacacttttgttatcaggaggcccacgggccacaggaggccctcgcccaactccgggaactctgccatcagtggctgaggcctgagatgcatacgaaggagcaaattatggagctgcttgtgctggaacagtttttgactatattgcccaaagagctccaaccttgtgtaaagacatatccattagaatccggggaagaggcggtaacggtgttggagaacctggaaaccggttccggtgacacaggccagcaagcaagtgtgtatattcagggccaggacatgcacccaatggtggcagagtaccagggggtcagcttagaatgccagagcttgcaattattgccaggtatcaccacactgaagtgcgagccccctcagcgtcctcagggtaatcctcaggaggtgtccggtcctgttccccatggctcagctcacctacaggagaagaatccgagagataaagctgtcgttcccgtatttaacccggtgagaagtcagactcttgtgaaaacagaagaggaaaccgcccaagccgtggctgctgaaaagtggtctcaccttagtctgacaagacggaacctgtgtggtaacagcgctcaggagaccgtaatgagtctttctcctatgacagaagaaattgtaacaaaggaccgccttttcaaagctaaacaggaaacatctgaagaaatggagcagtctggcgaggcttccggcaagcctaatagagaatgcgcaccacagatcccctgctcaacaccaatcgctaccgagcggactgtggctcatctaaacacgcttaaggatcgacatcctggagacctgtgggctcgcatgcacatctcatcactcgagtatgccgcaggagacataacccgcaaaggaaggaagaaagacaaagctagagtttctgagctgcttcagggtttatcgttttctggggattcagacgttgaaaaagacaacgagccggaaattcagccggctcagaaaaagctgaaagtgagctgctttcctgagaaatcctggaccaaacgcgacattaagcccaatttccccagctggagcgccctagacagcggactcctaaatctaaaaagcgagaagctgaacccagtcgaactgtttgagctgttctttgatgacgaaacattcaacttgattgtcaacgaaaccaacaattacgcctcccaaaaaaatgtcagcctggaagtaactgtccaggagatgaggtgcgtattcggggtgctgttactttctggctttatgcggcatccacgcagggaaatgtattgggaagtgtccgataccgatcagaacctcgttcgggatgcaatccgacgggaccggttcgagctgatcttttccaacctgcattttgcagataatggtcatctggatcaaaaggataaattcaccaagctgagaccactgatcaaacaaatgaacaagaatttcctactgtatgccccattggaagagtattactgctttgacaagtctatgtgtgaatgtttcgattctgatcagtttctaaatggtaagccaatccgcattggctataagatctggtgcggtacgactacccaaggatacctcgtgtggttcgaaccgtatcaggaggaatcaaccatgaaggtcgatgaggatcctgatttagggttggggggaaacttagtgatgaacttcgctgatgtcctgttggagcggggacagtatccgtaccatctgtgctttgattctttctttacatctgtgaagctactgtctgccctgaaaaaaaagggggtccgcgcaaccggcaccatccgtgagaaccgcaccgagaaatgccccctcatgaatgttgaacatatgaagaaaatgaaacggggttatttcgatttccgcatcgaagagaacaatgaaatcattctctgtcgttggtacggtgacggcattatttcattgtgtagtaatgcagtggggattgagcccgtgaacgaggtaagttgctgcgacgcagacaatgaagagatcccgcaaatcagtcaaccgagtattgtgaaagtttatgatgaatgtaaggaaggagtggccaagatggaccagattattagcaaatatcgcgttcgcatcaggagcaaaaaatggtacagcattctcgtctcctatatgattgacgtagctatgaataacgcatggcaactgcaccgcgcttgtaatccaggtgccagcctggatcctcttgacttccgtcgcttcgtggcacacttctatctcgagcacaacgctcaccttagcgattag

SEQ ID NO: 71274 - DNA, 2430 bp, Artificial Sequence
  derived and/or modified sequence
atgtacgaggccctgcccggccccgcccccgagaacgaggacggcctggtgaaggtgaaggaggaggaccccacctgggagcaggtgtgcaacagccaggagggcagcagccacacccaggagatctgcagactgagattcagacacttctgctaccaggaggcccacggcccccaggaggccctggcccagctgagagagctgtgccaccagtggctgagacccgagatgcacaccaaggagcagatcatggagctgctggtgctggagcagttcctgaccatcctgcccaaggagctgcagccctgcgtgaagacctaccccctggagagcggcgaggaggccgtgaccgtgctggagaacctggagaccggcagcggcgacaccggccagcaggccagcgtgtacatccagggccaggacatgcaccccatggtggccgagtaccagggcgtgagcctggagtgccagagcctgcagctgctgcccggcatcaccaccctgaagtgcgagcccccccagagaccccagggcaacccccaggaggtgagcggccccgtgccccacggcagcgcccacctgcaggagaagaaccccagagacaaggccgtggtgcccgtgttcaaccccgtgagaagccagaccctggtgaagaccgaggaggagaccgcccaggccgtggccgccgagaagtggagccacctgagcctgaccagaagaaacctgtgcggcaacagcgcccaggagaccgtgatgagcctgagccccatgaccgaggagatcgtgaccaaggacagactgttcaaggccaagcaggagaccagcgaggagatggagcagagcggcgaggccagcggcaagcccaacagagagtgcgccccccagatcccctgcagcacccccatcgccaccgagagaaccgtggcccacctgaacaccctgaaggacagacaccccggcgacctgtgggccagaatgcacatcagcagcctggagtacgccgccggcgacatcaccagaaagggcagaaagaaggacaaggccagagtgagcgagctgctgcagggcctgagcttcagcggcgacagcgacgtggagaaggacaacgagcccgagatccagcccgcccagaagaagctgaaggtgagctgcttccccgagaagagctggaccaagagagacatcaagcccaacttccccagctggagcgccctggacagcggcctgctgaacctgaagagcgagaagctgaaccccgtggagctgttcgagctgttcttcgacgacgagaccttcaacctgatcgtgaacgagaccaacaactacgccagccagaagaacgtgagcctggaggtgaccgtgcaggagatgagatgcgtgttcggcgtgctgctgctgagcggcttcatgagacaccccagaagagagatgtactgggaggtgagcgacaccgaccagaacctggtgagagacgccatcagaagagacagattcgagctgatcttcagcaacctgcacttcgccgacaacggccacctggaccagaaggacaagttcaccaagctgagacccctgatcaagcagatgaacaagaacttcctgctgtacgcccccctggaggagtactactgcttcgacaagagcatgtgcgagtgcttcgacagcgaccagttcctgaacggcaagcccatcagaatcggctacaagatctggtgcggcaccaccacccagggctacctggtgtggttcgagccctaccaggaggagagcaccatgaaggtggacgaggaccccgacctgggcctgggcggcaacctggtgatgaacttcgccgacgtgctgctggagagaggccagtacccctaccacctgtgcttcgacagcttcttcaccagcgtgaagctgctgagcgccctgaagaagaagggcgtgagagccaccggcaccatcagagagaacagaaccgagaagtgccccctgatgaacgtggagcacatgaagaagatgaagagaggctacttcgacttcagaatcgaggagaacaacgagatcatcctgtgcagatggtacggcgacggcatcatcagcctgtgcagcaacgccgtgggcatcgagcccgtgaacgaggtgagctgctgcgacgccgacaacgaggagatcccccagatcagccagcccagcatcgtgaaggtgtacgacgagtgcaaggagggcgtggccaagatggaccagatcatcagcaagtacagagtgagaatcagaagcaagaagtggtacagcatcctggtgagctacatgatcgacgtggccatgaacaacgcctggcagctgcacagagcctgcaaccccggcgccagcctggaccccctggacttcagaagattcgtggcccacttctacctggagcacaacgcccacctgagcgactag

SEQ ID NO: 71275 - protein, 132 aa, Artificial Sequence
  derived and/or modified sequence
MSQGDSNPAAIPHAAEDIQGDDRWMSQHNRFVLDCKDKEPDVLFVGDSMVQLMQQYEIWRELFSPLHALNFGIGGDTTRHVLWRLKNGELENIKPKVIVVWVGTNNHENTAEEVAGGIEAIVQLINTRQPQA

SEQ ID NO: 71276 - protein, 202 aa, Artificial Sequence
  derived and/or modified sequence
MSQGDSNPAAIPHAAEDIQGDDRWMSQHNRFVLDCKDKEPDVLFVGDSMVQLMQQYEIWRELFSPLHALNFGIGGDTTRHVLWRLKNGELENIKPKVIVVWVGTNNHENTAEEVAGGIEAIVQLINTRQPQAKIIVLGKAAASKYSISEIVRLEQGSVNWSIGTYPDDTPATTRPAILQLFTGKMSRITMKEKSRWTEEILH

SEQ ID NO: 71277 - DNA, 609 bp, Artificial Sequence
  derived and/or modified sequence
atgtcacagggtgactcaaaccctgccgccattcctcacgccgcagaagacatacaaggagatgaccggtggatgagtcagcacaacagattcgtcctggattgtaaagacaaagagccagatgtcttattcgtaggggactccatggtgcagctgatgcaacagtacgagatctggcgcgagttattctcacctcttcacgctctgaattttggcatcggtggggacacgacgcggcacgttctgtggaggcttaaaaatggagagttggaaaacatcaagcctaaagtaatcgtggtttgggttggcaccaacaaccatgagaatacggccgaagaagtggctgggggcattgaggcaatagtgcagttaatcaacacaaggcagcctcaggcaaaaataatcgtgctcggcaaggccgcagccagtaagtattccatttccgaaatcgtgagactcgaacaaggctccgtgaactggagcatcggcacttacccagatgatacccccgcaactacccggcccgccatcctgcagctgtttactggcaagatgtcccgcataacaatgaaagaaaaaagcaggtggactgaggagattcttcactag

SEQ ID NO: 71278 - DNA, 609 bp, Artificial Sequence
  derived and/or modified sequence
atgagccagggcgacagcaacccagctgccatcccccacgccgctgaggacatccagggagatgaccgctggatgagccagcacaacagatttgtgctggactgcaaggacaaggagccagatgtgctgtttgtgggggacagcatggtgcagctgatgcagcagtatgagatctggagggagctgttcagccccctgcacgccctgaactttggaattggaggagacaccaccaggcatgtgctgtggaggctgaagaatggagagctggagaacatcaagcccaaggtgattgtggtgtgggtgggcaccaacaaccacgagaacacagctgaggaggtggccggcggcatcgaggccatcgtgcagctgatcaacacccggcagccccaggccaagatcatcgtgctgggcaaggctgctgccagcaagtacagcatcagcgagatcgtgcggctggagcagggctctgtgaactggagcatcggcacctacccagatgacaccccagccaccaccaggcctgccatcctgcagctgttcaccgggaagatgagccgcatcaccatgaaggagaagagccgctggacagaggagatcctgcactag

SEQ ID NO: 71279 - DNA, 609 bp, Artificial Sequence
  derived and/or modified sequence
atgagccagggcgacagcaaccccgccgccatcccccacgccgccgaagatatccagggtgacgatagatggatgtcacagcacaataggttcgtgttggattgtaaagataaggagcccgacgttctatttgtcggagactcaatggtgcagctcatgcagcaatacgagatctggagggagttgtttagcccacttcatgcactgaatttcggaatagggggcgacaccactagacatgtgctgtggcgcctaaagaacggcgagcttgagaatatcaaaccgaaagtgatcgtggtgtgggtgggtacaaacaaccacgagaacactgcagaagaggtggccggcgggatcgaggcaatcgtgcaactaataaatacgcgccaaccgcaggctaaaatcatcgtgctcgggaaggccgctgctagtaaatatagtatctctgaaattgtgcggttagagcagggatcagtcaactggtctatcggcacctaccccgacgacacaccagctactacccgaccggcaattttacaactgttcaccggcaaaatgagtagaattaccatgaaggagaaatcacgatggaccgaagaaattttgcactag

SEQ ID NO: 71280 - DNA, 850 bp, Artificial Sequence
  derived and/or modified sequence
gggaccgagcgagcgaccgacgcgccacccgccgacgcctcagccgcttggggcccgcacggaccctctacttcagtgtagaatgagccaaggagactcaaacccagcagctattccgcatgcagcagaagatattcaaggagatgaccgatggatgtctcagcacaacagatttgttttggactgtaaagacaaagagcctgatgtactgttcgtgggagactccatggtgcagttaatgcagcaatatgagatatggcgagagcttttttccccacttcatgcactgaattttggaattgggggagatacaacaagacatgttttgtggagactaaagaatggagaactggagaatattaagcctaaggtcattgttgtctgggtaggaacaaataaccacgaaaatacagcagaagaagtagcaggtgggatcgaggccattgtacaacttatcaacacaaggcagccacaggccaaaatcattgtattgggtaaagcagccgcctccaaatactctatctcagagatagtgagactagaacaagggtcggttaactggtcgatcgggacctatcctgatgacacaccagcaactaccaggccagcaatattacaattatttactggcaagatgagcaggattaccatgaaagaaaagtccagatggactgaggaaatcctacactgattctccaaacttggcagctgactgcatggagggctcatgatgaagaaacctcttttgccatcctgaggattctctgattcatattcgcctagatgtgctggaaacagtactggaccaaggtgcaaacttgagtctagtgaggtactaatgggctgaagt

SEQ ID NO: 71281 - DNA, 609 bp, Artificial Sequence
  derived and/or modified sequence
atgtcacaaggggacagcaacccagccgcaattccacacgccgcagaggacattcagggagacgatagatggatgtcacagcacaacaggtttgtgttggactgtaaagataaagagcccgacgtcctctttgtcggcgattccatggtccagctgatgcagcagtatgagatatggcgtgaactgttttcccccctccacgcgctaaacttcggaatcggcggagacactacgcgccatgttctctggcggctaaagaatggtgagctggagaatatcaagcccaaggtgatcgtggtgtgggtaggcacaaataaccacgagaatacggctgaggaagtggcagggggtatcgaggcaattgttcaactgatcaacacccgccagccccaggcgaagatcatcgtgttgggcaaagcagccgctagcaaatactctatatccgagatcgtcagacttgaacaaggaagtgtcaactggagtattgggacctatcccgatgatacaccggcaacaacacgtcccgcaatcctccagctcttcacgggaaagatgtctcggataaccatgaaggaaaagagcagatggactgaagaaatcctgcactag

SEQ ID NO: 71282 - DNA, 609 bp, Artificial Sequence
  derived and/or modified sequence
atgagccagggcgacagcaaccccgccgccatcccccacgccgccgaggacatccagggcgacgacagatggatgagccagcacaacagattcgtgctggactgcaaggacaaggagcccgacgtgctgttcgtgggcgacagcatggtgcagctgatgcagcagtacgagatctggagagagctgttcagccccctgcacgccctgaacttcggcatcggcggcgacaccaccagacacgtgctgtggagactgaagaacggcgagctggagaacatcaagcccaaggtgatcgtggtgtgggtgggcaccaacaaccacgagaacaccgccgaggaggtggccggcggcatcgaggccatcgtgcagctgatcaacaccagacagccccaggccaagatcatcgtgctgggcaaggccgccgccagcaagtacagcatcagcgagatcgtgagactggagcagggcagcgtgaactggagcatcggcacctaccccgacgacacccccgccaccaccagacccgccatcctgcagctgttcaccggcaagatgagcagaatcaccatgaaggagaagagcagatggaccgaggagatcctgcactag

SEQ ID NO: 71283 - protein, 155 aa, Artificial Sequence
  derived and/or modified sequence
MSQGDSNPAAIPHAAEDIQGDDRWMSQHNRFVLDCKDKEPDVLFVGDSMVQLMQQYEIWRELFSPLHALNFGIGGDTTRHVLWRLKNGELENIKPKVIVVWVGTNNHENTAEEVAGGIEAIVQLINTRQPQAKIIVLIIYWQDEQDYHERKVQMD

SEQ ID NO: 71284 - DNA, 468 bp, Artificial Sequence
  derived and/or modified sequence
atgtcacaaggtgatagcaaccctgccgctattccacatgcggccgaagacattcaaggagacgatcggtggatgagtcagcacaatagatttgtcctagactgcaaggataaagagcctgatgtcctcttcgttggcgactctatggtgcaacttatgcagcagtacgagatatggcgtgagctcttcagccccctccatgccctgaacttcggtatcggaggcgacaccacccgccacgtactttggcggctgaagaatggggaactggaaaatatcaaacctaaggttattgttgtgtgggtcggtactaacaaccacgagaatacagccgaagaggtggcgggtggcattgaggccattgttcaactgataaacacacgccagccacaggctaaaatcatcgtcctgattatctactggcaggacgagcaggactaccacgagcgcaaagtgcaaatggattag

SEQ ID NO: 71285 - DNA, 468 bp, Artificial Sequence
  derived and/or modified sequence
atgagccagggcgacagcaacccagctgccatcccccacgccgctgaggacatccagggagatgaccgctggatgagccagcacaacagatttgtgctggactgcaaggacaaggagccagatgtgctgtttgtgggggacagcatggtgcagctgatgcagcagtatgagatctggagggagctgttcagccccctgcacgccctgaactttggaattggaggagacaccaccaggcatgtgctgtggaggctgaagaatggagagctggagaacatcaagcccaaggtgattgtggtgtgggtgggcaccaacaaccacgagaacacagctgaggaggtggccggcggcatcgaggccatcgtgcagctgatcaacacccggcagccccaggccaagatcatcgtgctgatcatctactggcaggatgagcaggactaccacgagaggaaggtgcagatggactag

SEQ ID NO: 71286 - DNA, 468 bp, Artificial Sequence
  derived and/or modified sequence
atgagccagggcgacagcaaccccgccgccatcccccacgccgccgaggacatccaaggtgacgatcggtggatgtctcaacacaatcgcttcgtcctggactgcaaagacaaggagcctgatgtcctgtttgttggcgacagtatggtgcagctgatgcagcagtatgagatctggagagagctgttttcacccctgcatgctctgaatttcggcataggcggcgacactaccaggcatgtactatggagacttaagaacggagagctcgagaacatcaagcctaaggtgatcgtagtatgggtggggacaaacaaccacgagaacaccgccgaggaggtagctggtgggatcgaagctatcgtgcagctgattaacactaggcagccccaggctaaaattatcgtgttaatcatctattggcaggatgaacaggattatcacgagagaaaggttcaaatggactag

SEQ ID NO: 71287 - DNA, 1056 bp, Artificial Sequence
  derived and/or modified sequence
tgctggtgctggggccggaggagggacgcgccggagcgggaccgacgggaccgagcgagcgaccgacgcgccacccgccgacgcctcagccgcttggggcccgcacggaccctctacttcagtgtagaatgagccaaggagactcaaacccagcagctattccgcatgcagcagaagatattcaaggagatgaccgatggatgtctcagcacaacagatttgttttggactgtaaagacaaagagcctgatgtactgttcgtgggagactccatggtgcagttaatgcagcaatatgagatatggcgagagcttttttccccacttcatgcactgaattttggaattgggggagatacaacaagacatgttttgtggagactaaagaatggagaactggagaatattaagcctaaggtcattgttgtctgggtaggaacaaataaccacgaaaatacagcagaagaagtagcaggtgggatcgaggccattgtacaacttatcaacacaaggcagccacaggccaaaatcattgtattgattatttactggcaagatgagcaggattaccatgaaagaaaagtccagatggactgaggaaatcctacactgattctccaaacttggcagctgactgcatggagggctcatgatgaagaaacctcttttgccatcctgaggattctctgattcatattcgcctagatgtgctggaaacagtactggaccaaggtgcaaacttgagtctagtgaggtactaatgggctgaagtttttctgagcgtcactttcctcatctgtataatgaggggttggccaaggaaacccataaggttatcttccagctgactttctaattggtgaaccctttggaaaaggggtgcagcttgcttctggtcttcatcctcaagtatgctgtgcttggacaggggccaaaactaattcctccactcaccatttgcccagcataactacaacagtacctggcacatcgtggatgcttattaaatatttattgcaggaatgagtaaatataactaactgatcataaggtaaaa

SEQ ID NO: 71288 - DNA, 468 bp, Artificial Sequence
  derived and/or modified sequence
atgtctcagggggactctaatcccgctgcgattccccacgcagccgaagatatacagggtgatgatcggtggatgagtcagcataaccgctttgtgttagattgtaaggacaaggaacccgacgtgctgtttgttggagactcgatggtacagctcatgcagcagtacgaaatatggcgtgaattattttctccattgcatgccctaaacttcggcatcggtggagatacaacccgccacgtgctgtggaggctgaagaatggcgagcttgagaatattaagccaaaagtaatcgtggtctgggttggcacgaataatcacgaaaacacagcggaggaggtcgcaggtggaatcgaagcgatagtgcagctgattaacaccagacagcctcaggcaaagatcatcgtactgattatttattggcaagacgagcaggactatcacgaaagaaaggtgcagatggattag

SEQ ID NO: 71289 - DNA, 468 bp, Artificial Sequence
  derived and/or modified sequence
atgagccagggcgacagcaaccccgccgccatcccccacgccgccgaggacatccagggcgacgacagatggatgagccagcacaacagattcgtgctggactgcaaggacaaggagcccgacgtgctgttcgtgggcgacagcatggtgcagctgatgcagcagtacgagatctggagagagctgttcagccccctgcacgccctgaacttcggcatcggcggcgacaccaccagacacgtgctgtggagactgaagaacggcgagctggagaacatcaagcccaaggtgatcgtggtgtgggtgggcaccaacaaccacgagaacaccgccgaggaggtggccggcggcatcgaggccatcgtgcagctgatcaacaccagacagccccaggccaagatcatcgtgctgatcatctactggcaggacgagcaggactaccacgagagaaaggtgcagatggactag

SEQ ID NO: 71290 - DNA, 399 bp, Artificial Sequence
  derived and/or modified sequence
atgagccagggagacagcaaccccgccgcaatcccccatgccgctgaggatatccagggtgacgacaggtggatgtctcagcataaccgattcgtgctggactgtaaagacaaggaacccgacgtgttgtttgtgggggatagcatggtccagctgatgcaacagtacgagatctggcgagaattgttttcaccgctccacgctctaaatttcgggataggcggcgatacaacccggcatgttctgtggagactgaaaaatggtgagttggaaaatatcaagcctaaagtgatcgtagtgtgggtgggaactaacaaccatgaaaacactgctgaagaggtggctggcggcatagaagcaatcgtccagctgattaacacccgacagccgcaggcgtag

SEQ ID NO: 71291 - DNA, 399 bp, Artificial Sequence
  derived and/or modified sequence
atgagccagggcgacagcaacccagctgccatcccccacgccgctgaggacatccagggagatgaccgctggatgagccagcacaacagatttgtgctggactgcaaggacaaggagccagatgtgctgtttgtgggggacagcatggtgcagctgatgcagcagtatgagatctggagggagctgttcagccccctgcacgccctgaactttggaattggaggagacaccaccaggcatgtgctgtggaggctgaagaatggagagctggagaacatcaagcccaaggtgattgtggtgtgggtgggcaccaacaaccacgagaacacagctgaggaggtggccggcggcatcgaggccatcgtgcagctgatcaacacccggcagccccaggcctag

SEQ ID NO: 71292 - DNA, 399 bp, Artificial Sequence
  derived and/or modified sequence
atgagccagggcgacagcaaccccgccgccatcccccacgccgccgaggatatccagggggatgacaggtggatgtcacagcacaatagattcgtcctggattgtaaggataaggaacctgatgttctgttcgtgggggactcgatggtgcagctgatgcaacagtacgagatttggcgcgaactgttcagtccactgcatgctcttaactttgggataggtggagacactactcggcacgtattatggaggctgaaaaacggagaactggaaaacatcaagcccaaggtgattgtcgtttgggtggggacgaacaaccacgaaaacactgcagaagaagtagccggggggatcgaggctatcgtgcaattaattaacactcgccagccgcaggcttag

SEQ ID NO: 71293 - DNA, 2517 bp, Artificial Sequence
  derived and/or modified sequence
agtggaggagctgctgctggtgctggggccggaggagggacgcgccggagcgggaccgacgggaccgagcgagcgaccgacgcgccacccgccgacgcctcagccgcttggggcccgcacggaccctctacttcagtgtagaatgagccaaggagactcaaacccagcagctattccgcatgcagcagaagatattcaaggagatgaccgatggatgtctcagcacaacagatttgttttggactgtaaagacaaagagcctgatgtactgttcgtgggagactccatggtgcagttaatgcagcaatatgagatatggcgagagcttttttccccacttcatgcactgaattttggaattgggggagatacaacaagacatgttttgtggagactaaagaatggagaactggagaatattaagcctaaggtcattgttgtctgggtaggaacaaataaccacgaaaatacagcagaagaagtagcaggtgggatcgaggccattgtacaacttatcaacacaaggcagccacaggcgtgagtcaccgcaccaggccatcttcaggtcattttaacaatacccctgagccacctgaagcttcctccctgtcctctcaccccaaacttcataaatcccctgtgacttaaaatggagctggactcatgggtccagcaagctcctcagctgtgtgttgaatggtcccatttctttggtccattcaacactcaggctcaggaagggtggtccacagggaaatataagtcaaataagccttatggccccaccctgaccgcttgagggccacggttagggttgagctctttgtatattatgccagggaatgcggtagctggacctgtgcacaaggccaggatcacatccctgaggccccgacatctcccctgtgtgctcacaagtctggctttgagacacaccactgcctttttttgctgactgctgcagccaacaaaaaggcattctctcccagtggacagacctcagaaaggacctattcataagtgcggggtagggcagagggactgaggaaagttctgcagacctgggaacagcaagaaaatgtgcagttgctgccctcccactctgtagacgcagggtcctgacgattcaaaagttaagtcttgagaccttgcaaaagggaaggatcccttcagagtttgcttggatggatttctctccagatattgccagcggaaagggagcaaacagaaatagtgatagtccacagttgtttggttccagagcagtggttctcaaacttcattgtgcatagcaagcttctggagtgccccgttaaattgcagttttctgggctccacctcccaagatgaattaagtgtgaagtaggactctggatgtgcgtttaaaacaggcgtagggtcacatcttgccccaaagttatgaggccaacttagagtagtggtgcttgcctgtaatccagctactcgagaggctgtggcagatcgcttgaagccaggagttcaagaccagcctgggcaatgtatcacgagtgtttcttaatgtttcagattatttactggcaagatgagcaggattaccatgaaagaaaagtccagatggactgaggaaatcctacactgattctccaaacttggcagctgactgcatggagggctcatgatgaagaaacctcttttgccatcctgaggattctctgattcatattcgcctagatgtgctggaaacagtactggaccaaggtgcaaacttgagtctagtgaggtactaatgggctgaagtttttctgagcgtcactttcctcatctgtataatgaggggttggccaaggaaacccataaggttatcttccagctgactttctaattggtgaaccctttggaaaaggggtgcagcttgcttctggtcttcatcctcaagtatgctgtgcttggacaggggccaaaactaattcctccactcaccatttgcccagcataactacaacagtacctggcacatcgtggatgcttattaaatatttattgcaggaatgagtaaatataactaactgatcataaggtaaaatagtcttcattggaacaaggctccagatagttgggcagggctgggagctgagactgctgcaatcctgccagctgagagaactctgacaaggcactgatctgggtggctttattaggatgtctgacagcttcagaggtggccacatttcttttcctttaaacatgtctaatttggccgggcgcagtggctcacgcctgtaatcccaacactttgggaagcctaggtgggtggatcactcgaggtcaggagttcgagatcagcctgaccaatatggtgaaaccccgctttactaaaaatacaagaaattagcagggtgtggtggcgggtgcctgtagtcccagctacttgggaggctgaggcaggagcatcgcctgaactcaggaggcggagattgcagtgagctgagatcacaccactgtactccagcatgggtgacagtgagactccatctc

SEQ ID NO: 71294 - DNA, 399 bp, Artificial Sequence
  derived and/or modified sequence
atgtcccagggcgatagcaacccagccgcaattcctcacgccgctgaggatattcaaggcgatgatcggtggatgtctcagcataacagattcgtattggattgcaaggacaaagaaccagacgttctgtttgtgggagattcaatggtgcagctgatgcagcagtacgagatctggagggaacttttcagtcctctacacgctttgaattttggaattggcggagacacaacccgtcatgttctctggcgcctcaaaaacggcgagctggaaaacatcaaaccaaaggtgatcgtcgtttgggtaggcacaaataatcacgagaataccgctgaggaagtggccggtgggatcgaggccatcgtccagctcattaacacacggcagcctcaagcttag

SEQ ID NO: 71295 - DNA, 399 bp, Artificial Sequence
  derived and/or modified sequence
atgagccagggcgacagcaaccccgccgccatcccccacgccgccgaggacatccagggcgacgacagatggatgagccagcacaacagattcgtgctggactgcaaggacaaggagcccgacgtgctgttcgtgggcgacagcatggtgcagctgatgcagcagtacgagatctggagagagctgttcagccccctgcacgccctgaacttcggcatcggcggcgacaccaccagacacgtgctgtggagactgaagaacggcgagctggagaacatcaagcccaaggtgatcgtggtgtgggtgggcaccaacaaccacgagaacaccgccgaggaggtggccggcggcatcgaggccatcgtgcagctgatcaacaccagacagccccaggcctag

SEQ ID NO: 71296 - protein, 230 aa, Artificial Sequence
  derived and/or modified sequence
MAELDPFGAPAGAPGGPALGNGVAGAGEEDPAAAFLAQQESEIAGIENDEAFAILDGGAPGPQPHGEPPGGPDAVDGVMNGEYYQESNGPTDSYAAISQVDRLQSEPESIRKWREEQMERLEALDANSRKQEAEWKEKAIKELEEWYARQDEQLQKTKANNSTNINHPCYSLEQAAEEAFVNDIDESSPGTEWERVARLCDFNPKSSKQAKDVSRMRSVLISLKQAPLVH

SEQ ID NO: 71297 - DNA, 693 bp, Artificial Sequence
  derived and/or modified sequence
atggcggagctcgatcctttcggagccccggccggtgcacccgggggcccggcactcggtaacggggtagccggggccggagaagaggatcctgcggccgcattcctggcccaacaggaatctgaaattgccggcatcgagaatgacgaggcatttgcaatcctcgacggcggcgcccctggccctcagccacacggcgagcccccaggcggtcctgacgccgttgacggggtgatgaacggggagtactatcaagagtccaacggaccaacagacagctacgcggcaatttcgcaggtagatcgtttgcagtccgagcccgagtctattcgtaaatggcgggaagagcagatggaaaggctcgaggctcttgatgccaacagtcgcaagcaggaagccgaatggaaggaaaaagctataaaggagctcgaggaatggtacgcacgacaggacgagcagctgcaaaagacaaaggccaataacagcactaacatcaaccacccctgctactcgctggagcaagccgctgaggaagcctttgtaaatgacatcgatgagtctagtccagggaccgagtgggaacgagtggcccgcctgtgcgacttcaacccgaagtcatcaaagcaggccaaggatgttagcagaatgagaagcgtgttgatcagtctgaaacaggctccacttgtacattag

SEQ ID NO: 71298 - DNA, 693 bp, Artificial Sequence
  derived and/or modified sequence
atggcagaattagatccctttggtgccccagctggcgcacctggaggccccgccttaggcaacggtgtagcaggcgctggcgaagaggaccccgctgcagcttttctggcacagcaagagagtgaaattgcaggaattgagaacgacgaggctttcgctatactcgatggtggagctcccggccctcagcctcacggcgagccccctggcgggcccgacgctgtcgatggcgtgatgaatggggagtattatcaggaatcaaatggtccaaccgactcttacgctgcaataagccaggtggatcgcctccagtccgaaccagaaagtatcagaaagtggcgggaggaacagatggagagactcgaggcactcgacgccaattcccgcaagcaggaggccgaatggaaggaaaaggccattaaggagctggaggaatggtacgcgcgccaggatgaacagctgcagaagaccaaggctaataacagcacaaatattaaccacccatgctactccctcgagcaggctgccgaggaggccttcgtgaatgacatcgacgagtcatctccaggtacagagtgggagcgcgtcgctcgcctctgcgacttcaaccccaagagctccaaacaagccaaggatgtctctaggatgaggagcgtcctgataagtttgaagcaggcacccttggttcactag

SEQ ID NO: 71299 - DNA, 693 bp, Artificial Sequence
  derived and/or modified sequence
atggccgagctggacccctttggagccccagctggggcccctgggggccctgccctgggcaatggagtggccggggccggggaggaggaccctgctgctgccttcctggcccagcaggagagcgagattgctggcattgaaaatgatgaggcctttgccatcctggatggaggagcccctggcccccagccccatggagagcccccaggcggcccagatgctgtggatggagtgatgaatggagagtactaccaggagagcaatggccccacagacagctatgctgccatcagccaggtggaccggctgcagagcgagcctgagagcatcaggaagtggagggaggagcagatggagcggctggaggccctggatgccaacagcaggaagcaggaggccgagtggaaggagaaggccatcaaggagctggaggagtggtacgcccggcaggatgagcagctgcagaagaccaaggccaacaacagcaccaacatcaaccacccctgctacagcctggagcaggccgctgaggaggcctttgtgaatgacattgatgagagcagccctggaacagagtgggagcgggtggcccggctgtgtgacttcaaccccaagagcagcaagcaggccaaggatgtgtccaggatgaggtctgtgctgatcagcctgaagcaggcccccctggtgcactag

SEQ ID NO: 71300 - DNA, 693 bp, Artificial Sequence
  derived and/or modified sequence
atggccgagctggaccccttcggcgcccccgccggcgcccccggcggcccggctcttggcaatggtgttgccggtgctggcgaggaagacccagccgccgcctttctcgcccagcaggagtccgaaatcgctggcatcgaaaacgatgaggcgttcgccatacttgacgggggcgcccccgggcctcagcctcacggagaaccccccgggggcccagacgccgtcgatggtgtcatgaatggtgaatattaccaggagtccaacggacccactgattcctatgccgcaattagccaggtcgaccgactacagtcggagcctgagtccatcaggaaatggcgggaggagcagatggaacggttagaagccctggacgcaaattctcgaaaacaggaagcagagtggaaagagaaggctattaaagagctggaggaatggtatgctcgccaggacgagcaactccaaaagacaaaggctaataattccactaatatcaatcacccttgttattccctcgagcaggcagccgaagaggcattcgttaatgatattgatgaaagcagcccaggcaccgaatgggaaagagtggctcggctttgtgatttcaaccctaagtcatccaagcaggcgaaggacgtatcaagaatgaggtccgttctcatttcactcaaacaagcacctctagttcattag

SEQ ID NO: 71301 - DNA, 693 bp, Artificial Sequence
  derived and/or modified sequence
atggccgagctggaccccttcggcgcccccgccggcgcccccggcgggcccgcacttggcaatggcgttgctggtgcaggcgaggaggacccagccgccgccttcttggcccagcaggagtctgagattgctggaatcgagaatgacgaggcctttgcgatcctcgatgggggagctccaggccctcagccccacggcgagccccctggagggccggatgctgtggacggcgtaatgaatggggagtactatcaggagagcaacggtcccaccgactcctacgccgcaatctctcaagtggacaggctgcaatccgaacctgaaagcattaggaagtggcgtgaggagcagatggaaaggttggaggccctcgatgctaactcaaggaagcaggaggcagaatggaaagaaaaagccatcaaggagctggaggagtggtatgctcgccaggatgaacagctgcagaaaaccaaagccaataactcgactaacatcaatcatccttgctatagcctcgaacaagccgcagaggaggcttttgtcaatgacattgacgagagctcgcctggtacagaatgggagagagtggccaggctctgcgacttcaatccgaaaagcagtaaacaggcaaaggacgtgtctagaatgaggtctgttttgataagcctgaagcaggcccctctggtccattag

SEQ ID NO: 71302 - DNA, 693 bp, Artificial Sequence
  derived and/or modified sequence
atggcagagctcgatccttttggggctccggcaggtgccccaggcggtcccgctttagggaacggagtggcaggcgcaggggaagaagatccagctgctgcttttctcgcccagcaggagagcgagatcgctggtattgagaacgatgaagcgtttgctatcctggatggtggagcacccggtcctcaacctcatggcgagcctcctggcggtccggatgccgtcgacggggtaatgaacggcgaatactaccaggagagcaacgggccaactgactcatatgctgcaatatctcaggttgacaggctgcagtctgaaccggagagcattcgcaagtggcgcgaggagcagatggagcgcttggaggcactcgacgctaatagccgaaaacaagaagcagagtggaaagaaaaagccattaaggagctcgaagaatggtacgcaaggcaggatgagcagcttcaaaaaactaaagccaacaactcaacgaatattaaccacccttgctatagcctagagcaggccgcagaagaggcctttgtgaatgacatcgatgaaagtagtcccggaaccgagtgggagagggttgctcgcctgtgcgatttcaacccaaaaagtagcaagcaggctaaagacgtaagtcgcatgcggagcgtattgatctccttgaagcaggccccactcgtccactag

SEQ ID NO: 71303 - DNA, 693 bp, Artificial Sequence
  derived and/or modified sequence
atggccgaactggacccttttggagcccctgccggagccccagggggtccggcattgggaaatggggtggcaggcgctggagaggaagaccctgccgctgcattcctggcccaacaagaatcagagatcgccggtatcgagaatgatgaggcatttgcaattctggacggtggggctcctggaccccaaccgcacggggagcccccagggggtccagatgccgtggacggggtaatgaacggagagtattatcaagaatccaatggcccaacggatagctatgccgctatcagccaggtggatagactgcagtctgagccagaatctatcaggaaatggagggaagagcagatggaacgcctggaagccctagacgccaactcacgcaaacaagaagctgagtggaaagagaaggccataaaagagctagaagaatggtacgctcggcaagacgagcagctgcagaagactaaagccaataactccaccaatattaaccatccgtgctattcactggagcaagccgctgaagaagctttcgtaaacgatatcgacgaatcatcaccaggtaccgagtgggaacgggtggctcgcctgtgcgatttcaatcctaagagctctaaacaagccaaagatgtgtctcgcatgcgtagcgtattgatcagtctgaaacaggcccctctcgtgcactag

SEQ ID NO: 71304 - DNA, 1102 bp, Artificial Sequence
  derived and/or modified sequence
gtctccctcctggcgcttgtcctcctctcccagtcggcaccacagcggtggctgccgggcgtggtgtcggtgggtcggttggtttttgtctcaccgttggtgtccgtgccgttcagttgcccgccatggctgagctggatccgttcggcgcccctgccggcgcccctggcggtcccgcgctggggaacggagtggccggcgccggcgaagaagacccggctgcggccttcttggcgcagcaagagagcgagattgcgggcatcgagaacgacgaggccttcgccatcctggacggcggcgcccccgggccccagccgcacggcgagccgccggggggtccggatgctgttgatggagtaatgaatggtgaatactaccaggaaagtaatggtccaacagacagttatgcagctatttcacaagtggatcgattgcagtcagagcctgaaagtatccgtaaatggagagaagaacaaatggaacgcttggaagcccttgatgccaattctcggaagcaagaagcagagtggaaagaaaaggcaataaaggagctagaagaatggtatgcaagacaggacgagcagctacagaaaacaaaagcaaacaacagcacaaacataaaccatccttgctacagcctagaacaggcagcagaagaagcctttgtaaatgacattgacgagtcgtccccaggcactgagtgggaacgggtggcccggctgtgtgactttaaccccaagtctagcaagcaggccaaagatgtctcccgcatgcgctcagtcctcatctccctcaagcaggccccgctggtgcactgaagagccaccctgtggaaacactacatctgcaatatcttaatcctactcagtgaagctcttcacagtcattggattaattatgttgagttcttttggaccaaacctttttgtctttagagttgttcattgtttgtgattgcatgtttccttccttcaactgtgttctccctggcattcagagaggagggagaggaggaagaggaaggggagggaagcttcccaagagtagcctcaacctgtgcttctgtgcattattctgagaataaatttctgtttcaaactgt

SEQ ID NO: 71305 - DNA, 1181 bp, Artificial Sequence
  derived and/or modified sequence
gattggttgttcccttttcggctctgcaacaccgcctagaccgaccggatacacgggtagggcttccgctttacccgtctccctcctggcgcttgtcctcctctcccagtcggcaccacagcggtggctgccgggcgtggtgtcggtgggtcggttggtttttgtctcaccgttggtgtccgtgccgttcagttgcccgccatggctgagctggatccgttcggcgcccctgccggcgcccctggcggtcccgcgctggggaacggagtggccggcgccggcgaagaagacccggctgcggccttcttggcgcagcaagagagcgagattgcgggcatcgagaacgacgaggccttcgccatcctggacggcggcgcccccgggccccagccgcacggcgagccgccggggggtccggatgctgttgatggagtaatgaatggtgaatactaccaggaaagtaatggtccaacagacagttatgcagctatttcacaagtggatcgattgcagtcagagcctgaaagtatccgtaaatggagagaagaacaaatggaacgcttggaagcccttgatgccaattctcggaagcaagaagcagagtggaaagaaaaggcaataaaggagctagaagaatggtatgcaagacaggacgagcagctacagaaaacaaaagcaaacaacagcacaaacataaaccatccttgctacagcctagaacaggcagcagaagaagcctttgtaaatgacattgacgagtcgtccccaggcactgagtgggaacgggtggcccggctgtgtgactttaaccccaagtctagcaagcaggccaaagatgtctcccgcatgcgctcagtcctcatctccctcaagcaggccccgctggtgcactgaagagccaccctgtggaaacactacatctgcaatatcttaatcctactcagtgaagctcttcacagtcattggattaattatgttgagttcttttggaccaaacctttttgtctttagagttgttcattgtttgtgattgcatgtttccttccttcaactgtgttctccctggcattcagagaggagggagaggaggaagaggaaggggagggaagcttcccaagagtagcctcaacctgtgcttctgtgcattattctgagaataaatttctgtttcaaactgtatt

SEQ ID NO: 71306 - DNA, 693 bp, Artificial Sequence
  derived and/or modified sequence
atggccgagctggaccccttcggcgcccccgccggcgcccccggcggccccgccctgggcaacggcgtggccggcgccggcgaggaggaccccgccgccgccttcctggcccagcaggagagcgagatcgccggcatcgagaacgacgaggccttcgccatcctggacggcggcgcccccggcccccagccccacggcgagccccccggcggccccgacgccgtggacggcgtgatgaacggcgagtactaccaggagagcaacggccccaccgacagctacgccgccatcagccaggtggacagactgcagagcgagcccgagagcatcagaaagtggagagaggagcagatggagagactggaggccctggacgccaacagcagaaagcaggaggccgagtggaaggagaaggccatcaaggagctggaggagtggtacgccagacaggacgagcagctgcagaagaccaaggccaacaacagcaccaacatcaaccacccctgctacagcctggagcaggccgccgaggaggccttcgtgaacgacatcgacgagagcagccccggcaccgagtgggagagagtggccagactgtgcgacttcaaccccaagagcagcaagcaggccaaggacgtgagcagaatgagaagcgtgctgatcagcctgaagcaggcccccctggtgcactag

SEQ ID NO: 71307 - protein, 166 aa, Artificial Sequence
  derived and/or modified sequence
MAELDPFGAPAGAPGGPALGNGVAGAGEEDPAAAFLAQQESEIAGIENDEAFAILDGGAPGPQPHGEPPGGPDANSRKQEAEWKEKAIKELEEWYARQDEQLQKTKANNRAAEEAFVNDIDESSPGTEWERVARLCDFNPKSSKQAKDVSRMRSVLISLKQAPLVH

SEQ ID NO: 71308 - DNA, 501 bp, Artificial Sequence
  derived and/or modified sequence
atggcagaactggacccatttggagcccctgcaggagctcctggtgggccagccttgggaaatggcgtagcaggcgcgggtgaggaagacccagccgccgcatttctggcacagcaggaatctgagatcgccggtatcgagaatgatgaggcttttgccattctggacggcggggcacccgggcctcagccccacggcgagccgcccggaggacccgacgcaaattctaggaagcaagaagcggagtggaaggagaaggccattaaggagctggaggaatggtatgcacggcaggatgagcaacttcaaaaaactaaggccaataatagagccgcggaggaagcatttgtaaacgacatcgacgaaagcagcccgggtactgagtgggagcgagtggctaggctgtgcgacttcaatccaaagtcaagtaaacaagccaaagacgtctcaaggatgcgctccgtattgataagcctcaagcaagctcccctggtgcattag

SEQ ID NO: 71309 - DNA, 501 bp, Artificial Sequence
  derived and/or modified sequence
atggccgagctggacccctttggagccccagctggggcccctgggggccctgccctgggcaatggagtggccggggccggggaggaggaccctgctgctgccttcctggcccagcaggagagcgagattgctggcattgaaaatgatgaggcctttgccatcctggatggaggagcccctggcccccagccccatggagagcccccaggcggcccagatgccaacagcaggaagcaggaggccgagtggaaggagaaggccatcaaggagctggaggagtggtacgcccggcaggatgagcagctgcagaagaccaaggccaacaacagagctgctgaggaggcctttgtgaatgacattgatgagagcagccctggaacagagtgggagcgggtggcccggctgtgtgacttcaaccccaagagcagcaagcaggccaaggatgtgtccaggatgaggtctgtgctgatcagcctgaagcaggcccccctggtgcactag

SEQ ID NO: 71310 - DNA, 501 bp, Artificial Sequence
  derived and/or modified sequence
atggccgagctggaccccttcggcgcccccgccggcgcccccggcgggccagcactcgggaatggagttgccggggccggggaagaggacccagcagccgctttcttggcccagcaggaaagcgagattgcaggcatagagaacgacgaggccttcgccatcctggacggcggagctccaggacctcagccgcacggagagcctcctggaggacctgatgcgaattccagaaagcaggaggctgagtggaaggaaaaagcgatcaaagaactggaggaatggtatgcgcggcaggatgaacagttacaaaagacaaaagctaataaccgcgccgctgaagaggcttttgtgaatgatattgacgagtcatctcctggaactgaatgggaacgcgtagctagattatgtgattttaaccctaagagttcaaaacaggctaaggatgtttcccggatgaggagcgtactgatttcgctcaaacaggcaccgctcgtgcactag

SEQ ID NO: 71311 - DNA, 501 bp, Artificial Sequence
  derived and/or modified sequence
atggccgagctggacccttttggggcacccgctggggctccaggcggtccagccctgggcaacggtgtggcaggtgccggagaggaggatcccgctgccgctttcctggcccaacaagagtccgagattgccggaattgagaatgatgaggcctttgccatcctggacgggggagcccctgggccacagccgcacggcgagccacctggtggacctgacgccaacagcaggaagcaggaagctgagtggaaggaaaaggctataaaggagctcgaggaatggtacgcccgtcaggacgaacagctgcagaaaaccaaggcgaataaccgggctgctgaggaggcttttgtgaacgacatcgacgaatcctcccccggtaccgagtgggaaagggtggctagactgtgtgacttcaatcccaagagttcaaagcaggcgaaggatgtcagcaggatgagatccgtgctgatcagtctcaaacaggcccctctggtgcactag

SEQ ID NO: 71312 - DNA, 989 bp, Artificial Sequence
  derived and/or modified sequence
gattggttgttcccttttcggctctgcaacaccgcctagaccgaccggatacacgggtagggcttccgctttacccgtctccctcctggcgcttgtcctcctctcccagtcggcaccacagcggtggctgccgggcgtggtgtcggtgggtcggttggtttttgtctcaccgttggtgtccgtgccgttcagttgcccgccatggctgagctggatccgttcggcgcccctgccggcgcccctggcggtcccgcgctggggaacggagtggccggcgccggcgaagaagacccggctgcggccttcttggcgcagcaagagagcgagattgcgggcatcgagaacgacgaggccttcgccatcctggacggcggcgcccccgggccccagccgcacggcgagccgccggggggtccggatgccaattctcggaagcaagaagcagagtggaaagaaaaggcaataaaggagctagaagaatggtatgcaagacaggacgagcagctacagaaaacaaaagcaaacaacagggcagcagaagaagcctttgtaaatgacattgacgagtcgtccccaggcactgagtgggaacgggtggcccggctgtgtgactttaaccccaagtctagcaagcaggccaaagatgtctcccgcatgcgctcagtcctcatctccctcaagcaggccccgctggtgcactgaagagccaccctgtggaaacactacatctgcaatatcttaatcctactcagtgaagctcttcacagtcattggattaattatgttgagttcttttggaccaaacctttttgtctttagagttgttcattgtttgtgattgcatgtttccttccttcaactgtgttctccctggcattcagagaggagggagaggaggaagaggaaggggagggaagcttcccaagagtagcctcaacctgtgcttctgtgcattattctgagaataaatttctgtttcaaactgtatt

SEQ ID NO: 71313 - DNA, 501 bp, Artificial Sequence
  derived and/or modified sequence
atggccgagctggaccccttcggcgcccccgccggcgcccccggcggccccgccctgggcaacggcgtggccggcgccggcgaggaggaccccgccgccgccttcctggcccagcaggagagcgagatcgccggcatcgagaacgacgaggccttcgccatcctggacggcggcgcccccggcccccagccccacggcgagccccccggcggccccgacgccaacagcagaaagcaggaggccgagtggaaggagaaggccatcaaggagctggaggagtggtacgccagacaggacgagcagctgcagaagaccaaggccaacaacagagccgccgaggaggccttcgtgaacgacatcgacgagagcagccccggcaccgagtgggagagagtggccagactgtgcgacttcaaccccaagagcagcaagcaggccaaggacgtgagcagaatgagaagcgtgctgatcagcctgaagcaggcccccctggtgcactag

SEQ ID NO: 71314 - protein, 345 aa, Artificial Sequence
  derived and/or modified sequence
MFLTRPKVCVDLNRRVTLYGVFTIHFSPNVPSRCLLLELLDVSVSELLLYSSHQGCSMWMIQHCARDVLEALAFLHHEGYVHADLKPRNILWSAENECFKLIDFGLSFKEGNQDVKYIQTDGYRAPEAELQNCLAQAGLQSDTECTSAVDLWSLGIILLEMFSGMKLKHTVRSQEWKANSSAIIDHIFASKAVVNAAIPAYHLRDLIKSMLHDDPSRRIPAEMALCSPFFSIPFAPHIEDLVMLPTPVLRLLNVLDDDYLENEEEYEDVVEDVKEECQKYGPVVSLLVPKENPGRGQVFVEYANAGDSKAAQKLLTGRMFDGKFVVATFYPLSAYKRGYLYQTLL

SEQ ID NO: 71315 - DNA, 1038 bp, Artificial Sequence
  derived and/or modified sequence
atgttcctgaccagacccaaggtgtgcgtggacctgaacagaagagtgaccctgtacggcgtgttcaccatccacttcagccccaacgtgcccagcagatgcctgctgctggagctgctggacgtgagcgtgagcgagctgctgctgtacagcagccaccagggctgcagcatgtggatgatccagcactgcgccagagacgtgctggaggccctggccttcctgcaccacgagggctacgtgcacgccgacctgaagcccagaaacatcctgtggagcgccgagaacgagtgcttcaagctgatcgacttcggcctgagcttcaaggagggcaaccaggacgtgaagtacatccagaccgacggctacagagcccccgaggccgagctgcagaactgcctggcccaggccggcctgcagagcgacaccgagtgcaccagcgccgtggacctgtggagcctgggcatcatcctgctggagatgttcagcggcatgaagctgaagcacaccgtgagaagccaggagtggaaggccaacagcagcgccatcatcgaccacatcttcgccagcaaggccgtggtgaacgccgccatccccgcctaccacctgagagacctgatcaagagcatgctgcacgacgaccccagcagaagaatccccgccgagatggccctgtgcagccccttcttcagcatccccttcgccccccacatcgaggacctggtgatgctgcccacccccgtgctgagactgctgaacgtgctggacgacgactacctggagaacgaggaggagtacgaggacgtggtggaggacgtgaaggaggagtgccagaagtacggccccgtggtgagcctgctggtgcccaaggagaaccccggcagaggccaggtgttcgtggagtacgccaacgccggcgacagcaaggccgcccagaagctgctgaccggcagaatgttcgacggcaagttcgtggtggccaccttctaccccctgagcgcctacaagagaggctacctgtaccagaccctgctgtag

SEQ ID NO: 71316 - DNA, 1038 bp, Artificial Sequence
  derived and/or modified sequence
atgttcttgactcgccccaaggtgtgcgttgatcttaaccgtagggtcactctttacggagtcttcacaattcacttctctccgaatgtaccaagtcggtgtctgcttctagaactcttggacgtgtcggtctctgagcttttgctttacagctcccatcaggggtgcagcatgtggatgatacagcactgtgccagagatgtgctggaggcccttgctttcctgcaccatgaaggatatgtgcatgccgacttaaaaccacgcaacatattgtggagtgctgaaaatgagtgctttaagttgatcgactttgggttgtcttttaaggaagggaaccaagatgtgaagtacattcagaccgatgggtacagagcgcccgaggctgagctgcagaactgtctggcacaggccgggctacagtccgatactgaatgtacgagcgcagtggatctgtggtctcttgggatcattctgttagagatgttctccggtatgaagctgaaacatactgtgaggtctcaagaatggaaggcaaatagtagcgcaatcattgaccatatatttgcatctaaggctgttgtgaatgccgccatccctgcataccacctgagggatctgatcaagtcaatgcttcacgatgatccgagccgtcgtattccagccgaaatggctctgtgctccccattctttagcatcccattcgcaccccacatagaagacttggtcatgctacctactccggtgctgcgactcctaaatgtgctcgatgatgactacttggaaaatgaggaggaatacgaggacgtggtggaggatgttaaagaagaatgccagaaatatgggccagtggtttcgcttctagttcctaaagagaatcccgggcgtggtcaggtgtttgtggagtacgcaaacgctggagattctaaagccgcgcaaaagttacttaccggacggatgttcgacggcaagttcgtcgttgctactttttaccccctgagtgcctataagcggggttacctgtaccagaccctgctatag

SEQ ID NO: 71317 - DNA, 1038 bp, Artificial Sequence
  derived and/or modified sequence
atgttcctgacccggcccaaggtgtgtgtggacctgaacagaagagtgaccctgtatggagtcttcaccatccacttcagccccaacgtgcccagccgctgcctgctgctggagctgctggatgtgtctgtgtctgagctgctgctgtacagcagccaccagggctgcagcatgtggatgatccagcactgtgccagagatgtgctggaggccctggccttcctgcaccacgagggctacgtgcatgctgacctgaagcccaggaacatcctgtggagcgcagaaaatgaatgcttcaagctgattgactttggcctgtccttcaaggagggcaaccaggatgtgaagtacatccagacagatggctaccgggcccctgaggccgagctgcagaactgcctggcccaggccggcctgcagagcgacacagagtgcaccagcgctgtggacctgtggagcctgggcatcatcctgctggagatgttttctggcatgaagctgaagcacacagtgcgcagccaggagtggaaggccaacagcagcgccatcatcgaccacatctttgccagcaaggctgtggtgaatgctgccatcccagcctaccacctgcgggacctgatcaagtccatgctgcatgatgaccccagccgccgcatcccagctgagatggccctgtgcagccccttcttcagcatcccctttgccccccacatcgaggacctggtgatgctgcccacccctgtgctgcggctgctgaatgtgctggatgatgactacctggagaatgaggaggagtatgaagatgtggtggaggatgtgaaggaggagtgccagaagtatggccctgtggtgtccctgctggtgcccaaggaaaatcctggccggggccaggtgtttgtggagtatgccaatgctggggacagcaaggccgcccagaagctgctgaccggccgcatgtttgatggcaagtttgtggtggccaccttctaccccctgagcgcctacaagaggggctacctgtaccagaccctgctgtag

SEQ ID NO: 71318 - DNA, 1038 bp, Artificial Sequence
  derived and/or modified sequence
atgttcctgacccggcccaaggtgtgcgtggacctgaaccggcgggtgactctatacggagtgtttacgattcacttttcaccaaatgtgccatcccgatgcctgctcctggagttgcttgacgtcagcgtgagtgagctgttactgtactcttcccaccagggctgcagtatgtggatgattcaacactgcgccagagacgtgctggaggcattagccttcctccaccatgagggatacgttcacgccgacctgaaaccccgcaacatcctctggagtgccgaaaatgagtgctttaagcttattgactttggactgtcgttcaaagaaggcaatcaggacgtgaagtacatccagactgatggatatagagcccctgaagcggagctccagaactgcctggcccaggccggcctgcagtcagatacagaatgcacatccgccgtggatttgtggtcacttgggatcattctgcttgaaatgttctcagggatgaaactgaaacacaccgttcgctcccaggagtggaaggccaatagcagcgcaatcatagaccacatttttgcttcaaaggcagtcgtcaatgccgccattcctgcataccacttgcgcgacctgatcaaatcaatgctccacgatgacccctcccgacgcatccccgctgagatggctctctgctcccctttctttagcattccatttgctcctcatattgaagacctggtgatgctcccgacccctgtactaagactacttaacgttctggacgacgactacctcgaaaatgaggaggaatacgaagatgtcgtggaggatgttaaagaagagtgccagaaatacgggcccgttgtcagcctgctggtccccaaggagaatcccggacgagggcaggtgtttgtggagtatgctaatgcgggcgacagcaaggccgcacagaagctgcttacgggcagaatgttcgacgggaagtttgttgtggcaactttctaccctctgtccgcctataaacgtggttacctttaccagacgttactttag

SEQ ID NO: 71319 - DNA, 1038 bp, Artificial Sequence
  derived and/or modified sequence
atgttcctcacccggcctaaggtctgcgtggacctcaatagaagggtgactttatatggcgttttcactatacacttcagtcctaatgttccatctagatgccttcttctggagctattagatgtgagtgtctccgagttgcttttgtactcaagtcaccagggatgctcaatgtggatgatccagcactgcgcccgtgatgtcctcgaggcgctggctttcctgcatcatgaaggctacgtgcatgctgacctgaaaccacgtaacatcttgtggtccgcagagaatgagtgcttcaaactgattgattttggacttagtttcaaggagggcaaccaggacgtgaagtatatccaaacagacgggtatcgggctccagaagctgaactccagaactgcctcgcgcaggccggattgcagtcagacactgaatgtacatccgccgtggacctctggtcactgggcataatcttactggagatgtttagcggtatgaagctgaagcatacagtgcgcagtcaagagtggaaggccaattctagtgcgatcattgaccatattttcgcttctaaggctgtcgtcaacgccgctataccagcctatcacctacgcgacctgatcaagagcatgttgcacgatgacccaagccgcagaatcccggctgagatggctctttgcagtcccttcttcagcatacctttcgcgccacatatcgaagatctcgtaatgttgccaacacctgtgctccgtctgctgaacgtccttgacgatgattacctcgaaaatgaggaagagtacgaggatgtggtggaggatgtcaaagaggaatgtcagaagtacggccctgtggtctctcttcttgtccccaaagaaaacccagggcgtggacaagtttttgttgagtacgcaaacgccggagatagtaaggctgcacagaagctgttgacgggtaggatgtttgacggcaaattcgtggttgccacattttatcctctgtcagcctataagagggggtatctgtaccagacccttctttag

SEQ ID NO: 71320 - DNA, 2542 bp, Artificial Sequence
  derived and/or modified sequence
atgtttcttaccagaccgaaggtctgtgttgaccttaaccggagagtgactttgtatggagtgtttacaatccacttttctccaaatgtgccatcacgctgtctgttgcttgaactcctggatgtcagtgtttcggaattgctcttatattccagtcaccagggttgttccatgtggatgatacagcattgtgcccgagatgttttggaggcccttgcttttcttcatcatgagggctatgtccatgcggacctcaaaccacgtaacatattgtggagtgcagagaatgaatgttttaaactcattgactttggacttagcttcaaagaaggcaatcaggatgtaaagtatattcagacagacgggtatcgggctccagaagcagaattgcaaaattgcttggcccaggctggcctgcagagtgatacagaatgtacctcagctgttgatctgtggagcctaggaatcattttactggaaatgttctcaggaatgaaactgaaacatacagtcagatctcaggaatggaaggcaaacagttctgctattattgatcacatatttgccagtaaagcagtggtgaatgccgcaattccagcctatcacctaagagaccttatcaaaagcatgcttcatgatgatccaagcagaagaattcctgctgaaatggcattgtgcagcccattctttagcattccttttgcccctcatattgaagatctggtcatgcttcccactccagtgctaagactgctgaatgtgctggatgatgattatcttgagaatgaagaggaatatgaagatgttgtagaagatgtaaaagaggagtgtcaaaaatatggaccagtggtatctctacttgttccaaaggaaaatcctggcagaggacaagtctttgttgagtatgcaaatgctggtgattccaaagctgcgcagaaattactgactggaaggatgtttgatgggaagtttgttgtggctacattctacccgctgagtgcctacaagaggggatatctgtatcaaaccttgctttaatcagtaacctaaggactgtttcctttttctcctcttccatttcttgggttattccacatatgaatgcaggactacccccttaccattttaagaaggtactttatacatttatttaatcctactaatgtgcagccattgcccaagcagtgactgcgttgcatacatttggcactgagtaggacaagacctctcagctatacattgaggggttttagagcatccatgtgggcaacccttttttgtgcgggagagcaggtgttgctcttcagtatgtagcctaaaaaaatcttaattatttcatggatcatgaagcaaggatgaataatatcatgtcttggtaaatactaacaaatttgttaggtttggtgacatcatttacagattatttctttatgttgtccagtggttcttccttattgttgatatccataagctggcactggatgctctcagtaatgttaagtaattgtcaagcagcagttacctactgtgttcttaacactgagttgtgaattttttcttaaagcagtactgtagtactgaatattcctttaaaggaactgcagtgagcctatctaagtttttttaaattaaggcttttaaaatagaaagctgatgcttgatcttgcacaatttttatgtctagtatgtatgcttgagtgaatgtgcgagtatgaatgattagagaaaatttgagtcagtgtactttatagtgtgaatcctgtgagctaatacagtctatacttatttcttccctacctgtttcacatccgtaagatttaagatatacattttttgagaggtagtctgtctgatacaatgtaaatgacaaaacataattcctgagaggcccagaacaaactggagtctagcctggagttaaattgagacttctaaaatgattggaacaaagactaagttgtgccagatgtaaatcaacccctcttttagtttactttagactttgtattagctcatcttttttgtagtaaatctatagttttaaggtttctcaagatgtggctctacctactatgatgaaaattgaagtgggtcaaaagaattagatgtacagtgaagggaaaagaaaaaaaatgggcgaagagagggtggaaaataaaaggattcttttttcttcctttctgtttctcgtatccctgctccctttttcctccccttccctcattctttgcctctatccttagctgaagacaaactagaggagcagcatcccaggtagtttggcttttgactgcaaggtagttaagaaaggtgtagatataatgaggtagaagtagaaaggaagaaaaactcaaagaattcttaaaaggattcatagcaacataatgtgtccctgagtagaggatgctgctatgcgtgagttcatggacacaagttgattacatggtttttagaattataattatggattcttcttatttcatggtaggttgtctttaaagatataaaaattaggatgcctttatgaagcactgattatacc

SEQ ID NO: 71321 - protein, 301 aa, Artificial Sequence
  derived and/or modified sequence
MSYPTKEGSDTAGNAHKNSENEPPNDCSTDIESPSADPNMIYQVETNPINREPGTATSQEDVVPQAAENSELETEIQKDQREEDLKEELLLLQTPIPRKLVSHKPLNDRSRSHSGKVEMKANNFPINHKTRFRLSTSWRVPFINSHEIRSMILHLLCDRYFSQAAGCQNTMWVKRKYIACLYHPNSFTHHERAITFRRPSRVHYYRPLTERMTSGKFCKSTDTKGKCRFRAIVRSVLFVSQIQIESIFNIKGFVDILTYIHTMNVMITNTNNGWKYFCPICGRLFNTYSELRQHSCSSSGN

SEQ ID NO: 71322 - DNA, 906 bp, Artificial Sequence
  derived and/or modified sequence
atgagctaccccaccaaggagggcagcgacaccgccggcaacgcccacaagaacagcgagaacgagccccccaacgactgcagcaccgacatcgagagccccagcgccgaccccaacatgatctaccaggtggagaccaaccccatcaacagagagcccggcaccgccaccagccaggaggacgtggtgccccaggccgccgagaacagcgagctggagaccgagatccagaaggaccagagagaggaggacctgaaggaggagctgctgctgctgcagacccccatccccagaaagctggtgagccacaagcccctgaacgacagaagcagaagccacagcggcaaggtggagatgaaggccaacaacttccccatcaaccacaagaccagattcagactgagcaccagctggagagtgcccttcatcaacagccacgagatcagaagcatgatcctgcacctgctgtgcgacagatacttcagccaggccgccggctgccagaacaccatgtgggtgaagagaaagtacatcgcctgcctgtaccaccccaacagcttcacccaccacgagagagccatcaccttcagaagacccagcagagtgcactactacagacccctgaccgagagaatgaccagcggcaagttctgcaagagcaccgacaccaagggcaagtgcagattcagagccatcgtgagaagcgtgctgttcgtgagccagatccagatcgagagcatcttcaacatcaagggcttcgtggacatcctgacctacatccacaccatgaacgtgatgatcaccaacaccaacaacggctggaagtacttctgccccatctgcggcagactgttcaacacctacagcgagctgagacagcacagctgcagcagcagcggcaactag

SEQ ID NO: 71323 - DNA, 1630 bp, Artificial Sequence
  derived and/or modified sequence
aggagtaagtggagaggtagagggcagaagaaaaggggtcaagaaggcaggaccccgtgaagcacacctttcctaaggattttgacgaatgagaatgaagataaactgtgagttgaaagtgaaagagaaagcataagggatcttaggtgcatctgacaagccttagatgacctccagcaacttcagttctcaccgaattactgcatttcagccttactgagaagcagccagtcatactatcctcaaattttaacccaggatgagttatcctactaaagaaggaagtgatacagctggaaatgctcacaaaaattctgaaaatgagcctcctaatgactgtagtacagacatagagtctccatctgctgatcccaatatgatctatcaggtagaaaccaacccaataaacagggagccaggcacagcaacctcccaggaagatgttgttcctcaagcagcagaaaacagcgagctcgaaacagagatccaaaaagatcaacgagaagaagatctaaaagaagagcttcttctacttcagacccccattcccagaaaattggtctctcacaagcccttaaatgatagatcaagatcccactcagggaaagttgagatgaaagcaaacaatttccccataaatcacaaaactcgttttcgactttcaacttcatggagagtcccatttattaacagtcatgagataagaagtatgattctccatctgctatgtgatagatatttctctcaggctgcagggtgtcagaataccatgtgggtaaagcgaaaatatatagcatgtctttaccatccaaatagtttcacccatcacgagagagccataacatttagaaggccttcgagggtgcactactaccgtcccctcactgagagaatgacatcaggaaaattttgcaaatcaactgacactaaagggaaatgtagattccgtgctattgtgaggtctgtgctctttgtgtcacagatacaaattgaaagtatttttaatataaaaggttttgtggatatattgacatatatccataccatgaatgttatgatcacaaacaccaataatggttggaaatacttttgtcccatctgtggaaggctttttaacacttactctgaattaagacaacattcatgcagctcttctgggaattaaattaaattggggtaaattcattttaaaatataacttctaaaattcataatttgactactaaagtaagacaaaattgcatgaacataaattttagtattattagagggagtagcagaaaggaacacaaactaatagtacctctcagtaagaaatacctatggggagtgaggaaacatctgtttatactttgcttttacaagtacatcattgaaatatcagacctgtcatctatattgagtcagcatttgaaccaagtaaatgttttcactgtcttaacatctatttctgtagatgtaaatattgttaacataaaagaatccaagttaacaggatcctgactaagatagcaaacatatattggaaggccagacaaagttctaccaagtgtttccagagattctgctacatgtattatctgaaatgttctccatatattcaataaaaaccaatttgaagacatagaaa

SEQ ID NO: 71324 - DNA, 1577 bp, Artificial Sequence
  derived and/or modified sequence
ggagaggtagagggcagaagaaaaggggtcaagaaggcaggaccccgtgaagcacacctttcctaaggattttgacgaatgagaatgaagataaactggtgcatctgacaagccttagatgacctccagcaacttcagttctcaccgaattactgcatttcagccttactgagaagcagccagtcatactatcctcaaattttaacccaggatgagttatcctactaaagaaggaagtgatacagctggaaatgctcacaaaaattctgaaaatgagcctcctaatgactgtagtacagacatagagtctccatctgctgatcccaatatgatctatcaggtagaaaccaacccaataaacagggagccaggcacagcaacctcccaggaagatgttgttcctcaagcagcagaaaacagcgagctcgaaacagagatccaaaaagatcaacgagaagaagatctaaaagaagagcttcttctacttcagacccccattcccagaaaattggtctctcacaagcccttaaatgatagatcaagatcccactcagggaaagttgagatgaaagcaaacaatttccccataaatcacaaaactcgttttcgactttcaacttcatggagagtcccatttattaacagtcatgagataagaagtatgattctccatctgctatgtgatagatatttctctcaggctgcagggtgtcagaataccatgtgggtaaagcgaaaatatatagcatgtctttaccatccaaatagtttcacccatcacgagagagccataacatttagaaggccttcgagggtgcactactaccgtcccctcactgagagaatgacatcaggaaaattttgcaaatcaactgacactaaagggaaatgtagattccgtgctattgtgaggtctgtgctctttgtgtcacagatacaaattgaaagtatttttaatataaaaggttttgtggatatattgacatatatccataccatgaatgttatgatcacaaacaccaataatggttggaaatacttttgtcccatctgtggaaggctttttaacacttactctgaattaagacaacattcatgcagctcttctgggaattaaattaaattggggtaaattcattttaaaatataacttctaaaattcataatttgactactaaagtaagacaaaattgcatgaacataaattttagtattattagagggagtagcagaaaggaacacaaactaatagtacctctcagtaagaaatacctatggggagtgaggaaacatctgtttatactttgcttttacaagtacatcattgaaatatcagacctgtcatctatattgagtcagcatttgaaccaagtaaatgttttcactgtcttaacatctatttctgtagatgtaaatattgttaacataaaagaatccaagttaacaggatcctgactaagatagcaaacatatattggaaggccagacaaagttctaccaagtgtttccagagattctgctacatgtattatctgaaatgttctccatatattcaataaaaaccaatttgaagacat

SEQ ID NO: 71325 - DNA, 906 bp, Artificial Sequence
  derived and/or modified sequence
atgagctatccaacaaaggagggctccgataccgccggcaacgcccacaagaactcagaaaacgaacccccaaacgactgctctactgatattgagagcccatcggcggaccctaatatgatttatcaggtcgaaaccaacccaattaacagggaaccaggcactgcaacttcccaggaagacgtggtaccgcaagcggccgagaactcagaactggagaccgaaattcagaaggaccagagagaagaggacctgaaagaagaactactcctgctgcaaaccccaataccacggaagctcgtgtctcataagcccttaaatgaccggtcgagatctcattctggcaaggtcgagatgaaggccaataacttccccattaatcataagactcgctttcgcctctccacctcatggcgcgtgccattcatcaattcgcacgagatcaggagtatgatactgcacttgctctgcgatcggtactttagtcaagcagcgggatgtcagaatactatgtgggtaaagagaaaatatatcgcgtgcctgtatcaccccaacagtttcacgcaccacgagagggccatcacttttagacgcccgagtcgagtgcactattacaggcctttaaccgagcgcatgacctctggaaagttttgcaagtctactgatacaaagggaaagtgtcgatttcgggctatagtacgaagcgtgctctttgtgagccagatccagatcgagagtatattcaatataaaaggatttgtcgatatcctgacgtacatccatactatgaacgtcatgatcaccaacactaacaacgggtggaagtacttctgtcctatctgtgggcgactatttaacacatacagtgagctacgtcaacactcctgcagcagtagcgggaactag

SEQ ID NO: 71326 - DNA, 906 bp, Artificial Sequence
  derived and/or modified sequence
atgtcataccctacgaaggaagggtccgacacagctgggaatgcacacaagaattcggagaacgaaccaccaaacgactgctccactgatattgagagtccctccgcggatcctaacatgatttaccaggtggaaacaaaccccataaatcgcgagccaggcactgcaacaagtcaggaggacgtggtgccccaagcagccgagaacagtgagctggagacagaaattcagaaggatcagcgcgaagaagatttgaaagaagagctgctgttgctccaaaccccaatccctcggaaactggtttcgcataagccactcaacgaccgaagcaggagccactcggggaaagttgaaatgaaagcgaataactttcccattaaccataagacccggtttcgccttagtacctcatggcgagtcccatttatcaactcgcacgagattcggtcaatgattttgcatctgctttgcgaccggtatttttcgcaggctgctggctgtcagaatactatgtgggtgaaacgaaagtacatcgcatgcctgtaccatcccaattcatttacccaccatgaaagggcaatcacattccgaaggcctagtcgagtgcactactatagaccactcaccgaacggatgacaagcggaaaattctgtaaatccactgacacaaaaggcaaatgccgatttcgtgctatcgtccgttccgtcttgttcgtgagccagatccagatagagagtatcttcaatataaagggattcgtggacatacttacctatatccacacgatgaatgtgatgattaccaacaccaataacggttggaaatacttttgtcctatttgcggccgcctgttcaacacttattcagagcttagacaacattcttgctcctcctctggcaattag

SEQ ID NO: 71327 - DNA, 906 bp, Artificial Sequence
  derived and/or modified sequence
atgagctaccccaccaaggagggcagtgacacagctggaaatgcccacaagaacagtgaaaatgaacctccaaatgactgcagcacagacatcgagagccccagcgctgaccccaacatgatctaccaggtggagaccaaccccatcaaccgggagcctggaacagccaccagccaggaggatgtggtgccccaggccgctgagaacagcgagctggagacagagatccagaaggaccagcgggaggaggacctgaaggaggagctgctgctgctgcagacccccatccccaggaagctggtgagccacaagcccctgaatgacaggagccgcagccacagcggcaaggtggagatgaaggccaacaacttccccatcaaccacaagacccgcttccggctgagcacctcctggagggtgcccttcatcaacagccatgagatccgctccatgatcctgcacctgctgtgtgaccgctacttcagccaggccgccggctgccagaacaccatgtgggtgaagaggaagtacatcgcctgcctgtaccaccccaacagcttcacccaccacgagcgggccatcaccttcagaagacccagccgggtgcactactaccggcccctgacagagaggatgaccagcggcaagttctgcaagagcacagacaccaagggcaagtgccgcttccgggccatcgtgcgctctgtgctgtttgtgtcccagatccagatcgagagcatcttcaacatcaagggctttgtggacatcctgacctacatccacaccatgaatgtgatgatcaccaacaccaacaacggctggaagtacttctgccccatctgtggccgcctcttcaacacctacagcgagctgcggcagcacagctgcagcagcagcggcaactag

SEQ ID NO: 71328 - DNA, 906 bp, Artificial Sequence
  derived and/or modified sequence
atgagctaccccaccaaggagggcagcgacaccgccggcaacgcccataaaaatagcgaaaatgaaccaccaaatgactgctcaaccgacatcgagtcacccagcgccgaccctaatatgatctaccaggtagaaactaatcccattaatagagaaccagggacagcaactagtcaggaagacgttgtgcctcaagcggccgaaaacagtgagctagagactgaaatccaaaaagatcagagggaggaggatctaaaagaagagctccttctcctgcagaccccaatcccgaggaagctagtttctcacaagcccctgaatgatcgatcccggtcacatagtggcaaggttgaaatgaaggccaacaacttccctattaatcacaaaaccagatttaggttatcaacctcttggagggtgccctttatcaactcacatgagatacggtccatgatattgcacctgctgtgtgaccgctatttttcccaggccgccggctgtcagaataccatgtgggtcaagcgaaagtacattgcctgcttgtaccaccccaactccttcactcaccacgaacgggccataactttcagaaggccttctagagtgcattattaccggcccctgactgaacggatgacaagcgggaaattctgtaaatcaactgacacaaaggggaagtgtcggttcagagctatagtacgatctgtactgtttgtctctcagattcaaatcgagtctattttcaatattaagggcttcgtggacattctcacctatatccacactatgaatgtgatgataaccaatacaaataacggctggaagtacttctgccccatttgtggccggctgtttaatacatactctgagcttcgccagcatagttgtagctccagcgggaactag

SEQ ID NO: 71329 - DNA, 906 bp, Artificial Sequence
  derived and/or modified sequence
atgagctaccccaccaaggagggcagcgacaccgccggcaacgcccacaagaattccgaaaacgagcctcctaacgattgcagcactgacatcgaatctccttccgccgaccctaatatgatttaccaggtcgaaaccaaccctattaaccgagaacccggcactgcaacctcccaggaggacgttgtccctcaggctgccgagaactccgaacttgaaacagagattcagaaagaccaacgggaggaagatctaaaagaggagctcctacttctccagacccctatccccaggaagctggtaagccataagcccctgaatgaccggtctaggtcccattcgggtaaggtggaaatgaaggccaacaactttcccatcaatcataaaacaaggtttcggctttccacgtcctggagagtgccatttataaattcccacgagatcagatccatgatcctgcacttactgtgtgacagatacttttcccaggccgcgggttgccaaaataccatgtgggtgaagcggaagtacattgcctgcctttaccatcccaacagtttcacccatcacgagagggcgatcacattccggcgaccgtcacgagtccattactaccgccctttgacagaaaggatgactagcggcaagttttgcaaatctactgataccaaaggcaagtgccggtttagagccatcgttaggtctgtcctctttgtctcgcagatccagattgaatccatttttaacatcaaaggattcgtcgacattcttacatatatccacacaatgaatgttatgattacaaacaccaacaatggctggaagtacttctgcccaatctgcggtcgcttattcaatacctactccgagcttcgccaacatagctgctcctcatctggcaactag

SEQ ID NO: 71330 - DNA, 906 bp, Artificial Sequence
  derived and/or modified sequence
atgagctacccgaccaaagagggttctgacacggccggtaatgcgcacaagaactccgaaaatgagccacccaatgactgtagtacagacatcgaatcaccaagcgcggatccgaatatgatttaccaggtggaaacaaatcctataaatagagaacccggaacagcgacatcccaggaggacgttgtgccacaggccgctgaaaactctgagctcgagaccgagatccagaaggatcagcgagaggaggatctgaaagaagaacttctgttgctacagacccccattcctcggaagctagtaagtcacaaacccctgaacgacaggtcacgctctcactctgggaaagtcgagatgaaggcaaacaatttccctatcaaccacaagaccagatttagactgtccacatcctggcgggtgccatttatcaacagtcacgagattagaagcatgatcttgcacttgctctgcgaccgatatttttcccaagccgcaggttgccagaatactatgtgggtcaagaggaagtatatcgcgtgcttgtaccaccctaattcattcactcaccacgaacgggcaatcacctttcgacgaccctctagggtacactactacagaccgctgacagaaagaatgacaagcggtaaattctgtaagtccaccgacaccaaggggaaatgcagattccgggctatcgtcaggtccgtcttgttcgtgagccagattcaaatcgaatctatttttaacatcaaaggctttgtggacatactgacctatatccacacaatgaatgttatgattaccaacaccaataacggctggaagtacttctgcccaatatgtgggagactgttcaacacgtattcagagctgaggcagcatagctgcagttcaagtggtaactag

SEQ ID NO: 71331 - DNA, 906 bp, Artificial Sequence
  derived and/or modified sequence
atgagctacccaacaaaagagggcagcgacaccgctggtaacgcacataagaactctgagaacgagccaccaaatgattgtagtacagatatcgagtcaccctctgcagatccgaacatgatttatcaagtggaaaccaatccaattaatcgtgaacctggcaccgccactagccaggaggacgtggttccacaggcagcagagaacagcgagctagagaccgagattcagaaggatcagagggaggaggacctcaaggaagaactgctgcttctgcagactccgatacccagaaagctggtgagtcacaagccattgaacgaccgcagccggagtcatagtggaaaggtggagatgaaagctaacaacttcccaattaatcacaagacacgtttccggctatcgacatcatggcgagtgcccttcatcaactcacatgaaataagatctatgatcttgcatctgctatgcgaccggtacttctcccaggcagccggatgtcagaacacaatgtgggtaaaacggaaatacatcgcctgcctataccaccctaattctttcacacaccatgagcgggctataaccttcaggagaccttctcgggttcattactatagacctctgaccgaacgcatgaccagcggtaagttttgcaagtcaacggataccaaaggcaaatgtagatttagagccatcgtaagatcggttctgttcgtcagccaaatccagattgaatccatttttaatatcaagggtttcgtggacattttaacctacattcacaccatgaatgttatgatcacaaatacaaacaacgggtggaagtatttttgcccaatatgtggcaggctgtttaacacatattctgagctgcgtcaacacagttgctcctcttcgggaaattag

SEQ ID NO: 71332 - protein, 1023 aa, Artificial Sequence
  derived and/or modified sequence
MPAARPPAAGLRGISLFLALLLGSPAAALERDALPEGDASPLGPYLLPSGAPERGSPGKEHPEERVVTAPPSSSQSAEVLGELVLDGTAPSAHHDIPALSPLLPEEARPKHALPPKKKLPSLKQVNSARKQLRPKATSAATVQRAGSQPASQGLDLLSSSTEKPGPPGDPDPIVASEEASEVPLWLDRKESAVPTTPAPLQISPFTSQPYVAHTLPQRPEPGEPGPDMAQEAPQEDTSPMALMDKGENELTGSASEESQETTTSTIITTTVITTEQAPALCSVSFSNPEGYIDSSDYPLLPLNNFLECTYNVTVYTGYGVELQVKSVNLSDGELLSIRGVDGPTLTVLANQTLLVEGQVIRSPTNTISVYFRTFQDDGLGTFQLHYQAFMLSCNFPRRPDSGDVTVMDLHSGGVAHFHCHLGYELQGAKMLTCINASKPHWSSQEPICSAPCGGAVHNATIGRVLSPSYPENTNGSQFCIWTIEAPEGQKLHLHFERLLLHDKDRMTVHSGQTNKSALLYDSLQTESVPFEGLLSEGNTIRIEFTSDQARAASTFNIRFEAFEKGHCYEPYIQNGNFTTSDPTYNIGTIVEFTCDPGHSLEQGPAIIECINVRDPYWNDTEPLCRAMCGGELSAVAGVVLSPNWPEPYVEGEDCIWKIHVGEEKRIFLDIQFLNLSNSDILTIYDGDEVMPHILGQYLGNSGPQKLYSSTPDLTIQFHSDPAGLIFGKGQGFIMNYIEVSRNDSCSDLPEIQNGWKTTSHTELVRGARITYQCDPGYDIVGSDTLTCQWDLSWSSDPPFCEKIMYCTDPGEVDHSTRLISDPVLLVGTTIQYTCNPGFVLEGSSLLTCYSRETGTPIWTSRLPHCVSEESLACDNPGLPENGYQILYKRLYLPGESLTFMCYEGFELMGEVTIRCILGQPSHWNGPLPVCKVNQDSFEHALEAEAAAETSLEGGNMALAIFIPVLIISLLLGGAYIYITRCRYYSNLRLPLMYSHPYSQITVETEFDNPIYETGETREYEVSI

SEQ ID NO: 71333 - DNA, 3072 bp, Artificial Sequence
  derived and/or modified sequence
atgccggcagcccgccctcccgctgcagggttgcgcggcattagtctgtttctcgcactcctgctggggtccccagccgcagccctcgaaagggatgcactgccagagggggatgcctcaccattgggcccctacctgctaccatctggggcccccgagaggggctctccaggcaaggaacatcctgaggaacgcgtcgttacagctcccccatcgagctcccaatcagccgaggttcttggagagctggtcctagacggcaccgccccttctgcccaccacgacatccccgccctgtcccctctgttgcccgaggaggccagaccaaagcatgccctgcctcccaaaaaaaaactgccatccctgaaacaggtcaatagtgccagaaagcagttgcggcccaaagctacctcggcggccacggtccaacgagcaggttctcagcctgcatctcagggtctggatctgctaagctctagcacagaaaagcccggaccacctggagaccctgaccccattgtggcttctgaggaggctagcgaagttcctttatggctggatcggaaggagtccgcagttcctactacccctgcccccttacagatctcacccttcaccagccagccctacgtggcccacactctgccgcagcgtcctgagcctggcgaaccgggaccagacatggcccaggaggcccctcaagaggacacctcccccatggcactgatggataagggcgaaaatgaacttaccggcagcgccagcgaagaatcgcaggagacaaccacgtctacgattatcacgactaccgtgatcactacggagcaagcgccagctctgtgcagcgtaagctttagcaaccctgaaggatacatcgactcatctgactatccactgttgccgttaaacaacttcctagaatgcacttataacgtaaccgtgtatactggctacggagtggagctgcaggtgaagtccgtaaatttaagcgacggtgagttactgagtatcaggggcgtcgacgggcctaccctcacggtcctggctaatcagaccctccttgtcgaaggacaagttatccggtcccccactaatacgatatctgtttattttaggacgtttcaagatgacgggcttgggacttttcagctgcattaccaggcgttcatgctctcctgcaacttccccagacgccctgatagcggcgacgtgacggttatggatctccattccgggggcgtggcacattttcattgtcatcttgggtacgagttgcagggtgcgaaaatgctgacctgcattaatgcatctaagccacattggtctagccaggaacccatctgctcagccccctgtggtggagcagtacataatgcaacaataggtagagtgctctctcctagctatccagagaataccaacggatcacagttttgcatctggaccattgaagctcccgaaggtcagaagctgcatctgcacttcgaacgtctgctccttcatgacaaggatagaatgaccgtgcactcaggacagacgaataaatcagccctcctgtacgactccctgcaaaccgaaagcgtcccttttgagggtctgctgtctgaaggaaacacaattcgaattgaatttacaagcgaccaggctcgggccgctagtaccttcaatatccggtttgaggccttcgaaaaagggcattgttacgaaccgtatatacagaacggaaattttactacgtcagaccctacttataatataggaacgatcgttgagttcacatgcgatcccggtcactccctcgagcagggtccagccataattgagtgtattaatgtgcgggacccatattggaatgacacagaacccttgtgtcgagccatgtgtggtggagagttgtccgctgtggctggcgtggtcttgagcccgaattggccagagccgtatgtggagggcgaagactgtatctggaagatccacgtaggcgaagagaagagaatattcctggacatccagtttctaaatttaagcaattctgacattctcacaatctacgacggcgatgaggttatgcctcacattctcggacagtatctaggcaattccgggccccagaagttatacagcagcactccagaccttactattcagtttcacagcgaccctgctggtttgatcttcgggaagggacaaggttttataatgaattacatcgaggttagccggaatgattcatgtagcgacctgccagaaatccagaacggttggaagactacttcccacactgagctggttagaggggccaggattacttaccagtgcgatccaggctatgatattgtgggctccgataccctcacatgtcagtgggacttgagctggtcaagcgatccccctttctgcgagaaaatcatgtattgcaccgaccccggagaagtggaccatagtacgaggttgatctctgatccggtgcttttagtgggaaccaccattcagtacacctgtaacccgggtttcgtactcgaagggtccagcctacttacctgctactcacgcgagacggggacacctatttggaccagccggctgccccactgcgtatccgaggagtcactggcgtgtgataatcctggcctgccggagaacgggtaccagatcctttacaagagactttatttgcctggagagtcccttacattcatgtgttacgagggatttgagctcatgggcgaggttaccatacgctgcatactgggacaacccagccattggaatggtcctttacccgtgtgcaaagtcaaccaagactcatttgagcacgctttagaggccgaggccgcggccgagactagcctggagggaggcaatatggctctggcaatctttattcccgtcctaattataagcctcctcctgggcggcgcttatatatacatcacacggtgcaggtattatagcaaccttaggctcccgttgatgtacagccacccttacagccagattacagtcgagactgaatttgacaacccaatctatgaaacaggggaaacgcgcgagtacgaggtatccatctag

SEQ ID NO: 71334 - DNA, 3072 bp, Artificial Sequence
  derived and/or modified sequence
atgcctgctgcccggcccccagctgctggcctgcggggcatcagcctcttcctggccctgctgctgggcagccctgctgctgccctggagagagatgccctgcctgaaggagatgccagccccctgggcccctacctgctgcccagcggggcccctgagcggggcagccctgggaaggagcaccctgaggagcgggtggtgacagccccacccagcagcagccagagcgctgaggtgctgggggagctggtgctggatggaacagcccccagcgcccaccacgacatcccagccctgagccccctgctgcctgaggaggcccggcccaagcacgccctgccccccaagaagaagctgcccagcctgaagcaggtgaacagcgccaggaagcagctgcggcccaaggccaccagcgctgccaccgtgcagagagctggcagccagcctgccagccagggcctggacctgctgagcagcagcacagagaagccaggccccccaggggaccctgaccccatcgtggccagcgaggaggccagcgaggtgcccctgtggctggacaggaaggagagcgctgtgcccaccaccccagcccccctgcagatcagccccttcaccagccagccctacgtggcccacaccctgccccagaggcctgagcctggagagcccggccctgacatggcccaggaggccccccaggaggacaccagccccatggccctgatggacaagggagaaaatgagctgactggaagtgccagcgaggagagccaggagaccaccaccagcaccatcatcaccaccaccgtcatcaccacagagcaggccccagccctgtgcagcgtgtccttcagcaaccctgagggctacatcgacagcagtgactaccccctgctgcccctgaacaacttcctggagtgcacctacaacgtgacagtgtacacaggctacggcgtggagctgcaggtgaagtctgtgaacctgagtgatggagagctgctgagcatccggggcgtggatggccccaccctgactgtgctggccaaccagaccctgctggtggagggccaggtgatccgcagccccaccaacaccatctctgtgtacttccgcaccttccaggatgatggcctgggcaccttccagctgcactaccaggccttcatgctgagctgcaacttccccaggaggccagattctggagatgtgacagtgatggacctgcacagcggaggagtggcccacttccactgccacctgggctatgagctgcagggcgccaagatgctgacctgcatcaatgccagcaagccccactggagcagccaggagcccatctgcagcgccccctgtggcggcgctgtgcacaatgccaccatcggccgggtgctgagccccagctacccagagaacaccaacggcagccagttctgcatctggaccatcgaggcccctgagggccagaagctgcacctgcactttgagcggctgctgctgcatgacaaggacaggatgacagtgcacagcggccagaccaacaagagcgccctgctgtatgacagcctgcagacagaatctgtgccctttgagggcctgctgtctgagggcaacaccatccgcatcgagttcaccagtgaccaggcccgggccgccagcaccttcaacatccgctttgaggcctttgagaagggccactgctatgagccctacatccagaatggaaacttcaccaccagtgaccccacctacaacatcggcaccatcgtggagttcacctgtgaccccggccacagcctggagcagggccctgccatcatcgagtgcatcaacgtgcgggacccctactggaatgacacagagcccctgtgccgggccatgtgtggcggggagctgtctgctgtggccggcgtggtgctgagccccaactggccagagccctacgtggagggggaggactgcatctggaagatccacgtgggggaggagaagaggatcttcctggacatccagttcctgaacctgagcaacagcgacatcctgaccatctatgatggagatgaggtgatgccccacatcctgggccagtacctgggcaacagcggcccccagaagctgtacagcagcaccccagacctgaccatccagttccacagcgaccctgctggcctcatctttgggaagggccagggcttcatcatgaactacatcgaggtgtccagaaatgacagctgcagcgacctgcctgagatccagaatggctggaagaccaccagccacacagagctggtgcggggggcccgcatcacctaccagtgtgaccccggctatgacatcgtgggcagtgacaccctgacctgccagtgggacctgtcctggagcagtgacccccccttctgtgagaagatcatgtactgcacagatcctggagaggtggaccacagcaccaggctcatcagtgaccctgtgctgctggtgggcaccaccatccagtacacctgcaaccctggctttgtgctggagggcagcagcctgctgacctgctacagccgggagaccggcacccccatctggaccagccggctgccccactgtgtgtctgaggagagcctggcctgtgacaaccctggcctgcctgaaaatggctaccagatcctgtacaagaggctgtacctgcctggagagagcctgaccttcatgtgctatgagggctttgagctgatgggagaggtgaccatccgctgcatcctgggccagcccagccactggaatggccccctgcctgtgtgcaaggtgaaccaggacagctttgaacatgccctggaggccgaggccgctgctgagaccagcctggagggcggcaacatggccctggccatcttcatccctgtgctgatcatcagcctgctgctgggcggggcctacatctacatcacccgctgccgctactacagcaacctgcggctgcccctgatgtacagccacccctacagccagatcaccgtggagacagaatttgacaaccccatctatgaaacaggagagacccgggagtatgaggtgtccatctag

SEQ ID NO: 71335 - DNA, 3072 bp, Artificial Sequence
  derived and/or modified sequence
atgcccgccgcccggccccccgccgccggcctgcggggcatcagcttgttccttgccctgctgctggggtctcctgccgcagcactcgaaagggatgcacttccggagggagacgcttctcctctgggaccttacttgctgccgtcgggtgccccggagaggggcagccccggaaaagaacatccggaagagagggtagttaccgctccaccgagtagtagtcaatctgcagaagtactgggtgagttggtactggacggtacagctccttctgcgcatcacgacataccggccctcagtcctttactgccggaggaggcccggccaaagcacgcactgccaccaaaaaagaagcttcccagcctgaaacaggtcaatagcgcgaggaagcagctacgtcctaaagctactagtgcagcaacagtccagagggccggaagccagcccgccagccaaggtctggaccttctctcaagtagcaccgaaaagcccggaccccctggcgatccagaccccattgttgcatctgaggaggcttccgaggttcctctgtggttagacagaaaggagagtgccgtgcccactactcctgccccccttcaaatctcccctttcaccagccagccctatgtggcccacactttacctcagcgacccgaaccgggcgagcctgggcctgatatggcccaagaggctccccaggaagacacctcccctatggcgctaatggacaaaggtgaaaacgaactgacgggctctgcatcggaagagagccaggaaacaacaacttccacaatcatcaccacgaccgtgattacaactgaacaggctcctgctctctgttctgtgtcattctcaaatcccgaaggctacattgactccagcgactatcccctgttgccacttaacaatttcctggaatgtacctacaacgtgactgtttatactggctacggcgtcgagctgcaggtgaaatccgtgaacctctcagacggggagctcttaagcatcagaggcgtcgatggccctacactgacagtgctcgccaatcagactcttctcgtcgaaggccaagtgattcggagtcccacaaataccatcagtgtctatttcaggacatttcaggacgacgggctcggaacatttcaattacactaccaggcgttcatgttgtcttgtaactttccaagaagacccgactccggcgacgtgaccgtgatggatcttcactcaggaggagtggcgcactttcattgtcacctgggatatgaactgcagggcgcaaagatgctcacgtgtatcaatgctagcaagccgcactggagctctcaggagccaatctgctctgccccttgtggaggagctgtccacaatgccactataggtcgagtgctctcaccatcttatcctgaaaataccaacggcagccaattctgtatctggacaatagaagccccagagggccagaaactccacttgcactttgagaggctattactccacgataaagacaggatgaccgtgcacagtggtcagacaaataaaagcgcgctgctgtacgattctcttcagacagagagcgtcccttttgaagggttgttgtcagaaggcaacactatcagaatagaattcacttctgaccaggcccgcgcagcaagcacttttaacataagatttgaggcgttcgagaagggacattgctacgagccatatattcaaaatgggaactttaccacatcggatcctacatataacattggtaccatcgttgaatttacctgtgaccccggccactccttagagcagggtccagctataatcgagtgtattaatgtgagggacccatattggaatgatactgaacctctgtgtcgggcgatgtgcgggggcgaactgagcgccgtcgccggagtcgtgctatctccgaactggcccgagccatatgtggaaggcgaagattgcatctggaaaattcatgttggcgaagagaaacgcatatttctggacatccagttcttgaatctgtccaactctgacattctgactatctacgacggagatgaagttatgcctcatatcttaggccagtaccttgggaactcaggtccacagaaactatattccagtactcccgatcttactattcaattccactccgatccagccggtctcatttttggcaagggacagggatttatcatgaattatatcgaggtctccagaaacgacagctgttccgatttacccgaaatacagaatggctggaaaacgacctcacacaccgagcttgtgcgtggggcacgaataacatatcagtgcgaccctgggtacgacatagtaggctccgatacattaacatgtcagtgggatctgtcctggagcagcgacccccccttctgtgaaaaaattatgtactgtacggatccgggtgaagttgaccactccactcgtttaatctccgatcccgtccttctggtaggaactaccattcagtatacatgcaatccaggttttgtgcttgaagggtccagcctcctaacttgctactcacgcgagactggcaccccaatctggacctcccgtctcccccactgtgtctccgaggagtctttggcctgcgacaaccctggcctaccagaaaatgggtatcagattctctacaagcgcctttacctccccggagagtccctcaccttcatgtgttatgagggtttcgaacttatgggcgaggttaccatccgctgtatcctaggtcagccctcccattggaacggcccgttaccagtttgtaaggttaaccaggatagcttcgagcacgcccttgaagcggaggcagcggccgaaacatcactggaaggaggaaacatggcattagctatttttattccggttcttatcatctccttgctgttggggggtgcgtacatctatatcaccaggtgtcggtactacagcaatctgaggttgcctctgatgtactctcatccatactctcagattactgtggaaaccgagtttgacaatcccatctatgaaactggcgagaccagagagtacgaggtctccatttag

SEQ ID NO: 71336 - DNA, 3072 bp, Artificial Sequence
  derived and/or modified sequence
atgcccgctgctcggccacccgctgccggactgcgcggtatctccctctttcttgctctgctgctgggctctcccgctgctgctctggaaagggacgcactgccagaaggtgatgccagcccgttgggaccctaccttctcccttccggcgctcctgagcgtggttccccaggtaaggagcatccggaggagcgcgtggtgacagcccctcccagctcctcccaatctgccgaagttctaggcgaactggtcctggacggaactgcccctagtgcgcatcatgacattcccgctctgtctcccctcttgcccgaggaggccaggcccaagcacgccctgccacccaagaaaaaattgccctcccttaaacaggtgaattctgccagaaagcagctgcggccaaaagccacttccgccgctactgtgcagagagctggaagccagcctgcctcccagggcctagacctcctttcaagctcaacagaaaagcccggacctccaggtgatccagaccctatcgtggcatcagaagaggcttcagaagttcccctgtggcttgaccggaaggaatccgctgttcccacaactcctgccccactccaaatttctccatttaccagtcagccctacgtggcccacacactccctcaacgccctgaacccggtgagcccggtcccgatatggcacaggaggcccctcaagaagacaccagtcccatggcattgatggacaagggcgaaaacgaacttaccgggagtgccagcgaggagagccaggaaacaactacctccacaattatcacgaccactgttatcacaacagagcaggccccagctctctgctccgtctctttttctaatcctgagggctatatcgactcatcagactaccctctgctgccacttaataattttcttgaatgcacttacaatgtgaccgtgtacacaggttacggagttgaactgcaggtgaagtctgtgaatttaagtgacggagaactgctcagtattagaggggtggatggccctactctgacggtgctggccaatcagaccttgctagtcgaaggtcaggttatcagatcccctaccaacacaatcagcgtgtacttcagaacatttcaggacgatggattgggcacctttcagctccactatcaggccttcatgctatcctgcaattttccgcgtaggcccgacagcggagacgtcacagtgatggacctgcattctggaggagtcgcacacttccactgccacctaggttacgaactccagggagcgaagatgctcacttgtatcaacgcttcaaagccccactggtcaagccaggaacccatctgcagcgccccatgcggcggagccgtgcacaatgccaccatcgggagagtgctgagcccctcctatccagagaacactaatggcagccagttctgcatctggacaatcgaggcgccagaaggccagaaattgcacctgcacttcgagcgattgctcctgcacgataaagatcgaatgacagtccattctggccaaactaacaagtctgctctgctctatgattctctgcaaacagagagtgttccctttgagggtctgctgtccgagggaaataccattcgcattgagtttaccagtgatcaggcccgagctgcttcgactttcaacattcgatttgaggcattcgaaaagggccattgctatgaaccctatatacagaatggtaacttcacaacttctgaccctacctacaatattgggactatcgtcgagtttacctgcgacccaggacacagccttgagcaggggccagccataatcgaatgcatcaatgtcagagatccctactggaatgacacggagccactgtgtcgtgcgatgtgcggtggagaactgtctgccgttgctggcgtggttctgagccccaattggccagagccatatgtggagggagaggactgcatatggaaaatacacgtgggagaggagaaacggatctttctggatatacagttcttgaacctctctaacagtgacatcctgaccatatacgacggggatgaggtaatgccccacattcttggccaatacttggggaacagtggccctcaaaagctgtattctagtacacctgatctcacgatccagttccacagcgacccagccggattgatcttcggaaaaggccagggttttataatgaattacatcgaggtgtccaggaacgatagttgtagtgatctgcctgagatacagaacggctggaagacaacaagtcacactgaactcgtgcgcggtgcacgcatcacctaccagtgcgatcctgggtacgatatcgtgggcagtgacaccctgacatgccagtgggatttgagttggtcctctgaccctcccttctgcgaaaaaattatgtactgcactgacccaggcgaggtggaccactccactcgactgatctccgaccctgtgctcctggttggtacaactatacagtacacctgtaacccgggttttgtgctcgaaggttcctccctgctcacctgctattctagggagaccgggacaccaatctggacctcacggcttccccattgcgtttctgaggagtccctcgcctgtgataatccaggcctgcccgagaacgggtatcagatcctgtacaagcgactgtacctccccggagaaagcctgactttcatgtgttacgaaggattcgagctcatgggcgaagtgacaatcaggtgtattctgggccaaccttcccactggaatggcccattaccggtatgcaaggttaaccaagattcctttgagcatgcactcgaggccgaagcggcagcagaaacctcactagagggcggaaatatggctttggcgattttcattcccgtattgatcatatctttacttttgggaggagcctacatctatattacccggtgccgctactactcaaacctgaggctcccgctgatgtatagccacccttactctcaaattactgtggagacggagttcgacaaccctatctatgaaaccggggaaacccgggagtacgaggtgtcaatttag

SEQ ID NO: 71337 - DNA, 3444 bp, Artificial Sequence
  derived and/or modified sequence
gcgcccggcgcagctcggccagagcgaccgcggggctgagcgcgcgtccgcccagggggctccggaagctgccccggcccgcggcctcctccctcgctcccgcttcccctttctcgctcaccgccgccctccttccccagctccctcgccgtccgcccgccccacagccagcggctccgcgccccctgcagccacgatgcccgcggcccggccgcccgccgcgggactccgcgggatctcgctgttcctcgctctgctcctggggagcccggcggcagcgctggagcgagatgctcttcccgagggagatgctagccctttgggtccttacctcctgccctcaggagccccggagagaggcagtcctggcaaagagcaccctgaagagagagtggtaacagcgccccccagttcctcacagtcggcggaagtgctgggcgagctggtgctggatgggaccgcaccctctgcacatcacgacatcccagccctgtcaccgctgcttccagaggaggcccgccccaagcacgccttgccccccaagaagaaactgccttcgctcaagcaggtgaactctgccaggaagcagctgaggcccaaggccacctccgcagccactgtccaaagggcagggtcccagccagcgtcccagggcctagatctcctctcctcctccacggagaagcctggcccaccgggggacccggaccccatcgtggcctccgaggaggcatcagaagtgcccctttggctggaccgaaaggagagtgcggtccctacaacacccgcacccctgcaaatctcccccttcacttcgcagccctatgtggcccacacactcccccagaggccagaacccggggagcctgggcctgacatggcccaggaggccccccaggaggacaccagccccatggccctgatggacaaaggtgagaatgagctgactgggtcagcctcagaggagagccaggagaccactacctccaccattatcaccaccacggtcatcaccaccgagcaggcaccagctctctgcagtgtgagcttctccaatcctgaggggtacattgactccagcgactacccactgctgcccctcaacaactttctggagtgcacatacaacgtgacagtctacactggctatggggtggagctccaggtgaagagtgtgaacctgtccgatggggaactgctctccatccgcggggtggacggccctaccctgaccgtcctggccaaccagacactcctggtggaggggcaggtaatccgaagccccaccaacaccatctccgtctacttccggaccttccaggacgacggccttgggaccttccagcttcactaccaggccttcatgctgagctgcaactttccccgccggcctgactctggggatgtcacggtgatggacctgcactcaggtggggtggcccactttcactgccacctgggctatgagctccagggcgctaagatgctgacatgcatcaatgcctccaagccgcactggagcagccaggagcccatctgctcagctccttgtggaggggcagtgcacaatgccaccatcggccgcgtcctctccccaagttaccctgaaaacacaaatgggagccaattctgcatctggacgattgaagctccagagggccagaagctgcacctgcactttgagaggctgttgctgcatgacaaggacaggatgacggttcacagcgggcagaccaacaagtcagctcttctctacgactcccttcaaaccgagagtgtcccttttgagggcctgctgagcgaaggcaacaccatccgcatcgagttcacgtccgaccaggcccgggcggcctccaccttcaacatccgatttgaagcgtttgagaaaggccactgctatgagccctacatccagaatgggaacttcactacatccgacccgacctataacattgggactatagtggagttcacctgcgaccccggccactccctggagcagggcccggccatcatcgaatgcatcaatgtgcgggacccatactggaatgacacagagcccctgtgcagagccatgtgtggtggggagctctctgctgtggctggggtggtattgtccccaaactggcccgagccctacgtggaaggtgaagattgtatctggaagatccacgtgggagaagagaaacggatcttcttagatatccagttcctgaatctgagcaacagtgacatcttgaccatctacgatggcgacgaggtcatgccccacatcttggggcagtaccttgggaacagtggcccccagaaactgtactcctccacgccagacttaaccatccagttccattcggaccctgctggcctcatctttggaaagggccagggatttatcatgaactacatagaggtatcaaggaatgactcctgctcggatttacccgagatccagaatggctggaaaaccacttctcacacggagttggtgcggggagccagaatcacctaccagtgtgaccccggctatgacatcgtggggagtgacaccctcacctgccagtgggacctcagctggagcagcgaccccccattttgtgagaaaattatgtactgcaccgaccccggagaggtggatcactcgacccgcttaatttcggatcctgtgctgctggtggggaccaccatccaatacacctgcaaccccggttttgtgcttgaagggagttctcttctgacctgctacagccgtgaaacagggactcccatctggacgtctcgcctgccccactgcgtttcggaggagtccctggcatgtgacaacccagggctgcctgaaaatggataccaaatcctgtacaagcgactctacctgccaggagagtccctcaccttcatgtgctacgaaggctttgagctcatgggtgaagtgaccatccgctgcatcctgggacagccatcccactggaacgggcccctgcccgtgtgtaaagttaatcaagacagttttgaacatgctttagaagcagaagcggcagcagagacgtcgctggaaggggggaacatggccctggctatcttcatcccggtcctcatcatctccttactgctgggaggagcctacatttacatcacaagatgtcgctactattccaacctccgcctgcctctgatgtactcccacccctacagccagatcaccgtggaaaccgagtttgacaaccccatttacgagacaggggaaaccagagagtatgaggtttctatctaaagagagctacacttgagaaggggacttgtgaactcaaccacaatctcctcgagacattcatccagagaccatgtggcacttgattgaaaccccagaatgtcgactgtcttttgtttagactctttatcaaaggtttactgttttcttccctgtatttattatatttaaaagtgaaa

SEQ ID NO: 71338 - DNA, 3072 bp, Artificial Sequence
  derived and/or modified sequence
atgcccgccgccagaccccccgccgccggcctgagaggcatcagcctgttcctggccctgctgctgggcagccccgccgccgccctggagagagacgccctgcccgagggcgacgccagccccctgggcccctacctgctgcccagcggcgcccccgagagaggcagccccggcaaggagcaccccgaggagagagtggtgaccgccccccccagcagcagccagagcgccgaggtgctgggcgagctggtgctggacggcaccgcccccagcgcccaccacgacatccccgccctgagccccctgctgcccgaggaggccagacccaagcacgccctgccccccaagaagaagctgcccagcctgaagcaggtgaacagcgccagaaagcagctgagacccaaggccaccagcgccgccaccgtgcagagagccggcagccagcccgccagccagggcctggacctgctgagcagcagcaccgagaagcccggcccccccggcgaccccgaccccatcgtggccagcgaggaggccagcgaggtgcccctgtggctggacagaaaggagagcgccgtgcccaccacccccgcccccctgcagatcagccccttcaccagccagccctacgtggcccacaccctgccccagagacccgagcccggcgagcccggccccgacatggcccaggaggccccccaggaggacaccagccccatggccctgatggacaagggcgagaacgagctgaccggcagcgccagcgaggagagccaggagaccaccaccagcaccatcatcaccaccaccgtgatcaccaccgagcaggcccccgccctgtgcagcgtgagcttcagcaaccccgagggctacatcgacagcagcgactaccccctgctgcccctgaacaacttcctggagtgcacctacaacgtgaccgtgtacaccggctacggcgtggagctgcaggtgaagagcgtgaacctgagcgacggcgagctgctgagcatcagaggcgtggacggccccaccctgaccgtgctggccaaccagaccctgctggtggagggccaggtgatcagaagccccaccaacaccatcagcgtgtacttcagaaccttccaggacgacggcctgggcaccttccagctgcactaccaggccttcatgctgagctgcaacttccccagaagacccgacagcggcgacgtgaccgtgatggacctgcacagcggcggcgtggcccacttccactgccacctgggctacgagctgcagggcgccaagatgctgacctgcatcaacgccagcaagccccactggagcagccaggagcccatctgcagcgccccctgcggcggcgccgtgcacaacgccaccatcggcagagtgctgagccccagctaccccgagaacaccaacggcagccagttctgcatctggaccatcgaggcccccgagggccagaagctgcacctgcacttcgagagactgctgctgcacgacaaggacagaatgaccgtgcacagcggccagaccaacaagagcgccctgctgtacgacagcctgcagaccgagagcgtgcccttcgagggcctgctgagcgagggcaacaccatcagaatcgagttcaccagcgaccaggccagagccgccagcaccttcaacatcagattcgaggccttcgagaagggccactgctacgagccctacatccagaacggcaacttcaccaccagcgaccccacctacaacatcggcaccatcgtggagttcacctgcgaccccggccacagcctggagcagggccccgccatcatcgagtgcatcaacgtgagagacccctactggaacgacaccgagcccctgtgcagagccatgtgcggcggcgagctgagcgccgtggccggcgtggtgctgagccccaactggcccgagccctacgtggagggcgaggactgcatctggaagatccacgtgggcgaggagaagagaatcttcctggacatccagttcctgaacctgagcaacagcgacatcctgaccatctacgacggcgacgaggtgatgccccacatcctgggccagtacctgggcaacagcggcccccagaagctgtacagcagcacccccgacctgaccatccagttccacagcgaccccgccggcctgatcttcggcaagggccagggcttcatcatgaactacatcgaggtgagcagaaacgacagctgcagcgacctgcccgagatccagaacggctggaagaccaccagccacaccgagctggtgagaggcgccagaatcacctaccagtgcgaccccggctacgacatcgtgggcagcgacaccctgacctgccagtgggacctgagctggagcagcgacccccccttctgcgagaagatcatgtactgcaccgaccccggcgaggtggaccacagcaccagactgatcagcgaccccgtgctgctggtgggcaccaccatccagtacacctgcaaccccggcttcgtgctggagggcagcagcctgctgacctgctacagcagagagaccggcacccccatctggaccagcagactgccccactgcgtgagcgaggagagcctggcctgcgacaaccccggcctgcccgagaacggctaccagatcctgtacaagagactgtacctgcccggcgagagcctgaccttcatgtgctacgagggcttcgagctgatgggcgaggtgaccatcagatgcatcctgggccagcccagccactggaacggccccctgcccgtgtgcaaggtgaaccaggacagcttcgagcacgccctggaggccgaggccgccgccgagaccagcctggagggcggcaacatggccctggccatcttcatccccgtgctgatcatcagcctgctgctgggcggcgcctacatctacatcaccagatgcagatactacagcaacctgagactgcccctgatgtacagccacccctacagccagatcaccgtggagaccgagttcgacaaccccatctacgagaccggcgagaccagagagtacgaggtgagcatctag

SEQ ID NO: 71339 - protein, 1013 aa, Artificial Sequence
  derived and/or modified sequence
MPAARPPAAGLRGISLFLALLLGSPAAALERDALPEGDASPLGPYLLPSGAPERGSPGKEHPEERVVTAPPSSSQSAEVLGELVLDGTAPSAHHDIPALSPLLPEEARPKHALPPKKKLPSLKQVNSARKQLRPKATSAATVQRAGSQPASQGLDLLSSSTEKPGPPGDPDPIVASEEASEVPLWLDRKESAVPTTPAPLQISPFTSQPYVAHTLPQRPEPGEPGPDMAQEAPQEDTSPMALMDKGENELTGSASEESQETTTSTIITTTVITTEQAPALCSVSFSNPEGYIDSSDYPLLPLNNFLECTYNVTVYTGYGVELQVKSVNLSDGELLSIRGVDGPTLTVLANQTLLVEGQVIRSPTNTISVYFRTFQDDGLGTFQLHYQAFMLSCNFPRRPDSGDVTVMDLHSGGVAHFHCHLGYELQGAKMLTCINASKPHWSSQEPICSAPCGGAVHNATIGRVLSPSYPENTNGSQFCIWTIEAPEGQKLHLHFERLLLHDKDRMTVHSGQTNKSALLYDSLQTESVPFEGLLSEGNTIRIEFTSDQARAASTFNIRFEAFEKGHCYEPYIQNGNFTTSDPTYNIGTIVEFTCDPGHSLEQGPAIIECINVRDPYWNDTEPLCRAMCGGELSAVAGVVLSPNWPEPYVEGEDCIWKIHVGEEKRIFLDIQFLNLSNSDILTIYDGDEVMPHILGQYLGNSGPQKLYSSTPDLTIQFHSDPAGLIFGKGQGFIMNYIEVSRNDSCSDLPEIQNGWKTTSHTELVRGARITYQCDPGYDIVGSDTLTCQWDLSWSSDPPFCEKIMYCTDPGEVDHSTRLISDPVLLVGTTIQYTCNPGFVLEGSSLLTCYSRETGTPIWTSRLPHCVSEESLACDNPGLPENGYQILYKRLYLPGESLTFMCYEGFELMGEVTIRCILGQPSHWNGPLPVCKVAEAAAETSLEGGNMALAIFIPVLIISLLLGGAYIYITRCRYYSNLRLPLMYSHPYSQITVETEFDNPIYETGETREYEVSI

SEQ ID NO: 71340 - DNA, 3042 bp, Artificial Sequence
  derived and/or modified sequence
atgcccgcagcaaggcctcccgcagccggacttagaggcattagtttgtttcttgccctcctactcgggtccccagcagcggcactggagagggatgccctgcctgagggggacgcttcacccctgggaccttatctgctgcctagcggcgcccccgaacgcgggtctcctgggaaagaacatcccgaggaacgggtcgtcacggctccacctagttcatcccagtcagctgaagtgctgggcgagctggtgctggatgggactgccccatcagcacatcatgatatcccggcactctctccactgctgccggaggaagcccgcccaaaacatgccctccctccgaagaagaagctgccatccctcaaacaggtgaattccgcccgaaagcaattgaggccaaaggccacttctgctgccacggtacagagggcaggttcacagcccgcctcccagggattagacctgctgtcctcctctacggagaaacccggaccacccggggacccagacccaatagtggcctctgaggaagcctcagaggttcccctgtggctggatagaaaggagtcagctgtccccacaactccagcccctttacagatatctccatttaccagccagccatacgtggcccatactcttccccaacgcccagaacctggcgagcctggaccggacatggcccaggaggcccctcaggaggacactagccctatggccctgatggataaaggcgagaacgaacttaccggaagcgcatccgaggaatcacaagaaaccaccacctcaacaatcatcacaaccaccgtgattacaaccgagcaggcaccagccctgtgtagtgtcagttttagcaaccccgagggatatattgattcctccgactacccactgctgcctctcaacaactttctggaatgcacatataacgtgacggtttatactggatatggcgttgagttgcaggtcaaatcagtgaacctttcagatggcgaactgttatccatccgtggtgtggatggccccactctaacagttctggccaaccaaacactcctggtggaagggcaggtcatcaggtctcctactaacacgatcagtgtgtacttcaggacattccaagacgatggattgggcactttccaattgcattaccaggctttcatgcttagttgtaactttccaagacgcccagactctggagatgtgacggtgatggatctacatagcggcggtgttgcacacttccattgccatctcggctacgaacttcagggcgccaagatgctcacttgtatcaacgcaagcaagccccactggagtagccaggaaccgatctgttcagcaccttgcggcggcgctgtccacaatgcgacaatcgggagagtattgtcccctagctatccagagaacaccaatggatctcagttttgtatttggactattgaagcgcccgaaggacaaaagctgcatctgcacttcgaaagactcctgctacacgataaggacaggatgactgtgcacagcggtcagacaaataagagcgctctgctgtatgacagtctacaaactgaaagtgtgccgttcgaggggctcttgtcagaagggaacacaataagaattgaatttacgtctgaccaggcccgagctgcgagcacatttaacattcggtttgaggcgttcgagaagggtcactgttacgagccctacattcaaaatggaaactttacaacctccgaccccacctataacatcggaactatagtagaattcacatgcgatcccggacatagcctggagcagggaccagcgattatagagtgcataaacgtgcgggatccttactggaatgatacagagcctctgtgtagagccatgtgcggtggggagctatctgcagtggccggtgtggtgctgtcccccaactggcccgagccatatgtggagggggaggactgtatttggaagatccacgtgggagaggagaagaggatctttctggatatacagtttttaaacttgagcaacagtgatatcctgaccatctacgacggtgatgaggtcatgccacacattctcggccagtatttagggaacagcgggccacagaagctttacagctcgacacctgatttgaccattcagttccactcagaccctgccgggcttatctttggtaaggggcagggatttattatgaactatatcgaagtgtctcgaaacgacagctgtagcgatctgcccgagattcagaatggctggaaaacaaccagtcacacggaactggtgaggggagcaaggattacctaccagtgcgacccagggtatgatattgtgggtagcgatactctgacttgccagtgggacctctcttggagtagcgatcccccattctgtgaaaagatcatgtactgtacagatccaggtgaagtggatcatagtacacggctgataagtgatccagtgttgctcgtcggcacgactattcagtacacctgtaatccaggtttcgtcctggagggcagttcactgttgacctgctacagccgagaaacaggcacccccatctggacttctcggctcccccattgtgtgagcgaagaatccttggcctgtgacaaccctggtctgccagagaacggataccagatcttgtacaaacgcctctacttgccaggagagtcccttacgttcatgtgttacgagggctttgagctgatgggggaggttactatcagatgtatcctggggcaaccatctcattggaacggtcccctaccagtatgcaaggttgctgaggccgccgctgagacgtcactcgagggcggtaacatggccctggctatatttatacccgtgttgatcataagtctgcttctcggcggcgcttacatatacataacacgttgcagatactattccaatttgcggctgcccctgatgtacagtcacccatattctcagatcaccgtggaaaccgagtttgataaccctatttatgaaacaggcgaaacacgagaatatgaggtgagtatctag

SEQ ID NO: 71341 - DNA, 3042 bp, Artificial Sequence
  derived and/or modified sequence
atgcctgctgcccggcccccagctgctggcctgcggggcatcagcctcttcctggccctgctgctgggcagccctgctgctgccctggagagagatgccctgcctgaaggagatgccagccccctgggcccctacctgctgcccagcggggcccctgagcggggcagccctgggaaggagcaccctgaggagcgggtggtgacagccccacccagcagcagccagagcgctgaggtgctgggggagctggtgctggatggaacagcccccagcgcccaccacgacatcccagccctgagccccctgctgcctgaggaggcccggcccaagcacgccctgccccccaagaagaagctgcccagcctgaagcaggtgaacagcgccaggaagcagctgcggcccaaggccaccagcgctgccaccgtgcagagagctggcagccagcctgccagccagggcctggacctgctgagcagcagcacagagaagccaggccccccaggggaccctgaccccatcgtggccagcgaggaggccagcgaggtgcccctgtggctggacaggaaggagagcgctgtgcccaccaccccagcccccctgcagatcagccccttcaccagccagccctacgtggcccacaccctgccccagaggcctgagcctggagagcccggccctgacatggcccaggaggccccccaggaggacaccagccccatggccctgatggacaagggagaaaatgagctgactggaagtgccagcgaggagagccaggagaccaccaccagcaccatcatcaccaccaccgtcatcaccacagagcaggccccagccctgtgcagcgtgtccttcagcaaccctgagggctacatcgacagcagtgactaccccctgctgcccctgaacaacttcctggagtgcacctacaacgtgacagtgtacacaggctacggcgtggagctgcaggtgaagtctgtgaacctgagtgatggagagctgctgagcatccggggcgtggatggccccaccctgactgtgctggccaaccagaccctgctggtggagggccaggtgatccgcagccccaccaacaccatctctgtgtacttccgcaccttccaggatgatggcctgggcaccttccagctgcactaccaggccttcatgctgagctgcaacttccccaggaggccagattctggagatgtgacagtgatggacctgcacagcggaggagtggcccacttccactgccacctgggctatgagctgcagggcgccaagatgctgacctgcatcaatgccagcaagccccactggagcagccaggagcccatctgcagcgccccctgtggcggcgctgtgcacaatgccaccatcggccgggtgctgagccccagctacccagagaacaccaacggcagccagttctgcatctggaccatcgaggcccctgagggccagaagctgcacctgcactttgagcggctgctgctgcatgacaaggacaggatgacagtgcacagcggccagaccaacaagagcgccctgctgtatgacagcctgcagacagaatctgtgccctttgagggcctgctgtctgagggcaacaccatccgcatcgagttcaccagtgaccaggcccgggccgccagcaccttcaacatccgctttgaggcctttgagaagggccactgctatgagccctacatccagaatggaaacttcaccaccagtgaccccacctacaacatcggcaccatcgtggagttcacctgtgaccccggccacagcctggagcagggccctgccatcatcgagtgcatcaacgtgcgggacccctactggaatgacacagagcccctgtgccgggccatgtgtggcggggagctgtctgctgtggccggcgtggtgctgagccccaactggccagagccctacgtggagggggaggactgcatctggaagatccacgtgggggaggagaagaggatcttcctggacatccagttcctgaacctgagcaacagcgacatcctgaccatctatgatggagatgaggtgatgccccacatcctgggccagtacctgggcaacagcggcccccagaagctgtacagcagcaccccagacctgaccatccagttccacagcgaccctgctggcctcatctttgggaagggccagggcttcatcatgaactacatcgaggtgtccagaaatgacagctgcagcgacctgcctgagatccagaatggctggaagaccaccagccacacagagctggtgcggggggcccgcatcacctaccagtgtgaccccggctatgacatcgtgggcagtgacaccctgacctgccagtgggacctgtcctggagcagtgacccccccttctgtgagaagatcatgtactgcacagatcctggagaggtggaccacagcaccaggctcatcagtgaccctgtgctgctggtgggcaccaccatccagtacacctgcaaccctggctttgtgctggagggcagcagcctgctgacctgctacagccgggagaccggcacccccatctggaccagccggctgccccactgtgtgtctgaggagagcctggcctgtgacaaccctggcctgcctgaaaatggctaccagatcctgtacaagaggctgtacctgcctggagagagcctgaccttcatgtgctatgagggctttgagctgatgggagaggtgaccatccgctgcatcctgggccagcccagccactggaatggccccctgcctgtgtgcaaggtggccgaggccgctgctgagaccagcctggagggcggcaacatggccctggccatcttcatccctgtgctgatcatcagcctgctgctgggcggggcctacatctacatcacccgctgccgctactacagcaacctgcggctgcccctgatgtacagccacccctacagccagatcaccgtggagacagaatttgacaaccccatctatgaaacaggagagacccgggagtatgaggtgtccatctag

SEQ ID NO: 71342 - DNA, 3042 bp, Artificial Sequence
  derived and/or modified sequence
atgcccgccgcccggccccccgccgccggcctgcggggcatcagccttttcttggccttgctgctgggatcccctgctgcagctctcgaacgcgacgctctgcctgagggagatgcgagcccattaggcccttacctgttgcctagcggggctccagagagggggtcacccggcaaggagcacccagaggagcgtgtcgtgaccgcacctccatcaagcagtcagagcgcagaagtgctgggcgaactggtcttagatggtacagctccatctgcccatcatgacattcccgctctgagcccactgttaccagaggaggcccggcctaaacacgcacttccccccaagaagaagcttccatccttgaagcaggtcaacagcgcacgaaagcagctgcgacctaaggctacttccgccgccacagtacagcgcgccggctcacagccagcaagccaggggctggacctgctcagttctagcaccgagaagccaggacctcccggcgatcctgatcccatcgtggcgagcgaggaggcgtcagaggttccactgtggctggaccgcaaagaaagtgccgtccctacaacaccagccccactgcagataagcccattcaccagtcaaccatatgtggcgcacacactgcctcagaggccagaaccgggagagccaggacctgacatggcacaagaagccccccaggaggatacctcaccaatggcgctcatggataagggggaaaatgaactgacaggcagtgcatccgaggaatcccaggaaactaccaccagcacaatcataacaactacagtgataacgaccgagcaggcgccggcgctatgctccgtgtccttctctaaccccgagggttacattgattcttctgactacccccttctgcccctgaacaactttctggagtgtacctataacgttactgtatataccggttatggcgtggaactacaagtcaaaagcgttaacctctccgacggcgaactcctgagcattcggggagtggacggacctacacttaccgtcctcgcaaaccagacattattggtcgagggacaggtcattcgatctcctacaaacactatctccgtgtattttcgaacctttcaggacgatggtttaggcactttccagctgcactaccaggcatttatgctttcgtgcaatttcccaaggagacctgattcaggagatgttactgtaatggatctacactcaggcggcgtggcccattttcattgtcatctgggatacgaattacaaggagccaagatgctcacctgcattaacgcctctaagccccattggtctagccaagagccaatctgctcagccccttgtggcggcgctgttcacaatgctacaatcggtagagttctctccccctcttaccccgaaaacacaaacgggtcccagttttgtatctggaccattgaagcaccagagggacagaaactgcacctgcacttcgaacggttgttgctacacgacaaggatcgcatgaccgtgcactccggccagacaaataagagtgccctgttgtatgattcactgcagactgagtccgttccattcgaagggctgctgagcgagggtaacacaattagaatcgaattcacctcagatcaagcgagggccgcatctacttttaacattcgatttgaggccttcgagaagggtcactgttacgaaccgtacatccaaaacggcaactttaccaccagtgaccctacctacaatattggcactatcgtggagttcacatgtgatccgggccattccttggaacagggtcccgcaatcatcgaatgtatcaacgtgcgggatccttattggaacgacacggaacccctgtgtagagccatgtgcggaggggagctatcagccgtcgctggtgtggtactatcaccaaactggcccgaaccttacgtggaaggggaagactgcatctggaaaatacatgttggcgaggagaagcggattttcctggatatccagtttctgaatctctctaactccgatatattgacaatctacgatggagatgaggtgatgccacacatcctggggcagtacctgggcaactccggccctcagaaactgtacagtagtactccggatttgactatccagttccactcggatccggccggcctcatatttgggaagggccagggcttcataatgaattatatcgaagttagtaggaatgattcctgcagtgacttgcccgagattcagaacgggtggaagacgacctcccatacagaactggtcagaggggcccgaatcacctaccagtgcgaccctgggtacgatattgtcggctctgacactttgacgtgccaatgggatctgtcctggagttcggacccaccgttttgcgaaaaaataatgtattgtacagaccccggagaggtggaccattcgacccgattgatttctgatccagtgctcctggtcgggacgaccatccagtatacatgtaaccctggcttcgtgctggagggctcttcattgctcacatgttactcaagggaaactggaacccccatctggacatctagactgccccattgtgtgtctgaggagtcacttgcctgtgacaatcctgggctgccggagaatggctaccagatattgtataaacggttgtaccttcctggagagagcctgacattcatgtgttatgagggctttgagttgatgggcgaagtgaccatcagatgtattcttgggcagccatcccactggaacggcccattgcccgtgtgcaaagtcgcagaggctgccgccgaaactagcttagaaggcggcaacatggccttggccatttttatccccgttttgatcatctccctgctcttggggggggcctatatatatatcactaggtgccgctactacagcaatttaagacttcctctgatgtatagccacccttactcacagattaccgtggagaccgaatttgacaatccaatctacgagactggtgagacaagagagtatgaggtgagtatatag

SEQ ID NO: 71343 - DNA, 3042 bp, Artificial Sequence
  derived and/or modified sequence
atgcctgccgcacgacctcctgccgcagggctacgtggtatctctctgtttcttgcgcttttactggggtctcccgctgcagctctcgagcgggacgcgctgcccgagggcgatgcctcacctctggggccatacctgctgccctcgggcgcaccagagcgcggatcccccggaaaagagcaccccgaagagcgcgtggtgaccgccccaccttccagttctcagagtgcggaagtgctcggggagctcgttttggatggaacggccccatcagctcaccatgacattcctgctctgtcccccctgcttcctgaagaagcacgaccaaaacacgctctaccgcctaagaagaagctcccttcattgaaacaggtgaactccgcgaggaaacagctgcggcctaaggccacttccgcagccacagtgcagcgggctggcagccagccagcttcccaaggtctggatcttctgagcagctctacagaaaagccgggaccccctggggacccagatccgattgtcgctagtgaggaagcatctgaggtgcccctgtggctggatcggaaggaatcagcagtccccacgaccccggcacctctccagataagtcccttcacgtcacagccctatgtcgcccatactttacctcagcggccagagcccggagagcccggaccggatatggcccaggaggctcctcaggaagacacttccccaatggcactcatggacaaaggagaaaacgagcttacagggtcagcttcagaggaatctcaggaaactaccaccagcaccattatcaccacaacagtgatcacgaccgagcaggctcctgccctgtgcagcgtttcttttagcaaccctgagggatatatcgacagctctgattaccctttgctgcccttgaataatttcttggagtgcacatataatgttacagtgtacaccgggtacggagtggaactgcaggtcaaatcagtgaatctaagcgatggagaactgttgagcatcaggggagttgacggccctacactcactgttctggctaaccagacactactggtcgagggccaagttataagatctcccacaaacactatctctgtatatttccggacttttcaagacgacgggttgggcaccttccagcttcactatcaggcatttatgctgagttgtaacttccctagacgcccagatagcggggacgtcaccgttatggacctgcatagcgggggagtggcccatttccactgccacttggggtatgagctccagggggcaaaaatgctgacatgcatcaatgcgtctaagccccactggagctcgcaggaacctatctgcagcgcgccatgtgggggtgcagtgcacaatgccacaattggtagagttctcagcccatcttatccagaaaataccaacgggtcccagttttgcatctggacgatcgaggctccggaggggcaaaagcttcatctgcactttgaacggctgttgttgcacgataaggaccgtatgacagtccactctggccagactaacaaatcggcgcttctgtatgactccctgcagactgagtcagtccccttcgaaggactgctgtccgagggcaacactataaggatcgagtttaccagcgaccaggctcgagccgcttccacctttaatatcagatttgaagccttcgaaaagggtcactgttacgaaccatacatccagaacgggaatttcaccacaagcgaccccacatacaacatcggcacgatagtggaattcacatgcgaccccggtcactcactggagcaaggtcctgcgatcatcgaatgtatcaatgttcgggacccttactggaacgatacggagcccctctgtagggcaatgtgcggcggtgagctctccgccgtcgccggagtggtcttgtcacccaattggcccgaaccatacgttgagggggaagattgtatatggaagatccacgtaggggaagagaagagaatttttctcgatattcagttcctcaacttatccaacagtgatatcctgactatctatgacggggatgaggttatgccgcacattcttggacagtatttaggaaattcaggtccacagaagttgtactccagcacgcccgatttaactatccagttccacagcgatccagccggtcttatctttggaaagggacagggcttcataatgaattacattgaggtctctcggaacgactcgtgtagcgatctgcctgaaattcaaaatgggtggaaaacaacttcacatactgaattagtgcgcggagctagaatcacgtatcagtgcgatccaggctatgacatcgtcgggtcagacactttaacctgccaatgggatctctcctggagttcggatcctccgttttgtgagaagatcatgtactgtacggatcccggtgaggtggaccattccaccaggctgatctctgatcctgtgttgctcgtcggtacaactatccagtacacctgcaatccaggatttgttctcgagggatcctccctgctcacctgttattctcgcgagaccggcactccaatttggacgagccgcctccctcattgcgtctcagaggagtctctggcttgcgataaccctgggcttccagagaacggctatcagatcctctacaaaaggctgtatctgcctggagaaagtctaacttttatgtgctatgagggatttgagctaatgggcgaggtaacgatacgttgtatactgggacaacccagtcattggaacggccctttgccggtgtgcaaggtggctgaggccgcagcagaaactagtctggagggaggaaacatggcgcttgctatctttattccagtgctgatcatctccctgctgctggggggagcatacatctacatcacgaggtgtagatattatagtaatttaaggttgcctctgatgtactcacatccgtacagccaaatcacagtggagactgaattcgacaatccaatatatgaaacgggtgaaacccgcgaatacgaggtctccatttag

SEQ ID NO: 71344 - DNA, 6532 bp, Artificial Sequence
  derived and/or modified sequence
gcgcccggcgcagctcggccagagcgaccgcggggctgagcgcgcgtccgcccagggggctccggaagctgccccggcccgcggcctcctccctcgctcccgcttcccctttctcgctcaccgccgccctccttccccagctccctcgccgtccgcccgccccacagccagcggctccgcgccccctgcagccacgatgcccgcggcccggccgcccgccgcgggactccgcgggatctcgctgttcctcgctctgctcctggggagcccggcggcagcgctggagcgagatgctcttcccgagggagatgctagccctttgggtccttacctcctgccctcaggagccccggagagaggcagtcctggcaaagagcaccctgaagagagagtggtaacagcgccccccagttcctcacagtcggcggaagtgctgggcgagctggtgctggatgggaccgcaccctctgcacatcacgacatcccagccctgtcaccgctgcttccagaggaggcccgccccaagcacgccttgccccccaagaagaaactgccttcgctcaagcaggtgaactctgccaggaagcagctgaggcccaaggccacctccgcagccactgtccaaagggcagggtcccagccagcgtcccagggcctagatctcctctcctcctccacggagaagcctggcccaccgggggacccggaccccatcgtggcctccgaggaggcatcagaagtgcccctttggctggaccgaaaggagagtgcggtccctacaacacccgcacccctgcaaatctcccccttcacttcgcagccctatgtggcccacacactcccccagaggccagaacccggggagcctgggcctgacatggcccaggaggccccccaggaggacaccagccccatggccctgatggacaaaggtgagaatgagctgactgggtcagcctcagaggagagccaggagaccactacctccaccattatcaccaccacggtcatcaccaccgagcaggcaccagctctctgcagtgtgagcttctccaatcctgaggggtacattgactccagcgactacccactgctgcccctcaacaactttctggagtgcacatacaacgtgacagtctacactggctatggggtggagctccaggtgaagagtgtgaacctgtccgatggggaactgctctccatccgcggggtggacggccctaccctgaccgtcctggccaaccagacactcctggtggaggggcaggtaatccgaagccccaccaacaccatctccgtctacttccggaccttccaggacgacggccttgggaccttccagcttcactaccaggccttcatgctgagctgcaactttccccgccggcctgactctggggatgtcacggtgatggacctgcactcaggtggggtggcccactttcactgccacctgggctatgagctccagggcgctaagatgctgacatgcatcaatgcctccaagccgcactggagcagccaggagcccatctgctcagctccttgtggaggggcagtgcacaatgccaccatcggccgcgtcctctccccaagttaccctgaaaacacaaatgggagccaattctgcatctggacgattgaagctccagagggccagaagctgcacctgcactttgagaggctgttgctgcatgacaaggacaggatgacggttcacagcgggcagaccaacaagtcagctcttctctacgactcccttcaaaccgagagtgtcccttttgagggcctgctgagcgaaggcaacaccatccgcatcgagttcacgtccgaccaggcccgggcggcctccaccttcaacatccgatttgaagcgtttgagaaaggccactgctatgagccctacatccagaatgggaacttcactacatccgacccgacctataacattgggactatagtggagttcacctgcgaccccggccactccctggagcagggcccggccatcatcgaatgcatcaatgtgcgggacccatactggaatgacacagagcccctgtgcagagccatgtgtggtggggagctctctgctgtggctggggtggtattgtccccaaactggcccgagccctacgtggaaggtgaagattgtatctggaagatccacgtgggagaagagaaacggatcttcttagatatccagttcctgaatctgagcaacagtgacatcttgaccatctacgatggcgacgaggtcatgccccacatcttggggcagtaccttgggaacagtggcccccagaaactgtactcctccacgccagacttaaccatccagttccattcggaccctgctggcctcatctttggaaagggccagggatttatcatgaactacatagaggtatcaaggaatgactcctgctcggatttacccgagatccagaatggctggaaaaccacttctcacacggagttggtgcggggagccagaatcacctaccagtgtgaccccggctatgacatcgtggggagtgacaccctcacctgccagtgggacctcagctggagcagcgaccccccattttgtgagaaaattatgtactgcaccgaccccggagaggtggatcactcgacccgcttaatttcggatcctgtgctgctggtggggaccaccatccaatacacctgcaaccccggttttgtgcttgaagggagttctcttctgacctgctacagccgtgaaacagggactcccatctggacgtctcgcctgccccactgcgtttcggaggagtccctggcatgtgacaacccagggctgcctgaaaatggataccaaatcctgtacaagcgactctacctgccaggagagtccctcaccttcatgtgctacgaaggctttgagctcatgggtgaagtgaccatccgctgcatcctgggacagccatcccactggaacgggcccctgcccgtgtgtaaagtagcagaagcggcagcagagacgtcgctggaaggggggaacatggccctggctatcttcatcccggtcctcatcatctccttactgctgggaggagcctacatttacatcacaagatgtcgctactattccaacctccgcctgcctctgatgtactcccacccctacagccagatcaccgtggaaaccgagtttgacaaccccatttacgagacaggggaaaccagagagtatgaggtttctatctaaagagagctacacttgagaaggggacttgtgaactcaaccacaatctcctcgagacattcatccagagaccatgtggcacttgattgaaaccccagaatgtcgactgtcttttgtttagactctttatcaaaggtttactgttttcttccctgtatttattatatttaaaagtgaaataggtgtgggtttggatgtttcgcggcctcagccaaattcatgttacagcctcaattctgaaggcaggtggaagacttgcaaaatggcaaaccgcggcagcaaaaacacaaaacagcagatggagtttctcccatcagcaatgccatgctaaggctgcattgaattgcatgcatctttgggaaccatgcccatgatgttttcagtacaaatctaagtcccaagattaggttggaaagggtatttcttgttggcttagtttgggttggaatttagcatgggtacttaaacccatttggagagctgtgctcctaaacaaattctgtgtcctctcttcccattttgccagcttctgaaaggtttttccacagcccctccctctcacggttcttctgaaggtagcaaaggtgttatataaacattgtcttttaccactctggcctcgctggacagtgacaaaacaagaaaacgttttctttctagaaaggtgataaacgaccaaaggcaatttttcagagacaaatgagagatttgagagttccaatgaagaattgggtgagggggatcattgggtaagggaattgggttaaaatgttcttttctttgacactctttcaatgatgaaagagcgtgtaatttatgctacaagtgccagaatcgatcaccatgttcagcaagccactctcaagctgtggtaataaacacacaggcttgggaggcaccagcggccccactcatacagtgacaaggatttgtgatgggaaaaaggaggtgccatgtttggaaatgcaggggtgagctctggtttctcctggggttctggaatatctcagccctcaaaatagaggagactcaagtgcactgattctctaaaaggtgtcatcttcagaatatacttgccatcaagtatttcagggggcgggagggtcccatgagaagaaactatttttctattctccaaagctgtctggatgttggagggtggtgtgaatgctgactgaggaggtgcagagaacaggggcaggggattttaaatcacagcagaccatccagtggaatcctgtatcatctgatctgaacatcaatgaagacagagagaggaatttcattcagaaaggattccatagccccacatctagtcacacgggcattcctcttattttatcagggtctgttttcccccaacccagtgaaaccggtgagtgtgtaactcttgggaagattcttttctaaatacaggtataaagagaaggtggagggtgcgggtgcatggaagaaatactatgtgtgaagcagattcaccttcctgggaccggtgacatggtggtgacagtcaatggcttggacagacagacgggcacagtggcatttggaaccctctttggtgccctcccattctctctggaattgtttcaagtctgctggttttcaaacaagaaaagacctttctggccatagggagaatagcagggagtctatgttttggtggttacattggaaacatcttaagcaagatagggaaagttgattttaggcacacatgtaccctccttgacagcaggaactcagacttcaatcttgggggtctaagaccagaatattttccttctgccagaaaagaatcttgcacatatactcctgaaggcatgagtgtgtggtccatggcaagaaatagctaaaggctgctttccaggacccaaagccccatttaatgcaagaaccagagaagtgttctaggccattagtggacaatgtcatgtttggagaaagataacaacacaaataatgtaacctttccttaaaaggcagaactcaatccattttatttgatgcttattctaaccctaaccctgggtcacctggaatgaagaactctatgaataatatttgattttacaacgtgttatggttatgtgaaaactaaacatttgccttttataaagactgacaaaatataaatctttattctaaccctatccccaaaactagccaggccacaccccagatgttcttattgactattggaaagatagaaaaggcgttgtgttttttgtttttttgttgttgttgtcattgttgtttttttcagaagaccagtgtctcagttctgtcttagtagtaccacacccgtaaccgtgttttaaaagtttgttttagcctagagacagatcatacgagttcaacaatgtacagtgtgattgaaaagacaggttggtgtctatttttctttttaaaatatctgaatgtgtatttgtaatacgtaaaggtaaaaaaaaatagtgccaaaaatgtgcaaggcatctcattacagctcatgtacgtctgtttttataagatcaatattaaaacccattgggattaaatatttttgaataggatacactcttgagaaactcgagaatggactgagccttcctacaagccactctttgtttttaaaacagtggggaaatacgtttacagagattgtgagcttcagagaatgcatgtgatggtgtgtattacatgctaattcatataagctgtatctgtcagctaccaccctgtgctttaaaaatgcacacactcaaccctctttagcttggagctcagctttttgcttttttttttttttttttgtagaattatttagctaacataagtattctgattgctacctgatggccattcttacttagtttcatagatgtgctttaactatgatcctttgaagctcaccccttggagagcctacagaacctcaggctgatagctttgaagactgccaaacagcccagaaggaagcaaagcatctgcataatcaggagggttgtataacaagtagtgatttggcaaatatgtgggtagctttaggctgaggcacgggcctcaggcaaaaatgcccttcgagtgaatccgaagggcatgatcttcctatgtccttgactaggcatgacgagtcatttgaggtcagatattatttgagttgttcagcacccccaaaggtaggcattctcctgggaaattttcatttccattttatcgccaaacaaaataaaaagcaaaacaaactttctaagctagaataatgaaattaagtcattttccactttgtatatattgatgctaataaaacagatg

SEQ ID NO: 71345 - DNA, 3042 bp, Artificial Sequence
  derived and/or modified sequence
atgcccgccgccagaccccccgccgccggcctgagaggcatcagcctgttcctggccctgctgctgggcagccccgccgccgccctggagagagacgccctgcccgagggcgacgccagccccctgggcccctacctgctgcccagcggcgcccccgagagaggcagccccggcaaggagcaccccgaggagagagtggtgaccgccccccccagcagcagccagagcgccgaggtgctgggcgagctggtgctggacggcaccgcccccagcgcccaccacgacatccccgccctgagccccctgctgcccgaggaggccagacccaagcacgccctgccccccaagaagaagctgcccagcctgaagcaggtgaacagcgccagaaagcagctgagacccaaggccaccagcgccgccaccgtgcagagagccggcagccagcccgccagccagggcctggacctgctgagcagcagcaccgagaagcccggcccccccggcgaccccgaccccatcgtggccagcgaggaggccagcgaggtgcccctgtggctggacagaaaggagagcgccgtgcccaccacccccgcccccctgcagatcagccccttcaccagccagccctacgtggcccacaccctgccccagagacccgagcccggcgagcccggccccgacatggcccaggaggccccccaggaggacaccagccccatggccctgatggacaagggcgagaacgagctgaccggcagcgccagcgaggagagccaggagaccaccaccagcaccatcatcaccaccaccgtgatcaccaccgagcaggcccccgccctgtgcagcgtgagcttcagcaaccccgagggctacatcgacagcagcgactaccccctgctgcccctgaacaacttcctggagtgcacctacaacgtgaccgtgtacaccggctacggcgtggagctgcaggtgaagagcgtgaacctgagcgacggcgagctgctgagcatcagaggcgtggacggccccaccctgaccgtgctggccaaccagaccctgctggtggagggccaggtgatcagaagccccaccaacaccatcagcgtgtacttcagaaccttccaggacgacggcctgggcaccttccagctgcactaccaggccttcatgctgagctgcaacttccccagaagacccgacagcggcgacgtgaccgtgatggacctgcacagcggcggcgtggcccacttccactgccacctgggctacgagctgcagggcgccaagatgctgacctgcatcaacgccagcaagccccactggagcagccaggagcccatctgcagcgccccctgcggcggcgccgtgcacaacgccaccatcggcagagtgctgagccccagctaccccgagaacaccaacggcagccagttctgcatctggaccatcgaggcccccgagggccagaagctgcacctgcacttcgagagactgctgctgcacgacaaggacagaatgaccgtgcacagcggccagaccaacaagagcgccctgctgtacgacagcctgcagaccgagagcgtgcccttcgagggcctgctgagcgagggcaacaccatcagaatcgagttcaccagcgaccaggccagagccgccagcaccttcaacatcagattcgaggccttcgagaagggccactgctacgagccctacatccagaacggcaacttcaccaccagcgaccccacctacaacatcggcaccatcgtggagttcacctgcgaccccggccacagcctggagcagggccccgccatcatcgagtgcatcaacgtgagagacccctactggaacgacaccgagcccctgtgcagagccatgtgcggcggcgagctgagcgccgtggccggcgtggtgctgagccccaactggcccgagccctacgtggagggcgaggactgcatctggaagatccacgtgggcgaggagaagagaatcttcctggacatccagttcctgaacctgagcaacagcgacatcctgaccatctacgacggcgacgaggtgatgccccacatcctgggccagtacctgggcaacagcggcccccagaagctgtacagcagcacccccgacctgaccatccagttccacagcgaccccgccggcctgatcttcggcaagggccagggcttcatcatgaactacatcgaggtgagcagaaacgacagctgcagcgacctgcccgagatccagaacggctggaagaccaccagccacaccgagctggtgagaggcgccagaatcacctaccagtgcgaccccggctacgacatcgtgggcagcgacaccctgacctgccagtgggacctgagctggagcagcgacccccccttctgcgagaagatcatgtactgcaccgaccccggcgaggtggaccacagcaccagactgatcagcgaccccgtgctgctggtgggcaccaccatccagtacacctgcaaccccggcttcgtgctggagggcagcagcctgctgacctgctacagcagagagaccggcacccccatctggaccagcagactgccccactgcgtgagcgaggagagcctggcctgcgacaaccccggcctgcccgagaacggctaccagatcctgtacaagagactgtacctgcccggcgagagcctgaccttcatgtgctacgagggcttcgagctgatgggcgaggtgaccatcagatgcatcctgggccagcccagccactggaacggccccctgcccgtgtgcaaggtggccgaggccgccgccgagaccagcctggagggcggcaacatggccctggccatcttcatccccgtgctgatcatcagcctgctgctgggcggcgcctacatctacatcaccagatgcagatactacagcaacctgagactgcccctgatgtacagccacccctacagccagatcaccgtggagaccgagttcgacaaccccatctacgagaccggcgagaccagagagtacgaggtgagcatctag

SEQ ID NO: 71346 - protein, 139 aa, Artificial Sequence
  derived and/or modified sequence
MYCTDPGEVDHSTRLISDPVLLVGTTIQYTCNPGFVLEGSSLLTCYSRETGTPIWTSRLPHCVSEESLACDNPGLPENGYQILYKRLYLPGESLTFMCYEGFELMGEVTIRCILGQPSHWNGPLPVCKDVATIPTSACL

SEQ ID NO: 71347 - protein, 949 aa, Artificial Sequence
  derived and/or modified sequence
MPAARPPAAGLRGISLFLALLLGSPAAALERDALPEGDASPLGPYLLPSGAPERGSPGKEHPEERVVTAPPSSSQSAEVLGELVLDGTAPSAHHDIPALSPLLPEEARPKHALPPKKKLPSLKQVNSARKQLRPKATSAATVQRAGSQPASQGLDLLSSSTEKPGPPGDPDPIVASEEASEVPLWLDRKESAVPTTPAPLQISPFTSQPYVAHTLPQRPEPGEPGPDMAQEAPQEDTSPMALMDKGENELTGSASEESQETTTSTIITTTVITTEQAPALCSVSFSNPEGYIDSSDYPLLPLNNFLECTYNVTVYTGYGVELQVKSVNLSDGELLSIRGVDGPTLTVLANQTLLVEGQVIRSPTNTISVYFRTFQDDGLGTFQLHYQAFMLSCNFPRRPDSGDVTVMDLHSGGVAHFHCHLGYELQGAKMLTCINASKPHWSSQEPICSAPCGGAVHNATIGRVLSPSYPENTNGSQFCIWTIEAPEGQKLHLHFERLLLHDKDRMTVHSGQTNKSALLYDSLQTESVPFEGLLSEGNTIRIEFTSDQARAASTFNIRFEAFEKGHCYEPYIQNGNFTTSDPTYNIGTIVEFTCDPGHSLEQGPAIIECINVRDPYWNDTEPLCRAMCGGELSAVAGVVLSPNWPEPYVEGEDCIWKIHVGEEKRIFLDIQFLNLSNSDILTIYDGDEVMPHILGQYLGNSGPQKLYSSTPDLTIQFHSDPAGLIFGKGQGFIMNYIEVSRNDSCSDLPEIQNGWKTTSHTELVRGARITYQCDPGYDIVGSDTLTCQWDLSWSSDPPFCEKTEESLACDNPGLPENGYQILYKRLYLPGESLTFMCYEGFELMGEVTIRCILGQPSHWNGPLPVCKVAEAAAETSLEGGNMALAIFIPVLIISLLLGGAYIYITRCRYYSNLRLPLMYSHPYSQITVETEFDNPIYETGETREYEVSI

SEQ ID NO: 71348 - DNA, 2850 bp, Artificial Sequence
  derived and/or modified sequence
atgcctgccgccagaccacctgccgcaggcctgcgagggatttcgctgttccttgctcttctcctgggctcccctgctgcagccctcgaaagagatgctttgcctgaaggggatgcctcccctttgggtccgtatctgctgcccagtggggctcccgaacgggggtcccctggaaaggagcaccccgaggaacgggtcgttaccgcccctccaagcagttctcagagtgctgaggtgcttggtgaacttgtactcgacgggaccgccccctcagcacaccacgacataccagctctgtcacccctcctgccagaggaagctcggcctaagcatgccctgcctcccaagaagaaactcccatctttgaaacaggtcaattctgctcgcaaacagcttcgaccgaaagccacatccgctgccacagtccagagagctggatcgcagccagcgtcgcaagggctcgatttactctccagctctaccgagaaacccggcccccccggcgaccctgacccgatagtggcgtccgaagaagccagcgaggtgccattgtggctggataggaaggagagcgccgtccccactacaccggctcctttgcaaatttctcctttcacctcccagccttacgtggctcatacacttccccagagacctgagccaggggagcccggccccgatatggctcaggaagcccctcaggaagacacctcaccaatggctctgatggacaaaggggagaatgaactcaccggctccgcatcagaagaatctcaggagactacgaccagcaccattataacaaccaccgtgattacaacagagcaggcccccgccctgtgttctgtgagtttcagcaatcctgaggggtacatcgatagttcagactatccacttctgcctttgaataacttcttagagtgtacttataacgttaccgtgtatacaggctacggcgtggagctacaggtaaagtcggtcaatctctcagacggtgaactgctctccatccgcggagtagatggtccaaccctgacagtgctggccaatcaaaccttgctcgttgaaggacaagtgatcagatctccaacaaacacaattagcgtctattttagaactttccaagacgatggtcttggcacatttcagttgcactaccaggcctttatgttgagttgtaactttccccgaaggcctgactctggtgatgtaaccgtgatggacctccactctggtggtgttgcacactttcactgccacctggggtacgaactgcaaggggcgaaaatgctgacttgcatcaacgcaagtaagccacactggtcatcccaggagccaatctgtagcgccccatgcggcggggccgtccataatgctacaatcggacgagtactctctcccagctatccggagaacaccaatggatcacagttttgtatctggaccatagaggcacccgaggggcagaaactacatctgcacttcgaaaggttgctgctgcacgataaggatcggatgacagttcactctggacagacgaataagtccgctttattgtatgatagccttcaaactgaaagcgtcccgtttgaagggcttttaagcgagggaaacaccatccggattgagtttacatctgaccaagcccgggcagccagtaccttcaacatcaggttcgaggccttcgagaaagggcactgttacgagccgtatatccagaatgggaacttcaccacatccgatcccacttataatatcggcacaatcgtggagtttacatgtgaccccgggcactcacttgaacagggacctgcaattattgaatgcatcaatgtacgcgatccatactggaatgacacagaaccactctgtcgcgccatgtgcggtggtgagttaagcgctgtggctggggtggtcctcagtcccaattggcccgagccgtacgtggagggggaggattgcatctggaagatacacgtgggagaagaaaaacggatctttctggacatccagttcctgaacctatcgaattccgacatcctcaccatatacgacggtgatgaagtgatgcctcacatccttggccagtatctgggcaattcgggaccccagaagctatacagcagtacgccggacttaacaatccagtttcacagcgatcctgcaggattgatctttggaaaggggcagggatttatcatgaattacatcgaggtgtctaggaatgattcctgttcggatctaccagagattcagaacggatggaaaacaacctcgcacactgagctcgtaaggggggcccgcattacctatcagtgtgaccctgggtatgacatcgttgggtctgacacactcacatgtcagtgggatctcagctggtccagcgatccacctttttgtgagaagaccgaggagtccctagcctgcgataaccctggactgcccgaaaatgggtatcagatcttgtacaagcggctgtacctgcctggagagtctctgacctttatgtgttatgagggcttcgagctgatgggagaagtgacaattcgctgcattcttggccagcccagtcactggaacggaccattgccagtttgcaaggtggcagaagctgccgctgaaacttctctcgaggggggtaacatggctctagccatcttcattcccgtcttgatcatttccctactcttgggaggcgcatacatctacattactcgctgccgctactatagtaatttgaggcttccactcatgtacagccacccctattctcagattaccgttgagaccgagttcgataaccctatctacgagactggggaaactagagaatatgaagtatccatctag

SEQ ID NO: 71349 - DNA, 2850 bp, Artificial Sequence
  derived and/or modified sequence
atgcctgctgcccggcccccagctgctggcctgcggggcatcagcctcttcctggccctgctgctgggcagccctgctgctgccctggagagagatgccctgcctgaaggagatgccagccccctgggcccctacctgctgcccagcggggcccctgagcggggcagccctgggaaggagcaccctgaggagcgggtggtgacagccccacccagcagcagccagagcgctgaggtgctgggggagctggtgctggatggaacagcccccagcgcccaccacgacatcccagccctgagccccctgctgcctgaggaggcccggcccaagcacgccctgccccccaagaagaagctgcccagcctgaagcaggtgaacagcgccaggaagcagctgcggcccaaggccaccagcgctgccaccgtgcagagagctggcagccagcctgccagccagggcctggacctgctgagcagcagcacagagaagccaggccccccaggggaccctgaccccatcgtggccagcgaggaggccagcgaggtgcccctgtggctggacaggaaggagagcgctgtgcccaccaccccagcccccctgcagatcagccccttcaccagccagccctacgtggcccacaccctgccccagaggcctgagcctggagagcccggccctgacatggcccaggaggccccccaggaggacaccagccccatggccctgatggacaagggagaaaatgagctgactggaagtgccagcgaggagagccaggagaccaccaccagcaccatcatcaccaccaccgtcatcaccacagagcaggccccagccctgtgcagcgtgtccttcagcaaccctgagggctacatcgacagcagtgactaccccctgctgcccctgaacaacttcctggagtgcacctacaacgtgacagtgtacacaggctacggcgtggagctgcaggtgaagtctgtgaacctgagtgatggagagctgctgagcatccggggcgtggatggccccaccctgactgtgctggccaaccagaccctgctggtggagggccaggtgatccgcagccccaccaacaccatctctgtgtacttccgcaccttccaggatgatggcctgggcaccttccagctgcactaccaggccttcatgctgagctgcaacttccccaggaggccagattctggagatgtgacagtgatggacctgcacagcggaggagtggcccacttccactgccacctgggctatgagctgcagggcgccaagatgctgacctgcatcaatgccagcaagccccactggagcagccaggagcccatctgcagcgccccctgtggcggcgctgtgcacaatgccaccatcggccgggtgctgagccccagctacccagagaacaccaacggcagccagttctgcatctggaccatcgaggcccctgagggccagaagctgcacctgcactttgagcggctgctgctgcatgacaaggacaggatgacagtgcacagcggccagaccaacaagagcgccctgctgtatgacagcctgcagacagaatctgtgccctttgagggcctgctgtctgagggcaacaccatccgcatcgagttcaccagtgaccaggcccgggccgccagcaccttcaacatccgctttgaggcctttgagaagggccactgctatgagccctacatccagaatggaaacttcaccaccagtgaccccacctacaacatcggcaccatcgtggagttcacctgtgaccccggccacagcctggagcagggccctgccatcatcgagtgcatcaacgtgcgggacccctactggaatgacacagagcccctgtgccgggccatgtgtggcggggagctgtctgctgtggccggcgtggtgctgagccccaactggccagagccctacgtggagggggaggactgcatctggaagatccacgtgggggaggagaagaggatcttcctggacatccagttcctgaacctgagcaacagcgacatcctgaccatctatgatggagatgaggtgatgccccacatcctgggccagtacctgggcaacagcggcccccagaagctgtacagcagcaccccagacctgaccatccagttccacagcgaccctgctggcctcatctttgggaagggccagggcttcatcatgaactacatcgaggtgtccagaaatgacagctgcagcgacctgcctgagatccagaatggctggaagaccaccagccacacagagctggtgcggggggcccgcatcacctaccagtgtgaccccggctatgacatcgtgggcagtgacaccctgacctgccagtgggacctgtcctggagcagtgacccccccttctgtgagaagacagaggagagcctggcctgtgacaaccctggcctgcctgaaaatggctaccagatcctgtacaagaggctgtacctgcctggagagagcctgaccttcatgtgctatgagggctttgagctgatgggagaggtgaccatccgctgcatcctgggccagcccagccactggaatggccccctgcctgtgtgcaaggtggccgaggccgctgctgagaccagcctggagggcggcaacatggccctggccatcttcatccctgtgctgatcatcagcctgctgctgggcggggcctacatctacatcacccgctgccgctactacagcaacctgcggctgcccctgatgtacagccacccctacagccagatcaccgtggagacagaatttgacaaccccatctatgaaacaggagagacccgggagtatgaggtgtccatctag

SEQ ID NO: 71350 - DNA, 2850 bp, Artificial Sequence
  derived and/or modified sequence
atgcccgccgcccggccccccgccgccggcctgcggggcatcagcctgtttcttgcgctacttttaggctctccagccgccgccttggagcgcgacgctctgcccgagggtgatgcgtcacctctggggccttatctgctgccttccggggcgcctgaacgcgggtctcctggaaaagagcacccagaagaaagagtcgtaaccgctcctccctcctcctctcagagtgccgaggtactgggtgagcttgttctggatggtactgcgcctagtgcccaccacgacattccggcattgagtccgctgctgcctgaagaggctcgacccaagcatgctctaccccccaagaagaagctgccttctcttaagcaggtcaatagcgctcgtaagcagcttcgccctaaggcgacatccgccgcaactgtacagcgggccggaagccagcctgcgtcacagggcttggatctcctaagctctagtactgaaaaaccaggcccccccggagatccagatcctattgttgcaagcgaggaagcaagcgaagtgccactgtggttggacaggaaagaaagcgccgtccccaccacacccgccccactgcaaatttcaccttttacctcacagccgtacgtggcccataccctgccacaaagacctgaacccggggaacccggaccagatatggctcaggaggcccctcaggaggatacatctccaatggctctgatggacaaaggggagaacgagcttaccggttcggcgagtgaggagtctcaagaaacaacgacctcaacaatcatcacaaccacagtcatcacaaccgaacaggcccctgccctgtgctcagtaagttttagcaatccagaaggctatattgactcttcagattatccactgctaccgctgaacaatttcctcgagtgtacgtacaacgtaacagtgtacacggggtacggcgtagagttgcaggtgaagtctgtgaacttatccgacggagagctcttaagcataaggggcgtggatggccccaccttgaccgtccttgcgaaccagaccctgctagtggaaggccaagttatacggagtcccacaaacactataagtgtgtatttcagaacattccaagacgatggattaggcaccttccaactgcattatcaagcctttatgctttcctgtaatttcccacggcggcccgattcgggcgatgtcaccgtcatggatctccacagtggcggagtcgcacattttcattgtcacctgggctacgaactccagggagccaaaatgcttacctgtattaacgcaagcaaaccccactggtccagtcaagagcctatttgttccgctccatgtggaggtgccgtccacaatgcaacaatcggcagggttctcagtccctcatacccagagaatacaaatggctcacagttctgtatctggacgatcgaggccccagaggggcagaaacttcacctacacttcgagcggcttctgctccatgataaggacaggatgaccgttcattccggacagactaacaagtccgccctgttgtacgacagcctccagacggagagcgtacccttcgagggcctgctgagtgaaggcaacaccataaggatcgaattcacaagtgatcaagctagggcagcttcaacgtttaatatacggttcgaagctttcgagaaggggcactgctatgaaccgtacattcagaacggaaatttcacaacgagtgaccccacctataatattggaacaattgtggagtttacttgtgaccctgggcattctttagagcaggggccagcgattatagaatgtatcaacgtgagggatccttactggaatgacacagagccactctgtagagctatgtgtggaggggagctgtccgcagtcgctggggtggtgctgagccctaactggcccgagccttatgtggagggcgaagattgtatatggaagattcatgttggcgaggagaagcgcatttttctggatatacagtttttgaatctgtccaattcggatatactgaccatctacgatggcgatgaggtaatgccccacattctcgggcagtacttaggcaactcagggccccagaaactctacagctcaactccggatctgacaattcagtttcactcagatcccgccggactgatttttgggaagggccaaggctttatcatgaactatattgaagtttctcggaatgactcctgttctgatctgcccgaaatccagaacggatggaaaaccacaagccacacagagctggtgagaggcgccaggatcacctaccagtgcgatccaggctatgatatcgtgggctctgacacattaacatgccagtgggatctgagttggtcaagtgaccctccattttgcgagaagaccgaggagtcgctggcatgcgacaaccccggcttgcccgaaaacggttaccaaatcttgtataaacgactttacctccccggagaaagcttgaccttcatgtgttacgagggatttgaactgatgggagaggtgactattcgttgcattctcggacagccttcgcattggaatggtcccctgcctgtctgcaaagtagctgaagcagccgcagagactagtttggagggggggaacatggcgttggcaattttcatcccagtgctgataatttccctactgctgggcggagcatacatctatatcacacgatgccgatattactctaacctcaggctcccactcatgtactcgcacccatacagtcagatcaccgtcgaaacggagtttgataatccaatatatgagacgggcgaaacacgggagtatgaggtgtccatctag

SEQ ID NO: 71351 - DNA, 2850 bp, Artificial Sequence
  derived and/or modified sequence
atgcccgctgcccgaccacccgctgccggtctgagggggatttcattgtttctggctctgctcctcggcagtccggcagccgctttagagagggacgcgttgcctgagggagacgctagtccattaggcccttacctgctgccctcaggcgctccagaaaggggctctccaggaaaagaacaccccgaagagagagtggtgaccgctcccccaagcagctctcagagcgccgaggtgctgggcgagctcgtgctggatgggacagcccctagtgcccaccacgacatcccagctctgagccctctgctgccagaagaagcccgtcctaagcacgctctgcctcccaaaaagaaactgccttctctgaaacaggtcaactcagctcggaagcagttgcgaccaaaggcaacaagcgctgccacagtgcagcgggctggatctcaacctgccagccaaggcctggacctgctgtcgtcaagcactgagaaaccaggtccacctggtgatcctgaccccatagtggcttctgaagaggcttccgaggttcctctgtggctggaccgcaaagagtctgccgttcctacaacgccggctcccctgcagatctctcctttcacatctcaaccatacgttgcccatactttgccccaaagacctgagcccggagaacctggtccagacatggcacaggaggcgcctcaggaagatacatctcccatggccctgatggacaaaggggagaatgaacttactggcagtgcatcagaagagtcgcaggagacgactacctctaccatcattaccacgacagtgattacaactgaacaggcccctgcattgtgctctgtctccttctccaatccggaaggctatattgattcctccgattaccctctgcttccgctgaacaattttctcgaatgcacctacaacgtgaccgtgtacacggggtatggcgtggagcttcaggtgaagtccgtgaacctctccgatggcgaactgttaagtatccggggtgtcgacgggccaacactgaccgttctcgcgaatcaaaccttgttagtcgaggggcaagtgatccgatccccaacgaatactatctctgtgtactttagaacgtttcaggatgatgggctgggcacttttcagctgcattatcaggccttcatgctcagctgtaattttcctcggagaccagatagcggggacgtcacagtaatggacctgcacagtgggggagtcgcccacttccactgccacctgggctatgagctccagggtgccaaaatgctgacttgcatcaacgcaagtaaaccacactggtcgtcacaggagcctatttgctcggccccatgcggtggggcagtgcataacgcgacgatcgggagggtgttgagtccctcctatcccgaaaataccaacggttcgcagttttgtatatggactatagaggccccagaaggccagaagctgcatttgcattttgaaagactgcttcttcatgacaaggatcggatgacagtccactctgggcaaaccaataagagcgccctgctctacgatagtcttcagaccgagtcagtgccattcgaaggattactgtcagaaggaaatacaattaggatcgaattcacttccgaccaggcgcgagctgcctctacattcaacataaggtttgaagcattcgagaaaggccattgctatgaaccctacatacagaatggcaacttcactacgagcgatcctacgtacaatatcggaaccatagtggaattcacatgcgacccaggccattcactggagcagggtccggcaatcattgagtgcatcaacgttagagatccatactggaacgacactgaaccactctgcagagccatgtgcggcggagagctgtccgccgtagctggggtggtgctgagtccgaactggcccgagccttacgtcgaaggagaggactgcatctggaaaatccacgtgggcgaggagaaacgtatctttctagatatccagttcctgaacctgagcaattccgatattctgacaatctatgacggcgatgaggtgatgccacacattcttgggcagtacttgggtaattctggtccacagaaactgtacagttctactcccgacctaacaatccaatttcacagtgatcctgcaggcctgattttcggaaaaggccaaggctttattatgaactatatagaagtgtcaagaaatgattcatgcagtgatttgcccgagatccaaaacgggtggaaaaccacctcgcacaccgagctggtgaggggggctaggattacctatcagtgcgatcccggttacgacatagtaggctccgacaccctgacctgtcagtgggacctctcttggtccagcgatcccccattctgcgagaaaacagaagagtccctggcctgtgataaccctggcctcccagaaaacggttatcagatcctttacaagcgcctctatctgcctggcgaatccttaactttcatgtgttatgagggctttgagctgatgggtgaggtgacgatacgctgtatcctcggccaaccgagccactggaatggcccacttcccgtctgcaaagtcgcagaggcagccgcagaaactagtctggagggaggaaatatggcactcgcaatctttattcccgtgctgattatcagtcttctgctgggtggtgcatacatttacataacccgatgtcgatattactccaacctgagattgcctcttatgtatagccacccctattctcaaatcaccgtggaaaccgagtttgacaatcccatttacgagaccggcgagactcgggagtacgaggtgtcaatctag

SEQ ID NO: 71352 - DNA, 6307 bp, Artificial Sequence
  derived and/or modified sequence
cgcgcgtccgcccagggggctccggaagctgccccggcccgcggcctcctccctcgctcccgcttcccctttctcgctcaccgccgccctccttccccagctccctcgccgtccgcccgccccacagccagcggctccgcgccccctgcagccacgatgcccgcggcccggccgcccgccgcgggactccgcgggatctcgctgttcctcgctctgctcctggggagcccggcggcagcgctggagcgagatgctcttcccgagggagatgctagccctttgggtccttacctcctgccctcaggagccccggagagaggcagtcctggcaaagagcaccctgaagagagagtggtaacagcgccccccagttcctcacagtcggcggaagtgctgggcgagctggtgctggatgggaccgcaccctctgcacatcacgacatcccagccctgtcaccgctgcttccagaggaggcccgccccaagcacgccttgccccccaagaagaaactgccttcgctcaagcaggtgaactctgccaggaagcagctgaggcccaaggccacctccgcagccactgtccaaagggcagggtcccagccagcgtcccagggcctagatctcctctcctcctccacggagaagcctggcccaccgggggacccggaccccatcgtggcctccgaggaggcatcagaagtgcccctttggctggaccgaaaggagagtgcggtccctacaacacccgcacccctgcaaatctcccccttcacttcgcagccctatgtggcccacacactcccccagaggccagaacccggggagcctgggcctgacatggcccaggaggccccccaggaggacaccagccccatggccctgatggacaaaggtgagaatgagctgactgggtcagcctcagaggagagccaggagaccactacctccaccattatcaccaccacggtcatcaccaccgagcaggcaccagctctctgcagtgtgagcttctccaatcctgaggggtacattgactccagcgactacccactgctgcccctcaacaactttctggagtgcacatacaacgtgacagtctacactggctatggggtggagctccaggtgaagagtgtgaacctgtccgatggggaactgctctccatccgcggggtggacggccctaccctgaccgtcctggccaaccagacactcctggtggaggggcaggtaatccgaagccccaccaacaccatctccgtctacttccggaccttccaggacgacggccttgggaccttccagcttcactaccaggccttcatgctgagctgcaactttccccgccggcctgactctggggatgtcacggtgatggacctgcactcaggtggggtggcccactttcactgccacctgggctatgagctccagggcgctaagatgctgacatgcatcaatgcctccaagccgcactggagcagccaggagcccatctgctcagctccttgtggaggggcagtgcacaatgccaccatcggccgcgtcctctccccaagttaccctgaaaacacaaatgggagccaattctgcatctggacgattgaagctccagagggccagaagctgcacctgcactttgagaggctgttgctgcatgacaaggacaggatgacggttcacagcgggcagaccaacaagtcagctcttctctacgactcccttcaaaccgagagtgtcccttttgagggcctgctgagcgaaggcaacaccatccgcatcgagttcacgtccgaccaggcccgggcggcctccaccttcaacatccgatttgaagcgtttgagaaaggccactgctatgagccctacatccagaatgggaacttcactacatccgacccgacctataacattgggactatagtggagttcacctgcgaccccggccactccctggagcagggcccggccatcatcgaatgcatcaatgtgcgggacccatactggaatgacacagagcccctgtgcagagccatgtgtggtggggagctctctgctgtggctggggtggtattgtccccaaactggcccgagccctacgtggaaggtgaagattgtatctggaagatccacgtgggagaagagaaacggatcttcttagatatccagttcctgaatctgagcaacagtgacatcttgaccatctacgatggcgacgaggtcatgccccacatcttggggcagtaccttgggaacagtggcccccagaaactgtactcctccacgccagacttaaccatccagttccattcggaccctgctggcctcatctttggaaagggccagggatttatcatgaactacatagaggtatcaaggaatgactcctgctcggatttacccgagatccagaatggctggaaaaccacttctcacacggagttggtgcggggagccagaatcacctaccagtgtgaccccggctatgacatcgtggggagtgacaccctcacctgccagtgggacctcagctggagcagcgaccccccattttgtgagaaaacggaggagtccctggcatgtgacaacccagggctgcctgaaaatggataccaaatcctgtacaagcgactctacctgccaggagagtccctcaccttcatgtgctacgaaggctttgagctcatgggtgaagtgaccatccgctgcatcctgggacagccatcccactggaacgggcccctgcccgtgtgtaaagtagcagaagcggcagcagagacgtcgctggaaggggggaacatggccctggctatcttcatcccggtcctcatcatctccttactgctgggaggagcctacatttacatcacaagatgtcgctactattccaacctccgcctgcctctgatgtactcccacccctacagccagatcaccgtggaaaccgagtttgacaaccccatttacgagacaggggaaaccagagagtatgaggtttctatctaaagagagctacacttgagaaggggacttgtgaactcaaccacaatctcctcgagacattcatccagagaccatgtggcacttgattgaaaccccagaatgtcgactgtcttttgtttagactctttatcaaaggtttactgttttcttccctgtatttattatatttaaaagtgaaataggtgtgggtttggatgtttcgcggcctcagccaaattcatgttacagcctcaattctgaaggcaggtggaagacttgcaaaatggcaaaccgcggcagcaaaaacacaaaacagcagatggagtttctcccatcagcaatgccatgctaaggctgcattgaattgcatgcatctttgggaaccatgcccatgatgttttcagtacaaatctaagtcccaagattaggttggaaagggtatttcttgttggcttagtttgggttggaatttagcatgggtacttaaacccatttggagagctgtgctcctaaacaaattctgtgtcctctcttcccattttgccagcttctgaaaggtttttccacagcccctccctctcacggttcttctgaaggtagcaaaggtgttatataaacattgtcttttaccactctggcctcgctggacagtgacaaaacaagaaaacgttttctttctagaaaggtgataaacgaccaaaggcaatttttcagagacaaatgagagatttgagagttccaatgaagaattgggtgagggggatcattgggtaagggaattgggttaaaatgttcttttctttgacactctttcaatgatgaaagagcgtgtaatttatgctacaagtgccagaatcgatcaccatgttcagcaagccactctcaagctgtggtaataaacacacaggcttgggaggcaccagcggccccactcatacagtgacaaggatttgtgatgggaaaaaggaggtgccatgtttggaaatgcaggggtgagctctggtttctcctggggttctggaatatctcagccctcaaaatagaggagactcaagtgcactgattctctaaaaggtgtcatcttcagaatatacttgccatcaagtatttcagggggcgggagggtcccatgagaagaaactatttttctattctccaaagctgtctggatgttggagggtggtgtgaatgctgactgaggaggtgcagagaacaggggcaggggattttaaatcacagcagaccatccagtggaatcctgtatcatctgatctgaacatcaatgaagacagagagaggaatttcattcagaaaggattccatagccccacatctagtcacacgggcattcctcttattttatcagggtctgttttcccccaacccagtgaaaccggtgagtgtgtaactcttgggaagattcttttctaaatacaggtataaagagaaggtggagggtgcgggtgcatggaagaaatactatgtgtgaagcagattcaccttcctgggaccggtgacatggtggtgacagtcaatggcttggacagacagacgggcacagtggcatttggaaccctctttggtgccctcccattctctctggaattgtttcaagtctgctggttttcaaacaagaaaagacctttctggccatagggagaatagcagggagtctatgttttggtggttacattggaaacatcttaagcaagatagggaaagttgattttaggcacacatgtaccctccttgacagcaggaactcagacttcaatcttgggggtctaagaccagaatattttccttctgccagaaaagaatcttgcacatatactcctgaaggcatgagtgtgtggtccatggcaagaaatagctaaaggctgctttccaggacccaaagccccatttaatgcaagaaccagagaagtgttctaggccattagtggacaatgtcatgtttggagaaagataacaacacaaataatgtaacctttccttaaaaggcagaactcaatccattttatttgatgcttattctaaccctaaccctgggtcacctggaatgaagaactctatgaataatatttgattttacaacgtgttatggttatgtgaaaactaaacatttgccttttataaagactgacaaaatataaatctttattctaaccctatccccaaaactagccaggccacaccccagatgttcttattgactattggaaagatagaaaaggcgttgtgttttttgtttttttgttgttgttgtcattgttgtttttttcagaagaccagtgtctcagttctgtcttagtagtaccacacccgtaaccgtgttttaaaagtttgttttagcctagagacagatcatacgagttcaacaatgtacagtgtgattgaaaagacaggttggtgtctatttttctttttaaaatatctgaatgtgtatttgtaatacgtaaaggtaaaaaaaaatagtgccaaaaatgtgcaaggcatctcattacagctcatgtacgtctgtttttataagatcaatattaaaacccattgggattaaatatttttgaataggatacactcttgagaaactcgagaatggactgagccttcctacaagccactctttgtttttaaaacagtggggaaatacgtttacagagattgtgagcttcagagaatgcatgtgatggtgtgtattacatgctaattcatataagctgtatctgtcagctaccaccctgtgctttaaaaatgcacacactcaaccctctttagcttggagctcagctttttgcttttttttttttttttttgtagaattatttagctaacataagtattctgattgctacctgatggccattcttacttagtttcatagatgtgctttaactatgatcctttgaagctcaccccttggagagcctacagaacctcaggctgatagctttgaagactgccaaacagcccagaaggaagcaaagcatctgcataatcaggagggttgtataacaagtagtgatttggcaaatatgtgggtagctttaggctgaggcacgggcctcaggcaaaaatgcccttcgagtgaatccgaagggcatgatcttcctatgtccttgactaggcatgacgagtcatttgaggtcagatattatttgagttgttcagcacccccaaaggtaggcattctcctgggaaattttcatttccattttatcgccaaacaaaataaaaagcaaaacaaactttctaagctagaataatgaaattaagtcattttccactttgtatatattgatgctaataaaacagatgaaaaaga

SEQ ID NO: 71353 - DNA, 2850 bp, Artificial Sequence
  derived and/or modified sequence
atgcccgccgccagaccccccgccgccggcctgagaggcatcagcctgttcctggccctgctgctgggcagccccgccgccgccctggagagagacgccctgcccgagggcgacgccagccccctgggcccctacctgctgcccagcggcgcccccgagagaggcagccccggcaaggagcaccccgaggagagagtggtgaccgccccccccagcagcagccagagcgccgaggtgctgggcgagctggtgctggacggcaccgcccccagcgcccaccacgacatccccgccctgagccccctgctgcccgaggaggccagacccaagcacgccctgccccccaagaagaagctgcccagcctgaagcaggtgaacagcgccagaaagcagctgagacccaaggccaccagcgccgccaccgtgcagagagccggcagccagcccgccagccagggcctggacctgctgagcagcagcaccgagaagcccggcccccccggcgaccccgaccccatcgtggccagcgaggaggccagcgaggtgcccctgtggctggacagaaaggagagcgccgtgcccaccacccccgcccccctgcagatcagccccttcaccagccagccctacgtggcccacaccctgccccagagacccgagcccggcgagcccggccccgacatggcccaggaggccccccaggaggacaccagccccatggccctgatggacaagggcgagaacgagctgaccggcagcgccagcgaggagagccaggagaccaccaccagcaccatcatcaccaccaccgtgatcaccaccgagcaggcccccgccctgtgcagcgtgagcttcagcaaccccgagggctacatcgacagcagcgactaccccctgctgcccctgaacaacttcctggagtgcacctacaacgtgaccgtgtacaccggctacggcgtggagctgcaggtgaagagcgtgaacctgagcgacggcgagctgctgagcatcagaggcgtggacggccccaccctgaccgtgctggccaaccagaccctgctggtggagggccaggtgatcagaagccccaccaacaccatcagcgtgtacttcagaaccttccaggacgacggcctgggcaccttccagctgcactaccaggccttcatgctgagctgcaacttccccagaagacccgacagcggcgacgtgaccgtgatggacctgcacagcggcggcgtggcccacttccactgccacctgggctacgagctgcagggcgccaagatgctgacctgcatcaacgccagcaagccccactggagcagccaggagcccatctgcagcgccccctgcggcggcgccgtgcacaacgccaccatcggcagagtgctgagccccagctaccccgagaacaccaacggcagccagttctgcatctggaccatcgaggcccccgagggccagaagctgcacctgcacttcgagagactgctgctgcacgacaaggacagaatgaccgtgcacagcggccagaccaacaagagcgccctgctgtacgacagcctgcagaccgagagcgtgcccttcgagggcctgctgagcgagggcaacaccatcagaatcgagttcaccagcgaccaggccagagccgccagcaccttcaacatcagattcgaggccttcgagaagggccactgctacgagccctacatccagaacggcaacttcaccaccagcgaccccacctacaacatcggcaccatcgtggagttcacctgcgaccccggccacagcctggagcagggccccgccatcatcgagtgcatcaacgtgagagacccctactggaacgacaccgagcccctgtgcagagccatgtgcggcggcgagctgagcgccgtggccggcgtggtgctgagccccaactggcccgagccctacgtggagggcgaggactgcatctggaagatccacgtgggcgaggagaagagaatcttcctggacatccagttcctgaacctgagcaacagcgacatcctgaccatctacgacggcgacgaggtgatgccccacatcctgggccagtacctgggcaacagcggcccccagaagctgtacagcagcacccccgacctgaccatccagttccacagcgaccccgccggcctgatcttcggcaagggccagggcttcatcatgaactacatcgaggtgagcagaaacgacagctgcagcgacctgcccgagatccagaacggctggaagaccaccagccacaccgagctggtgagaggcgccagaatcacctaccagtgcgaccccggctacgacatcgtgggcagcgacaccctgacctgccagtgggacctgagctggagcagcgacccccccttctgcgagaagaccgaggagagcctggcctgcgacaaccccggcctgcccgagaacggctaccagatcctgtacaagagactgtacctgcccggcgagagcctgaccttcatgtgctacgagggcttcgagctgatgggcgaggtgaccatcagatgcatcctgggccagcccagccactggaacggccccctgcccgtgtgcaaggtggccgaggccgccgccgagaccagcctggagggcggcaacatggccctggccatcttcatccccgtgctgatcatcagcctgctgctgggcggcgcctacatctacatcaccagatgcagatactacagcaacctgagactgcccctgatgtacagccacccctacagccagatcaccgtggagaccgagttcgacaaccccatctacgagaccggcgagaccagagagtacgaggtgagcatctag

SEQ ID NO: 71354 - protein, 948 aa, Artificial Sequence
  derived and/or modified sequence
MPAARPPAAGLRGISLFLALLLGSPAAALERDALPEGDASPLGPYLLPSGAPERGSPGKEHPEERVVTAPPSSSQSAEVLGELVLDGTAPSAHHDIPALSPLLPEEARPKHALPPKKKLPSLKQVNSARKQLRPKATSAATVQRAGSQPASQGLDLLSSSTEKPGPPGDPDPIVASEEASEVPLWLDRKESAVPTTPAPLQISPFTSQPYVAHTLPQRPEPGEPGPDMAQEAPQEDTSPMALMDKGENELTGSASEESQETTTSTIITTTVITTEQAPALCSVSFSNPEGYIDSSDYPLLPLNNFLECTYNVTVYTGYGVELQVKSVNLSDGELLSIRGVDGPTLTVLANQTLLVEGQVIRSPTNTISVYFRTFQDDGLGTFQLHYQAFMLSCNFPRRPDSGDVTVMDLHSGGVAHFHCHLGYELQGAKMLTCINASKPHWSSQEPICSAPCGGAVHNATIGRVLSPSYPENTNGSQFCIWTIEAPEGQKLHLHFERLLLHDKDRMTVHSGQTNKSALLYDSLQTESVPFEGLLSEGNTIRIEFTSDQARAASTFNIRFEAFEKGHCYEPYIQNGNFTTSDPTYNIGTIVEFTCDPGHSLEQGPAIIECINVRDPYWNDTEPLCRAMCGGELSAVAGVVLSPNWPEPYVEGEDCIWKIHVGEEKRIFLDIQFLNLSNSDILTIYDGDEVMPHILGQYLGNSGPQKLYSSTPDLTIQFHSDPAGLIFGKGQGFIMNYIEVSRNDSCSDLPEIQNGWKTTSHTELVRGARITYQCDPGYDIVGSDTLTCQWDLSWSSDPPFCEKIMYCTDPGEVDHSTRLISDPVLLVGTTIQYTCNPGFVLEGSSLLTCYSRETGTPIWTSRLPHCVLAEAAAETSLEGGNMALAIFIPVLIISLLLGGAYIYITRCRYYSNLRLPLMYSHPYSQITVETEFDNPIYETGETREYEVSI

SEQ ID NO: 71355 - DNA, 2847 bp, Artificial Sequence
  derived and/or modified sequence
atgcctgcagccagaccacctgccgccggactgcgcggcatcagccttttcttggctctgctcctgggcagcccagctgctgctctcgaacgtgatgccctgcctgaaggcgacgcctctccccttgggccctatctgttgcccagtggcgcccctgagcggggttctcccggaaaagaacacccagaggagcgtgtggtgacagctcctccttcctccagccagtctgcggaagttctcggagagctggtattggacggcacagccccatcagcccatcacgacatccctgcactgagcccattgctcccggaagaggccagacctaaacatgcactcccccctaagaaaaaactgccttcattgaaacaagttaacagtgcacggaagcagttacgaccgaaagccacatcggcagcgacagtgcagcgtgccggctctcagcccgccagtcaagggctggatctgctgtcctcgagcacagaaaagccagggccaccaggagacccagacccgatagttgccagtgaggaggcctctgaagtaccactctggctggatcggaaagaatcggccgtgccaaccacacctgctcctttgcagatcagtccattcaccagtcagccatatgtcgctcacacactgccgcaacgccctgagcctggtgagcccggacccgacatggcacaggaagccccccaggaggacacaagtccaatggccttgatggacaaaggcgagaatgaactgaccggctccgcttccgaggaaagccaggagactactactagcaccataatcaccactaccgtgatcacaactgaacaggcgcctgctctttgttcagtctccttttcgaatccagagggctatatcgatagttcagactatcccctgcttccactgaataacttcttagagtgtacgtacaacgtgacagtctacactggctatggcgtcgagctgcaggtgaaatctgtgaatcttagcgatggcgaactgctctctattaggggagttgacggtcctacattaaccgtgcttgcgaatcaaaccctgttggtcgaaggccaagtgatcaggtctcctacaaacaccatcagcgtttacttccgcacatttcaggacgatggattaggtacattccagctacactaccaagcctttatgttaagctgcaacttccctagacgacccgattctggtgatgtaaccgtgatggatcttcacagcgggggcgtcgcccattttcattgtcacctagggtatgagttacaaggggctaaaatgctgacatgcatcaacgcctccaagccacattggtcctcacaggagccaatctgttcagcaccatgtgggggagcagtccataacgctaccatcggccgcgtgctgagcccttcataccctgagaacacaaacggatcacagttttgcatctggaccatcgaggcacctgaaggacagaaactgcatttacacttcgagcggcttttgctgcacgacaaggaccggatgaccgttcatagtgggcaaaccaacaaatccgcacttctatacgactcactgcagacagagtccgtgccttttgaggggttgctctctgaaggcaacacgattaggatcgaattcacatcagatcaagcccgagccgcaagcacattcaatatacggtttgaggctttcgagaagggacattgctacgaaccatacatccagaatggaaacttcaccacctctgatccgacctacaatatagggaccattgtggaatttacctgtgaccccggtcattcattggaacaggggcctgcgattattgaatgcataaatgttcgcgatccgtattggaacgataccgagcccctttgtcgggcgatgtgtgggggtgagctttctgccgttgctggtgtggtactgtcgccgaattggccagaaccctacgttgaaggcgaagattgcatatggaagatccatgtcggcgaggaaaagagaatcttcttagatatccagtttctgaatctctcaaattctgacattctcacgatctacgatggagacgaagtgatgccacatatattagggcaatatcttggaaactcgggtccccagaaattatactcatcaactccagacctaaccatccagtttcactctgatcccgctggactaatttttggtaaaggacaggggttcattatgaactacattgaggtaagccggaatgactcctgttccgatctgccagaaatccagaacggctggaaaacaacctctcatacagaactggtccgtggagcccgcatcacctatcagtgcgacccagggtatgatatcgtaggcagtgatacacttacatgccagtgggatctgtcttggagcagcgaccccccattttgtgaaaagataatgtactgcacagaccctggagaggtggatcacagcactaggcttatctctgatcccgttctgttggtggggaccactattcagtacacttgcaacccaggattcgtgctcgagggctcgtccttgctcacgtgttactcacgggaaactggtaccccgatctggacctcaaggctcccccactgcgtccttgcagaggccgcagctgagacatccttggaaggaggcaatatggccctcgccattttcattcccgtgttgatcatctcgctactcctgggcggcgcgtatatctatattacccgctgccggtactattctaacctccgcctgccccttatgtatagtcacccgtatagccagattacagttgaaacagagtttgataaccctatctatgagacaggcgaaacaagagaatatgaagtatctatctag

SEQ ID NO: 71356 - DNA, 2847 bp, Artificial Sequence
  derived and/or modified sequence
atgcctgctgcccggcccccagctgctggcctgcggggcatcagcctcttcctggccctgctgctgggcagccctgctgctgccctggagagagatgccctgcctgaaggagatgccagccccctgggcccctacctgctgcccagcggggcccctgagcggggcagccctgggaaggagcaccctgaggagcgggtggtgacagccccacccagcagcagccagagcgctgaggtgctgggggagctggtgctggatggaacagcccccagcgcccaccacgacatcccagccctgagccccctgctgcctgaggaggcccggcccaagcacgccctgccccccaagaagaagctgcccagcctgaagcaggtgaacagcgccaggaagcagctgcggcccaaggccaccagcgctgccaccgtgcagagagctggcagccagcctgccagccagggcctggacctgctgagcagcagcacagagaagccaggccccccaggggaccctgaccccatcgtggccagcgaggaggccagcgaggtgcccctgtggctggacaggaaggagagcgctgtgcccaccaccccagcccccctgcagatcagccccttcaccagccagccctacgtggcccacaccctgccccagaggcctgagcctggagagcccggccctgacatggcccaggaggccccccaggaggacaccagccccatggccctgatggacaagggagaaaatgagctgactggaagtgccagcgaggagagccaggagaccaccaccagcaccatcatcaccaccaccgtcatcaccacagagcaggccccagccctgtgcagcgtgtccttcagcaaccctgagggctacatcgacagcagtgactaccccctgctgcccctgaacaacttcctggagtgcacctacaacgtgacagtgtacacaggctacggcgtggagctgcaggtgaagtctgtgaacctgagtgatggagagctgctgagcatccggggcgtggatggccccaccctgactgtgctggccaaccagaccctgctggtggagggccaggtgatccgcagccccaccaacaccatctctgtgtacttccgcaccttccaggatgatggcctgggcaccttccagctgcactaccaggccttcatgctgagctgcaacttccccaggaggccagattctggagatgtgacagtgatggacctgcacagcggaggagtggcccacttccactgccacctgggctatgagctgcagggcgccaagatgctgacctgcatcaatgccagcaagccccactggagcagccaggagcccatctgcagcgccccctgtggcggcgctgtgcacaatgccaccatcggccgggtgctgagccccagctacccagagaacaccaacggcagccagttctgcatctggaccatcgaggcccctgagggccagaagctgcacctgcactttgagcggctgctgctgcatgacaaggacaggatgacagtgcacagcggccagaccaacaagagcgccctgctgtatgacagcctgcagacagaatctgtgccctttgagggcctgctgtctgagggcaacaccatccgcatcgagttcaccagtgaccaggcccgggccgccagcaccttcaacatccgctttgaggcctttgagaagggccactgctatgagccctacatccagaatggaaacttcaccaccagtgaccccacctacaacatcggcaccatcgtggagttcacctgtgaccccggccacagcctggagcagggccctgccatcatcgagtgcatcaacgtgcgggacccctactggaatgacacagagcccctgtgccgggccatgtgtggcggggagctgtctgctgtggccggcgtggtgctgagccccaactggccagagccctacgtggagggggaggactgcatctggaagatccacgtgggggaggagaagaggatcttcctggacatccagttcctgaacctgagcaacagcgacatcctgaccatctatgatggagatgaggtgatgccccacatcctgggccagtacctgggcaacagcggcccccagaagctgtacagcagcaccccagacctgaccatccagttccacagcgaccctgctggcctcatctttgggaagggccagggcttcatcatgaactacatcgaggtgtccagaaatgacagctgcagcgacctgcctgagatccagaatggctggaagaccaccagccacacagagctggtgcggggggcccgcatcacctaccagtgtgaccccggctatgacatcgtgggcagtgacaccctgacctgccagtgggacctgtcctggagcagtgacccccccttctgtgagaagatcatgtactgcacagatcctggagaggtggaccacagcaccaggctcatcagtgaccctgtgctgctggtgggcaccaccatccagtacacctgcaaccctggctttgtgctggagggcagcagcctgctgacctgctacagccgggagaccggcacccccatctggaccagccggctgccccactgtgtgctggccgaggccgctgctgagaccagcctggagggcggcaacatggccctggccatcttcatccctgtgctgatcatcagcctgctgctgggcggggcctacatctacatcacccgctgccgctactacagcaacctgcggctgcccctgatgtacagccacccctacagccagatcaccgtggagacagaatttgacaaccccatctatgagaccggggagacccgggagtatgaggtgtccatctag

SEQ ID NO: 71357 - DNA, 2847 bp, Artificial Sequence
  derived and/or modified sequence
atgcccgccgcccggccccccgccgccggcctgcggggcatcagcctgtttcttgctctcctgctcggttctcccgctgcagccctggaacgggatgccctgcccgaaggcgacgcctcccccctgggaccctatttgctgccctccggcgcgccagagcggggaagcccgggtaaagaacaccctgaggagagagtggtgaccgcaccaccctcgagctcccagtctgcagaggtgttaggagaactggtgttggacggtactgctccatccgcccaccacgacattccggctctgagccctctcctcccagaggaggcaaggcctaagcacgctctcccacctaaaaagaagctgccatccctgaaacaggtcaattccgcccgcaagcagctcaggccaaaagctacttctgctgctaccgtgcagcgagcggggagccaaccagcctcccagggcctcgatctcctgagttcaagtaccgagaaaccaggacccccaggcgaccccgatccaatagtggcctccgaagaagcgtccgaagtcccactgtggcttgatcgtaaagagtcagcggtacccaccactccggccccacttcagatcagtccctttacaagtcaaccatatgtggcccacacacttccccaacggccagagccgggggagccaggaccagacatggcccaagaggcaccccaggaggacacctcacctatggctctaatggacaagggcgaaaacgaattgaccgggtctgcttctgaagaaagccaggagactaccaccagtacaatcatcactacaactgtgataacaactgagcaggctcccgctctgtgttccgtgtccttttccaatcctgaaggatacattgattcaagcgactacccgttgctgcctcttaataacttcttggagtgtacatacaacgttacagtctacactggttacggcgtagagcttcaggttaagagcgttaatctgagtgatggggagcttctgtccatccggggagtggacggacctaccctgaccgtgttagcaaaccagaccctgctcgtggaagggcaggtaatcagatctcccaccaacaccatctccgtttattttcgcacctttcaggatgacggactcggtaccttccagctgcactaccaggcctttatgttgtcttgcaactttccccggaggccagacagtggtgacgtgaccgtgatggatttgcactccggcggggttgcccactttcactgccaccttggctacgagctgcagggggccaaaatgcttacatgcattaacgcctctaaacctcattggtcctcccaggaaccgatctgctctgccccttgcgggggcgctgttcataatgctacgattggccgggtgctgtccccctcttatccagaaaacaccaatgggtctcagttctgtatttggactatcgaggcccctgaagggcaaaagctgcacctccattttgagcgtctgctgctgcacgacaaggatcgcatgaccgtccacagcgggcagactaacaagtctgctctgttgtacgactctctacagaccgagagtgtgccttttgaaggcctgctcagcgaggggaacactatccgaatcgagtttaccagtgaccaggcaagggccgcgagtacctttaatatcaggtttgaagcctttgagaaagggcactgttatgaaccgtacattcagaatggtaactttacgacatctgatcccacttataacattgggactattgtcgagtttacctgcgaccctgggcacagcttagagcaaggccccgccatcatcgagtgcatcaatgttcgggacccatactggaacgacactgagccattgtgcagagctatgtgcggaggggagctctcagccgtcgctggggtagtgctgagccccaactggccagagccatatgttgagggcgaagattgcatctggaagattcacgtaggggaggaaaaaagaatctttctggatatacagttcctgaatctatccaattctgatattttgaccatttatgatggagatgaagtgatgccgcatatccttggtcagtatcttggcaattctgggccacagaagctgtacagctctacacccgacctgaccatacagtttcacagcgatcccgccgggctcatcttcggtaagggccagggatttattatgaactatatcgaagtgagccgtaacgactcttgctctgatttgccagaaatccagaatggatggaaaacaacatcccacaccgaacttgtgcgtggagcacggattacctatcaatgtgacccaggatacgatatagtcggaagtgacactctaacttgccagtgggacctaagttggtcctcagatccaccattctgtgagaagatcatgtactgcaccgaccctggcgaggtagaccacagtactcgactcatcagtgaccctgttctactggtgggtacgaccattcagtacacttgtaatcctgggtttgtattggaaggatcaagcctcttgacttgttactcccgcgagaccggaactcccatctggacttcacgcctgccacactgtgtgttagctgaggccgcagcagaaacctccctggaggggggcaatatggccctcgccatttttattccagtgctgattattagcttactcttagggggcgcctatatctatataactaggtgtcgatattactcgaacctgcggctgccattaatgtacagccacccatattcccagatcaccgtcgagaccgaattcgacaaccccatctatgagacgggagagacaagagaatatgaggtatcaatatag

SEQ ID NO: 71358 - DNA, 2847 bp, Artificial Sequence
  derived and/or modified sequence
atgcccgctgccaggccgcctgccgcaggcctccgaggcatctcacttttcctggcgctgcttctcggatcccctgcggctgctctcgagagagatgccctgcccgaaggagatgcatctcccctgggaccttaccttctgccgtctggggctccagagagaggatctccaggtaaagagcacccggaagagcgcgtggtgaccgcccctccctcctcttctcagtctgccgaagtgctcggcgaacttgttctcgacggtaccgctccaagcgcccaccacgacattcccgctctgtccccactactaccagaggaagctaggcccaaacacgccttaccaccgaaaaagaaactgccttctttgaagcaggttaacagcgcaagaaagcagttgagaccaaaagcgacaagcgccgctactgttcagagggcgggaagtcagcccgcaagccaaggtcttgatctgttgagcagctccacggaaaaacccggacctcccggagacccggatcccatcgttgcaagcgaagaagccagtgaggtcccgctgtggctggaccgaaaggaatcagctgttcctaccaccccagcaccccttcaaatctctcccttcactagccagccatatgttgcacacacattgccacagaggccggagcctggcgagcctggcccagacatggctcaggaggccccacaggaagacaccagccctatggccctcatggataagggggagaacgaactcaccggctcagccagtgaagaaagtcaagagaccacaaccagtactattatcaccacgaccgtcattaccacagaacaggctcctgccttatgctccgtctccttttcaaacccagagggttacatcgacagttcagactacccactacttcctctgaacaacttcctggagtgcacctacaacgttacggtctacactggatacggcgtggagctgcaggtgaagagtgtgaatctgagcgacggagaactgctcagcattaggggcgttgacgggccaaccctgacagtgctggccaaccagactctgctggtagagggtcaagtgattcgatctccgactaataccatctctgtctatttccgaacctttcaggacgatggcctagggactttccagctgcactaccaggcatttatgctgtcttgtaatttccctcgacgacccgattcaggagatgtaaccgtaatggacctgcactcgggcggagtagctcactttcattgtcacctgggctatgagttacagggcgctaagatgctgacctgcatcaacgccagcaaaccgcattggtcgagtcaggaaccgatctgcagcgctccttgtggaggagccgtgcacaatgctaccatcggcagggtgctctcgccctcttaccccgagaacaccaatggcagtcagttctgcatctggactatcgaggcaccagaggggcaaaagctccatttgcacttcgagagactcctcttacacgacaaagaccgaatgactgtgcactccggccagaccaataagtcagcattgctgtacgacagtctgcagacagaaagcgttcctttcgaggggctcttatcagaagggaatacgataagaatcgagtttactagcgatcaagctcgggcagcgagcacttttaacattcgctttgaagctttcgaaaaaggacactgctacgagccctatatccagaatggcaacttcacaacaagtgatccaacatacaacataggcacgattgtagaatttacctgcgacccagggcacagccttgaacagggaccagcaattatcgaatgcatcaatgtcagagacccttactggaatgacacggagcccctctgtcgggcaatgtgcggcggtgaactgagtgctgtggccggagtcgtgttatcccccaattggcctgagccttatgtggagggagaagattgcatctggaaaatccacgttggcgaggaaaaacgtatctttctagatatacagttcctcaatttatcaaattcagatatcttgacaatctatgatggagatgaggtaatgccacacattcttggtcagtatttgggaaactccgggcctcagaaactatatagctcaacgccagatttaactattcagtttcactccgatcccgctggcctgatctttggcaagggacagggattcatcatgaattacattgaggtctcaagaaacgactcttgtagcgatctgccagagatacagaacggctggaagaccacaagccacacagagctcgtgcgaggagccaggattacatatcagtgcgaccccggatacgatatcgtcggttccgataccttgacatgccagtgggatcttagctggagcagcgacccgccattctgcgaaaagataatgtactgcacagacccaggggaggttgatcattccacgaggctcattagtgaccccgttctccttgtgggcacaactatccaatatacatgcaatcctgggtttgtgctggagggttcatcactcttaacgtgttacagccgagagacaggcacgcccatttggacctctcggctaccgcattgtgtgctggcggaagcagcggctgagacatcactcgaaggcggtaatatggctttagccattttcatacctgttctcatcatctctctgcttctgggtggcgcatatatatacatcactcgttgtcggtattactccaatctgaggttacctctgatgtactcacacccctacagccagattacagtggagacagagtttgacaatcccatttacgagacgggggagacccgcgaatatgaggttagtatctag

SEQ ID NO: 71359 - DNA, 2898 bp, Artificial Sequence
  derived and/or modified sequence
cctgcagccacgatgcccgcggcccggccgcccgccgcgggactccgcgggatctcgctgttcctcgctctgctcctggggagcccggcggcagcgctggagcgagatgctcttcccgagggagatgctagccctttgggtccttacctcctgccctcaggagccccggagagaggcagtcctggcaaagagcaccctgaagagagagtggtaacagcgccccccagttcctcacagtcggcggaagtgctgggcgagctggtgctggatgggaccgcaccctctgcacatcacgacatcccagccctgtcaccgctgcttccagaggaggcccgccccaagcacgccttgccccccaagaagaaactgccttcgctcaagcaggtgaactctgccaggaagcagctgaggcccaaggccacctccgcagccactgtccaaagggcagggtcccagccagcgtcccagggcctagatctcctctcctcctccacggagaagcctggcccaccgggggacccggaccccatcgtggcctccgaggaggcatcagaagtgcccctttggctggaccgaaaggagagtgcggtccctacaacacccgcacccctgcaaatctcccccttcacttcgcagccctatgtggcccacacactcccccagaggccagaacccggggagcctgggcctgacatggcccaggaggccccccaggaggacaccagccccatggccctgatggacaaaggtgagaatgagctgactgggtcagcctcagaggagagccaggagaccactacctccaccattatcaccaccacggtcatcaccaccgagcaggcaccagctctctgcagtgtgagcttctccaatcctgaggggtacattgactccagcgactacccactgctgcccctcaacaactttctggagtgcacatacaacgtgacagtctacactggctatggggtggagctccaggtgaagagtgtgaacctgtccgatggggaactgctctccatccgcggggtggacggccctaccctgaccgtcctggccaaccagacactcctggtggaggggcaggtaatccgaagccccaccaacaccatctccgtctacttccggaccttccaggacgacggccttgggaccttccagcttcactaccaggccttcatgctgagctgcaactttccccgccggcctgactctggggatgtcacggtgatggacctgcactcaggtggggtggcccactttcactgccacctgggctatgagctccagggcgctaagatgctgacatgcatcaatgcctccaagccgcactggagcagccaggagcccatctgctcagctccttgtggaggggcagtgcacaatgccaccatcggccgcgtcctctccccaagttaccctgaaaacacaaatgggagccaattctgcatctggacgattgaagctccagagggccagaagctgcacctgcactttgagaggctgttgctgcatgacaaggacaggatgacggttcacagcgggcagaccaacaagtcagctcttctctacgactcccttcaaaccgagagtgtcccttttgagggcctgctgagcgaaggcaacaccatccgcatcgagttcacgtccgaccaggcccgggcggcctccaccttcaacatccgatttgaagcgtttgagaaaggccactgctatgagccctacatccagaatgggaacttcactacatccgacccgacctataacattgggactatagtggagttcacctgcgaccccggccactccctggagcagggcccggccatcatcgaatgcatcaatgtgcgggacccatactggaatgacacagagcccctgtgcagagccatgtgtggtggggagctctctgctgtggctggggtggtattgtccccaaactggcccgagccctacgtggaaggtgaagattgtatctggaagatccacgtgggagaagagaaacggatcttcttagatatccagttcctgaatctgagcaacagtgacatcttgaccatctacgatggcgacgaggtcatgccccacatcttggggcagtaccttgggaacagtggcccccagaaactgtactcctccacgccagacttaaccatccagttccattcggaccctgctggcctcatctttggaaagggccagggatttatcatgaactacatagaggtatcaaggaatgactcctgctcggatttacccgagatccagaatggctggaaaaccacttctcacacggagttggtgcggggagccagaatcacctaccagtgtgaccccggctatgacatcgtggggagtgacaccctcacctgccagtgggacctcagctggagcagcgaccccccattttgtgagaaaattatgtactgcaccgaccccggagaggtggatcactcgacccgcttaatttcggatcctgtgctgctggtggggaccaccatccaatacacctgcaaccccggttttgtgcttgaagggagttctcttctgacctgctacagccgtgaaacagggactcccatctggacgtctcgcctgccccactgcgttttagcagaagcggcagcagagacgtcgctggaaggggggaacatggccctggctatcttcatcccggtcctcatcatctccttactgctgggaggagcctacatttacatcacaagatgtcgctactattccaacctccgcctgcctctgatgtactcccacccctacagccagatcaccgtggaaaccgagtttgacaaccccatttacgagacaggggaaaccagagagtatgaggtttctatctaaagagagctacacttgagaaggggacttgtgaactcaacc

SEQ ID NO: 71360 - DNA, 2847 bp, Artificial Sequence
  derived and/or modified sequence
atgcccgccgccagaccccccgccgccggcctgagaggcatcagcctgttcctggccctgctgctgggcagccccgccgccgccctggagagagacgccctgcccgagggcgacgccagccccctgggcccctacctgctgcccagcggcgcccccgagagaggcagccccggcaaggagcaccccgaggagagagtggtgaccgccccccccagcagcagccagagcgccgaggtgctgggcgagctggtgctggacggcaccgcccccagcgcccaccacgacatccccgccctgagccccctgctgcccgaggaggccagacccaagcacgccctgccccccaagaagaagctgcccagcctgaagcaggtgaacagcgccagaaagcagctgagacccaaggccaccagcgccgccaccgtgcagagagccggcagccagcccgccagccagggcctggacctgctgagcagcagcaccgagaagcccggcccccccggcgaccccgaccccatcgtggccagcgaggaggccagcgaggtgcccctgtggctggacagaaaggagagcgccgtgcccaccacccccgcccccctgcagatcagccccttcaccagccagccctacgtggcccacaccctgccccagagacccgagcccggcgagcccggccccgacatggcccaggaggccccccaggaggacaccagccccatggccctgatggacaagggcgagaacgagctgaccggcagcgccagcgaggagagccaggagaccaccaccagcaccatcatcaccaccaccgtgatcaccaccgagcaggcccccgccctgtgcagcgtgagcttcagcaaccccgagggctacatcgacagcagcgactaccccctgctgcccctgaacaacttcctggagtgcacctacaacgtgaccgtgtacaccggctacggcgtggagctgcaggtgaagagcgtgaacctgagcgacggcgagctgctgagcatcagaggcgtggacggccccaccctgaccgtgctggccaaccagaccctgctggtggagggccaggtgatcagaagccccaccaacaccatcagcgtgtacttcagaaccttccaggacgacggcctgggcaccttccagctgcactaccaggccttcatgctgagctgcaacttccccagaagacccgacagcggcgacgtgaccgtgatggacctgcacagcggcggcgtggcccacttccactgccacctgggctacgagctgcagggcgccaagatgctgacctgcatcaacgccagcaagccccactggagcagccaggagcccatctgcagcgccccctgcggcggcgccgtgcacaacgccaccatcggcagagtgctgagccccagctaccccgagaacaccaacggcagccagttctgcatctggaccatcgaggcccccgagggccagaagctgcacctgcacttcgagagactgctgctgcacgacaaggacagaatgaccgtgcacagcggccagaccaacaagagcgccctgctgtacgacagcctgcagaccgagagcgtgcccttcgagggcctgctgagcgagggcaacaccatcagaatcgagttcaccagcgaccaggccagagccgccagcaccttcaacatcagattcgaggccttcgagaagggccactgctacgagccctacatccagaacggcaacttcaccaccagcgaccccacctacaacatcggcaccatcgtggagttcacctgcgaccccggccacagcctggagcagggccccgccatcatcgagtgcatcaacgtgagagacccctactggaacgacaccgagcccctgtgcagagccatgtgcggcggcgagctgagcgccgtggccggcgtggtgctgagccccaactggcccgagccctacgtggagggcgaggactgcatctggaagatccacgtgggcgaggagaagagaatcttcctggacatccagttcctgaacctgagcaacagcgacatcctgaccatctacgacggcgacgaggtgatgccccacatcctgggccagtacctgggcaacagcggcccccagaagctgtacagcagcacccccgacctgaccatccagttccacagcgaccccgccggcctgatcttcggcaagggccagggcttcatcatgaactacatcgaggtgagcagaaacgacagctgcagcgacctgcccgagatccagaacggctggaagaccaccagccacaccgagctggtgagaggcgccagaatcacctaccagtgcgaccccggctacgacatcgtgggcagcgacaccctgacctgccagtgggacctgagctggagcagcgacccccccttctgcgagaagatcatgtactgcaccgaccccggcgaggtggaccacagcaccagactgatcagcgaccccgtgctgctggtgggcaccaccatccagtacacctgcaaccccggcttcgtgctggagggcagcagcctgctgacctgctacagcagagagaccggcacccccatctggaccagcagactgccccactgcgtgctggccgaggccgccgccgagaccagcctggagggcggcaacatggccctggccatcttcatccccgtgctgatcatcagcctgctgctgggcggcgcctacatctacatcaccagatgcagatactacagcaacctgagactgcccctgatgtacagccacccctacagccagatcaccgtggagaccgagttcgacaaccccatctacgagaccggcgagaccagagagtacgaggtgagcatctag

SEQ ID NO: 71361 - protein, 737 aa, Artificial Sequence
  derived and/or modified sequence
MNTSGDPAQTGPEGCRGTMSAEEDARWLRWVTQQFKTIAGEDGEISLQEFKAALHVKESFFAERFFALFDSDRSGTITLQELQEALTLLIHGSPMDKLKFLFQVYDIDGSGSIDPDELRTVLQSCLRESAISLPDEKLDQLTLALFESADADGNGAITFEELRDELQRFPGVMENLTISAAHWLTAPAPRPRPRRPRQLTRAYWHNHRSQLFCLATYAGLHVLLFGLAASAHRDLGASVMVAKGCGQCLNFDCSFIAVLMLRRCLTWLRATWLAQVLPLDQNIQFHQLMGYVVVGLSLVHTVAHTVNFVLQAQAEASPFQFWELLLTTRPGIGWVHGSASPTGVALLLLLLLMFICSSSCIRRSGHFEVFYWTHLSYLLVWLLLIFHGPNFWKWLLVPGILFFLEKAIGLAVSRMAAVCIMEVNLLPSKVTHLLIKRPPFFHYRPGDYLYLNIPTIARYEWHPFTISSAPEQKDTIWLHIRSQGQWTNRLYESFKASDPLGRGSKRLSRSVTMRKSQRSSKGSEILLEKHKFCNIKCYIDGPYGTPTRRIFASEHAVLIGAGIGITPFASILQSIMYRHQKRKHTCPSCQHSWIEGVQDNMKLHKVDFIWINRDQRSFEWFVSLLTKLEMDQAEEAQYGRFLELHMYMTSALGKNDMKAIGLQMALDLLANKEKKDSITGLQTRTQPGRPDWSKVFQKVAAEKKGKVQVFFCGSPALAKVLKGHCEKFGFRFFQENF

SEQ ID NO: 71362 - DNA, 2214 bp, Artificial Sequence
  derived and/or modified sequence
atgaacacgagcggagatcccgcccaaactggacctgaaggctgtcggggtaccatgagcgccgaggaagacgccagatggctccgctgggtaacacagcagttcaagactattgcaggtgaggacggggagatctctttgcaggagttcaaagcggctctgcacgttaaggaaagttttttcgcggaaagatttttcgcactgtttgatagcgataggagtggtacaatcactctccaggaattgcaagaagccctgacgttacttatccacgggagtccaatggataaacttaagttcttgttccaggtttacgatattgacggtagcggaagcatcgatcctgatgagctgcgcaccgtcctgcagtcgtgcctgcgcgaaagcgcaatttccctacccgatgagaagctcgaccagctcactctcgccttatttgaatctgctgacgcagatggcaacggagcaatcacctttgaggagctgcgagacgaactgcaacggttccccggtgtcatggagaacctgacaattagtgcagcacactggctgaccgcccctgcgccccgtccacggccccggcggcccagacaactgacccgggcatattggcataatcaccgtagccagttgttctgcctcgcaacctatgcaggcctccacgtgctgttattcggtctggctgcatcagcccatcgtgatctgggcgcttctgtcatggtggccaaggggtgcgggcagtgcttgaacttcgactgctcgttcatcgccgtcttgatgctgaggcgatgtctaacctggctcagggctacttggctggcccaggtcttacctctagatcaaaatatccagtttcatcaattgatgggttatgtggtcgttgggctgagtctggtacacaccgtcgcccacacagtcaacttcgttcttcaggctcaggcagaagcttcaccctttcagttttgggaacttttgctcactactcgccctggaatcggctgggtacatggatctgccagccctacaggcgtggccctcctcttgctccttttactaatgttcatttgctcatcgtcttgcatcaggcgatctgggcattttgaggtattctattggacccatctcagctacttattggtctggctcctccttatctttcacggaccgaacttttggaaatggctgctcgtccccggcatcttattctttctcgaaaaggcaattggattggcggtaagcagaatggccgccgtctgtatcatggaagtcaacttattgccatcaaaggtcacccatcttctgataaaaaggccccctttctttcattatagaccaggcgactacctgtatctcaatatccccacaatagcccgttacgagtggcacccctttaccatcagcagcgcaccagagcagaaagacacaatctggttgcatattcggagccagggacaatggactaaccgcctgtacgagtcattcaaagccagcgatccactcgggcggggttcgaagcgcctgtctagaagtgtaacaatgcggaagtctcagcgtagttctaagggtagtgagattctgcttgaaaagcataaattctgcaacattaagtgctacatcgacggtccctatggaacacctacacggcgcatctttgcttccgagcatgccgtgctcataggggccggaatcggaattactccgtttgcatcaatcttacagtccataatgtatagacaccagaagaggaagcacacctgtccttcctgccagcactcctggatcgagggcgtgcaggacaacatgaaactgcataaagtcgatttcatctggatcaaccgcgaccagcgaagctttgagtggtttgttagcctcttaaccaagctggagatggaccaggccgaagaggcacagtacgggcgatttctcgagctgcatatgtacatgacctcagccctcggaaagaatgatatgaaagcgatcggactgcagatggctctggatctgctggctaacaaagaaaagaaggacagcatcaccggcttgcagacccgaactcagccgggacggccggactggtcgaaggttttccagaaagttgcagccgaaaaaaagggcaaggtccaagtgtttttttgcggaagccctgccctagctaaggtgttaaaaggccactgcgagaagttcgggttccggttttttcaggagaacttctag

SEQ ID NO: 71363 - DNA, 2214 bp, Artificial Sequence
  derived and/or modified sequence
atgaacaccagcggggaccctgcccagacaggccctgagggctgccggggcaccatgtctgcagaagaagatgcccgctggctgcgctgggtgacccagcagttcaagaccatcgctggagaagatggagagatcagcctgcaggagttcaaggccgccctgcacgtgaaggagagcttctttgctgagcgcttctttgccctgtttgacagcgacaggagcggcaccatcaccctgcaggagctgcaggaggccctgaccctgctgattcatggcagccccatggacaagctgaagttcctgttccaggtgtatgacattgatggcagcggcagcattgatcctgatgagctgaggacagtgctgcagagctgcctgcgggagagcgccatcagcctgcctgatgagaagctggaccagctgaccctggccctgtttgagagcgcagatgctgatggaaatggagccatcacctttgaggagctgagagatgagctgcagcgcttccctggggtgatggagaacctgaccatctctgctgcccactggctgacagccccagccccccggccccggccccggcggccccggcagctgacccgggcctactggcacaaccacaggagccagctgttctgcctggccacctacgccggcctgcacgtgctgctgtttggcctggccgccagcgcccaccgggacctgggcgcctctgtgatggtggccaagggctgcggccagtgcctgaactttgactgcagcttcatcgctgtgctgatgctgcggcgctgcctgacctggctgcgggccacctggctggcccaggtgctgcccctggaccagaacatccagttccaccagctgatgggctacgtggtggtgggcctgagcctggtgcacacagtggcccacacagtgaactttgtgctgcaggcccaggccgaggccagccccttccagttctgggagctgctgctgaccacccggcccggcatcggctgggtgcacggcagcgccagccccaccggggtggccctgctgctgctgctgctgctgatgttcatctgcagcagcagctgcatccgccgcagcggccactttgaggtgttctactggacccacctgagctacctgctggtgtggctgctgctgatcttccacggccccaacttctggaagtggctgctggtgcccggcatcctcttcttcctggagaaggccatcggcctggccgtgtccaggatggctgctgtgtgcatcatggaggtgaacctgctgcccagcaaggtgacccacctgctgatcaagaggcctcccttcttccactacagacctggggactacctgtacctgaacatccccaccatcgcccgctatgagtggcaccccttcaccatcagcagcgcccctgagcagaaggacaccatctggctgcacatccgcagccagggccagtggaccaaccggctgtatgagagcttcaaggccagtgaccccctgggccggggcagcaagaggctgagccgctctgtgaccatgaggaagagccagaggagcagcaaaggaagtgagatcctgctggagaagcacaagttctgcaacatcaagtgctacattgatggcccctacggcacccccacccggcgcatctttgccagcgagcacgctgtgctgattggagctggcatcggcatcaccccatttgccagcatcctgcagagcatcatgtaccgccaccagaagaggaagcacacctgccccagctgccagcacagctggattgagggcgtgcaggacaacatgaagctgcacaaggtggacttcatctggatcaacagagaccagaggagctttgagtggtttgtgtccctgctgaccaagctggagatggaccaggccgaggaggcccagtatggccgcttcctggagctgcacatgtacatgaccagcgccctgggcaagaatgacatgaaggccatcggcctgcagatggccctggacctgctggccaacaaggagaagaaggacagcatcaccggcctgcagaccaggacccagcccggccgcccagactggagcaaggtgttccagaaggtggccgctgagaagaagggcaaggtgcaggtgttcttctgtggcagccctgccctggccaaggtgctgaagggccactgtgagaagtttggcttccgcttcttccaggagaacttctag

SEQ ID NO: 71364 - DNA, 2289 bp, Artificial Sequence
  derived and/or modified sequence
agtctttctgggacctgtgatctagaagacaggagaagatgaacacatctggagacccagcccagacgggccctgaaggctgtagaggcaccatgagtgccgaggaggatgccaggtggctccggtgggtgactcagcagtttaagaccattgcaggagaagatggggagatcagcctgcaagaattcaaagcagctctgcatgtgaaagagtccttctttgcagagcgattctttgccctatttgactccgatagaagtggcaccatcaccctccaggagctgcaggaggcactgaccctgctcatccatggcagccccatggacaaactcaaattcctcttccaggtgtatgacatcgatggcagtggctccattgacccggatgagctgcgcactgtgctgcagtcgtgtctgcgcgagagcgccatctcgctgcctgacgagaagctggaccagctgacgctggcgctcttcgaatcggccgacgcggacggcaacggggccatcaccttcgaggagctccgggacgagctgcagcgcttccccggagtcatggagaacctgaccatcagcgctgcccactggctgacggcccccgccccccgcccacgcccgcgccggccgcgccagctgacccgcgcctactggcacaaccaccgcagccagctgttctgcctggccacctatgcaggcctccacgtgctgctcttcgggctggcggccagcgcgcaccgggacctcggcgccagcgtcatggtggccaagggctgcggccagtgcctcaacttcgactgcagcttcatcgcggtgctgatgctcagacgctgcctcacctggctgcgggccacgtggctggctcaagtcctaccactggaccagaacatccagttccaccagcttatgggctacgtggtagtggggctgtccctcgtgcacaccgtggctcacactgtgaactttgtactccaggctcaggcggaggccagccctttccagttctgggagctgctgctcaccacgaggcctggcattggctgggtacacggttcggcctccccgacaggtgtcgctctgctgctgctgctcctcctcatgttcatctgctccagttcctgcatccgcaggagtggccactttgaggtgttctattggactcacctgtcctacctcctcgtgtggcttctgctcatctttcatgggcccaacttctggaagtggctgctggtgcctggaatcttgtttttcctggagaaggccatcggactggcagtgtcccgcatggcagccgtgtgcatcatggaagtcaacctcctcccctccaaggtcactcatctcctcatcaagcggccccctttttttcactatagacctggtgactacttgtatctgaacatccccaccattgctcgctatgagtggcaccccttcaccatcagcagtgctcctgagcagaaagacactatctggctgcacattcggtcccaaggccagtggacaaacaggctgtatgagtccttcaaggcatcagacccactgggccgtggttctaagaggctgtcgaggagtgtgacaatgagaaagagtcaaaggtcgtccaagggctctgagatacttttggagaaacacaaattctgtaacatcaagtgctacatcgatgggccttatgggacccccacccgcaggatctttgcctctgagcatgccgtgctcatcggggcaggcatcggcatcaccccctttgcttccattctgcagagtatcatgtacaggcaccagaaaagaaagcatacttgccccagctgccagcactcctggatcgaaggtgtccaagacaacatgaagctccataaggtggactttatctggatcaacagagaccagcggtctttcgagtggtttgtgagcctgctgactaaactggagatggaccaggccgaggaggctcaatacggccgcttcctggagctgcatatgtacatgacatctgcactgggcaagaatgacatgaaggccattggcctgcagatggcccttgacctcctggccaacaaggagaagaaagactccatcacggggctgcagacgcgcacccagcctgggcggcctgactggagcaaggtgttccagaaagtggctgctgagaagaagggcaaggtgcaggtcttcttctgtggctccccagctctggccaaggtgctgaagggccattgtgagaagttcggcttcagatttttccaagagaatttctagcctcacctctccaagctctgccccaagtccacaccat

SEQ ID NO: 71365 - DNA, 2214 bp, Artificial Sequence
  derived and/or modified sequence
atgaacaccagcggcgaccccgcccagaccggccccgagggctgcagggggactatgtcagcggaggaagatgcaaggtggctgcgctgggttacacagcagtttaaaacaattgcaggagaggatggggagatctccctgcaggaattcaaagccgcactgcatgtcaaagaatccttctttgcagagcgctttttcgccttgtttgactccgatagaagcggaacaattacattgcaggaattgcaggaggccctcactctgctgatccacggtagccccatggataaactgaagttcctcttccaagtttacgacatcgacggttctggatccattgatcctgatgaactccgcacagtgctgcagagctgcttgagagaatccgccatcagcctgcccgatgagaagctcgatcagctgactctcgccctctttgaatcagcagacgccgatggcaacggggctattactttcgaggaactgcgtgatgagctacagaggtttcccggagttatggagaacctcactatttcagccgcccattggctgaccgcccccgccccccggccgcgcccacgaaggcctaggcagttgactagggcttactggcacaatcacagatcacaattgttttgtctcgccacatacgctggccttcacgtgctgttatttggcttggccgcttctgcccatcgggatcttggagccagtgtgatggtcgctaaagggtgtgggcaatgtcttaattttgactgtagtttcattgctgtcctcatgctgaggcgttgtcttacgtggctgagagccacgtggctcgcacaagtactgcccttggatcagaacatccagttccatcaactcatggggtacgttgtcgtcgggctgagtctcgtccacacggtcgcgcacacagtgaattttgtcctgcaggcacaggccgaagccagccctttccagttctgggagttgctcctgactacacggccgggtataggctgggtacatggatccgcatctccgacgggtgtagctctcctacttctcctcctcctcatgttcatctgcagcagcagctgcatacgcagatctggccatttcgaagtgttttactggacacatcttagttaccttctggtgtggttgctgctgatcttccacggtcccaacttttggaagtggcttctggtgccaggcattctcttttttttagagaaagcaataggattagccgtcagtcgcatggcagcagtctgtataatggaggtaaatctcttacctagtaaagtgacccatctattaattaagagaccgccatttttccactatcggcccggggactacctgtatctcaacattcctacaatcgctcgttatgaatggcacccattcactatcagcagcgcaccggaacagaaagacacaatctggctgcacattaggtctcagggtcagtggacaaatagactttacgaatcattcaaagcctctgaccctctcggcagaggcagcaagcgtctgagtagaagcgtgactatgaggaaatcccagcgcagtagcaaggggtcagagattctgctggaaaagcacaagttctgtaatataaagtgctacatagatggaccttatggaacacccacgcgccgaatcttcgcctccgaacacgcagtgttgattggagccgggatcggtattacccccttcgcatctatactccaatcaattatgtaccggcaccagaagcggaagcacacttgccctagttgtcagcacagctggatcgaaggagtgcaggacaatatgaagctacacaaagtggacttcatttggatcaaccgggaccagaggtcattcgaatggtttgtttctctcctgacgaaacttgagatggaccaagcggaagaggcccagtatgggaggtttcttgaactccacatgtacatgacaagtgctttaggtaagaatgatatgaaggccatcggtctgcagatggccctagatctgttggccaacaaagagaagaaagatagcattacaggacttcagacccggacccaacctggcaggcctgactggagtaaggtgttccagaaagtcgccgccgaaaaaaagggaaaagttcaggtcttcttttgcggaagccccgccctggccaaggtgctgaaaggccattgcgagaaatttggattcaggttcttccaggagaatttctag

SEQ ID NO: 71366 - DNA, 2214 bp, Artificial Sequence
  derived and/or modified sequence
atgaacacatccggagacccagctcagactgggcctgaaggctgccgtggcaccatgtctgccgaggaggatgctcgatggttgcgctgggttactcagcaattcaagactatagcaggggaagacggggagatttctctccaggagtttaaagccgctctgcacgtcaaagaatcctttttcgccgagcgctttttcgccctgttcgattctgataggtccgggactattacattgcaggaattgcaggaggcattaacattgctgatccacggatctccaatggacaaactcaagtttctttttcaagtgtacgatattgacggatctggttcgattgatccagatgagctgagaacagtgctgcagtcctgcctgagggagagcgcaatctcgctgcctgacgaaaagttagaccagctcacgttggccctcttcgaaagcgccgacgctgacggaaacggagcaatcacattcgaggagctcagggatgagctacagcgttttcctggggtcatggagaacctcaccatatccgcagcgcactggctgaccgccccagcgcctagacccagacctcggcgacccaggcagctcactcgcgcatactggcacaatcacaggtctcagctcttctgtctggccacttacgctgggcttcacgtactcctgtttggcctggccgcatccgcccatagggacctgggggcttccgtgatggtggcaaaaggatgtggccagtgcctgaacttcgactgttcttttatagcagtgctcatgctcagacggtgtcttacatggctgagggctacatggttggcccaggtgctgccactggatcagaacatccaatttcaccagttgatggggtatgtggtggtcgggctttctcttgttcataccgtcgctcacaccgttaacttcgtcctccaggcacaggccgaggcttcacctttccaattctgggagctcctgctgacaacacggcctgggattgggtgggtccatgggtcagcgtccccgacgggcgtggcactgctgctgctgctgctactgatgtttatctgctctagcagttgtatccggaggagtggccactttgaggtgttttactggactcacctttcctacctgcttgtgtggttactgctgatttttcacggacccaacttctggaagtggcttctggtgcctggcatattgtttttcttggagaaagcgataggcctcgcagtctctaggatggcggcagtgtgcattatggaggtcaacctgctgccttctaaggtgacacatctgctaatcaagaggcccccattctttcattacagaccgggagactacctgtatttaaatattccaaccatagcacggtacgaatggcatcccttcacaatctcgagcgcacctgaacagaaagacactatttggctgcatataaggagccaggggcaatggacgaaccggctatacgagtcttttaaagcatccgacccactggggagaggttctaagaggctatctagaagcgtgaccatgcgtaaaagccagcgcagtagtaagggatctgaaattctgctggagaagcacaagttttgtaacataaagtgctatatcgacggtccatatggaacacctacaaggcggatttttgcttccgaacatgctgtgctgattggagctggcatcggaatcacccctttcgcttctatactccagagcatcatgtatcgccaccagaaaagaaagcacacttgcccttcttgccagcattcctggatagagggggtgcaggataacatgaagctgcataaggtggatttcatttggatcaatcgggaccagcggagcttcgagtggttcgtgagcttgctgacaaaactagagatggatcaagctgaggaggcccagtatggtagattcctagagcttcacatgtacatgacctctgcgctgggaaagaacgacatgaaagctattggactccagatggccctcgacttactggcaaataaggaaaaaaaagattcaattacaggattgcagactcgcactcagcccggaaggccagactggtctaaggtcttccagaaagtcgctgctgagaaaaaagggaaagtccaagtcttcttctgtggatctcccgctttagctaaggtgcttaagggacactgcgagaaattcgggttccgattctttcaagagaatttttag

SEQ ID NO: 71367 - DNA, 2214 bp, Artificial Sequence
  derived and/or modified sequence
atgaacaccagcggcgaccccgcccagaccggccccgagggctgcagaggcaccatgagcgccgaggaggacgccagatggctgagatgggtgacccagcagttcaagaccatcgccggcgaggacggcgagatcagcctgcaggagttcaaggccgccctgcacgtgaaggagagcttcttcgccgagagattcttcgccctgttcgacagcgacagaagcggcaccatcaccctgcaggagctgcaggaggccctgaccctgctgatccacggcagccccatggacaagctgaagttcctgttccaggtgtacgacatcgacggcagcggcagcatcgaccccgacgagctgagaaccgtgctgcagagctgcctgagagagagcgccatcagcctgcccgacgagaagctggaccagctgaccctggccctgttcgagagcgccgacgccgacggcaacggcgccatcaccttcgaggagctgagagacgagctgcagagattccccggcgtgatggagaacctgaccatcagcgccgcccactggctgaccgcccccgcccccagacccagacccagaagacccagacagctgaccagagcctactggcacaaccacagaagccagctgttctgcctggccacctacgccggcctgcacgtgctgctgttcggcctggccgccagcgcccacagagacctgggcgccagcgtgatggtggccaagggctgcggccagtgcctgaacttcgactgcagcttcatcgccgtgctgatgctgagaagatgcctgacctggctgagagccacctggctggcccaggtgctgcccctggaccagaacatccagttccaccagctgatgggctacgtggtggtgggcctgagcctggtgcacaccgtggcccacaccgtgaacttcgtgctgcaggcccaggccgaggccagccccttccagttctgggagctgctgctgaccaccagacccggcatcggctgggtgcacggcagcgccagccccaccggcgtggccctgctgctgctgctgctgctgatgttcatctgcagcagcagctgcatcagaagaagcggccacttcgaggtgttctactggacccacctgagctacctgctggtgtggctgctgctgatcttccacggccccaacttctggaagtggctgctggtgcccggcatcctgttcttcctggagaaggccatcggcctggccgtgagcagaatggccgccgtgtgcatcatggaggtgaacctgctgcccagcaaggtgacccacctgctgatcaagagaccccccttcttccactacagacccggcgactacctgtacctgaacatccccaccatcgccagatacgagtggcaccccttcaccatcagcagcgcccccgagcagaaggacaccatctggctgcacatcagaagccagggccagtggaccaacagactgtacgagagcttcaaggccagcgaccccctgggcagaggcagcaagagactgagcagaagcgtgaccatgagaaagagccagagaagcagcaagggcagcgagatcctgctggagaagcacaagttctgcaacatcaagtgctacatcgacggcccctacggcacccccaccagaagaatcttcgccagcgagcacgccgtgctgatcggcgccggcatcggcatcacccccttcgccagcatcctgcagagcatcatgtacagacaccagaagagaaagcacacctgccccagctgccagcacagctggatcgagggcgtgcaggacaacatgaagctgcacaaggtggacttcatctggatcaacagagaccagagaagcttcgagtggttcgtgagcctgctgaccaagctggagatggaccaggccgaggaggcccagtacggcagattcctggagctgcacatgtacatgaccagcgccctgggcaagaacgacatgaaggccatcggcctgcagatggccctggacctgctggccaacaaggagaagaaggacagcatcaccggcctgcagaccagaacccagcccggcagacccgactggagcaaggtgttccagaaggtggccgccgagaagaagggcaaggtgcaggtgttcttctgcggcagccccgccctggccaaggtgctgaagggccactgcgagaagttcggcttcagattcttccaggagaacttctag

SEQ ID NO: 71368 - protein, 730 aa, Artificial Sequence
  derived and/or modified sequence
MAFVCAGLSDTMSAEEDARWLRWVTQQFKTIAGEDGEISLQEFKAALHVKESFFAERFFALFDSDRSGTITLQELQEALTLLIHGSPMDKLKFLFQVYDIDGSGSIDPDELRTVLQSCLRESAISLPDEKLDQLTLALFESADADGNGAITFEELRDELQRFPGVMENLTISAAHWLTAPAPRPRPRRPRQLTRAYWHNHRSQLFCLATYAGLHVLLFGLAASAHRDLGASVMVAKGCGQCLNFDCSFIAVLMLRRCLTWLRATWLAQVLPLDQNIQFHQLMGYVVVGLSLVHTVAHTVNFVLQAQAEASPFQFWELLLTTRPGIGWVHGSASPTGVALLLLLLLMFICSSSCIRRSGHFEVFYWTHLSYLLVWLLLIFHGPNFWKWLLVPGILFFLEKAIGLAVSRMAAVCIMEVNLLPSKVTHLLIKRPPFFHYRPGDYLYLNIPTIARYEWHPFTISSAPEQKDTIWLHIRSQGQWTNRLYESFKASDPLGRGSKRLSRSVTMRKSQRSSKGSEILLEKHKFCNIKCYIDGPYGTPTRRIFASEHAVLIGAGIGITPFASILQSIMYRHQKRKHTCPSCQHSWIEGVQDNMKLHKVDFIWINRDQRSFEWFVSLLTKLEMDQAEEAQYGRFLELHMYMTSALGKNDMKAIGLQMALDLLANKEKKDSITGLQTRTQPGRPDWSKVFQKVAAEKKGKVQVFFCGSPALAKVLKGHCEKFGFRFFQENF

SEQ ID NO: 71369 - DNA, 2193 bp, Artificial Sequence
  derived and/or modified sequence
atggccttcgtctgtgcaggacttagtgatactatgtccgctgaggaagatgcccgatggctgcgctgggttacccagcagtttaaaaccatagccggagaagatggtgagattagccttcaggaatttaaggcagccctccatgtcaaggagtccttttttgccgagagattttttgcactttttgactccgacagatctggcactattaccttacaggaactgcaggaggctttgactctcctcatccacggctctcccatggataagctgaaatttctgttccaagtttacgacatcgacggttcaggaagcatcgatcctgacgagctgaggaccgtgttgcagtcctgcctgagagaatccgccatttctctccctgacgagaagttggaccagctcactctggcactgtttgagtctgcagacgctgacggaaacggcgccattacattcgaagaactccgggacgaactccagaggtttccgggcgtcatggaaaacctcacgatcagcgccgcacattggctcaccgccccagcacccaggcccagaccacgccgtccgaggcagctcactcgggcgtattggcacaaccacaggtcccagctgttctgtctggccacctatgcgggcctgcacgttctcttattcggactggctgcttccgctcaccgcgacctgggagcctctgtaatggtggctaaagggtgcggccagtgtctgaactttgactgtagttttatcgccgtactcatgttacggcgatgtctaacctggctccgcgctacctggctggcccaggtactgcctctggaccagaacatccagttccaccaactgatggggtacgtcgttgtgggcctatcccttgtgcataccgtggctcatacagtgaactttgtgttacaggctcaggccgaggcttctcccttccagttctgggagctcctgctcaccacaaggcccggcattggctgggtccacgggtcagcctcccctacaggcgtagccctcctgttgcttctgctcctcatgttcatttgtagctccagctgtatccggaggtcagggcattttgaggtcttttattggacccacctgagctaccttctggtttggcttctgctgatatttcatggacctaatttttggaaatggctcctggtgccggggatcctgttttttcttgagaaggccatcggactggccgtgtcacggatggctgccgtctgcattatggaagtaaacttgctcccttccaaggtgactcacctgctgatcaagcgtcctcccttttttcattaccgacctggggactatctgtacctgaacattccgacgattgctaggtatgaatggcatccttttaccatcagctcagcacctgagcaaaaggacacaatttggcttcacatccgcagccaaggtcagtggactaaccgtctctatgaaagttttaaagccagcgatcccctgggacggggtagtaaacgattgtcccggtccgtgacaatgcgaaaatctcagagatcctctaagggctcagagatcctgctcgaaaagcataagttttgcaacatcaaatgttatatcgacggcccctacgggaccccaactcggcggatcttcgcctctgaacacgcggtgttgattggcgcaggaataggtatcaccccatttgccagtattttacagagcattatgtaccggcatcagaaacgaaaacatacatgcccaagctgccagcactcttggattgagggggtgcaggacaatatgaagttacacaaggttgacttcatctggataaatagagaccagcgatcctttgaatggttcgtttcactcctgacaaagttggaaatggaccaagctgaggaagcccagtacggaagatttctagaactccacatgtacatgacctcagccctgggcaagaacgatatgaaagctattggactgcagatggcactggacttattagccaacaaagagaagaaggattccataactggactccaaacaaggacccagccaggccgacccgattggagcaaggtgtttcagaaggtggccgcggagaaaaagggcaaagtgcaagtgttcttttgcggcagtcccgccttggccaaagtgcttaaggggcattgtgagaagtttggattccggttcttccaggagaatttctag

SEQ ID NO: 71370 - DNA, 2193 bp, Artificial Sequence
  derived and/or modified sequence
atggcctttgtgtgtgccggcctgagtgacaccatgtctgctgaggaggatgcccgctggctgcgctgggtgacccagcagttcaagaccatcgccggggaggatggagagatcagcctgcaggagttcaaggccgccctgcacgtgaaggagagcttctttgctgagcgcttctttgccctgtttgacagcgacagaagtggcaccatcaccctgcaggagctgcaggaggccctgaccctgctgatccacggcagccccatggacaagctgaagttcctgttccaggtgtatgacattgatggcagcggcagcattgatcctgatgagctgaggacagtgctgcagagctgcctgcgggagagcgccatcagcctgcctgatgagaagctggaccagctgaccctggccctgtttgaatctgcagatgctgatggaaatggagccatcacctttgaggagctgagagatgagctgcagcgcttccctggggtgatggagaacctgaccatctctgctgcccactggctgacagccccagccccccggccccggccccggcggccccggcagctgacccgggcctactggcacaaccacaggagccagctgttctgcctggccacctacgccggcctgcacgtgctgctgtttggcctggccgccagcgcccaccgggacctgggcgcctctgtgatggtggccaagggctgcggccagtgcctgaactttgactgcagcttcatcgctgtgctgatgctgcggcgctgcctgacctggctgcgggccacctggctggcccaggtgctgcccctggaccagaacatccagttccaccagctgatgggctacgtggtggtgggcctgagcctggtgcacacagtggcccacacagtgaactttgtgctgcaggcccaggccgaggccagccccttccagttctgggagctgctgctgaccaccaggcctggcatcggctgggtgcacggcagcgccagccccactggagtggccctgctgctgctgctgctgctgatgttcatctgcagcagcagctgcatcagaagaagtggccactttgaggtgttctactggacccacctgagctacctgctggtgtggctgctgctgatcttccacggccccaacttctggaagtggctgctggtgcccggcatcctcttcttcctggagaaggccatcggcctggccgtgtccaggatggctgctgtgtgcatcatggaggtgaacctgctgcccagcaaggtgacccacctgctgatcaagaggcctcccttcttccactacagacctggggactacctgtacctgaacatccccaccatcgcccgctatgagtggcaccccttcaccatcagcagcgcccctgagcagaaggacaccatctggctgcacatccgcagccagggccagtggaccaaccggctgtatgagagcttcaaggccagtgaccccctgggccggggcagcaagaggctgagccgctctgtgaccatgaggaagagccagaggagcagcaagggcagcgagatcctgctggagaagcacaagttctgcaacatcaagtgctacattgatggcccctacggcacccccacccggcgcatctttgccagcgagcacgctgtgctgattggagctggcatcggcatcaccccatttgccagcatcctgcagagcatcatgtaccgccaccagaagaggaagcacacctgccccagctgccagcacagctggattgaaggagtgcaggacaacatgaagctgcacaaggtggacttcatctggatcaacagagaccagaggagctttgagtggtttgtgtccctgctgaccaagctggagatggaccaggccgaggaggcccagtatggccgcttcctggagctgcacatgtacatgaccagcgccctgggcaagaatgacatgaaggccatcggcctgcagatggccctggacctgctggccaacaaggagaagaaggacagcatcaccggcctgcagaccaggacccagcccggccgcccagactggagcaaggtgttccagaaggtggccgctgagaagaagggcaaggtgcaggtgttcttctgtggcagccctgccctggccaaggtgctgaagggccactgtgagaagtttggcttccgcttcttccaggagaacttctag

SEQ ID NO: 71371 - DNA, 2277 bp, Artificial Sequence
  derived and/or modified sequence
gagtgctacggacgacgcctatgaagcccttagtccttctagttgcgcttttgctatggccttcgtctgtgccggcttatccgacaccatgagtgccgaggaggatgccaggtggctccggtgggtgactcagcagtttaagaccattgcaggagaagatggggagatcagcctgcaagaattcaaagcagctctgcatgtgaaagagtccttctttgcagagcgattctttgccctatttgactccgatagaagtggcaccatcaccctccaggagctgcaggaggcactgaccctgctcatccatggcagccccatggacaaactcaaattcctcttccaggtgtatgacatcgatggcagtggctccattgacccggatgagctgcgcactgtgctgcagtcgtgtctgcgcgagagcgccatctcgctgcctgacgagaagctggaccagctgacgctggcgctcttcgaatcggccgacgcggacggcaacggggccatcaccttcgaggagctccgggacgagctgcagcgcttccccggagtcatggagaacctgaccatcagcgctgcccactggctgacggcccccgccccccgcccacgcccgcgccggccgcgccagctgacccgcgcctactggcacaaccaccgcagccagctgttctgcctggccacctatgcaggcctccacgtgctgctcttcgggctggcggccagcgcgcaccgggacctcggcgccagcgtcatggtggccaagggctgcggccagtgcctcaacttcgactgcagcttcatcgcggtgctgatgctcagacgctgcctcacctggctgcgggccacgtggctggctcaagtcctaccactggaccagaacatccagttccaccagcttatgggctacgtggtagtggggctgtccctcgtgcacaccgtggctcacactgtgaactttgtactccaggctcaggcggaggccagccctttccagttctgggagctgctgctcaccacgaggcctggcattggctgggtacacggttcggcctccccgacaggtgtcgctctgctgctgctgctcctcctcatgttcatctgctccagttcctgcatccgcaggagtggccactttgaggtgttctattggactcacctgtcctacctcctcgtgtggcttctgctcatctttcatgggcccaacttctggaagtggctgctggtgcctggaatcttgtttttcctggagaaggccatcggactggcagtgtcccgcatggcagccgtgtgcatcatggaagtcaacctcctcccctccaaggtcactcatctcctcatcaagcggccccctttttttcactatagacctggtgactacttgtatctgaacatccccaccattgctcgctatgagtggcaccccttcaccatcagcagtgctcctgagcagaaagacactatctggctgcacattcggtcccaaggccagtggacaaacaggctgtatgagtccttcaaggcatcagacccactgggccgtggttctaagaggctgtcgaggagtgtgacaatgagaaagagtcaaaggtcgtccaagggctctgagatacttttggagaaacacaaattctgtaacatcaagtgctacatcgatgggccttatgggacccccacccgcaggatctttgcctctgagcatgccgtgctcatcggggcaggcatcggcatcaccccctttgcttccattctgcagagtatcatgtacaggcaccagaaaagaaagcatacttgccccagctgccagcactcctggatcgaaggtgtccaagacaacatgaagctccataaggtggactttatctggatcaacagagaccagcggtctttcgagtggtttgtgagcctgctgactaaactggagatggaccaggccgaggaggctcaatacggccgcttcctggagctgcatatgtacatgacatctgcactgggcaagaatgacatgaaggccattggcctgcagatggcccttgacctcctggccaacaaggagaagaaagactccatcacggggctgcagacgcgcacccagcctgggcggcctgactggagcaaggtgttccagaaagtggctgctgagaagaagggcaaggtgcaggtcttcttctgtggctccccagctctggccaaggtgctgaagggccattgtgagaagttcggcttcagatttttccaagagaatttctagcctcacctctccaagctctgccccaagtc

SEQ ID NO: 71372 - DNA, 2193 bp, Artificial Sequence
  derived and/or modified sequence
atggccttcgtgtgcgccggcctgagcgacaccatgagcgccgaggaggatgccagatggctgaggtgggtaacgcagcagtttaaaacaattgctggagaggatggtgaaatcagcctccaagagtttaaagccgcactccacgtcaaggagtccttcttcgctgagcgcttctttgccctgtttgatagtgatcggagtggtacaatcacgcttcaggaactgcaggaggcgctcacactgctgattcacgggtcccccatggataagctgaaattccttttccaggtgtatgatatcgacggcagcggctcaattgaccccgatgagctccgcaccgtcctgcagtcctgcctacgggagtccgcgatctcgctgccagatgaaaaactggaccaattaactctggcattgttcgagtccgccgacgccgacggtaacggggctataacctttgaggagctccgggatgagctacagcggttcccgggcgtaatggagaacctgactattagtgctgctcactggttgactgcccccgcgcccaggccccggcccagacgcccccgccagttgacccgggcctattggcataaccaccgatcccaactgttctgcctggccacctacgctggcttacacgtgctgttatttgggctggcggcctccgcgcatagagaccttggagcttcagtaatggtggcgaaaggctgtggccagtgtttgaactttgactgcagctttatcgccgtgctgatgcttcgaaggtgcctcacgtggctgagggccacatggttagcccaggtattgccgctcgatcagaacatacaattccaccagctcatgggctacgtggtagtcggattatccttggtacatacggtggcacacaccgtaaactttgtactgcaagctcaggctgaggcatctccattccagttttgggagctgctgttgacaactcgacctggcatcggctgggtgcatgggagcgccagccctacaggggttgctctgttgttgttactcttgctgatgtttatttgtagcagctcatgcataagacgttccggtcacttcgaggtcttttactggacacatctgtcttatctgttggtgtggttgttattgatcttccacgggcccaacttctggaagtggctgttggtgcctggcattctttttttcctggagaaggcaattggactggctgtctccaggatggcagcagtgtgtataatggaagtcaacctcctccctagtaaggtgacccacttgttaatcaaaagaccgccattcttccactaccgtcccggagactatctctatctgaacattccaacgattgccagatacgagtggcatcccttcactatcagcagcgccccagagcagaaagatacgatatggctgcacatacgctcacagggacagtggaccaaccggctgtacgagtcattcaaggcttctgatccattaggccgcggcagcaaaaggcttagtcgcagcgttaccatgcgaaaatcccaacgatcctcaaaagggagcgagattctgctggaaaagcataaattttgcaacattaagtgctatattgatggtccctacggcacccccacacgccggatttttgccagtgagcacgccgtactgataggagccggaatcggaatcacaccatttgcctcgattctgcaatccattatgtatcgccatcagaaacggaagcatacttgccctagttgccagcacagctggatagagggtgttcaggacaacatgaagcttcacaaggtggattttatctggatcaatcgagaccagcggagcttcgaatggtttgtcagcctgctcactaagctcgaaatggatcaggccgaggaggcacagtatggtagatttttagaacttcacatgtacatgacttcagcactgggtaaaaacgacatgaaggcaataggcctgcagatggcgttggacctgctcgctaataaggagaagaaggactcaatcactggcctgcagacacgcactcagccagggagacctgattggtcaaaagtgtttcaaaaagtggcagcggagaaaaaagggaaggttcaggtatttttctgcgggtccccggcactggcaaaggtcctgaaaggtcactgcgaaaagtttggcttccgattttttcaggagaacttctag

SEQ ID NO: 71373 - DNA, 2193 bp, Artificial Sequence
  derived and/or modified sequence
atggcctttgtgtgcgccggtctctcagacacaatgtccgcagaggaggacgctagatggttgaggtgggtgactcagcagttcaaaactattgccggagaggacggggaaatctctctgcaggagttcaaggccgctctccatgtcaaagagtctttctttgccgagcggtttttcgctctgttcgactctgatcgatccggcacaatcaccttgcaggagctgcaggaagcattgacgctgctgattcacggctcccccatggataaactgaagtttctcttccaagtttatgacatcgacggctctgggtctatcgatcccgacgaactgcggaccgttctgcagtcttgcctgcgggagtcagctattagcctgcccgatgaaaagttggaccagttgacactcgccctgttcgagtcagccgatgcagatggtaacggagccatcacatttgaggaattacgagacgagctgcagcgtttcccaggtgtgatggaaaaccttacgatctccgccgctcactggttaacagcccctgcaccacgcccacgtccgcgaaggcctcggcagctgacaagagcctattggcataaccacagatcccagctgttctgcctcgctacatatgcaggactgcatgtcctcctctttgggttagccgcatccgctcatagggaccttggcgctagcgtcatggtggcgaagggctgcgggcagtgtctgaatttcgattgttcgttcatcgccgttctcatgttgcggagatgtttaacatggcttagggccacttggctggcccaggtcttacccttggatcagaatatccagttccaccagttaatggggtatgttgtggttggactgagtcttgtgcacactgttgcccatacggtaaactttgtgctgcaggctcaggccgaagccagtcctttccagttttgggagctgctgcttaccacacggccaggcattggttgggtgcacggctccgccagccccaccggcgtcgcccttctgctgttgctgctgctaatgttcatttgcagcagcagctgtattaggagatctggccactttgaagtcttctactggacgcatctgtcttacctgctggtttggctgctcctgattttccacggcccaaatttttggaagtggctcctggtgccagggatcctcttttttcttgaaaaagctattgggctcgcagtgtcaaggatggctgccgtgtgcatcatggaggtgaacttactgccgtccaaggtgactcacctgctgatcaaaaggccgcctttcttccattaccggcctggagactatctctatttaaatatcccaactattgccaggtacgagtggcacccattcactataagctctgcccctgagcagaaggacaccatttggctacacattcgctctcagggacaatggaccaatcggttgtacgagagcttcaaagcgagtgatccacttggtagaggaagcaagcggctgtcaagatccgttaccatgcggaaatctcagagaagctctaagggcagtgaaatcctgttggagaaacataagttttgcaatatcaaatgttatatagacggaccttacggaactcccaccagacggatctttgcgtctgagcacgccgtccttatcggcgctggaatcggaatcacgccttttgcctccattttgcaatctattatgtatcggcatcagaagcggaaacacacatgcccgtcctgtcaacactcgtggatcgagggggtgcaggacaacatgaaactgcacaaagtggatttcatttggattaatagggaccagcgctcttttgaatggtttgtgtcactgctaacaaagctcgaaatggatcaggcagaagaagctcagtatgggaggtttctggaactgcacatgtacatgacttctgctctcgggaaaaatgatatgaaagccatcgggctgcagatggcgctggatctcctggccaacaaagaaaaaaaggatagtatcacaggcctgcagacacgcacacagccaggcagaccggattggtccaaggtgttccaaaaggtggccgctgaaaagaagggaaaggttcaggtgttcttctgcggctcaccagccctggcaaaggtgctgaagggacattgcgagaaattcggctttcggttcttccaggaaaacttctag

SEQ ID NO: 71374 - DNA, 2193 bp, Artificial Sequence
  derived and/or modified sequence
atggccttcgtgtgcgccggcctgagcgacaccatgagcgccgaggaggacgccagatggctgagatgggtgacccagcagttcaagaccatcgccggcgaggacggcgagatcagcctgcaggagttcaaggccgccctgcacgtgaaggagagcttcttcgccgagagattcttcgccctgttcgacagcgacagaagcggcaccatcaccctgcaggagctgcaggaggccctgaccctgctgatccacggcagccccatggacaagctgaagttcctgttccaggtgtacgacatcgacggcagcggcagcatcgaccccgacgagctgagaaccgtgctgcagagctgcctgagagagagcgccatcagcctgcccgacgagaagctggaccagctgaccctggccctgttcgagagcgccgacgccgacggcaacggcgccatcaccttcgaggagctgagagacgagctgcagagattccccggcgtgatggagaacctgaccatcagcgccgcccactggctgaccgcccccgcccccagacccagacccagaagacccagacagctgaccagagcctactggcacaaccacagaagccagctgttctgcctggccacctacgccggcctgcacgtgctgctgttcggcctggccgccagcgcccacagagacctgggcgccagcgtgatggtggccaagggctgcggccagtgcctgaacttcgactgcagcttcatcgccgtgctgatgctgagaagatgcctgacctggctgagagccacctggctggcccaggtgctgcccctggaccagaacatccagttccaccagctgatgggctacgtggtggtgggcctgagcctggtgcacaccgtggcccacaccgtgaacttcgtgctgcaggcccaggccgaggccagccccttccagttctgggagctgctgctgaccaccagacccggcatcggctgggtgcacggcagcgccagccccaccggcgtggccctgctgctgctgctgctgctgatgttcatctgcagcagcagctgcatcagaagaagcggccacttcgaggtgttctactggacccacctgagctacctgctggtgtggctgctgctgatcttccacggccccaacttctggaagtggctgctggtgcccggcatcctgttcttcctggagaaggccatcggcctggccgtgagcagaatggccgccgtgtgcatcatggaggtgaacctgctgcccagcaaggtgacccacctgctgatcaagagaccccccttcttccactacagacccggcgactacctgtacctgaacatccccaccatcgccagatacgagtggcaccccttcaccatcagcagcgcccccgagcagaaggacaccatctggctgcacatcagaagccagggccagtggaccaacagactgtacgagagcttcaaggccagcgaccccctgggcagaggcagcaagagactgagcagaagcgtgaccatgagaaagagccagagaagcagcaagggcagcgagatcctgctggagaagcacaagttctgcaacatcaagtgctacatcgacggcccctacggcacccccaccagaagaatcttcgccagcgagcacgccgtgctgatcggcgccggcatcggcatcacccccttcgccagcatcctgcagagcatcatgtacagacaccagaagagaaagcacacctgccccagctgccagcacagctggatcgagggcgtgcaggacaacatgaagctgcacaaggtggacttcatctggatcaacagagaccagagaagcttcgagtggttcgtgagcctgctgaccaagctggagatggaccaggccgaggaggcccagtacggcagattcctggagctgcacatgtacatgaccagcgccctgggcaagaacgacatgaaggccatcggcctgcagatggccctggacctgctggccaacaaggagaagaaggacagcatcaccggcctgcagaccagaacccagcccggcagacccgactggagcaaggtgttccagaaggtggccgccgagaagaagggcaaggtgcaggtgttcttctgcggcagccccgccctggccaaggtgctgaagggccactgcgagaagttcggcttcagattcttccaggagaacttctag

SEQ ID NO: 71375 - protein, 269 aa, Artificial Sequence
  derived and/or modified sequence
MVPKADSGAFLLLFLLVLTVTEPLRPELRCNPGQFACRSGTIQCIPLPWQCDGWATCEDESDEANCPEVTGEVRPHHGKEAVDPRQGRARGGDPSHFHAVNVAQPVRFSRKCPTGWHHYEGTASCYRVYLSGENYWDAAQTCQRLNGSLATFSTDQELRFVLAQEWDQPERSFGWKDQRKLWVGYQYVITGRNRSLEGRWEVAFKDWGVSDTMVHRRLLCPCVGTLHTHLKLGARFRRVPVRLGGALSRRSPRPTPACEPRLGAKTLQV

SEQ ID NO: 71376 - DNA, 810 bp, Artificial Sequence
  derived and/or modified sequence
atggtgcctaaagcagactctggcgcctttcttctgttgttcctccttgtgttgaccgtgactgaaccactgaggcccgagctgcggtgtaacccgggacaatttgcttgcaggtctggaacaattcaatgcataccgctaccttggcaatgcgacggttgggccacgtgtgaggacgaatccgacgaggcaaactgccccgaggttaccggcgaagtaaggcctcaccacggaaaggaagctgtggatccacgacaggggcgggctcgtggcggcgacccgagccactttcacgctgtgaatgtagcacagcctgtgagattttcccggaaatgcccaacagggtggcaccactatgaaggaacagcatcctgttacagagtgtatctctctggagaaaactactgggacgctgctcagacctgtcagaggctgaacgggtccctcgccaccttctctaccgaccaagaacttagatttgtgctggcgcaggagtgggaccagcccgagcggtcgtttgggtggaaagatcagcgaaaattgtgggtgggctaccagtacgttattacgggccgcaatcgctccttggagggccgttgggaagtggcctttaaggactggggcgtttcagatacaatggtacaccgaagattgctctgcccttgcgttggcaccctccatacccaccttaagctgggagccaggttccgcagggtgcctgtgagactgggaggagctctttctaggcggtcaccacgcccaacacctgcttgcgagcccagattgggagcaaagactctgcaggtgtag

SEQ ID NO: 71377 - DNA, 810 bp, Artificial Sequence
  derived and/or modified sequence
atggtgcccaaggctgacagcggggccttcctgctgctcttcctgctggtgctgactgtgacagagcccctgcggcctgagctgcgctgcaaccctggccagtttgcctgccgcagcggcaccatccagtgcatccccctgccctggcagtgtgatggctgggccacctgtgaagatgaaagtgatgaggccaactgcccagaggtgactggagaggtgcggccccaccacggcaaggaggccgtggacccccggcagggccgggcccggggcggggaccccagccacttccacgctgtgaatgtggcccagcctgtgcgcttcagcaggaaatgtcccaccggctggcaccactatgagggcacagccagctgctacagagtgtacctgtctggagagaactactgggatgctgcccagacctgccagaggctgaatggcagcctggccaccttcagcacagaccaggagctgcgctttgtgctggcccaggagtgggaccagcctgagaggagctttggctggaaggaccagaggaagctgtgggtgggctaccagtatgtgatcaccggcaggaacagaagcctggagggccgctgggaggtggccttcaaggactggggcgtgtctgacaccatggtgcaccggcggctgctgtgcccctgtgtgggcaccctgcacacccacctgaagctgggcgcccgcttcagaagagtgcctgtgcggctgggcggggccctgagcagaagaagcccccggcccaccccagcctgtgagccccggctgggcgccaagaccctgcaggtgtag

SEQ ID NO: 71378 - DNA, 810 bp, Artificial Sequence
  derived and/or modified sequence
atggtgcccaaggccgacagcggcgccttcctgctgctgttcctgttggtgttgacggtgaccgagccgctcaggccagagttgaggtgtaatcccggccagttcgcctgccggtccggtacaatccagtgtatcccccttccctggcaatgtgacgggtgggcaacctgcgaggacgaaagcgacgaggctaactgtcccgaagtcactggagaggtgaggcctcaccacgggaaagaggccgtggatcccagacagggacgggcccgagggggtgatccttctcacttccacgctgttaatgttgcacagccggtaagattcagcaggaaatgccctacaggatggcatcactatgaaggaaccgctagttgttatagggtctatctttctggcgagaattactgggacgcagctcagacatgtcagaggctgaatggttccctggcaacatttagtacagatcaggagctccggtttgttctggcacaggaatgggaccaacctgagaggtcttttgggtggaaggaccaacgcaaactgtgggtgggttatcaatacgttatcactggccggaacaggagtcttgagggaagatgggaggtcgctttcaaagattggggggtcagcgacacaatggtacatcggcgcttgctgtgtccctgcgtgggaaccctacacacacacctgaagttgggcgccagattcagaagggtccctgtgcgcctcggcggggcactaagtcggcgtagtccaagacccaccccagcctgcgagccaaggctgggcgcgaagaccttacaggtttag

SEQ ID NO: 71379 - DNA, 810 bp, Artificial Sequence
  derived and/or modified sequence
atggtgccgaaagccgactctggagcattccttcttctgtttctgctcgtgctgactgtgacggagccacttagacctgaactgaggtgcaacccagggcagtttgcctgcaggagcggtacaatccagtgtatcccgttgccgtggcagtgcgatgggtgggctacatgcgaggacgagtccgatgaagcaaactgtcctgaggtgacgggagaggtgcggcctcaccatggaaaggaggccgtcgatcctcggcagggacgggctaggggaggagatcccagccattttcacgcagtgaatgtcgcacagccagtgcgtttctcccgtaagtgtccgaccggatggcaccactatgagggtaccgcctcgtgctacagggtctacctatcgggtgagaactactgggacgccgctcaaacctgtcagaggctgaacggatcgctcgcaacatttagtactgatcaggagttgagatttgtactcgcacaggagtgggatcagcccgaacgctctttcgggtggaaagatcagcgaaagctgtgggtcgggtatcagtatgtcataaccgggagaaataggagcctggagggcagatgggaggtggccttcaaagactggggcgtttcagacacaatggtgcaccgaagacttctttgtccatgcgtcggaaccctccatacacacctgaaactcggcgcacggtttcgcagggttcccgtgaggctgggcggagccctgtctcggagatccccacgtccgacccctgcctgtgagccacgcttgggagccaagacgctccaggtttag

SEQ ID NO: 71380 - DNA, 810 bp, Artificial Sequence
  derived and/or modified sequence
atggtgcccaaggccgacagcggcgccttcctgctgctgttcctgctggtgctgaccgtgaccgagcccctgagacccgagctgagatgcaaccccggccagttcgcctgcagaagcggcaccatccagtgcatccccctgccctggcagtgcgacggctgggccacctgcgaggacgagagcgacgaggccaactgccccgaggtgaccggcgaggtgagaccccaccacggcaaggaggccgtggaccccagacagggcagagccagaggcggcgaccccagccacttccacgccgtgaacgtggcccagcccgtgagattcagcagaaagtgccccaccggctggcaccactacgagggcaccgccagctgctacagagtgtacctgagcggcgagaactactgggacgccgcccagacctgccagagactgaacggcagcctggccaccttcagcaccgaccaggagctgagattcgtgctggcccaggagtgggaccagcccgagagaagcttcggctggaaggaccagagaaagctgtgggtgggctaccagtacgtgatcaccggcagaaacagaagcctggagggcagatgggaggtggccttcaaggactggggcgtgagcgacaccatggtgcacagaagactgctgtgcccctgcgtgggcaccctgcacacccacctgaagctgggcgccagattcagaagagtgcccgtgagactgggcggcgccctgagcagaagaagccccagacccacccccgcctgcgagcccagactgggcgccaagaccctgcaggtgtag

SEQ ID NO: 71381 - protein, 309 aa, Artificial Sequence
  derived and/or modified sequence
MSWCNELRLPALKQHSIGRGLESHITMCIPPSYADLGKAARDIFNKGFGFGLVKLDVKTKSCSGVEFSTSGSSNTDTGKVTGTLETKYKWCEYGLTFTEKWNTDNTLGTEIAIEDQICQGLKLTFDTTFSPNTGKKSGKIKSSYKRECINLGCDVDFDFAGPAIHGSAVFGYEGWLAGYQMTFDSAKSKLTRNNFAVGYRTGDFQLHTNVNDGTEFGGSIYQKVCEDLDTSVNLAWTSGTNCTRFGIAAKYQLDPTASISAKVNNSSLIGVGYTQTLRPGVKLTLSALVDGKSINAGGHKVGLALELEA

SEQ ID NO: 71382 - protein, 109 aa, Artificial Sequence
  derived and/or modified sequence
MSWCNELRLPALKQHSIGRGLESHITMCIPPSYADLGKAARDIFNKGFGFGLVKLDVKTKSCSGVEFSTSGSSNTDTGKVTGTLETKYKWCEYGLTFTEKWNTDNTLGT

SEQ ID NO: 71383 - protein, 255 aa, Artificial Sequence
  derived and/or modified sequence
MLVIPATQEAEEFSTSGSSNTDTGKVTGTLETKYKWCEYGLTFTEKWNTDNTLGTEIAIEDQICQGLKLTFDTTFSPNTGKKSGKIKSSYKRECINLGCDVDFDFAGPAIHGSAVFGYEGWLAGYQMTFDSAKSKLTRNNFAVGYRTGDFQLHTNVNDGTEFGGSIYQKVCEDLDTSVNLAWTSGTNCTRFGIAAKYQLDPTASISAKVNNSSLIGVGYTQTLRPGVKLTLSALVDGKSINAGGHKVGLALELEA

SEQ ID NO: 71384 - DNA, 930 bp, Artificial Sequence
  derived and/or modified sequence
atgagctggtgcaacgagctgagactgcccgccctgaagcagcacagcatcggcagaggcctggagagccacatcaccatgtgcatcccccccagctacgccgacctgggcaaggccgccagagacatcttcaacaagggcttcggcttcggcctggtgaagctggacgtgaagaccaagagctgcagcggcgtggagttcagcaccagcggcagcagcaacaccgacaccggcaaggtgaccggcaccctggagaccaagtacaagtggtgcgagtacggcctgaccttcaccgagaagtggaacaccgacaacaccctgggcaccgagatcgccatcgaggaccagatctgccagggcctgaagctgaccttcgacaccaccttcagccccaacaccggcaagaagagcggcaagatcaagagcagctacaagagagagtgcatcaacctgggctgcgacgtggacttcgacttcgccggccccgccatccacggcagcgccgtgttcggctacgagggctggctggccggctaccagatgaccttcgacagcgccaagagcaagctgaccagaaacaacttcgccgtgggctacagaaccggcgacttccagctgcacaccaacgtgaacgacggcaccgagttcggcggcagcatctaccagaaggtgtgcgaggacctggacaccagcgtgaacctggcctggaccagcggcaccaactgcaccagattcggcatcgccgccaagtaccagctggaccccaccgccagcatcagcgccaaggtgaacaacagcagcctgatcggcgtgggctacacccagaccctgagacccggcgtgaagctgaccctgagcgccctggtggacggcaagagcatcaacgccggcggccacaaggtgggcctggccctggagctggaggcctag

SEQ ID NO: 71385 - DNA, 330 bp, Artificial Sequence
  derived and/or modified sequence
atgagctggtgcaacgagctgagactgcccgccctgaagcagcacagcatcggcagaggcctggagagccacatcaccatgtgcatcccccccagctacgccgacctgggcaaggccgccagagacatcttcaacaagggcttcggcttcggcctggtgaagctggacgtgaagaccaagagctgcagcggcgtggagttcagcaccagcggcagcagcaacaccgacaccggcaaggtgaccggcaccctggagaccaagtacaagtggtgcgagtacggcctgaccttcaccgagaagtggaacaccgacaacaccctgggcacctag

SEQ ID NO: 71386 - DNA, 930 bp, Artificial Sequence
  derived and/or modified sequence
atgagctggtgcaacgagttgagattgccggcccttaaacaacacagcatcgggcgcgggctggaatcccacattactatgtgcatcccccctagttatgctgacctagggaaggctgctcgggacatttttaataaggggtttggattcggcttggtcaaattagacgtgaagacgaaatcgtgcagcggtgtagaattctctactagtggctcctctaataccgacactggaaaggtgaccggcactctggaaaccaaatacaagtggtgtgaatacggactgaccttcacagaaaagtggaatacagacaatacactaggaacggagatcgcaatcgaagatcagatttgccaggggctcaagttgacatttgacaccactttcagcccaaatacaggtaaaaagtccgggaagattaagagcagctacaagcgtgagtgtatcaacttagggtgcgatgtggattttgactttgccggtccagctatacatggctccgcagtgtttgggtatgaaggttggctcgctggatatcagatgaccttcgactcagccaaaagcaaactcactcggaacaattttgcagttgggtatcggaccggggacttccagctccacactaacgtgaacgatggcaccgagtttggcggctccatttaccagaaggtgtgtgaggatctcgacacttccgtgaatttggcttggacatcaggcactaactgtactcgtttcggaatcgccgcgaagtaccaattggaccccaccgcctctatctccgcaaaggtgaataactcatctttgatcggtgtgggttacacacagaccctgaggcccggcgtcaagctcactctcagcgctcttgtggacggcaagtcaatcaacgctggcggacataaagtaggcctggcactcgaactcgaagcctag

SEQ ID NO: 71387 - DNA, 330 bp, Artificial Sequence
  derived and/or modified sequence
atgagttggtgcaacgaattgaggctgcccgctctcaaacagcacagcatcggccgcggcctggagagtcacattacaatgtgtatcccaccctcttacgctgacctgggtaaggccgcccgtgacatatttaataagggctttggatttgggctggtgaagttggacgtaaagaccaagagctgcagcggagttgaattttccacttcaggcagttcaaacacagataccggtaaagtcactggcactcttgaaaccaagtacaagtggtgtgagtacgggttgacctttacagagaaatggaacactgataacaccctcggcacctag

SEQ ID NO: 71388 - DNA, 930 bp, Artificial Sequence
  derived and/or modified sequence
atgtcctggtgcaatgagctgcggctgcctgccctgaagcagcacagcatcggccggggcctggagagccacatcaccatgtgcatcccccccagctatgctgacctgggcaaggccgcccgggacatcttcaacaagggcttcggcttcggcctggtgaagctggatgtgaagaccaagagctgcagcggcgtggagttcagcaccagcggcagcagcaacacagacaccgggaaggtgacaggcaccctggagaccaagtacaagtggtgtgaatatggcctgaccttcacagagaagtggaacacagacaacaccctgggcacagaaattgccatcgaggaccagatctgccagggcctgaagctgacctttgacaccaccttcagccccaacacaggcaagaagagcggcaagatcaagagcagctacaagcgggagtgcatcaacctgggctgtgatgtggactttgattttgctggccctgccatccacggcagcgctgtgtttggctatgagggctggctggccggctaccagatgacctttgattctgccaagagcaagctgaccaggaacaactttgctgtgggctacagaactggagacttccagctgcacaccaacgtgaatgatggaacagaatttggaggcagcatctaccagaaggtgtgtgaggacctggacacctctgtgaacctggcctggaccagcggcaccaactgcaccaggtttggaattgctgccaagtaccagctggaccccacagccagcatcagcgccaaggtgaacaacagcagcctgattggagtgggctacacccagaccctgcggcctggggtgaagctgaccctgagcgccctggtggatggcaagagcatcaatgctgggggccacaaggtgggcctggccctggagctggaggcctag

SEQ ID NO: 71389 - DNA, 330 bp, Artificial Sequence
  derived and/or modified sequence
atgtcctggtgcaatgagctgcggctgcctgccctgaagcagcacagcatcggccggggcctggagagccacatcaccatgtgcatcccccccagctatgctgacctgggcaaggccgcccgggacatcttcaacaagggcttcggcttcggcctggtgaagctggatgtgaagaccaagagctgcagcggcgtggagttcagcaccagcggcagcagcaacacagacaccgggaaggtgacaggcaccctggagaccaagtacaagtggtgtgaatatggcctgaccttcacagagaagtggaacacagacaacaccctgggcacctag

SEQ ID NO: 71390 - DNA, 930 bp, Artificial Sequence
  derived and/or modified sequence
atgagctggtgcaacgagctgcggctgcccgccctgaagcagcacagcataggacgcggcctggaatcccacatcactatgtgtatcccaccctcttacgcagacctcggaaaagccgcacgggacattttcaacaagggcttcgggttcggactggtgaaactcgatgtgaaaaccaagtcatgttccggagtagagttctctacctcaggctccagcaatactgatacgggcaaagtcactggtaccctagagacgaagtataaatggtgcgagtatgggttgacctttaccgagaaatggaacaccgacaataccctgggaaccgagatcgcgatcgaggaccagatttgccaagggctaaaactgacattcgatacaacattcagtcccaatactggcaaaaagtcgggcaagatcaagtcatcatataagagagaatgtattaaccttgggtgcgatgtagattttgactttgccgggccggccatccatggctcagctgttttcggatacgaagggtggcttgctggataccagatgactttcgattcagccaagtcaaaactgactagaaacaactttgccgtggggtaccggaccggcgactttcagctacataccaatgtgaatgacgggactgaattcgggggctctatctaccagaaagtgtgcgaagatttggacacctccgttaatctcgcctggacctctgggaccaattgtacacgctttggtattgccgccaaataccagctagaccctacggcctctatttcagcgaaggtcaacaattcaagtctgataggagtgggatacacacaaactctgaggcctggtgtcaaactgaccctgtcagcgctggtggacggtaagagcatcaacgctggagggcacaaggttggtctggcactcgaattggaagcctag

SEQ ID NO: 71391 - DNA, 330 bp, Artificial Sequence
  derived and/or modified sequence
atgagctggtgcaacgagctgcggctgcccgccctgaagcagcactcgattggacggggactggagagccacattaccatgtgtattccaccctcatacgcagacctgggcaaggccgcccgtgatattttcaacaaaggcttcggcttcggcctagtgaagttggatgtgaagaccaaatcctgctctggcgtagagttctctacatccggctcatccaacacagacactggcaaagtgactggaacgctcgaaaccaaatataagtggtgtgaatacggtctgaccttcacggagaaatggaacaccgataacactcttggcacatag

SEQ ID NO: 71392 - DNA, 930 bp, Artificial Sequence
  derived and/or modified sequence
atgagttggtgcaacgagctccggctccctgcccttaaacaacacagcatcggccgtggactggagtctcacatcacaatgtgcattccccctagctatgcagacctgggcaaagctgcaagagatatcttcaacaagggcttcggattcgggcttgtcaaacttgacgtgaaaacaaagtcttgcagtggggtggaattctctaccagcgggagcagcaacacggatactgggaaggtgacaggaacgctcgagacaaaatataaatggtgtgagtatggactgacatttacagagaaatggaacaccgataacaccttgggcacagaaatcgccatcgaggatcagatatgccaaggtctgaaactcactttcgatacgaccttttcaccaaataccggaaagaagtccggcaaaataaaatcaagctataaacgcgaatgcattaacctgggctgtgacgtagatttcgactttgccggacctgccattcacggctcagccgtttttgggtacgaaggctggttggcagggtaccaaatgacctttgacagcgccaaaagcaagctaacccgaaacaactttgctgtgggataccgaaccggtgactttcagctgcataccaacgtcaatgatggaacagagtttggaggatcaatctatcagaaggtctgcgaagatttggacacctcggtgaatttggcatggacttcaggtaccaattgcacacgttttgggattgccgctaagtatcagttagacccaactgcatcaatctccgcaaaggtcaataactcgtcgttaattggggtgggttatacacagaccctccgccctggtgtgaagttgacactcagcgccttagtggatggtaagtcaatcaatgctggcggtcacaaggtgggactagccctcgaactcgaggcttag

SEQ ID NO: 71393 - DNA, 330 bp, Artificial Sequence
  derived and/or modified sequence
atgtcttggtgcaacgagctgaggttaccagctctgaaacagcacagcattggtagaggactagaaagtcacataacaatgtgtataccgccatcttatgctgacttgggcaaagccgctagagacatctttaataagggtttcgggttcgggttagttaagctagacgtgaagactaagagctgcagcggagtggaattctctaccagcggatcctctaataccgacactgggaaggtcaccggcacccttgaaaccaagtataagtggtgcgagtacggacttacttttacagagaagtggaacacggacaacactctggggacctag

SEQ ID NO: 71394 - DNA, 1467 bp, Artificial Sequence
  derived and/or modified sequence
gctgctggagctgcagcccgaccgcgagcgtgccaagcggcttcagcagctagcggagcggtggcggcggcccccctcaggacaccaccagattcccctcttcccgcggcctcgccatggcgacccacggacagacttgcgcgcgtcgatcggatcaatcacttttctagaggaagtagcagtccctcttgtgagagcgcaaggtcattacttgtgctcctaagggcgtggacgtgctttgtggaatgaatgagctggtgtaatgagctcagattgcctgcccttaagcagcacagcattggccgaggacttgagagtcacattacaatgtgtattcctccatcatatgctgaccttggcaaagctgccagagatattttcaacaaaggatttggttttgggttggtgaaactggatgtgaaaacaaagtcttgcagtggcgtggaattttcaacgtccggttcatctaatacagacactggtaaagttactgggaccttggagaccaaatacaagtggtgtgagtatggtctgactttcacagaaaagtggaacactgataacactctgggaacagaaatcgcaattgaagaccagatttgtcaaggtttgaaactgacatttgatactaccttctcaccaaacacaggaaagaaaagtggtaaaatcaagtcttcttacaagagggagtgtataaaccttggttgtgatgttgactttgattttgctggacctgcaatccatggttcagctgtctttggttatgagggctggcttgctggctaccagatgacctttgacagtgccaaatcaaagctgacaaggaataactttgcagtgggctacaggactggggacttccagctacacactaatgtcaatgatgggacagaatttggaggatcaatttatcagaaagtttgtgaagatcttgacacttcagtaaaccttgcttggacatcaggtaccaactgcactcgttttggcattgcagctaaatatcagttggatcccactgcttccatttctgcaaaagtcaacaactctagcttaattggagtaggctatactcagactctgaggcctggtgtgaagcttacactctctgctctggtagatgggaagagcattaatgctggaggccacaaggttgggctcgccctggagttggaggcttaatccagctgaaagaaacctttgggaatggatatcagaagatttggccttaatatatttccattgtgaccagcagcaggcttttttcccccaagaagatgatcaaaacaaaggatgatctcaacaagagctgtattttaagtatttagacagttctttgttagctggtttctagttggttatctagttaccaatgctgcagtcctgcagtcacctatacattatttaaatgtatttaactgttaaatgcgctacccaccaataatgaaatagacctttatgaaaactgtg

SEQ ID NO: 71395 - DNA, 457 bp, Artificial Sequence
  derived and/or modified sequence
gttaattggggattctgcctttggaggatcggatcaatcacttttctagaggaagtagcagtccctcttgtgagagcgcaaggtcattacttgtgctcctaagggcgtggacgtgctttgtggaatgaatgagctggtgtaatgagctcagattgcctgcccttaagcagcacagcattggccgaggacttgagagtcacattacaatgtgtattcctccatcatatgctgaccttggcaaagctgccagagatattttcaacaaaggatttggttttgggttggtgaaactggatgtgaaaacaaagtcttgcagtggcgtggaattttcaacgtccggttcatctaatacagacactggtaaagttactgggaccttggagaccaaatacaagtggtgtgagtatggtctgactttcacagaaaagtggaacactgataacactctgggaacaga

SEQ ID NO: 71396 - protein, 1353 aa, Artificial Sequence
  derived and/or modified sequence
MKVTVCFGRTRVVVPCGDGHMKVFSLIQQAVTRYRKAIAKDPNYWIQVHRLEHGDGGILDLDDILCDVADDKDRLVAVFDEQDPHHGGDGTSASSTGTQSPEIFGSELGTNNVSAFQPYQATSEIEVTPSVLRANMPLHVRRSSDPALIGLSTSVSDSNFSSEEPSRKNPTRWSTTAGFLKQNTAGSPKTCDRKKDENYRSLPRDTSNWSNQFQRDNARSSLSASHPMVGKWLEKQEQDEDGTEEDNSRVEPVGHADTGLEHIPNFSLDDMVKLVEVPNDGGPLGIHVVPFSARGGRTLGLLVKRLEKGGKAEHENLFRENDCIVRINDGDLRNRRFEQAQHMFRQAMRTPIIWFHVVPAANKEQYEQLSQSEKNNYYSSRFSPDSQYIDNRSVNSAGLHTVQRAPRLNHPPEQIDSHSRLPHSAHPSGKPPSAPASAPQNVFSTTVSSGYNTKKIGKRLNIQLKKGTEGLGFSITSRDVTIGGSAPIYVKNILPRGAAIQDGRLKAGDRLIEVNGVDLVGKSQEEVVSLLRSTKMEGTVSLLVFRQEDAFHPRELNAEPSQMQIPKETKAEDEDIVLTPDGTREFLTFEVPLNDSGSAGLGVSVKGNRSKENHADLGIFVKSIINGGAASKDGRLRVNDQLIAVNGESLLGKTNQDAMETLRRSMSTEGNKRGMIQLIVARRISKCNELKSPGSPPGPELPIETALDDRERRISHSLYSGIEGLDESPSRNAALSRIMGKYQLSPTVNMPQDDTVIIEDDRLPVLPPHLSDQSSSSSHDDVGFVTADAGTWAKAAISDSADCSLSPDVDPVLAFQREGFGRQSMSEKRTKQFSDASQLDFVKTRKSKSMDLGIADETKLNTVDDQKAGSPSRDVGPSLGLKKSSSLESLQTAVAEVTLNGDIPFHRPRPRIIRGRGCNESFRAAIDKSYDKPAVDDDDEGMETLEEDTEESSRSGRESVSTASDQPSHSLERQMNGNQEKGDKTDRKKDKTGKEKKKDRDKEKDKMKAKKGMLKGLGDMFRFGKHRKDDKIEKTGKIKIQESFTSEEERIRMKQEQERIQAKTREFRERQARERDYAEIQDFHRTFGCDDELMYGGVSSYEGSMALNARPQSPREGHMMDALYAQVKKPRNSKPSPVDSNRSTPSNHDRIQRLRQEFQQAKQDEDVEDRRRTYSFEQPWPNARPATQSGRHSVSVEVQMQRQRQEERESSQQAQRQYSSLPRQSRKNASSVSQDSWEQNYSPGEGFQSAKENPRYSSYQGSRNGYLGGHGFNARVMLETQELLRQEQRRKEQQMKKQPPSEGPSNYDSYKKVQDPSYAPPKGPFRQDVPPSPSQVARLNRLQTPEKGRPFYS

SEQ ID NO: 71397 - DNA, 4062 bp, Artificial Sequence
  derived and/or modified sequence
atgaaggtcactgtttgttttggccgaaccagggtggtggtaccctgcggagatggccatatgaaagtctttagcctgatacaacaggccgtgacaagatacaggaaggcaatcgccaaagatcccaattactggatccaggtccatagattggagcacggtgatgggggaatccttgacctagatgatatcctttgtgatgtcgccgacgacaaagatcggctcgtggccgttttcgatgagcaggatccccatcatggcggggacggcaccagtgcctcttcaactggcacgcagtcccccgaaatcttcgggtccgagctgggtactaacaatgttagcgcctttcagccttatcaggctactagcgaaatagaggtgaccccatcagtgctgagggctaacatgccgctgcatgtccggagatccagcgacccagctctgatcggactcagtacctccgtgagtgatagcaatttctcttcagaggaacccagcaggaagaaccccacgcgatggtcaaccacagctggttttctgaaacaaaatactgccggtagccctaagacctgtgaccgcaaaaaggatgagaattatagatctttgcccagagatacatccaattggagcaatcagtttcagcgagacaacgctcggagtagccttagcgctagccacccgatggtcgggaaatggctcgagaagcaggaacaggacgaagacggcaccgaggaagacaactccagagtggaacccgttggccatgccgatacgggcctggaacacattcccaacttttcacttgacgacatggtaaagctagtagaagtccctaacgacggtggtcccctggggattcacgttgtgccattcagcgcgagaggaggacggaccctgggtttgctcgtcaaacgcctggagaaaggcggcaaggccgaacatgagaatctgttccgcgagaatgattgcatcgttcgtattaatgacggcgacttacggaaccgccgctttgaacaggcacagcacatgtttaggcaggctatgcgtacccccataatatggtttcatgtcgtgccagcagccaacaaggagcaatatgaacagctgtcacagtcagagaaaaataactactactcctctaggttcagtccggacagtcagtacatcgacaatcggagtgtgaactccgctggcctacataccgtgcagagggcaccccgcctaaatcaccccccagaacagatcgattcccacagtcggttgccccattccgcacaccctagtgggaaacctccctccgcacccgcatcagctcctcagaacgtgtttagcaccactgtgagcagcggatacaatacaaaaaagattgggaagcggcttaacatccaattgaagaaggggaccgaggggttggggttcagtataactagcagagatgtgacgattggcggatcagctcccatttatgttaagaacatcctccccagaggggccgccatccaagatgggcgcttaaaggccggggaccgcctgattgaggttaacggtgtagacttggtaggtaagtcccaggaagaggtggtatcactactgcggagcacaaaaatggaggggactgttagtctgttagtgtttcggcaggaagacgctttccatcctagagagctgaatgcagagccgtcacagatgcagattcccaaggagactaaagctgaggacgaagatatcgtgctgacccccgatggtacccgagaattccttacgttcgaggtgcctcttaatgacagcggttccgccgggttaggcgttagtgtaaagggaaatagaagcaaggaaaaccacgctgatttgggtattttcgtgaagagcatcatcaatggtggcgccgcgtctaaggacggacgcctgagagttaacgaccagttaatcgcagtgaatggcgaaagtctgctaggaaagacgaaccaggacgctatggagactctgagacgctcaatgtccacggagggaaataagagaggaatgatccagctgatcgtggctagacgtataagtaagtgcaatgaactcaaatcccccgggagtcctccaggccccgagcttcccattgagaccgccctggatgaccgggagaggcggatctcccattcactctactcaggcatagaagggctggacgagagcccctctcgaaacgcggcgcttagccgcataatgggaaagtaccagcttagccccaccgtgaacatgccgcaggatgacaccgtcattatcgaagatgacagattgcctgtcttgcctccacatctgtctgatcagtcctcatccagcagtcacgatgatgttggttttgtaaccgctgacgccggtacttgggctaaggctgctattagcgatagcgccgattgcagcctgagccccgacgttgaccctgtattggcttttcaaagggagggcttcggacgccagtcaatgtctgaaaagcgcactaaacagttcagtgatgctagtcagctcgatttcgtgaaaaccaggaaaagcaaatcaatggatttaggaatagccgatgagacgaaacttaacaccgtggacgatcaaaaagcagggagcccttccagggatgtggggcccagtttggggttgaagaaatcctcctcactggaatctctccagaccgctgtcgccgaggtgaccctgaacggagatatcccattccatagacccaggccccgcatcattagagggagaggctgtaacgagagcttcagagcggcgatcgataaaagttacgataagccggccgtggacgacgatgatgaaggaatggaaacactggaagaggatacggaagaatctagccgatcaggacgcgagtctgtctccaccgcctccgatcagccttcgcacagtctggagcggcagatgaatggtaaccaggagaaaggggacaaaaccgatcggaaaaaagataagaccggaaaggagaagaagaaggacagggataaagagaaggacaagatgaaggccaagaaaggcatgctgaaaggtctgggagatatgttccggtttgggaagcatagaaaggacgacaagatcgagaaaaccgggaaaattaaaatccaggagagctttacaagcgaggaagagcgtatccgcatgaagcaggagcaggaacgcatccaggccaagactagagaatttcgtgagcgccaggcccgcgaaagggactacgcggagattcaggactttcaccgtactttcggttgtgatgatgagctaatgtacggaggagtatcctcctatgagggatcgatggcacttaacgcaagaccccagtctccaagggaagggcacatgatggatgcactgtatgcacaggtgaagaaacccaggaactctaagcccagccctgtggactccaaccgctcaactccatcaaaccacgacaggatccaacgcttgcgccaagaatttcaacaggccaaacaggacgaggacgtggaggaccggagaagaacctactctttcgagcagccctggcccaatgcccggcctgccacacagtccggccgacactccgtgtctgtggaggtccagatgcagcgccagcgccaagaggagagggaatcatcgcaacaagcccagcgccagtactcttcacttccccgccagtcacgtaaaaacgcgtctagtgtgagccaagactcttgggagcaaaattactctccaggagagggttttcaatccgctaaagaaaaccctcggtactccagttaccagggttctagaaatgggtatctgggtggccacggttttaacgccagagtcatgctcgagactcaagagctgctgcgacaggaacagcgccgcaaagagcagcaaatgaagaaacagccccctagcgagggtccttcgaattatgacagctataagaaagtgcaggacccaagttatgcacctcccaagggacccttcaggcaggacgtgccaccgagtccctcacaggttgcaaggcttaatcggttgcagacccctgaaaaggggcgccccttttacagttag

SEQ ID NO: 71398 - DNA, 4062 bp, Artificial Sequence
  derived and/or modified sequence
atgaaggtgacagtgtgctttggaagaaccagggtggtggtgccctgtggagatggccacatgaaggtgttcagcctcatccagcaggccgtgacccgctacaggaaggccatcgccaaggaccccaactactggatccaggtgcaccggctggagcacggagatggcggcatcctggacctggatgacatcctgtgtgatgtggctgatgacaaggaccggctggtggccgtgtttgatgagcaggacccccaccacggcggagatggcaccagcgccagcagcacaggcacccagagccctgagatcttcggcagcgagctgggcaccaacaacgtgtctgccttccagccctaccaggccaccagcgagattgaggtgacccccagcgtgctgcgggccaacatgcccctgcacgtgagaagaagcagtgaccctgccctgattggcctgagcacctctgtgtctgacagcaacttcagcagcgaggagcccagcaggaagaaccccacccgctggagcaccacagctggcttcctgaagcagaacacagctggcagccccaagacctgtgacaggaagaaggatgagaactaccgcagcctgccccgggacaccagcaactggagcaaccagttccagagggacaatgcccggagcagcctgagcgccagccaccccatggtgggcaagtggctggagaagcaggagcaggatgaagatggaacagaggaggacaacagccgggtggagcctgtgggccacgccgacaccggcctggagcacatccccaacttcagcctggatgacatggtgaagctggtggaggtgcccaatgatggcggccccctgggcatccacgtggtgcccttcagcgcccggggcggccgcaccctgggcctgctggtgaagaggctggagaagggcggcaaggccgagcatgaaaatctcttccgggagaatgactgcatcgtgcgcatcaatgatggagacctgaggaacagaagatttgagcaggcccagcacatgttccggcaggccatgaggacccccatcatctggttccacgtggtgcctgctgccaacaaggagcagtatgagcagctgagccagagcgagaagaacaactactacagcagccgcttctccccagacagccagtacatcgacaacagatctgtgaacagcgctggcctgcacacagtgcagagggccccccggctgaaccaccccccagagcagattgacagccacagccggctgccccacagcgcccaccccagcggcaagcccccatctgccccagccagcgccccccagaatgtgttcagcaccaccgtgagcagcggctacaacaccaagaagattggcaagaggctgaacatccagctgaagaagggcacagagggcctgggcttcagcatcaccagcagagatgtgaccatcggcggcagcgcccccatctacgtgaagaacatcctgcccaggggggccgccatccaggacggccgcctgaaggccggggacaggctcatcgaggtgaatggagtggacctggtgggcaagagccaggaggaggtggtgtccctgctgcggagcaccaagatggagggcaccgtgtccctgctggtgttccggcaggaggatgccttccacccccgggagctgaatgctgagcccagccagatgcagatccccaaggagaccaaggccgaggatgaggacatcgtgctgaccccagatggcacccgggagttcctgacctttgaggtgcccctgaatgacagcggcagcgctggcctgggcgtgtctgtgaagggcaacagaagcaaggagaaccacgccgacctgggcatctttgtgaagagcatcatcaatggaggagctgccagcaaggatggccgcctgcgggtgaatgaccagctgattgctgtgaatggagagagcctgctgggcaagaccaaccaggatgccatggagaccctgcggcgctccatgagcacagagggcaacaagaggggcatgatccagctgattgtggcccggcgcatcagcaagtgcaatgagctgaagagccctggcagccccccaggccctgagctgcccattgaaacagccctggatgaccgggagcggcgcatcagccacagcctgtacagcggcatcgagggcctggatgagagccccagcagaaatgctgccctgagccgcatcatgggcaagtaccagctgagccccaccgtgaacatgccccaggatgacaccgtcatcattgaagatgaccggctgcctgtgctgcccccccacctgagtgaccagagcagcagcagcagccatgatgatgtgggctttgtgacagcagatgctggcacctgggccaaggccgccatcagtgacagcgctgactgcagcctgagcccagatgtggaccctgtgctggccttccagcgggagggcttcggccggcagagcatgtctgagaagaggaccaagcagttcagtgatgccagccagctggactttgtgaagaccaggaagagcaagtccatggacctgggcattgctgatgagaccaagctgaacacagtggatgaccagaaggccggcagccccagcagagatgtgggccccagcctgggcctgaagaagagcagcagcctggagagcctgcagacagctgtggccgaggtgaccctgaatggagacatccccttccaccggccccggccccgcatcatccggggccggggctgcaatgaaagcttccgggccgccatcgacaagagctatgacaagccagctgtggatgatgatgatgagggcatggagaccctggaggaggacacagaggagagcagccgcagcggccgggagagcgtgtccacagccagtgaccagcccagccacagcctggagcggcagatgaatggaaaccaggagaagggggacaagacagacaggaagaaggacaagacaggcaaggagaagaagaaggaccgggacaaggagaaggacaagatgaaggccaagaagggcatgctgaagggcctgggggacatgttccgctttgggaagcacaggaaggatgacaagattgagaagacaggcaagatcaagatccaggagagcttcaccagcgaggaggagcgcatccgcatgaagcaggagcaggagcgcatccaggccaagacccgggagttccgggagcggcaggcccgggagcgggactatgcagagatccaggacttccacaggaccttcggctgtgatgatgagctgatgtatggaggagtgagcagctatgagggctccatggccctgaatgcccggccccagagcccccgggagggccacatgatggatgccctgtatgcccaggtgaagaagcccaggaacagcaagcccagccctgtggacagcaacagaagcacccccagcaaccacgaccgcatccagaggctgcggcaggagttccagcaggccaagcaggatgaagatgtggaggacagaagaaggacctacagctttgagcagccctggcccaatgcccggcctgccacccagagcggccgccacagcgtgtctgtggaggtgcagatgcagaggcagaggcaggaggagcgggagagcagccagcaggcccagaggcagtacagcagcctgccccggcagagcaggaagaatgccagctctgtgtcccaggacagctgggagcagaactacagccctggagagggcttccagagcgccaaggagaacccccgctacagcagctaccagggcagcagaaatggctacctgggcggccacggcttcaatgcccgggtgatgctggagacccaggagctgctgcggcaggagcagaggaggaaggagcagcagatgaagaagcagcccccatctgagggccccagcaactatgacagctacaagaaggtgcaggaccccagctatgccccacccaagggccccttccggcaggatgtgccccccagccccagccaggtggcccggctgaaccggctgcagaccccagagaagggccggcccttctacagctag

SEQ ID NO: 71399 - DNA, 4062 bp, Artificial Sequence
  derived and/or modified sequence
atgaaggtgaccgtgtgcttcggccggacccgggtggtggtgccctgtggcgacggtcatatgaaggttttctccttgatacaacaggctgtgacaaggtaccggaaagccatagctaaggacccaaattattggatccaggtgcatcgcctcgaacatggagacgggggtattctggaccttgatgacatcctttgtgatgtcgctgacgataaggatcgccttgtggcagtgttcgacgaacaggatcctcatcatggaggtgacgggacctctgcctcttcgacaggcacacagtcacccgagatcttcggctccgagctagggacgaacaatgttagcgcctttcaaccttatcaggccacctcagaaatcgaggttaccccctcagtgctacgcgcaaatatgccacttcacgtgaggcgcagctctgaccccgcactgattggcttaagcacctccgtgtctgactccaatttcagtagtgaagagcctagccggaagaacccgactagatggtccaccaccgctggctttcttaaacagaatacagccggctccccaaagacatgtgaccgaaagaaggatgaaaactataggtcattaccccgggatacatcaaattggagcaatcagtttcagcgagacaacgcgcgctcgagcttaagcgccagccaccccatggttggaaaatggctggagaaacaagagcaggacgaagacggcaccgaagaagataactctagggtcgaaccggtcggccatgcagatacgggccttgagcacatccctaattttagcctggacgacatggtcaagctggtggaggtccccaacgatggcggtccgctgggtattcacgtcgtgcctttctcagcacgcggtggacgcacattaggtctattagtaaaaagactagagaaggggggtaaagcggagcatgagaacctttttcgggaaaacgattgcatcgttagaattaatgatggtgatttacggaaccggaggtttgagcaggcgcagcacatgttcagacaggcgatgcgtactcccattatctggttccatgtcgtgcctgcagcaaataaggaacagtacgagcagctctctcaatcagaaaagaacaattactactccagtcgattcagtcccgattcacagtatatcgataacagatccgttaattccgccggtcttcataccgttcaacgtgcacctaggttgaaccacccccccgaacagatcgactcccactcccgacttcctcattcagcccaccctagcggtaaacctccctctgccccagccagtgcccctcagaacgtgttcagtacaactgtctcatcaggctataacacaaagaagatagggaagcggttaaacatccaactaaagaagggtaccgagggcctagggttttccatcacatcccgggacgtaactatcggaggctcagctcctatttacgttaagaatattttgcccagaggcgccgcaattcaggacggccgactgaaggcaggggacagactgatagaagtaaacggtgtggacctggtcggcaaaagtcaggaagaggtggtgagccttctcagaagcactaagatggaaggaaccgtatctcttctcgtctttagacaagaagacgcattccaccctagggaactgaatgctgaacctagccagatgcagatccctaaggaaacgaaggcagaggacgaggacatagtgctgacccccgatggcacccgcgagttcctgactttcgaagtaccactaaatgactctggatcagcggggctgggcgtctccgttaaaggtaatcgctcgaaagagaatcacgcggaccttggcatctttgtcaagtctatcatcaacggtggggccgccagcaaggacggcagattgagagttaatgaccagctgatcgccgtcaacggagaatcactgctgggcaagacaaaccaggacgcaatggagaccctgcgaagatctatgtctaccgaagggaataagcgcggcatgattcagctcatagtggcaaggaggatatcaaagtgtaatgagctgaaatcccctggcagtccaccagggccagaactgcccatcgaaactgctctcgacgacagagagaggaggatcagccacagtctctactccggcatcgagggattggacgaatccccttctcgaaacgcggctttgagccgcatcatgggcaagtatcaactgagccccacagtcaacatgcctcaagatgatacagtcatcatagaagacgatcggttacctgttctgcctcctcatctttccgatcaaagtagttcaagttctcatgatgatgtcggcttcgtgaccgccgatgccggcacctgggccaaagctgccatcagtgatagtgcagactgctctctcagccctgacgtggaccccgtcctagctttccagcgggaagggtttggccgccagagcatgtcagagaagcgaactaaacagttcagtgacgccagccagctagacttcgtgaaaactcggaagtcaaagagcatggatctagggatagctgatgaaactaaactgaacactgtcgacgatcagaaggctgggagcccctcaagagacgtgggaccgtccctgggtctaaaaaaatcttcctcccttgagtcgcttcagaccgccgtcgcagaagtgactcttaatggtgatattccttttcatcgccctagaccacgcatcatccgagggaggggatgcaacgaaagttttcgtgcagcaattgacaagtcctacgacaaacccgccgtagatgatgacgatgaggggatggagacattggaagaggatacagaggaatctagtagaagcgggcgcgaatcagtatcgaccgcaagtgaccagccttctcactcactcgaacgccagatgaacggcaaccaggaaaaaggggacaagacagacaggaaaaaggacaaaacgggcaaggagaagaagaaggacagagacaaagagaaggataagatgaaggccaagaagggcatgctgaaaggactgggggacatgtttcggtttgggaagcacaggaaagacgataaaattgagaagactggaaagatcaagatccaggaaagcttcacaagtgaggaagagcgaatcaggatgaagcaggagcaggagaggatccaagccaaaacgagagagttccgagagaggcaggcacgagaaagggattacgcagagattcaggacttccatcggaccttcggctgcgacgacgagttaatgtacggaggagtctcttcctatgagggctcaatggccctgaatgcaaggccccagtctccccgcgagggacacatgatggatgccctgtacgcccaggttaagaagccacgtaacagcaagccatcccccgttgacagtaatcggtctacacctagtaaccacgaccggatacagcgcttgcggcaggaattccagcaggccaagcaagacgaggacgtcgaggaccggcggagaacttactctttcgagcaaccttggcccaatgctaggcctgcgacccaatctggcaggcacagcgtgagcgtggaggtgcagatgcaaaggcagaggcaggaagagcgggaaagcagccaacaggcccagagacagtatagctcactgccaagacagtcccggaagaacgccagctctgtctctcaagatagttgggagcagaactattcacctggggagggttttcagagtgccaaagaaaatcccagatactcatcctaccagggctctcggaatggttatctgggagggcatgggtttaacgctcgggtcatgctggagacccaggaattattgaggcaagagcaacgaagaaaagagcagcagatgaagaaacagcccccttctgagggcccgtccaactacgacagctacaagaaagtgcaagatccttcatatgccccccctaaaggccccttccggcaggatgtaccgcccagcccatcccaagtagccagactgaatagactgcaaacgccagaaaaagggagacctttctactcttag

SEQ ID NO: 71400 - DNA, 5996 bp, Artificial Sequence
  derived and/or modified sequence
gcggccccgagcgagcgccagcgccacacagccccgggcagccgccggcgagcgcgccgcgacgccgaacaggtggccggaggctgcgggcgccgcggcggggagaggcgaggcaagccccgggcgaagcgaggcgaggcgagggcggccgggccgggcatgcgagctgagcggccccccggcgtcgccgccgcctgcccgcgcccctagccgcccgcgcgcccgagtccccagcggctcctccgcgcccagcgtcctcggtcccggcctcggctgctccggctgcgctcggcgaggggcgcgggcccgcccgcggcggcggcggcatgaaagtgaccgtgtgcttcggacggacccgggtggtcgtgccgtgcggggacggccacatgaaagttttcagcctcatccagcaggcggtgacccgctaccggaaggccatcgccaaggatccaaactactggatacaggtgcatcgcttggaacatggagatggaggaatactagaccttgatgacattctttgtgatgtagcagacgataaagacagactggtagcagtgtttgatgagcaggatccacatcacggaggtgatggcaccagtgccagttccacgggtacccagagcccagagatatttggtagtgagcttggcaccaacaatgtctcagcctttcagccttaccaagcaacaagtgaaattgaggtcacaccttcagtccttcgagcaaatatgcctcttcatgttcgacgcagtagtgacccagctctaattggcctctccacttctgtcagtgatagtaatttttcctctgaagagccttcaaggaaaaatcccacacgctggtcaacaacagctggcttcctcaagcagaacactgctgggagtcctaaaacctgcgacaggaagaaagatgaaaactacagaagcctcccgcgggatactagtaactggtctaaccaatttcagagagacaatgctcgctcgtctctgagtgccagtcacccaatggtgggcaagtggctggagaaacaagaacaggatgaggatgggacagaagaggataacagtcgtgttgaacctgttggacatgctgacacgggtttggagcatatacccaacttttctctggatgatatggtaaagctcgtagaagtccccaacgatggagggcctctgggaatccacgtagtgcctttcagtgctcgaggcggcagaaccctggggttattagtaaaacgattggagaaaggtggtaaagctgaacatgaaaatctttttcgtgagaatgattgcattgtcaggattaatgatggcgaccttcgaaatagaagatttgaacaagcacaacatatgtttcgccaagccatgcgtacacccatcatttggttccatgtggttcctgcagcaaataaagagcagtatgaacaactatcccaaagtgagaagaacaattactattcaagccgttttagccctgacagccagtatattgacaacaggagtgtgaacagtgcagggcttcacacggtgcagagagcaccccgactgaaccacccgcctgagcagatagactctcactcaagactacctcatagcgcacacccctcgggaaaaccaccatccgctccagcctcggcacctcagaatgtatttagtacgactgtaagcagtggttataacaccaaaaaaataggcaagaggcttaatatccagcttaagaaaggtacagaaggtttgggattcagcatcacttccagagatgtaacaataggtggctcagctccaatctatgtgaaaaacattctcccccggggggcggccattcaggatggccgacttaaggcaggagacagacttatagaggtaaatggagtagatttagtgggcaaatcccaagaggaagttgtttcgctgttgagaagcaccaagatggaaggaactgtgagccttctggtctttcgccaggaagacgccttccacccaagggaactgaatgcagagccaagccagatgcagattccaaaagaaacgaaagcagaagatgaggatattgttcttacacctgatggcaccagggaatttctgacatttgaagtcccacttaatgattcaggatctgcaggccttggtgtcagtgtcaaaggtaaccggtcaaaagagaaccacgcagatttgggaatctttgtcaagtccattattaatggaggagcagcatctaaagatggaaggcttcgggtgaatgatcaactgatagcagtaaatggagaatccctgttgggcaagacaaaccaagatgccatggaaaccctaagaaggtctatgtctactgaaggcaataaacgaggaatgatccagcttattgttgcaaggagaataagcaagtgcaatgagctgaagtcacctgggagcccccctggacctgagctgcccattgaaacagcgttggatgatagagaacgaagaatttcccattccctctacagtgggattgaggggcttgatgaatcgcccagcagaaatgctgccctcagtaggataatgggtaaataccagctgtcccctacagtgaatatgccccaagatgacactgtcattatagaagatgacaggttgccagtgcttcctccacatctctctgaccagtcctcttccagctcccatgatgatgtggggtttgtgacggcagatgctggtacttgggccaaggctgcaatcagtgattcagccgactgctctttgagtccagatgttgatccagttcttgcttttcaacgagaaggatttggacgtcagagtatgtcagaaaaacgcacaaagcaattttcagatgccagtcaattggatttcgttaaaacacgaaaatcaaaaagcatggatttaggtatagctgacgagactaaactcaatacagtggatgaccagaaagcaggttctcccagcagagatgtgggtccttccctgggtctgaagaagtcaagctcgttggagagtctgcagaccgcagttgccgaggtgactttgaatggggatattcctttccatcgtccacggccgcggataatcagaggcaggggatgcaatgagagcttcagagctgccatcgacaaatcttatgataaacccgcggtagatgatgatgatgaaggcatggagaccttggaagaagacacagaagaaagttcaagatcagggagagagtctgtatccacagccagtgatcagccttcccactctctggagagacaaatgaatggaaaccaagagaaaggtgataagactgatagaaaaaaggataaaactggaaaagaaaagaagaaagatagagataaggagaaggataaaatgaaagccaagaagggaatgctgaagggcttgggagacatgttcaggtttggcaaacatcgaaaagatgacaagattgagaaaacgggtaaaataaaaatacaggaatcctttacatcagaagaggagaggatacgaatgaagcaggagcaggagaggattcaagccaaaactcgagaatttagggaacgacaagctcgagagcgtgactatgctgaaattcaagattttcatcggacatttggctgtgatgatgagttaatgtatgggggagtttcttcttatgaaggttccatggctctcaacgctagacctcagagcccacgagaagggcatatgatggatgctttgtatgcccaagtcaagaagccgcggaattccaaaccctcacctgtagacagtaacagatcaactcctagcaatcatgatcggatacagcgtctgaggcaagaatttcagcaagcaaagcaagatgaagatgtagaagatcgtcggcggacctatagttttgagcaaccctggccgaacgcacggccggcgacgcagagcgggcgacactcggtgtccgtggaggtgcagatgcagcggcagcggcaggaggagcgcgagagctcccagcaggcccagcgccagtacagctctctgcctcggcaaagcaggaaaaatgccagctcggtctcccaggactcttgggagcagaactactcccctggggaaggcttccagagtgccaaagagaaccccaggtactccagctaccaaggctccaggaacggctacctgggaggacatggcttcaacgccagggtcatgctggaaactcaggagctccttcgccaggaacagaggcggaaggagcagcagatgaagaagcagcctccttccgaggggcccagcaactatgactcgtataagaaagtccaggaccccagttacgcccctcccaaggggcccttccggcaagatgtgcccccctccccttctcaggttgcgaggctgaacagacttcagactcctgagaaagggaggcccttctattcctgagcacgcaaataacggatgcttcatgtcgcgcaataaaagacattttcctatgaagacttgtattttgggagtttttttaaaacctcgatggtactatggagtatttctgttgttggtatcagtgcctttaagcggtgtaggcaaagaaatggaaggccttaatgtctttgccactatgtctcaagtgtctgtttcatggaaggatttcccaccctgtgacaatcatctgtttgaggtgttcatatgctctgcgcctctccacagtaccaggaatctcggccctactcatgagttgtccgcggcttggttgtaacatccctgcaccacttgcagtgacaaattcacctgaagtggaggatgacgtgcggccctgtttctccctctaagttctcttagctatgggatgacatcttagtctctggtggaggaaaagtgggcgacatacaccaaaaattggggctttctggtacttcacagcacagccatttgtcgtactttgtcatcactgtggttttctctttcctttctcagctctttgtgacgggagagtcggtcatcctattacagaagctaagccatagtccaacattgtttggtcaccatgggggtccttttgtaactgccttatgactcaacattaccaataaagtgatgatcctggtctgcgtttatacatacgcttgttcggtcctgttcctgacacgtgggttgagtcaccacagctctgtgtggggaacgtgggagacaggagtggctcctgccgggggaagctgggcctgccattggccctgtgtctatcatgaggggagagctaagaaagaaattctcctaggaagagctcatggcccagtacatcctagtaattattttaattagtttttgttctgacagcttgtcaggaagggcacagaatgggacagagataaaccagacagtcattttgatctgctctctacggtttttcaagtcagaggcaattgatgcttgtctaatgcatccacacactgcatgtctgactggcgatgccgcgctcctaagtagttctgccatgaaacataaaagacaaaggaaaagccgttacacatcacacagagaacattttcgggtcccacagcggtggtggcaggaagctcactctcgcgtcagtattagagtgtgtgtgtgggtctcggggatctcggtggctcccatcttccttcattgttctgaacatcctgtattgtaaaccatggctggggtgctaaagtgcctgtgaatcccgatgtggaaaaagctggaggtgaaagctcagcataccatgtatttactttaaaaacagaaaaaaagacatgtatggatatgtctattttttttttattggcacattgtatttttgtgttgacttgtttttagaaatgatgtgtccacacacgtacccgtgtctcttctgcatttctgtgtcatggttctgtttcttaatcacgtgcggcggtgtctaagtggtgttaccagtgtacgcgcagtgaccttggatgacagtggctctttctcacagcctcccctgagctgtgagaaacagctttctctgtacatatgcaactcctaataaaaggcatatttcttcctgtt

SEQ ID NO: 71401 - DNA, 4062 bp, Artificial Sequence
  derived and/or modified sequence
atgaaggtgaccgtttgtttcggtcgcactagggttgttgtcccttgcggtgatggccacatgaaggtgtttagcctgattcaacaggcggttacccgttaccgtaaagccatcgccaaggatccaaattattggatccaagtgcacaggctcgaacatggggatgggggaatcctggatctggacgacatcttgtgtgacgtcgcagatgacaaagaccggctggtggccgtgtttgacgaacaggacccccaccatgggggtgacggcacttccgcctctagtacaggcacacaatccccagagatttttggatccgaactgggtacgaataatgtgagtgctttccagccataccaggcaacaagcgagattgaggtgacgccctcggtcctgagggctaatatgccactccacgtaaggcggtcttccgacccagctcttattggtctgagtacaagcgtgtctgatagcaatttcagctccgaggaaccatctaggaagaacccgacaaggtggagtaccactgctgggttcctgaaacagaacaccgccggaagcccgaagacttgtgacaggaaaaaggacgaaaattatagaagcctccctcgcgatacaagcaattggtccaaccaattccagcgcgataacgccaggtcaagcctgtcggcgagccaccccatggttggaaagtggctcgaaaagcaggaacaggatgaagatggaactgaagaagacaattcaagagtggaaccagttggccacgctgatactggcttagagcacatacccaacttttctctagatgacatggtcaagctcgtggaggtgccaaatgatggagggccactggggatccacgtggtgcctttcagtgcccgagggggacgaacattgggtctgcttgtcaagcgccttgagaaggggggtaaagccgaacacgaaaacctgtttcgtgagaatgactgcatcgttagaattaatgacggggacctgaggaataggaggtttgagcaagcccaacacatgtttcgacaagccatgaggactcccataatctggttccacgtggtgccagctgccaataaggagcaatacgagcagctttcccaatccgagaaaaataactactattctagccggttctcccccgatagccagtacatcgataatcgcagtgttaactcggcgggtttgcatacagttcagcgcgctcctcgcctgaatcaccctcccgagcagatcgactcccattcccgactgccacactcagcccacccttctggtaagcctcccagcgctcccgcttcagcgcctcaaaacgtttttagtaccacagtgagttctggatataataccaaaaagattggtaagcgcttgaatattcagctcaagaagggcaccgaaggcttgggttttagtatcacttcccgcgacgtgacaattgggggatctgctcccatttacgtgaagaatattctccctcggggagcagctatccaggatggtagactcaaggccggtgaccggttgatcgaagtgaatggcgtcgatcttgtcggtaagtcccaagaagaagtcgttagccttctgcgcagtacaaagatggaaggcacagtctctctgttagttttccggcaggaggatgcctttcacccaagggagttgaatgccgaaccgagccagatgcagatccccaaggagacgaaggccgaggatgaagacattgtgctcactcccgacggcaccagggaattccttacgttcgaggtccctctcaatgactccggtagcgcaggactgggagtatctgtcaagggaaatcggagtaaggagaatcatgccgatctcggcatcttcgtgaaaagtatcataaatggaggggctgcctccaaagatggaagactgagggttaatgatcagctgatcgctgtcaatggggagtctctcctgggaaaaaccaaccaggacgcaatggaaaccttgagaagatccatgagtaccgaaggcaataaacggggaatgatccagctgatcgtagcaaggagaatctcaaagtgtaatgaacttaaatcccccggaagccctcccggaccagaactccccattgaaacagcgctggacgaccgagaacggcgtattagccattctttgtatagcggaattgagggtctcgatgagagtccatccagaaatgccgcactgtctcgtatcatgggcaaatatcaactgtccccaaccgtgaacatgccgcaggatgacactgtgatcatcgaggacgatcgcttacctgtcctgcccccacacctgagcgatcaatccagtagctccagtcatgatgatgtagggtttgttaccgccgatgcaggaacatgggccaaagcagctatcagcgactccgccgactgctcactgtcaccagacgtcgatccagtgctagccttccagcgtgaaggcttcgggcgtcaatccatgtccgagaaacgcacgaagcagtttagcgatgctagtcagctggactttgtgaaaacccgtaagtcaaagtctatggacctgggaatcgccgacgaaactaaattgaatacagttgatgaccagaaggccggttccccttctagagacgtcggaccatccctgggtctcaagaaatcatcgtccctggaatctttgcaaacagccgttgccgaagtgaccctcaacggggatattccctttcaccgaccgcgacccaggatcatcagagggcgaggatgcaacgaatccttccgggctgcaatcgacaagtcttatgataagccagccgtcgatgacgacgatgagggcatggagactctggaggaggacactgaggaatcctctcgctcgggaagagaatccgtgtcaaccgcctccgatcagcccagccatagccttgagcggcagatgaacggaaaccaggagaagggagataagaccgaccggaagaaagataagaccgggaaagagaagaaaaaagatcgtgacaaggaaaaggacaagatgaaggccaagaagggcatgctgaaaggtctcggggatatgttccgcttcggcaaacaccgcaaagacgacaagattgaaaagacaggaaagatcaagattcaagaaagctttactagtgaggaggaacgtattcggatgaaacaagagcaagagcggattcaggctaagacccgggaatttcgtgaacgccaggccagggagagagactatgccgagattcaggatttccataggacttttggatgcgacgacgaattgatgtatggtggcgtgagctcttacgaggggtcaatggcccttaacgcccgacctcaatcaccgcgtgagggtcacatgatggacgcactctatgctcaggtcaagaagccacggaactccaaacccagtccagtggacagcaatcggtccactccgtctaaccacgaccggattcaaaggcttaggcaagagttccaacaggcgaaacaggacgaagatgtggaggatagacgcaggacctactcttttgagcagccatggccgaacgctagaccggctacccagagcggccgtcattcagtgtctgttgaagtacagatgcagagacagcggcaggaagaaagggaatcatctcagcaggcacagaggcagtacagcagcctcccgaggcaatcacgcaaaaacgcttcctctgtcagccaggactcatgggaacagaactactctccaggggaaggctttcagtccgcgaaagagaaccctcgatactcttcctatcagggatcacggaatggatacctgggtggccacggatttaacgcgagggtcatgctggaaacccaagaactgctgcgacaagagcagcggcgaaaagaacagcagatgaagaagcagcctccctccgagggcccatctaattatgacagctataaaaaggtgcaggatccttcatatgccccacctaaggggccttttaggcaggacgttcccccttctccatcccaggtcgccaggctgaaccgcctacagacccctgaaaagggcaggcccttttattcttag

SEQ ID NO: 71402 - DNA, 4062 bp, Artificial Sequence
  derived and/or modified sequence
atgaaggtgaccgtgtgcttcggcagaaccagagtggtggtgccctgcggcgacggccacatgaaggtgttcagcctgatccagcaggccgtgaccagatacagaaaggccatcgccaaggaccccaactactggatccaggtgcacagactggagcacggcgacggcggcatcctggacctggacgacatcctgtgcgacgtggccgacgacaaggacagactggtggccgtgttcgacgagcaggacccccaccacggcggcgacggcaccagcgccagcagcaccggcacccagagccccgagatcttcggcagcgagctgggcaccaacaacgtgagcgccttccagccctaccaggccaccagcgagatcgaggtgacccccagcgtgctgagagccaacatgcccctgcacgtgagaagaagcagcgaccccgccctgatcggcctgagcaccagcgtgagcgacagcaacttcagcagcgaggagcccagcagaaagaaccccaccagatggagcaccaccgccggcttcctgaagcagaacaccgccggcagccccaagacctgcgacagaaagaaggacgagaactacagaagcctgcccagagacaccagcaactggagcaaccagttccagagagacaacgccagaagcagcctgagcgccagccaccccatggtgggcaagtggctggagaagcaggagcaggacgaggacggcaccgaggaggacaacagcagagtggagcccgtgggccacgccgacaccggcctggagcacatccccaacttcagcctggacgacatggtgaagctggtggaggtgcccaacgacggcggccccctgggcatccacgtggtgcccttcagcgccagaggcggcagaaccctgggcctgctggtgaagagactggagaagggcggcaaggccgagcacgagaacctgttcagagagaacgactgcatcgtgagaatcaacgacggcgacctgagaaacagaagattcgagcaggcccagcacatgttcagacaggccatgagaacccccatcatctggttccacgtggtgcccgccgccaacaaggagcagtacgagcagctgagccagagcgagaagaacaactactacagcagcagattcagccccgacagccagtacatcgacaacagaagcgtgaacagcgccggcctgcacaccgtgcagagagcccccagactgaaccacccccccgagcagatcgacagccacagcagactgccccacagcgcccaccccagcggcaagccccccagcgcccccgccagcgccccccagaacgtgttcagcaccaccgtgagcagcggctacaacaccaagaagatcggcaagagactgaacatccagctgaagaagggcaccgagggcctgggcttcagcatcaccagcagagacgtgaccatcggcggcagcgcccccatctacgtgaagaacatcctgcccagaggcgccgccatccaggacggcagactgaaggccggcgacagactgatcgaggtgaacggcgtggacctggtgggcaagagccaggaggaggtggtgagcctgctgagaagcaccaagatggagggcaccgtgagcctgctggtgttcagacaggaggacgccttccaccccagagagctgaacgccgagcccagccagatgcagatccccaaggagaccaaggccgaggacgaggacatcgtgctgacccccgacggcaccagagagttcctgaccttcgaggtgcccctgaacgacagcggcagcgccggcctgggcgtgagcgtgaagggcaacagaagcaaggagaaccacgccgacctgggcatcttcgtgaagagcatcatcaacggcggcgccgccagcaaggacggcagactgagagtgaacgaccagctgatcgccgtgaacggcgagagcctgctgggcaagaccaaccaggacgccatggagaccctgagaagaagcatgagcaccgagggcaacaagagaggcatgatccagctgatcgtggccagaagaatcagcaagtgcaacgagctgaagagccccggcagcccccccggccccgagctgcccatcgagaccgccctggacgacagagagagaagaatcagccacagcctgtacagcggcatcgagggcctggacgagagccccagcagaaacgccgccctgagcagaatcatgggcaagtaccagctgagccccaccgtgaacatgccccaggacgacaccgtgatcatcgaggacgacagactgcccgtgctgcccccccacctgagcgaccagagcagcagcagcagccacgacgacgtgggcttcgtgaccgccgacgccggcacctgggccaaggccgccatcagcgacagcgccgactgcagcctgagccccgacgtggaccccgtgctggccttccagagagagggcttcggcagacagagcatgagcgagaagagaaccaagcagttcagcgacgccagccagctggacttcgtgaagaccagaaagagcaagagcatggacctgggcatcgccgacgagaccaagctgaacaccgtggacgaccagaaggccggcagccccagcagagacgtgggccccagcctgggcctgaagaagagcagcagcctggagagcctgcagaccgccgtggccgaggtgaccctgaacggcgacatccccttccacagacccagacccagaatcatcagaggcagaggctgcaacgagagcttcagagccgccatcgacaagagctacgacaagcccgccgtggacgacgacgacgagggcatggagaccctggaggaggacaccgaggagagcagcagaagcggcagagagagcgtgagcaccgccagcgaccagcccagccacagcctggagagacagatgaacggcaaccaggagaagggcgacaagaccgacagaaagaaggacaagaccggcaaggagaagaagaaggacagagacaaggagaaggacaagatgaaggccaagaagggcatgctgaagggcctgggcgacatgttcagattcggcaagcacagaaaggacgacaagatcgagaagaccggcaagatcaagatccaggagagcttcaccagcgaggaggagagaatcagaatgaagcaggagcaggagagaatccaggccaagaccagagagttcagagagagacaggccagagagagagactacgccgagatccaggacttccacagaaccttcggctgcgacgacgagctgatgtacggcggcgtgagcagctacgagggcagcatggccctgaacgccagaccccagagccccagagagggccacatgatggacgccctgtacgcccaggtgaagaagcccagaaacagcaagcccagccccgtggacagcaacagaagcacccccagcaaccacgacagaatccagagactgagacaggagttccagcaggccaagcaggacgaggacgtggaggacagaagaagaacctacagcttcgagcagccctggcccaacgccagacccgccacccagagcggcagacacagcgtgagcgtggaggtgcagatgcagagacagagacaggaggagagagagagcagccagcaggcccagagacagtacagcagcctgcccagacagagcagaaagaacgccagcagcgtgagccaggacagctgggagcagaactacagccccggcgagggcttccagagcgccaaggagaaccccagatacagcagctaccagggcagcagaaacggctacctgggcggccacggcttcaacgccagagtgatgctggagacccaggagctgctgagacaggagcagagaagaaaggagcagcagatgaagaagcagccccccagcgagggccccagcaactacgacagctacaagaaggtgcaggaccccagctacgccccccccaagggccccttcagacaggacgtgccccccagccccagccaggtggccagactgaacagactgcagacccccgagaagggcagacccttctacagctag

SEQ ID NO: 71403 - protein, 1340 aa, Artificial Sequence
  derived and/or modified sequence
MKVTVCFGRTRVVVPCGDGHMKVFSLIQQAVTRYRKAIAKDPNYWIQVHRLEHGDGGILDLDDILCDVADDKDRLVAVFDEQDPHHGGDGTSASSTGTQSPEIFGSELGTNNVSAFQPYQATSEIEVTPSVLRANMPLHVRRSSDPALIGLSTSVSDSNFSSEEPSRKNPTRWSTTAGFLKQNTAGSPKTCDRKKDENYRSLPRDTSNWSNQFQRDNARSSLSASHPMVGKWLEKQEQDEDGTEEDNSRVEPVGHADTGLEHIPNFSLDDMVKLVEVPNDGGPLGIHVVPFSARGGRTLGLLVKRLEKGGKAEHENLFRENDCIVRINDGDLRNRRFEQAQHMFRQAMRTPIIWFHVVPAANKEQYEQLSQSEKNNYYSSRFSPDSQYIDNRSVNSAGLHTVQRAPRLNHPPEQIDSHSRLPHSAHPSGKPPSAPASAPQNVFSTTVSSGYNTKKIGKRLNIQLKKGTEGLGFSITSRDVTIGGSAPIYVKNILPRGAAIQDGRLKAGDRLIEVNGVDLVGKSQEEVVSLLRSTKMEGTVSLLVFRQEDAFHPRELKAEDEDIVLTPDGTREFLTFEVPLNDSGSAGLGVSVKGNRSKENHADLGIFVKSIINGGAASKDGRLRVNDQLIAVNGESLLGKTNQDAMETLRRSMSTEGNKRGMIQLIVARRISKCNELKSPGSPPGPELPIETALDDRERRISHSLYSGIEGLDESPSRNAALSRIMGKYQLSPTVNMPQDDTVIIEDDRLPVLPPHLSDQSSSSSHDDVGFVTADAGTWAKAAISDSADCSLSPDVDPVLAFQREGFGRQSMSEKRTKQFSDASQLDFVKTRKSKSMDLGIADETKLNTVDDQKAGSPSRDVGPSLGLKKSSSLESLQTAVAEVTLNGDIPFHRPRPRIIRGRGCNESFRAAIDKSYDKPAVDDDDEGMETLEEDTEESSRSGRESVSTASDQPSHSLERQMNGNQEKGDKTDRKKDKTGKEKKKDRDKEKDKMKAKKGMLKGLGDMFRFGKHRKDDKIEKTGKIKIQESFTSEEERIRMKQEQERIQAKTREFRERQARERDYAEIQDFHRTFGCDDELMYGGVSSYEGSMALNARPQSPREGHMMDALYAQVKKPRNSKPSPVDSNRSTPSNHDRIQRLRQEFQQAKQDEDVEDRRRTYSFEQPWPNARPATQSGRHSVSVEVQMQRQRQEERESSQQAQRQYSSLPRQSRKNASSVSQDSWEQNYSPGEGFQSAKENPRYSSYQGSRNGYLGGHGFNARVMLETQELLRQEQRRKEQQMKKQPPSEGPSNYDSYKKVQDPSYAPPKGPFRQDVPPSPSQVARLNRLQTPEKGRPFYS

SEQ ID NO: 71404 - DNA, 4023 bp, Artificial Sequence
  derived and/or modified sequence
atgaaggttacggtgtgcttcgggagaactcgagtggtggttccctgtggagatggccatatgaaggtgttttcactgatccagcaggccgttacccgttacaggaaggcaatcgcaaaggatcctaactattggatccaggttcatcggctggaacatggggacggcggcattctggacctggacgatattctctgtgacgtggccgacgataaggaccggctcgtggccgtgtttgatgaacaggatccccaccacggaggggatgggactagcgctagttcaactggcacacagagccctgagattttcggttcagagctgggtacaaataacgtttctgctttccagccctaccaggccaccagcgagattgaggttaccccctccgtcctgagggcaaacatgccactccatgtgaggcgaagcagcgacccagcactaattgggctcagcaccagcgtgtccgactcaaactttagctccgaggagccgtctaggaagaatccaaccagatggtccacaacagcgggattcctgaaacaaaataccgcgggttccccaaaaacctgtgaccgcaagaaagacgagaattatagaagccttcccagggacacaagcaactggagtaaccagtttcaaagagacaacgctcggagttccctttcagcttcccaccctatggtgggaaagtggttggaaaaacaggagcaagacgaagacgggaccgaggaagataactcacgggtcgagccagtcggccatgcggataccggcttagagcacatccccaacttctcactggacgatatggtcaagttggtagaagtaccaaacgacgggggccctctgggaattcacgtcgtgccattcagtgccagaggagggaggacactcggactgctggtcaagagactggagaaggggggcaaagccgagcacgagaacttatttcgagagaatgactgcatcgtgagaatcaatgatggggatctgcggaacaggagatttgagcaggcacagcacatgttcagacaggctatgaggacacccattatctggtttcatgtcgttcccgccgcaaacaaagagcagtacgagcagctcagccaatcagagaagaacaattactactcatccaggttcagtcccgactctcaatacatcgataaccgatccgtcaattctgcaggtctgcataccgtgcagcgcgccccccgactcaatcatcctcccgaacagattgactctcactcccgcctccctcattccgctcatccctcaggcaaacctccatcagctcccgcttctgcgcctcagaacgtattcagcaccaccgtgagctccggatacaataccaaaaaaattgggaaacgcctcaacattcagcttaagaagggtactgagggcctcgggttctctatcacatctagggacgtgaccatcggaggtagcgcgcccatttatgtgaaaaatattctgccgaggggcgcagctatccaggacggaagactgaaagcaggcgatagacttatcgaggtgaatggagtcgacctggtgggaaagtcgcaggaggaagttgtgagcctcctccggagtaccaaaatggaaggaacagtgtcactgctagtttttcgacaggaggatgctttccatcccagggagttgaaagccgaggatgaggatattgtcctaacacccgacgggactcgcgagtttctgaccttcgaggtacctcttaacgacagtgggagcgctgggcttggcgtttctgtgaaggggaacaggtccaaagaaaaccatgctgacctgggcatctttgtgaaaagtataatcaacggcggggctgcatctaaggatggtcggctccgcgtgaatgaccagttgatcgctgtcaatggggagtcactgctaggaaagacgaaccaggatgcgatggaaaccctcagacgcagtatgagtactgaaggaaataagagggggatgattcagctgattgtggcacggagaatctccaagtgcaatgagttaaaatcgcctggctcacctccgggcccagaactccctattgaaactgctctcgacgacagagagcgtaggatctcgcattctctctactcaggaattgagggactggacgagtccccgtcccggaatgcagccctctcccgcattatgggaaagtaccagctatcaccaaccgtcaatatgccccaggatgacacagtgattatagaggacgatagacttcctgtgctcccccctcatttaagcgatcagtcttctagcagtagtcatgatgatgtgggcttcgtgaccgccgacgccggcacttgggccaaggcagctatttcagattcggccgattgctccttgagcccagacgttgatccagtgcttgcgttccagcgggagggttttggccgacagagcatgtcagagaaaagaacaaagcagttcagcgacgcatctcagcttgattttgttaagacgcgcaaatcaaaatctatggaccttggcatcgccgacgaaactaaactgaacactgtcgatgaccaaaaggctggaagcccttccagggatgtgggtccatctttgggccttaaaaaatcctccagcctcgaatccctccagaccgccgtggcagaggtcacgttgaatggagacattccattccatagacctagaccaagaatcatccgtgggcggggctgtaatgagagcttcagagcggccattgacaagtcttacgacaagcctgccgtggatgatgatgatgagggaatggaaacgctcgaggaggatacagaagagagcagtcgatcaggccgggagtctgtgtctacggcctccgaccagcctagtcacagcttggaacgtcagatgaatggcaaccaagagaaaggtgacaagactgaccgcaaaaaggacaagactggcaaggagaagaagaaggatcgtgacaaggagaaagataaaatgaaggctaaaaaaggcatgctgaagggactaggcgatatgttcaggtttggcaagcacaggaaagacgataaaatagaaaagaccgggaagataaaaattcaggaatcatttaccagcgaagaggaaagaatcagaatgaagcaggaacaagagaggattcaggcaaagaccagggagttccgcgagcggcaagcccgtgagagggattacgcagagattcaggatttccaccggacattcggatgtgacgatgagttgatgtacggaggagtatcttcatacgaagggtccatggccctgaatgctaggcctcagtctccgcgcgaggggcatatgatggacgcgctgtacgctcaggtgaagaaaccaaggaatagtaagcccagccctgtcgattccaaccgctcaacccccagcaaccatgataggatccagcgtctcagacaggaattccagcaggcgaaacaggatgaagacgtggaggaccggagaagaacttactccttcgaacaaccatggccgaacgccagacccgccacgcaaagcggtagacattcagtgtccgtcgaggtgcagatgcagcgacaaaggcaagaggagcgagaatcttcacaacaggcccaacggcaatacagcagcctgcctaggcagtcgcgcaaaaatgcctcttccgtgtcacaggattcttgggagcaaaactactcccccggcgaggggtttcagagcgcaaaggaaaaccctcgctactcctcttatcaaggttcccgtaatggatacctgggaggacatggcttcaacgcccgtgttatgctggagacacaggagttgctgagacaagaacaacgccggaaggaacagcagatgaagaaacagcccccaagtgagggtccttctaattacgatagttacaagaaggtgcaggatccatcatacgcgccccctaaaggaccctttcggcaggacgtgcccccaagcccgagtcaggtcgctagactgaacaggcttcagacacccgaaaaaggccgccccttttactcttag

SEQ ID NO: 71405 - DNA, 4023 bp, Artificial Sequence
  derived and/or modified sequence
atgaaggtgacagtgtgctttggaagaaccagggtggtggtgccctgtggagatggccacatgaaggtgttcagcctcatccagcaggccgtgacccgctacaggaaggccatcgccaaggaccccaactactggatccaggtgcaccggctggagcacggagatggcggcatcctggacctggatgacatcctgtgtgatgtggctgatgacaaggaccggctggtggccgtgtttgatgagcaggacccccaccacggcggagatggcaccagcgccagcagcacaggcacccagagccctgagatcttcggcagcgagctgggcaccaacaacgtgtctgccttccagccctaccaggccaccagcgagattgaggtgacccccagcgtgctgcgggccaacatgcccctgcacgtgagaagaagcagtgaccctgccctgattggcctgagcacctctgtgtctgacagcaacttcagcagcgaggagcccagcaggaagaaccccacccgctggagcaccacagctggcttcctgaagcagaacacagctggcagccccaagacctgtgacaggaagaaggatgagaactaccgcagcctgccccgggacaccagcaactggagcaaccagttccagagggacaatgcccggagcagcctgagcgccagccaccccatggtgggcaagtggctggagaagcaggagcaggatgaagatggaacagaggaggacaacagccgggtggagcctgtgggccacgccgacaccggcctggagcacatccccaacttcagcctggatgacatggtgaagctggtggaggtgcccaatgatggcggccccctgggcatccacgtggtgcccttcagcgcccggggcggccgcaccctgggcctgctggtgaagaggctggagaagggcggcaaggccgagcatgaaaatctcttccgggagaatgactgcatcgtgcgcatcaatgatggagacctgaggaacagaagatttgagcaggcccagcacatgttccggcaggccatgaggacccccatcatctggttccacgtggtgcctgctgccaacaaggagcagtatgagcagctgagccagagcgagaagaacaactactacagcagccgcttctccccagacagccagtacatcgacaacagatctgtgaacagcgctggcctgcacacagtgcagagggccccccggctgaaccaccccccagagcagattgacagccacagccggctgccccacagcgcccaccccagcggcaagcccccatctgccccagccagcgccccccagaatgtgttcagcaccaccgtgagcagcggctacaacaccaagaagattggcaagaggctgaacatccagctgaagaagggcacagagggcctgggcttcagcatcaccagcagagatgtgaccatcggcggcagcgcccccatctacgtgaagaacatcctgcccaggggggccgccatccaggacggccgcctgaaggccggggacaggctcatcgaggtgaatggagtggacctggtgggcaagagccaggaggaggtggtgtccctgctgcggagcaccaagatggagggcaccgtgtccctgctggtgttccggcaggaggatgccttccacccccgggagctgaaggcagaagatgaagatattgtgctgaccccagatggcacccgggagttcctgacctttgaggtgcccctgaatgattctggcagcgctggcctgggcgtgtctgtgaagggcaacagaagcaaagaaaatcatgctgacctgggcatctttgtgaagagcatcatcaatggaggagctgccagcaaggatggccgcctgcgggtgaatgaccagctgattgctgtgaatggagagagcctgctgggcaagaccaaccaggatgccatggagaccctgcggcgctccatgagcacagagggcaacaagaggggcatgatccagctgattgtggcccggcgcatcagcaaatgtaatgagctgaagagccctggcagccccccaggccctgagctgcccatcgagacagccctggatgaccgggagcggcgcatcagccacagcctgtacagcggcatcgagggcctggatgagagccccagcagaaatgctgccctgagccgcatcatgggcaagtaccagctgagccccaccgtgaacatgccccaggatgacaccgtcatcattgaagatgaccggctgcctgtgctgcccccccacctgagtgaccagagcagcagcagcagccatgatgatgtgggctttgtgacagcagatgctggcacctgggccaaggccgccatcagtgacagcgctgactgcagcctgagcccagatgtggaccctgtgctggccttccagcgggagggcttcggccggcagagcatgtctgagaagaggaccaagcagttcagtgatgccagccagctggactttgtgaagaccaggaagagcaagtccatggacctgggcattgctgatgagaccaagctgaacacagtggatgaccagaaggccggcagccccagcagagatgtgggccccagcctgggcctgaagaagagcagcagcctggagagcctgcagacagctgtggccgaggtgaccctgaatggagacatccccttccaccggccccggccccgcatcatccggggccggggctgcaatgaaagcttccgggccgccatcgacaagagctatgacaagccagctgtggatgatgatgatgagggcatggagaccctggaggaggacacagaggagagcagccgcagcggccgggagagcgtgtccacagccagtgaccagcccagccacagcctggagcggcagatgaatggaaaccaggagaagggggacaagacagacaggaagaaggacaagacaggcaaggagaagaagaaggaccgggacaaggagaaggacaagatgaaggccaagaagggcatgctgaagggcctgggggacatgttccgctttgggaagcacaggaaggatgacaagattgagaagacaggcaagatcaagatccaggagagcttcaccagcgaggaggagcgcatccgcatgaagcaggagcaggagcgcatccaggccaagacccgggagttccgggagcggcaggcccgggagcgggactatgcagagatccaggacttccacaggaccttcggctgtgatgatgagctgatgtatggaggagtgtcctcctatgagggctccatggccctgaatgcccggccccagagcccccgggagggccacatgatggatgccctgtatgcccaggtgaagaagcccaggaacagcaagcccagccctgtggacagcaacagaagcacccccagcaaccacgaccgcatccagaggctgcggcaggagttccagcaggccaagcaggatgaagatgtggaggacagaagaaggacctacagctttgagcagccctggcccaatgcccggcctgccacccagagcggccgccacagcgtgtctgtggaggtgcagatgcagaggcagaggcaggaggagcgggagagcagccagcaggcccagaggcagtacagcagcctgccccggcagagcaggaagaatgccagctctgtgtcccaggacagctgggagcagaactacagccctggagagggcttccagagcgccaaggagaacccccgctacagcagctaccagggcagcagaaatggctacctgggcggccacggcttcaatgcccgggtgatgctggagacccaggagctgctgcggcaggagcagaggaggaaggagcagcagatgaagaagcagccccccagcgagggccccagcaactatgacagctacaagaaggtgcaggaccccagctatgccccacccaagggccccttccggcaggatgtgccccccagccccagccaggtggcccggctgaaccggctgcagaccccagagaagggccggcccttctacagctag

SEQ ID NO: 71406 - DNA, 4023 bp, Artificial Sequence
  derived and/or modified sequence
atgaaggtgaccgtgtgcttcggccggacccgggtggtggtgccctgcggcgacggtcatatgaaggttttttccctcatccagcaagcagttacgcggtatcgtaaggctatcgctaaggatcccaactattggatacaggtgcaccgacttgaacatggggatggcgggatcctcgacctggatgacatcttgtgtgatgtggctgatgacaaggaccggctcgttgcagtcttcgatgaacaagacccacaccatgggggggatggcacatccgcgtccagtactggtacacagtcaccagagatatttggttctgaactgggcactaacaacgtctccgctttccagccataccaagccacaagtgaaattgaagtgacaccctccgtgctgagggccaacatgcctctccatgtgcgtcggtcatccgacccagccctcatcggtctgtcaacttctgtctccgacagcaacttctcaagcgaggaaccctcgagaaagaatccaacaagatggagcacaaccgccggtttcctcaaacagaacactgctggttctcctaaaacctgtgatcgaaaaaaagatgagaactaccggtctctgccaagagatacctctaattggtctaaccagtttcagcgggataacgcacgttcctcgctctctgcatcacatccgatggtcggtaagtggttggaaaagcaagaacaagatgaagacggaaccgaagaggataatagccgcgtcgagcccgtggggcacgctgacaccggcctggaacatataccaaatttcagccttgacgacatggtcaaactagtcgaggtcccaaacgacggtgggcctctcggcatccacgtggtccctttcagtgcccgtggaggtcggaccctggggctgctggtaaagagacttgaaaaagggggtaaggcagagcacgagaatctcttcagagaaaacgattgcatagttcggatcaatgatggggaccttcgcaatagacggtttgagcaagctcagcacatgttcagacaagccatgagaactccaattatctggttccacgttgtcccagctgcgaataaagagcaatacgaacagctctcacagagcgagaaaaacaactattatagttcccggttttcccccgactcacagtacatagacaatagatctgttaatagcgccgggttgcatactgtccagagggcaccccgcctcaaccacccccctgaacagattgatagtcactctagactgccccatagtgcccacccttctgggaagcccccaagcgctccagcatccgcgccccaaaacgtattcagcactaccgtttcttctggctacaacacaaagaagatcggaaagcgactgaacatacaactgaagaaaggcacagaaggcctcgggttcagtattacttctcgtgatgtgacaatcggtggctccgctccaatttacgtcaagaatattctgccgcggggagccgccatacaagatgggagactgaaggcgggcgatagattaatcgaggtcaacggcgtggaccttgtggggaaatcccaagaggaggtagtgagcctcctccgttccaccaagatggaaggtacggtgagcctcttggtgttccggcaggaggacgcattccatccaagagaactcaaagccgaagacgaagacattgttcttacccctgatggcaccagggagtttctcaccttcgaagtccctctgaatgacagtggatccgccggtttaggggtatctgtaaagggtaatcggagcaaagaaaatcacgcagatttggggattttcgtaaagtctatcattaacggtggggccgcctctaaggacggccgactgcgggtcaacgaccagctcatcgccgttaacggcgagtctctgctggggaaaaccaaccaggacgccatggaaaccctccgtagatctatgtcaaccgaagggaacaaaaggggtatgattcagctgatagtggccaggaggattagtaaatgtaatgagctgaaaagtcccgggtctccaccagggccagaactgcccattgaaaccgctctagacgaccgcgagaggagaatttctcactcactgtacagcggcatcgaggggcttgatgagtcaccaagtagaaatgccgcgctgagtcgaatcatggggaagtaccagttgtctccaactgtgaatatgccccaagatgataccgttattatcgaggatgaccgcttacccgtcctgccaccccatctctccgaccagtctagttccagttctcacgatgatgttggctttgtaaccgctgacgctggaacatgggcgaaggccgcaatttccgattccgctgactgtagcttgagtcccgacgtagaccctgtgttggcctttcagcgtgagggtttcggccggcagagtatgtccgagaagcgcactaagcagttctccgatgctagccaactggatttcgtgaagacccgcaaatctaagagtatggatctggggatagcagacgaaactaagctgaatactgtggatgaccagaaggctggttccccatcccgcgatgtgggcccatccctgggtctgaagaaaagtagcagcctggaatcattgcaaacagccgtcgctgaagtgacccttaacggcgatatcccctttcaccggcccagacctcgcattatcagaggccgcggttgcaatgaatcctttcgggctgctatcgataaatcctacgacaagccagcagtagacgatgacgacgaaggcatggagacactggaagaggacaccgaggagagcagcaggtcagggagagaaagtgtttcgacagcttctgaccagccaagccactctttggaaaggcagatgaacggtaatcaagaaaagggagacaaaacagaccggaagaaggacaagaccggaaaggagaaaaaaaaggatcgcgacaaggaaaaggacaaaatgaaggcaaagaaggggatgttgaagggacttggcgatatgtttcggttcggcaagcaccgcaaggacgataagatcgagaagacaggtaaaattaaaatacaagagagcttcacttccgaggaagagcgcattagaatgaagcaggagcaagagcgcattcaggctaaaaccagagaattccgggaacggcaggctcgggagagggactacgctgagatacaggatttccataggacgttcggatgcgacgatgaacttatgtatggcggagttagcagctacgagggatctatggccctgaatgcccggccccagtcgcccagagagggccacatgatggatgccttatacgctcaggtgaagaagcctagaaatagcaaaccctcccctgtggacagcaacagaagtactccgtcgaatcatgaccgaattcagagactgagacaggaattccaacaggccaagcaagatgaggatgtggaagatcggcgccgcacgtacagctttgaacagccctggccaaacgcaagacccgccacacagtcaggacggcactctgtgtctgtggaggtacagatgcagagacagcggcaggaggagcgcgaatcttcacaacaggcccagcgtcagtactccagtcttcctcgacagagtagaaaaaacgcttctagcgtgtcacaggacagctgggagcagaattatagtcccggagaggggtttcagtccgccaaggagaatccacggtactccagctatcaaggtagccgcaatggatacctgggtggccacgggtttaatgcgcgcgtgatgttggagacccaagaacttctacggcaggagcagcggcgaaaggagcagcagatgaaaaaacaaccacccagcgaaggtccctctaactacgatagttacaagaaggtgcaggacccctcctacgcacctccgaaaggcccctttcggcaggatgtccccccgagcccctcacaggtggcgcggctaaacaggctccagacccccgagaagggccgacctttctactcctag

SEQ ID NO: 71407 - DNA, 5962 bp, Artificial Sequence
  derived and/or modified sequence
cccagcggccccgagcgagcgccagcgccacacagccccgggcagccgccggcgagcgcgccgcgacgccgaacaggtggccggaggctgcgggcgccgcggcggggagaggcgaggcaagccccgggcgaagcgaggcgaggcgagggcggccgggccgggcatgcgagctgagcggccccccggcgtcgccgccgcctgcccgcgcccctagccgcccgcgcgcccgagtccccagcggctcctccgcgcccagcgtcctcggtcccggcctcggctgctccggctgcgctcggcgaggggcgcgggcccgcccgcggcggcggcggcatgaaagtgaccgtgtgcttcggacggacccgggtggtcgtgccgtgcggggacggccacatgaaagttttcagcctcatccagcaggcggtgacccgctaccggaaggccatcgccaaggatccaaactactggatacaggtgcatcgcttggaacatggagatggaggaatactagaccttgatgacattctttgtgatgtagcagacgataaagacagactggtagcagtgtttgatgagcaggatccacatcacggaggtgatggcaccagtgccagttccacgggtacccagagcccagagatatttggtagtgagcttggcaccaacaatgtctcagcctttcagccttaccaagcaacaagtgaaattgaggtcacaccttcagtccttcgagcaaatatgcctcttcatgttcgacgcagtagtgacccagctctaattggcctctccacttctgtcagtgatagtaatttttcctctgaagagccttcaaggaaaaatcccacacgctggtcaacaacagctggcttcctcaagcagaacactgctgggagtcctaaaacctgcgacaggaagaaagatgaaaactacagaagcctcccgcgggatactagtaactggtctaaccaatttcagagagacaatgctcgctcgtctctgagtgccagtcacccaatggtgggcaagtggctggagaaacaagaacaggatgaggatgggacagaagaggataacagtcgtgttgaacctgttggacatgctgacacgggtttggagcatatacccaacttttctctggatgatatggtaaagctcgtagaagtccccaacgatggagggcctctgggaatccacgtagtgcctttcagtgctcgaggcggcagaaccctggggttattagtaaaacgattggagaaaggtggtaaagctgaacatgaaaatctttttcgtgagaatgattgcattgtcaggattaatgatggcgaccttcgaaatagaagatttgaacaagcacaacatatgtttcgccaagccatgcgtacacccatcatttggttccatgtggttcctgcagcaaataaagagcagtatgaacaactatcccaaagtgagaagaacaattactattcaagccgttttagccctgacagccagtatattgacaacaggagtgtgaacagtgcagggcttcacacggtgcagagagcaccccgactgaaccacccgcctgagcagatagactctcactcaagactacctcatagcgcacacccctcgggaaaaccaccatccgctccagcctcggcacctcagaatgtatttagtacgactgtaagcagtggttataacaccaaaaaaataggcaagaggcttaatatccagcttaagaaaggtacagaaggtttgggattcagcatcacttccagagatgtaacaataggtggctcagctccaatctatgtgaaaaacattctcccccggggggcggccattcaggatggccgacttaaggcaggagacagacttatagaggtaaatggagtagatttagtgggcaaatcccaagaggaagttgtttcgctgttgagaagcaccaagatggaaggaactgtgagccttctggtctttcgccaggaagacgccttccacccaagggaactgaaagcagaagatgaggatattgttcttacacctgatggcaccagggaatttctgacatttgaagtcccacttaatgattcaggatctgcaggccttggtgtcagtgtcaaaggtaaccggtcaaaagagaaccacgcagatttgggaatctttgtcaagtccattattaatggaggagcagcatctaaagatggaaggcttcgggtgaatgatcaactgatagcagtaaatggagaatccctgttgggcaagacaaaccaagatgccatggaaaccctaagaaggtctatgtctactgaaggcaataaacgaggaatgatccagcttattgttgcaaggagaataagcaagtgcaatgagctgaagtcacctgggagcccccctggacctgagctgcccattgaaacagcgttggatgatagagaacgaagaatttcccattccctctacagtgggattgaggggcttgatgaatcgcccagcagaaatgctgccctcagtaggataatgggtaaataccagctgtcccctacagtgaatatgccccaagatgacactgtcattatagaagatgacaggttgccagtgcttcctccacatctctctgaccagtcctcttccagctcccatgatgatgtggggtttgtgacggcagatgctggtacttgggccaaggctgcaatcagtgattcagccgactgctctttgagtccagatgttgatccagttcttgcttttcaacgagaaggatttggacgtcagagtatgtcagaaaaacgcacaaagcaattttcagatgccagtcaattggatttcgttaaaacacgaaaatcaaaaagcatggatttaggtatagctgacgagactaaactcaatacagtggatgaccagaaagcaggttctcccagcagagatgtgggtccttccctgggtctgaagaagtcaagctcgttggagagtctgcagaccgcagttgccgaggtgactttgaatggggatattcctttccatcgtccacggccgcggataatcagaggcaggggatgcaatgagagcttcagagctgccatcgacaaatcttatgataaacccgcggtagatgatgatgatgaaggcatggagaccttggaagaagacacagaagaaagttcaagatcagggagagagtctgtatccacagccagtgatcagccttcccactctctggagagacaaatgaatggaaaccaagagaaaggtgataagactgatagaaaaaaggataaaactggaaaagaaaagaagaaagatagagataaggagaaggataaaatgaaagccaagaagggaatgctgaagggcttgggagacatgttcaggtttggcaaacatcgaaaagatgacaagattgagaaaacgggtaaaataaaaatacaggaatcctttacatcagaagaggagaggatacgaatgaagcaggagcaggagaggattcaagccaaaactcgagaatttagggaacgacaagctcgagagcgtgactatgctgaaattcaagattttcatcggacatttggctgtgatgatgagttaatgtatgggggagtttcttcttatgaaggttccatggctctcaacgctagacctcagagcccacgagaagggcatatgatggatgctttgtatgcccaagtcaagaagccgcggaattccaaaccctcacctgtagacagtaacagatcaactcctagcaatcatgatcggatacagcgtctgaggcaagaatttcagcaagcaaagcaagatgaagatgtagaagatcgtcggcggacctatagttttgagcaaccctggccgaacgcacggccggcgacgcagagcgggcgacactcggtgtccgtggaggtgcagatgcagcggcagcggcaggaggagcgcgagagctcccagcaggcccagcgccagtacagctctctgcctcggcaaagcaggaaaaatgccagctcggtctcccaggactcttgggagcagaactactcccctggggaaggcttccagagtgccaaagagaaccccaggtactccagctaccaaggctccaggaacggctacctgggaggacatggcttcaacgccagggtcatgctggaaactcaggagctccttcgccaggaacagaggcggaaggagcagcagatgaagaagcagcctccttccgaggggcccagcaactatgactcgtataagaaagtccaggaccccagttacgcccctcccaaggggcccttccggcaagatgtgcccccctccccttctcaggttgcgaggctgaacagacttcagactcctgagaaagggaggcccttctattcctgagcacgcaaataacggatgcttcatgtcgcgcaataaaagacattttcctatgaagacttgtattttgggagtttttttaaaacctcgatggtactatggagtatttctgttgttggtatcagtgcctttaagcggtgtaggcaaagaaatggaaggccttaatgtctttgccactatgtctcaagtgtctgtttcatggaaggatttcccaccctgtgacaatcatctgtttgaggtgttcatatgctctgcgcctctccacagtaccaggaatctcggccctactcatgagttgtccgcggcttggttgtaacatccctgcaccacttgcagtgacaaattcacctgaagtggaggatgacgtgcggccctgtttctccctctaagttctcttagctatgggatgacatcttagtctctggtggaggaaaagtgggcgacatacaccaaaaattggggctttctggtacttcacagcacagccatttgtcgtactttgtcatcactgtggttttctctttcctttctcagctctttgtgacgggagagtcggtcatcctattacagaagctaagccatagtccaacattgtttggtcaccatgggggtccttttgtaactgccttatgactcaacattaccaataaagtgatgatcctggtctgcgtttatacatacgcttgttcggtcctgttcctgacacgtgggttgagtcaccacagctctgtgtggggaacgtgggagacaggagtggctcctgccgggggaagctgggcctgccattggccctgtgtctatcatgaggggagagctaagaaagaaattctcctaggaagagctcatggcccagtacatcctagtaattattttaattagtttttgttctgacagcttgtcaggaagggcacagaatgggacagagataaaccagacagtcattttgatctgctctctacggtttttcaagtcagaggcaattgatgcttgtctaatgcatccacacactgcatgtctgactggcgatgccgcgctcctaagtagttctgccatgaaacataaaagacaaaggaaaagccgttacacatcacacagagaacattttcgggtcccacagcggtggtggcaggaagctcactctcgcgtcagtattagagtgtgtgtgtgggtctcggggatctcggtggctcccatcttccttcattgttctgaacatcctgtattgtaaaccatggctggggtgctaaagtgcctgtgaatcccgatgtggaaaaagctggaggtgaaagctcagcataccatgtatttactttaaaaacagaaaaaaagacatgtatggatatgtctattttttttttattggcacattgtatttttgtgttgacttgtttttagaaatgatgtgtccacacacgtacccgtgtctcttctgcatttctgtgtcatggttctgtttcttaatcacgtgcggcggtgtctaagtggtgttaccagtgtacgcgcagtgaccttggatgacagtggctctttctcacagcctcccctgagctgtgagaaacagctttctctgtacatatgcaactcctaataaaaggcatatttcttcctgttc

SEQ ID NO: 71408 - DNA, 4023 bp, Artificial Sequence
  derived and/or modified sequence
atgaaggtgacggtttgcttcgggcgaaccagggtggtcgttccctgcggcgatggtcacatgaaggtattcagcttaatacagcaggctgttacccggtatcgcaaggcaatcgcaaaggatccaaactattggatccaggtgcacaggctggagcatggtgatggaggcatcttggacctagatgatatcttatgtgatgtggctgacgacaaagatcgtctagtcgctgtcttcgacgaacaggatcctcaccacggcggagacgggacctcagccagttctacaggcacccagtcccccgaaatctttggaagcgaactgggaaccaataatgtgagcgcctttcagccatatcaggccacaagtgaaatcgaagtgaccccatcggtgctacgggctaatatgcctctgcacgttcggaggagctcagatccagcattaatcggcctctctacttccgtgtcagactctaatttctcatccgaggaaccctcaagaaagaatccaacacgatggtccactacagcaggttttcttaagcagaacacggcaggctctcccaagacgtgtgataggaagaaggacgaaaattatcgatccctccctcgcgatacgtcaaactggagcaatcaattccaacgggataacgcccgttctagcttgagtgcttctcaccccatggttggcaagtggcttgagaagcaagagcaggacgaagacggtactgaggaagataattctcgcgttgaaccagtggggcatgctgacacaggcctcgaacacatacccaatttcagcctggacgatatggtcaagttggttgaggtgccgaacgacggcggacctctcggaattcacgttgtgcctttcagcgctcggggagggaggaccctgggattactcgtgaagcgcctcgagaagggcggtaaggccgagcatgaaaacctttttcgggaaaacgactgcattgtgcgcatcaatgacggggacttgcggaaccgcagattcgaacaggctcaacacatgtttagacaagccatgcgcactcccattatctggttccacgtggtgcccgctgccaacaaggaacagtacgaacagttgagtcagtctgaaaaaaataactactactctagccggttcagccccgactcacagtacattgataacaggtccgttaactccgcagggttgcatacagttcaaagagctcctcggctaaatcatcctcctgaacaaatagactctcatagccgtctgcctcactcggcacatccgtccggaaagccaccctctgctccagcttcggcgcctcagaatgtctttagcactaccgtttctagtggttacaacacaaaaaagattggaaagcgacttaacatacagctgaagaagggcaccgaagggttgggcttttccattacgtcccgtgatgttactatcgggggatcggcacctatttacgtcaagaacatccttcctaggggcgctgctatacaggatgggcgtcttaaagctggagatcgccttatcgaagtaaatggtgttgacctggttggaaaatctcaggaagaagtggtgtctttgctgcgcagtaccaaaatggagggtacagtctcccttctggtttttagacaagaggacgccttccacccgcgtgagttaaaggccgaagacgaggatattgtcttaacaccagacggcacgagggagtttctgaccttcgaggtccccctgaacgattccggctctgccggtctcggagtctctgtaaagggaaataggagcaaggagaatcacgcagacctcgggatatttgtcaaatcaatcattaacgggggtgcagcttcgaaagacggacggctgagggtaaacgaccagctgattgcagtgaatggggaatcgctgctcggtaaaactaaccaggacgctatggaaaccctccgacgatctatgagtaccgagggcaacaaaagggggatgatccagctgatcgttgcgagacgcatttccaaatgcaacgagctgaagagccctgggagccccccaggacccgaactgccaattgagactgcgctggatgatagagagcgccgaatctcgcatagtctgtattctggcatcgagggtctggacgagtccccttctcgaaacgctgccttgtcccgcatcatgggcaagtatcagctatcccctaccgtcaatatgccgcaggatgataccgtcatcatagaggacgacaggttgccggtcctgccacctcacctctctgaccagagctctagctcctcacatgacgacgtcggattcgtcacggccgacgctggtacctgggctaaagccgctatcagcgacagcgctgactgttcgctgagcccggacgtggaccccgtgttggcatttcagagagagggattcggaaggcagtctatgagcgaaaaaagaaccaagcagttctcggatgccagccagctcgactttgtcaagactcggaagagcaagtcaatggacctcggtatagctgacgaaactaagctgaatacagtggacgatcagaaagccggaagcccctctcgcgatgtaggaccgtctctcggcctgaaaaagtctagctctctggagtccttacagaccgcagtggccgaagttacgttgaatggtgacattccattccatagaccacggcctaggatcatcagaggaagaggctgcaacgagtcatttcgagccgcaatcgataaaagctatgacaaacccgcagtcgatgatgatgacgagggtatggagacattggaagaagatactgaggagagttccagatccggccgagagagcgtgtctaccgcaagtgaccagccatctcactctcttgagcgccagatgaatgggaatcaggagaaaggggacaagacggaccggaagaaggataagacaggcaaagagaagaagaaagatcgagataaagagaaagacaaaatgaaagctaagaagggaatgctgaagggccttggagacatgttcaggtttggtaagcaccgcaaagacgataaaatcgagaagactggcaagataaaaattcaagaatcttttacatcagaagaggagaggatccgaatgaagcaggaacaagaaagaattcaggccaagactagagagtttcgcgagcggcaggctagggagagagactacgcagagattcaggatttccacaggacctttggctgcgacgatgagctgatgtatgggggagtaagcagttatgagggatccatggccttaaacgctcggcctcagtcaccgagggaaggccacatgatggatgctttgtacgctcaggtcaaaaagccacggaacagtaagccgtcacccgtcgatagtaatagaagcaccccgtcaaaccatgatcgaatccaacggttgcgccaggagtttcaacaggcaaagcaggacgaggacgtggaagacagaaggaggacttactcgtttgagcaaccctggccaaacgctagaccggctacacaatccgggaggcacagcgtctccgtggaagtgcagatgcagagacagagacaggaagagagggagagttcccagcaagcgcagcgccaatactcatccctgccacgacaatctcggaagaacgcaagctccgtgagtcaagactcttgggaacagaactactccccaggcgagggtttccaatccgctaaggagaatcccaggtacagctcttaccagggtagtagaaacgggtacctcggcggacatgggttcaatgcccgagtgatgctggagacacaggaactcctgcgccaggagcaacggagaaaagaacagcaaatgaaaaagcagccacccagtgagggacccagtaattacgactcctataagaaggtgcaggatccttcctacgccccaccaaagggccctttcagacaggacgtgcctcccagtcccagtcaggtcgctaggcttaatcgactgcagacccctgagaaagggaggccattctacagttag

SEQ ID NO: 71409 - DNA, 4023 bp, Artificial Sequence
  derived and/or modified sequence
atgaaggtgaccgtgtgcttcggcagaaccagagtggtggtgccctgcggcgacggccacatgaaggtgttcagcctgatccagcaggccgtgaccagatacagaaaggccatcgccaaggaccccaactactggatccaggtgcacagactggagcacggcgacggcggcatcctggacctggacgacatcctgtgcgacgtggccgacgacaaggacagactggtggccgtgttcgacgagcaggacccccaccacggcggcgacggcaccagcgccagcagcaccggcacccagagccccgagatcttcggcagcgagctgggcaccaacaacgtgagcgccttccagccctaccaggccaccagcgagatcgaggtgacccccagcgtgctgagagccaacatgcccctgcacgtgagaagaagcagcgaccccgccctgatcggcctgagcaccagcgtgagcgacagcaacttcagcagcgaggagcccagcagaaagaaccccaccagatggagcaccaccgccggcttcctgaagcagaacaccgccggcagccccaagacctgcgacagaaagaaggacgagaactacagaagcctgcccagagacaccagcaactggagcaaccagttccagagagacaacgccagaagcagcctgagcgccagccaccccatggtgggcaagtggctggagaagcaggagcaggacgaggacggcaccgaggaggacaacagcagagtggagcccgtgggccacgccgacaccggcctggagcacatccccaacttcagcctggacgacatggtgaagctggtggaggtgcccaacgacggcggccccctgggcatccacgtggtgcccttcagcgccagaggcggcagaaccctgggcctgctggtgaagagactggagaagggcggcaaggccgagcacgagaacctgttcagagagaacgactgcatcgtgagaatcaacgacggcgacctgagaaacagaagattcgagcaggcccagcacatgttcagacaggccatgagaacccccatcatctggttccacgtggtgcccgccgccaacaaggagcagtacgagcagctgagccagagcgagaagaacaactactacagcagcagattcagccccgacagccagtacatcgacaacagaagcgtgaacagcgccggcctgcacaccgtgcagagagcccccagactgaaccacccccccgagcagatcgacagccacagcagactgccccacagcgcccaccccagcggcaagccccccagcgcccccgccagcgccccccagaacgtgttcagcaccaccgtgagcagcggctacaacaccaagaagatcggcaagagactgaacatccagctgaagaagggcaccgagggcctgggcttcagcatcaccagcagagacgtgaccatcggcggcagcgcccccatctacgtgaagaacatcctgcccagaggcgccgccatccaggacggcagactgaaggccggcgacagactgatcgaggtgaacggcgtggacctggtgggcaagagccaggaggaggtggtgagcctgctgagaagcaccaagatggagggcaccgtgagcctgctggtgttcagacaggaggacgccttccaccccagagagctgaaggccgaggacgaggacatcgtgctgacccccgacggcaccagagagttcctgaccttcgaggtgcccctgaacgacagcggcagcgccggcctgggcgtgagcgtgaagggcaacagaagcaaggagaaccacgccgacctgggcatcttcgtgaagagcatcatcaacggcggcgccgccagcaaggacggcagactgagagtgaacgaccagctgatcgccgtgaacggcgagagcctgctgggcaagaccaaccaggacgccatggagaccctgagaagaagcatgagcaccgagggcaacaagagaggcatgatccagctgatcgtggccagaagaatcagcaagtgcaacgagctgaagagccccggcagcccccccggccccgagctgcccatcgagaccgccctggacgacagagagagaagaatcagccacagcctgtacagcggcatcgagggcctggacgagagccccagcagaaacgccgccctgagcagaatcatgggcaagtaccagctgagccccaccgtgaacatgccccaggacgacaccgtgatcatcgaggacgacagactgcccgtgctgcccccccacctgagcgaccagagcagcagcagcagccacgacgacgtgggcttcgtgaccgccgacgccggcacctgggccaaggccgccatcagcgacagcgccgactgcagcctgagccccgacgtggaccccgtgctggccttccagagagagggcttcggcagacagagcatgagcgagaagagaaccaagcagttcagcgacgccagccagctggacttcgtgaagaccagaaagagcaagagcatggacctgggcatcgccgacgagaccaagctgaacaccgtggacgaccagaaggccggcagccccagcagagacgtgggccccagcctgggcctgaagaagagcagcagcctggagagcctgcagaccgccgtggccgaggtgaccctgaacggcgacatccccttccacagacccagacccagaatcatcagaggcagaggctgcaacgagagcttcagagccgccatcgacaagagctacgacaagcccgccgtggacgacgacgacgagggcatggagaccctggaggaggacaccgaggagagcagcagaagcggcagagagagcgtgagcaccgccagcgaccagcccagccacagcctggagagacagatgaacggcaaccaggagaagggcgacaagaccgacagaaagaaggacaagaccggcaaggagaagaagaaggacagagacaaggagaaggacaagatgaaggccaagaagggcatgctgaagggcctgggcgacatgttcagattcggcaagcacagaaaggacgacaagatcgagaagaccggcaagatcaagatccaggagagcttcaccagcgaggaggagagaatcagaatgaagcaggagcaggagagaatccaggccaagaccagagagttcagagagagacaggccagagagagagactacgccgagatccaggacttccacagaaccttcggctgcgacgacgagctgatgtacggcggcgtgagcagctacgagggcagcatggccctgaacgccagaccccagagccccagagagggccacatgatggacgccctgtacgcccaggtgaagaagcccagaaacagcaagcccagccccgtggacagcaacagaagcacccccagcaaccacgacagaatccagagactgagacaggagttccagcaggccaagcaggacgaggacgtggaggacagaagaagaacctacagcttcgagcagccctggcccaacgccagacccgccacccagagcggcagacacagcgtgagcgtggaggtgcagatgcagagacagagacaggaggagagagagagcagccagcaggcccagagacagtacagcagcctgcccagacagagcagaaagaacgccagcagcgtgagccaggacagctgggagcagaactacagccccggcgagggcttccagagcgccaaggagaaccccagatacagcagctaccagggcagcagaaacggctacctgggcggccacggcttcaacgccagagtgatgctggagacccaggagctgctgagacaggagcagagaagaaaggagcagcagatgaagaagcagccccccagcgagggccccagcaactacgacagctacaagaaggtgcaggaccccagctacgccccccccaagggccccttcagacaggacgtgccccccagccccagccaggtggccagactgaacagactgcagacccccgagaagggcagacccttctacagctag

SEQ ID NO: 71410 - protein, 1319 aa, Artificial Sequence
  derived and/or modified sequence
MKVTVCFGRTRVVVPCGDGHMKVFSLIQQAVTRYRKAIAKDPNYWIQVHRLEHGDGGILDLDDILCDVADDKDRLVAVFDEQDPHHGGDGTSASSTGTQSPEIFGSELGTNNVSAFQPYQATSEIEVTPSVLRANMPLHVRRSSDPALIGLSTSVSDSNFSSEEPSRKNPTRWSTTAGFLKQNTAGSPKTCDRKKDENYRSLPRDTSNWSNQFQRDNARSSLSASHPMVGKWLEKQEQDEDGTEEDNSRVEPVGHADTGLEHIPNFSLDDMVKLVEVPNDGGPLGIHVVPFSARGGRTLGLLVKRLEKGGKAEHENLFRENDCIVRINDGDLRNRRFEQAQHMFRQAMRTPIIWFHVVPAANKEQYEQLSQSEKNNYYSSRFSPDSQYIDNRSVNSAGLHTVQRAPRLNHPPEQIDSHSRLPHSAHPSGKPPSAPASAPQNVFSTTVSSGYNTKKIGKRLNIQLKKGTEGLGFSITSRDVTIGGSAPIYVKNILPRGAAIQDGRLKAGDRLIEVNGVDLVGKSQEEVVSLLRSTKMEGTVSLLVFRQEDAFHPRELNAEPSQMQIPKETKAEDEDIVLTPDGTREFLTFEVPLNDSGSAGLGVSVKGNRSKENHADLGIFVKSIINGGAASKDGRLRVNDQLIAVNGESLLGKTNQDAMETLRRSMSTEGNKRGMIQLIVARRISKCNELKSPGSPPGPELPIETALDDRERRISHSLYSGIEGLDESPSRNAALSRIMGESGKYQLSPTVNMPQDDTVIIEDDRLPVLPPHLSDQSSSSSHDDVGFVTADAGTWAKAAISDSADCSLSPDVDPVLAFQREGFGRQSMSEKRTKQFSDASQLDFVKTRKSKSMDLGIADETKLNTVDDQKAGSPSRDVGPSLGLKKSSSLESLQTAVAEVTLNGDIPFHRPRPRIIRGRGCNESFRAAIDKSYDKPAVDDDDEGMETLEEDTEESSRSGRESVSTASDQPSHSLERQMNGNQEKGDKTDRKKDKTGKEKKKDRDKEKDKMKAKKGMLKGLGDMFRIQAKTREFRERQARERDYAEIQDFHRTFGCDDELMYGGVSSYEGSMALNARPQSPREGHMMDALYAQVKKPRNSKPSPVDSNRSTPSNHDRIQRLRQEFQQAKQDEDVEDRRRTYSFEQPWPNARPATQSGRHSVSVEVQMQRQRQEERESSQQAQRQYSSLPRQSRKNASSVSQDSWEQNYSPGEGFQSAKENPRYSSYQGSRNGYLGGHGFNARVMLETQELLRQEQRRKEQQMKKQPPSEGPSNYDSYKKVQDPSYAPPKGPFRQDVPPSPSQVARLNRLQTPEKGRPFYS

SEQ ID NO: 71411 - DNA, 3960 bp, Artificial Sequence
  derived and/or modified sequence
atgaaggtaacggtatgcttcggcagaactagagtggtggtgccgtgtggagacggccacatgaaagtcttcagcctgatacagcaagcggtgactaggtacagaaaagccatcgccaaggacccgaattattggattcaagtgcatcgtcttgagcatggagatggcgggatcctggatctggacgacatactctgtgacgtggccgacgataaggaccggctggtggcagttttcgacgaacaggatcctcatcacggtggcgacgggacttccgcctcctccaccggcacccagtcccctgagatttttggatctgaactgggcacgaacaatgtatcagcattccagccttaccaggcaacctcagagatcgaggtgacaccctcagtcctgagggccaatatgcccttgcacgtgaggagatccagcgaccctgctctcatcggcttaagcacctctgtttcagattctaacttctcctcagaggagcctagtcgaaagaatcccactaggtggagtactaccgccggctttctgaaacagaacacagctggcagtcccaagacctgcgaccgcaaaaaggatgagaattaccggagtcttcccagggacacatctaactggtcgaaccaattccagagagacaacgcacggtcatccctctcggctagtcatcccatggtcggtaagtggctcgagaagcaggagcaagatgaggatgggacagaggaagataatagccgcgtcgaacctgtcggccatgcagatactggtctggaacatatccccaatttctcactcgatgatatggtgaagcttgtggaggtacctaacgacgggggaccactaggcattcacgtcgttccattttctgcccggggggggagaacattaggactgctggtcaaaaggctggaaaaaggggggaaagcagagcatgaaaacctatttcgcgagaacgattgcatcgtccggataaacgatggggatcttaggaaccggaggtttgaacaggcccaacacatgtttcgacaggccatgaggacccctataatttggtttcacgtcgtgcctgccgccaacaaggagcagtacgagcagctgagtcaaagcgagaagaacaactattactcttccagattttctcctgatagccagtatatcgataaccggtctgtgaacagcgcgggtttacatactgttcagcgcgctcccagactaaaccatcctcccgagcagatagattcacatagtcggcttccgcactctgcgcacccttcagggaaacccccgagcgcacctgccagtgcgccacagaacgtgttttccaccacagtgtcaagcggatataacaccaagaaaattggaaagagacttaacatacaactgaagaaaggcactgagggacttggcttctcgatcacatcacgagacgttaccattgggggaagtgcccccatttatgtgaagaatatccttcctagaggagccgccatccaggacgggcggctgaaggccggggatcggctgatagaggtgaacggcgtggaccttgtcggtaaaagccaagaggaagtggtcagcctgctgcgcagtacaaagatggaaggtaccgttagcctgctggtgtttaggcaggaggatgctttccatccccgcgagcttaacgccgaaccttctcaaatgcagattcccaaggagactaaagcggaggatgaagacatagtcctcactcccgacgggacaagagaatttctaacttttgaagtgcccctcaatgacagtggatccgccggtttgggtgtgtccgtgaagggcaaccggtccaaggaaaaccacgccgatctggggattttcgtgaaaagcatcatcaatgggggcgctgcctccaaagatggaagattgcgcgtgaacgaccagctgatcgcagttaacggagagagcctgctgggcaagacaaatcaggatgccatggagaccctcagacgatctatgagcactgaaggaaacaaacgaggtatgatccagctaatcgtcgcccgacggatcagtaaatgcaacgagctaaagagtcctgggtctcctcccggcccagagcttcctatcgaaactgctctggatgaccgcgagcggagaatttcccattccctctactctgggattgaagggttagatgaaagcccttcacgcaatgcggcgctgtcacggatcatgggtgagtccggcaaataccagctctctcctaccgtcaatatgcctcaagatgataccgtcatcatcgaggacgacagactgcccgtcttgcccccacaccttagcgaccagtcatcttcctcctcgcacgacgacgtgggcttcgttacagcggacgcgggtacgtgggctaaggccgcaatttcagattctgccgattgcagcctgagccccgacgtagaccctgtcttggcgtttcagagagagggattcggccgccagagcatgtcggagaagcgaacaaagcagttcagtgacgcatctcagctggatttcgtgaagacaagaaagtcgaagtcaatggacctggggattgctgacgagaccaagcttaacacagttgatgaccagaaagctggaagtccctcccgtgacgttggcccttcactcgggctgaaaaagtcatcttcgctcgagagtctccagactgccgtcgccgaggtcactctgaacggcgatattccctttcataggccaagacctcgaattatacgtggccgcgggtgcaatgagtcatttagagctgcaatcgataaaagctatgataagcctgcagtggacgatgatgacgaaggaatggagaccttggaagaagacactgaagagtcgagtcggagtggtcgggagagtgtttccaccgccagcgatcaacctagccatagcttagaacggcagatgaacggaaaccaggagaagggtgataagaccgacaggaagaaagataagacaggcaaggaaaagaaaaaagacagagacaaggagaaggacaagatgaaggccaagaaagggatgctcaagggccttggagacatgttcagaatccaggccaagactcgggaattccgcgagcgccaggccagagaacgagactatgccgagattcaggacttccatcgcacttttggctgcgacgacgaactgatgtatggaggcgttagcagctacgaggggtcaatggccctgaacgcccgaccacagagtcctagggagggccacatgatggatgccctatacgctcaggtgaagaagccacgaaattcaaagcctagtcccgtggacagtaatagaagcaccccctccaaccatgaccgtattcagcggctccgtcaggagttccagcaggcaaaacaagacgaagatgtggaggacagaaggcgcacatatagtttcgagcagccatggcctaacgccagacccgcgacccagagtggcagacactctgtctctgtggaggtgcaaatgcaacggcagcggcaggaggaaagggaaagctctcaacaagcgcaaaggcagtacagtagcctgccccggcagagtcgcaaaaacgcctcctctgttagccaggattcgtgggaacagaactactctccgggcgaaggttttcagagcgcaaaggaaaatcccagatactcatcttatcaggggtcgcgcaatggctacttgggaggacacggtttcaacgcgagggtaatgctggagacacaggagctgttacggcaggagcaaaggcgaaaggagcagcaaatgaagaaacaaccgccaagcgaaggcccttcaaactacgattcctacaaaaaggttcaggacccctcttatgcccctcctaagggcccattccgccaagatgtccccccatctccctcccaagtggcaaggttgaatcggcttcaaacgccagaaaaaggaagaccattctatagctag

SEQ ID NO: 71412 - DNA, 3960 bp, Artificial Sequence
  derived and/or modified sequence
atgaaggtgacagtgtgctttggaagaaccagggtggtggtgccctgtggagatggccacatgaaggtgttcagcctcatccagcaggccgtgacccgctacaggaaggccatcgccaaggaccccaactactggatccaggtgcaccggctggagcacggagatggcggcatcctggacctggatgacatcctgtgtgatgtggctgatgacaaggaccggctggtggccgtgtttgatgagcaggacccccaccacggcggagatggcaccagcgccagcagcacaggcacccagagccctgagatcttcggcagcgagctgggcaccaacaacgtgtctgccttccagccctaccaggccaccagcgagattgaggtgacccccagcgtgctgcgggccaacatgcccctgcacgtgagaagaagcagtgaccctgccctgattggcctgagcacctctgtgtctgacagcaacttcagcagcgaggagcccagcaggaagaaccccacccgctggagcaccacagctggcttcctgaagcagaacacagctggcagccccaagacctgtgacaggaagaaggatgagaactaccgcagcctgccccgggacaccagcaactggagcaaccagttccagagggacaatgcccggagcagcctgagcgccagccaccccatggtgggcaagtggctggagaagcaggagcaggatgaagatggaacagaggaggacaacagccgggtggagcctgtgggccacgccgacaccggcctggagcacatccccaacttcagcctggatgacatggtgaagctggtggaggtgcccaatgatggcggccccctgggcatccacgtggtgcccttcagcgcccggggcggccgcaccctgggcctgctggtgaagaggctggagaagggcggcaaggccgagcatgaaaatctcttccgggagaatgactgcatcgtgcgcatcaatgatggagacctgaggaacagaagatttgagcaggcccagcacatgttccggcaggccatgaggacccccatcatctggttccacgtggtgcctgctgccaacaaggagcagtatgagcagctgagccagagcgagaagaacaactactacagcagccgcttctccccagacagccagtacatcgacaacagatctgtgaacagcgctggcctgcacacagtgcagagggccccccggctgaaccaccccccagagcagattgacagccacagccggctgccccacagcgcccaccccagcggcaagcccccatctgccccagccagcgccccccagaatgtgttcagcaccaccgtgagcagcggctacaacaccaagaagattggcaagaggctgaacatccagctgaagaagggcacagagggcctgggcttcagcatcaccagcagagatgtgaccatcggcggcagcgcccccatctacgtgaagaacatcctgcccaggggggccgccatccaggacggccgcctgaaggccggggacaggctcatcgaggtgaatggagtggacctggtgggcaagagccaggaggaggtggtgtccctgctgcggagcaccaagatggagggcaccgtgtccctgctggtgttccggcaggaggatgccttccacccccgggagctgaatgctgagcccagccagatgcagatccccaaggagaccaaggccgaggatgaggacatcgtgctgaccccagatggcacccgggagttcctgacctttgaggtgcccctgaatgacagcggcagcgctggcctgggcgtgtctgtgaagggcaacagaagcaaggagaaccacgccgacctgggcatctttgtgaagagcatcatcaatggaggagctgccagcaaggatggccgcctgcgggtgaatgaccagctgattgctgtgaatggagagagcctgctgggcaagaccaaccaggatgccatggagaccctgcggcgctccatgagcacagagggcaacaagaggggcatgatccagctgattgtggcccggcgcatcagcaagtgcaatgagctgaagagccctggcagccccccaggccctgagctgcccattgaaacagccctggatgaccgggagcggcgcatcagccacagcctgtacagcggcatcgagggcctggatgagagccccagcagaaatgctgccctgagccgcatcatgggagagagcggcaagtaccagctgagccccaccgtgaacatgccccaggatgacaccgtcatcattgaagatgaccggctgcctgtgctgcccccccacctgagtgaccagagcagcagcagcagccatgatgatgtgggctttgtgacagcagatgctggcacctgggccaaggccgccatcagtgacagcgctgactgcagcctgagcccagatgtggaccctgtgctggccttccagcgggagggcttcggccggcagagcatgtctgagaagaggaccaagcagttcagtgatgccagccagctggactttgtgaagaccaggaagagcaagtccatggacctgggcattgctgatgagaccaagctgaacacagtggatgaccagaaggccggcagccccagcagagatgtgggccccagcctgggcctgaagaagagcagcagcctggagagcctgcagacagctgtggccgaggtgaccctgaatggagacatccccttccaccggccccggccccgcatcatccggggccggggctgcaatgaaagcttccgggccgccatcgacaagagctatgacaagccagctgtggatgatgatgatgagggcatggagaccctggaggaggacacagaggagagcagccgcagcggccgggagagcgtgtccacagccagtgaccagcccagccacagcctggagcggcagatgaatggaaaccaggagaagggggacaagacagacaggaagaaggacaagacaggcaaggagaagaagaaggaccgggacaaggagaaggacaagatgaaggccaagaagggcatgctgaagggcctgggggacatgttccgcatccaggccaagacccgggagttccgggagcggcaggcccgggagcgggactatgcagagatccaggacttccacaggaccttcggctgtgatgatgagctgatgtatggaggagtgagcagctatgagggctccatggccctgaatgcccggccccagagcccccgggagggccacatgatggatgccctgtatgcccaggtgaagaagcccaggaacagcaagcccagccctgtggacagcaacagaagcacccccagcaaccacgaccgcatccagaggctgcggcaggagttccagcaggccaagcaggatgaagatgtggaggacagaagaaggacctacagctttgagcagccctggcccaatgcccggcctgccacccagagcggccgccacagcgtgtctgtggaggtgcagatgcagaggcagaggcaggaggagcgggagagcagccagcaggcccagaggcagtacagcagcctgccccggcagagcaggaagaatgccagctctgtgtcccaggacagctgggagcagaactacagccctggagagggcttccagagcgccaaggagaacccccgctacagcagctaccagggcagcagaaatggctacctgggcggccacggcttcaatgcccgggtgatgctggagacccaggagctgctgcggcaggagcagaggaggaaggagcagcagatgaagaagcagcccccatctgagggccccagcaactatgacagctacaagaaggtgcaggaccccagctatgccccacccaagggccccttccggcaggatgtgccccccagccccagccaggtggcccggctgaaccggctgcagaccccagagaagggccggcccttctacagctag

SEQ ID NO: 71413 - DNA, 3960 bp, Artificial Sequence
  derived and/or modified sequence
atgaaggtgaccgtgtgcttcggccggacccgggtggtggtgccctgcggggacggacacatgaaggtcttttctctgatacagcaagcggttacacggtacaggaaggccatagccaaggatccaaactactggatccaagttcatcgtctggagcacggcgacggtggaatcctcgatctggacgacattctttgtgatgttgccgatgacaaagatcggctagtggccgtgttcgatgagcaggatcctcatcatggaggggatggcactagcgcttcttccacaggcactcagtctcccgagatcttcggaagcgagctgggaacaaacaatgtctctgcgtttcaaccctatcaggcaactagtgagattgaggtgacaccctccgtgttgagggctaacatgcctctgcacgtccggagaagcagtgacccagccttgatcggactgagcacctccgtgtctgactccaatttctccagtgaggagccctcgagaaagaatccgacaagatggtccaccacggctggctttctgaaacagaatacagcaggcagccctaagacttgcgatcggaaaaaggacgagaactatcggagtctccctagggatacctctaattggagcaaccagtttcagcgagacaatgcaaggtccagtttaagcgcatctcacccgatggtaggcaaatggctggagaagcaggaacaggatgaagatgggacagaggaagataattctagggtagagccagtgggacacgccgacactggactggagcatatccctaacttttctttggacgatatggttaaactggttgaggtccctaacgatggcgggcctctcggcatccatgttgtccccttctcggcgaggggtggaaggacgctcggactcctggtcaaaaggctggaaaagggtgggaaggccgaacatgagaatctgttcagagagaatgactgtattgtccgcatcaatgacggggatctgcggaaccgccggttcgaacaggcccaacacatgtttcggcaggctatgcggactcctattatttggtttcatgtggtccctgccgccaacaaagagcagtatgagcagctcagtcagagcgaaaagaacaattattactcctctaggttcagtcccgatagccagtacatcgacaatcgcagtgtcaatagtgccggtctgcatactgttcaaagagccccgcggctgaatcacccacctgagcagatagacagtcactcccgcctgccacactccgcacatccgtcaggcaaaccaccctccgcccctgccagtgcacctcaaaatgtattttccaccacagtcagtagcggttataataccaaaaaaatcgggaagagactgaacattcagctgaagaagggtaccgaagggctgggattctcaattactagccgagatgtcaccatcggtgggagcgcgcctatctatgtgaaaaacatactgccaagaggtgcagctatccaggatgggcgcctcaaggccggcgatagactcatagaggtgaacggcgtcgatctcgtcggtaagagccaggaggaggtggtctctttgctgaggtctacaaaaatggagggaactgtgagtttattagtattcaggcaggaggatgcatttcatccaagagaattgaatgctgagccctcgcaaatgcagattcccaaagaaactaaagcggaggatgaagatattgtgcttacccccgatgggacccgagagtttctcacttttgaagtccccttgaatgatagtggctccgcaggactaggcgtgtccgtgaaaggcaaccgctctaaggagaatcacgccgatctaggaattttcgtcaagagcatcataaatggaggagccgcctctaaagacggaagactgcgagtgaacgaccagctcatagctgttaatggggagagcctgctcggcaagaccaaccaggacgcaatggaaaccctgcggcggtctatgtctactgagggcaacaaaaggggcatgattcaactgattgtggcaaggagaatctccaaatgtaacgaactaaagtcacctgggagtccacccgggcccgaactgcctattgagactgctttagacgaccgagagcggcggatttcgcacagtctgtattctgggattgagggtctggacgaatccccttcccgaaacgctgccctgtccagaatcatgggagagtccgggaagtaccaactgtctccaaccgttaacatgccacaagacgataccgtgattatcgaagacgataggctgccggtcctccccccacacttgtctgatcagtccagctcctccagtcatgacgatgtaggcttcgtcacagctgacgccggcacatgggccaaggccgcaatatccgactcagccgattgctctctgagccctgatgtcgaccccgtcttggcctttcagcgggaagggttcggacgccaatctatgtccgagaaaaggacaaagcagtttagcgatgcgagccagctcgactttgtcaagacccggaaatctaagtctatggacctgggcatagcagatgagaccaagttgaacactgtagacgaccagaaagctggttccccatcccgggatgttggaccatcgcttggtctcaagaaatcatcaagcttagaatctctccagacagcagtcgccgaggttaccctgaacggagacatcccctttcaccgaccgcggccaagaatcataaggggccggggttgtaacgagagctttcgtgcagcaatcgacaagtcttatgacaagcctgccgtggacgacgatgatgagggtatggagacactcgaggaggataccgaagagagcagcagatcagggcgcgagtcggtctcaactgcctctgatcagccatcccatagtttggaaaggcagatgaatgggaaccaggagaagggagacaaaacagatcggaagaaagataaaacaggaaaggaaaaaaaaaaagatcgggataaggaaaaagacaagatgaaggccaaaaaaggaatgctgaagggtctcggcgacatgtttaggatacaggccaagactcgcgaattcagggagcgccaggccagggaaagggattatgcagagattcaggacttccatcggacctttggctgtgatgacgaactaatgtatggaggggttagctcttacgagggttctatggcccttaatgcccgccctcagagcccacgcgaaggccacatgatggatgccctgtacgctcaagtaaagaaaccaagaaactccaaaccctcaccggtagatagtaaccgctcaacaccatccaatcacgacagaatacaacgattgaggcaggagtttcaacaggccaagcaagatgaggacgtggaggatcgcagacgaacctattcattcgagcagccctggcctaatgccagacccgccacccagtccggtagacacagtgtgagcgttgaagtgcagatgcagaggcagcggcaggaagaacgcgagagcagccagcaggctcagaggcagtattcttccctccctcgccaaagtagaaaaaacgccagctccgtgtctcaggattcttgggagcagaactattcccccggcgaaggctttcagtccgccaaggaaaacccccgctattcaagctatcaaggcagtaggaacgggtacctcgggggtcatggctttaatgcgagagtgatgctcgaaacccaggagctcctcagacaagagcagcgacgaaaggaacagcagatgaaaaaacagccaccctctgagggtccttctaattacgacagttataaaaaagtacaagaccctagctatgcgccacctaaagggcccttccgccaagatgtgccaccttccccttcccaagtcgcccggctgaaccggcttcagactccagaaaaggggagaccattctattcatag

SEQ ID NO: 71414 - DNA, 5894 bp, Artificial Sequence
  derived and/or modified sequence
gcggccccgagcgagcgccagcgccacacagccccgggcagccgccggcgagcgcgccgcgacgccgaacaggtggccggaggctgcgggcgccgcggcggggagaggcgaggcaagccccgggcgaagcgaggcgaggcgagggcggccgggccgggcatgcgagctgagcggccccccggcgtcgccgccgcctgcccgcgcccctagccgcccgcgcgcccgagtccccagcggctcctccgcgcccagcgtcctcggtcccggcctcggctgctccggctgcgctcggcgaggggcgcgggcccgcccgcggcggcggcggcatgaaagtgaccgtgtgcttcggacggacccgggtggtcgtgccgtgcggggacggccacatgaaagttttcagcctcatccagcaggcggtgacccgctaccggaaggccatcgccaaggatccaaactactggatacaggtgcatcgcttggaacatggagatggaggaatactagaccttgatgacattctttgtgatgtagcagacgataaagacagactggtagcagtgtttgatgagcaggatccacatcacggaggtgatggcaccagtgccagttccacgggtacccagagcccagagatatttggtagtgagcttggcaccaacaatgtctcagcctttcagccttaccaagcaacaagtgaaattgaggtcacaccttcagtccttcgagcaaatatgcctcttcatgttcgacgcagtagtgacccagctctaattggcctctccacttctgtcagtgatagtaatttttcctctgaagagccttcaaggaaaaatcccacacgctggtcaacaacagctggcttcctcaagcagaacactgctgggagtcctaaaacctgcgacaggaagaaagatgaaaactacagaagcctcccgcgggatactagtaactggtctaaccaatttcagagagacaatgctcgctcgtctctgagtgccagtcacccaatggtgggcaagtggctggagaaacaagaacaggatgaggatgggacagaagaggataacagtcgtgttgaacctgttggacatgctgacacgggtttggagcatatacccaacttttctctggatgatatggtaaagctcgtagaagtccccaacgatggagggcctctgggaatccacgtagtgcctttcagtgctcgaggcggcagaaccctggggttattagtaaaacgattggagaaaggtggtaaagctgaacatgaaaatctttttcgtgagaatgattgcattgtcaggattaatgatggcgaccttcgaaatagaagatttgaacaagcacaacatatgtttcgccaagccatgcgtacacccatcatttggttccatgtggttcctgcagcaaataaagagcagtatgaacaactatcccaaagtgagaagaacaattactattcaagccgttttagccctgacagccagtatattgacaacaggagtgtgaacagtgcagggcttcacacggtgcagagagcaccccgactgaaccacccgcctgagcagatagactctcactcaagactacctcatagcgcacacccctcgggaaaaccaccatccgctccagcctcggcacctcagaatgtatttagtacgactgtaagcagtggttataacaccaaaaaaataggcaagaggcttaatatccagcttaagaaaggtacagaaggtttgggattcagcatcacttccagagatgtaacaataggtggctcagctccaatctatgtgaaaaacattctcccccggggggcggccattcaggatggccgacttaaggcaggagacagacttatagaggtaaatggagtagatttagtgggcaaatcccaagaggaagttgtttcgctgttgagaagcaccaagatggaaggaactgtgagccttctggtctttcgccaggaagacgccttccacccaagggaactgaatgcagagccaagccagatgcagattccaaaagaaacgaaagcagaagatgaggatattgttcttacacctgatggcaccagggaatttctgacatttgaagtcccacttaatgattcaggatctgcaggccttggtgtcagtgtcaaaggtaaccggtcaaaagagaaccacgcagatttgggaatctttgtcaagtccattattaatggaggagcagcatctaaagatggaaggcttcgggtgaatgatcaactgatagcagtaaatggagaatccctgttgggcaagacaaaccaagatgccatggaaaccctaagaaggtctatgtctactgaaggcaataaacgaggaatgatccagcttattgttgcaaggagaataagcaagtgcaatgagctgaagtcacctgggagcccccctggacctgagctgcccattgaaacagcgttggatgatagagaacgaagaatttcccattccctctacagtgggattgaggggcttgatgaatcgcccagcagaaatgctgccctcagtaggataatgggtgagtcaggtaaataccagctgtcccctacagtgaatatgccccaagatgacactgtcattatagaagatgacaggttgccagtgcttcctccacatctctctgaccagtcctcttccagctcccatgatgatgtggggtttgtgacggcagatgctggtacttgggccaaggctgcaatcagtgattcagccgactgctctttgagtccagatgttgatccagttcttgcttttcaacgagaaggatttggacgtcagagtatgtcagaaaaacgcacaaagcaattttcagatgccagtcaattggatttcgttaaaacacgaaaatcaaaaagcatggatttaggtatagctgacgagactaaactcaatacagtggatgaccagaaagcaggttctcccagcagagatgtgggtccttccctgggtctgaagaagtcaagctcgttggagagtctgcagaccgcagttgccgaggtgactttgaatggggatattcctttccatcgtccacggccgcggataatcagaggcaggggatgcaatgagagcttcagagctgccatcgacaaatcttatgataaacccgcggtagatgatgatgatgaaggcatggagaccttggaagaagacacagaagaaagttcaagatcagggagagagtctgtatccacagccagtgatcagccttcccactctctggagagacaaatgaatggaaaccaagagaaaggtgataagactgatagaaaaaaggataaaactggaaaagaaaagaagaaagatagagataaggagaaggataaaatgaaagccaagaagggaatgctgaagggcttgggagacatgttcaggattcaagccaaaactcgagaatttagggaacgacaagctcgagagcgtgactatgctgaaattcaagattttcatcggacatttggctgtgatgatgagttaatgtatgggggagtttcttcttatgaaggttccatggctctcaacgctagacctcagagcccacgagaagggcatatgatggatgctttgtatgcccaagtcaagaagccgcggaattccaaaccctcacctgtagacagtaacagatcaactcctagcaatcatgatcggatacagcgtctgaggcaagaatttcagcaagcaaagcaagatgaagatgtagaagatcgtcggcggacctatagttttgagcaaccctggccgaacgcacggccggcgacgcagagcgggcgacactcggtgtccgtggaggtgcagatgcagcggcagcggcaggaggagcgcgagagctcccagcaggcccagcgccagtacagctctctgcctcggcaaagcaggaaaaatgccagctcggtctcccaggactcttgggagcagaactactcccctggggaaggcttccagagtgccaaagagaaccccaggtactccagctaccaaggctccaggaacggctacctgggaggacatggcttcaacgccagggtcatgctggaaactcaggagctccttcgccaggaacagaggcggaaggagcagcagatgaagaagcagcctccttccgaggggcccagcaactatgactcgtataagaaagtccaggaccccagttacgcccctcccaaggggcccttccggcaagatgtgcccccctccccttctcaggttgcgaggctgaacagacttcagactcctgagaaagggaggcccttctattcctgagcacgcaaataacggatgcttcatgtcgcgcaataaaagacattttcctatgaagacttgtattttgggagtttttttaaaacctcgatggtactatggagtatttctgttgttggtatcagtgcctttaagcggtgtaggcaaagaaatggaaggccttaatgtctttgccactatgtctcaagtgtctgtttcatggaaggatttcccaccctgtgacaatcatctgtttgaggtgttcatatgctctgcgcctctccacagtaccaggaatctcggccctactcatgagttgtccgcggcttggttgtaacatccctgcaccacttgcagtgacaaattcacctgaagtggaggatgacgtgcggccctgtttctccctctaagttctcttagctatgggatgacatcttagtctctggtggaggaaaagtgggcgacatacaccaaaaattggggctttctggtacttcacagcacagccatttgtcgtactttgtcatcactgtggttttctctttcctttctcagctctttgtgacgggagagtcggtcatcctattacagaagctaagccatagtccaacattgtttggtcaccatgggggtccttttgtaactgccttatgactcaacattaccaataaagtgatgatcctggtctgcgtttatacatacgcttgttcggtcctgttcctgacacgtgggttgagtcaccacagctctgtgtggggaacgtgggagacaggagtggctcctgccgggggaagctgggcctgccattggccctgtgtctatcatgaggggagagctaagaaagaaattctcctaggaagagctcatggcccagtacatcctagtaattattttaattagtttttgttctgacagcttgtcaggaagggcacagaatgggacagagataaaccagacagtcattttgatctgctctctacggtttttcaagtcagaggcaattgatgcttgtctaatgcatccacacactgcatgtctgactggcgatgccgcgctcctaagtagttctgccatgaaacataaaagacaaaggaaaagccgttacacatcacacagagaacattttcgggtcccacagcggtggtggcaggaagctcactctcgcgtcagtattagagtgtgtgtgtgggtctcggggatctcggtggctcccatcttccttcattgttctgaacatcctgtattgtaaaccatggctggggtgctaaagtgcctgtgaatcccgatgtggaaaaagctggaggtgaaagctcagcataccatgtatttactttaaaaacagaaaaaaagacatgtatggatatgtctattttttttttattggcacattgtatttttgtgttgacttgtttttagaaatgatgtgtccacacacgtacccgtgtctcttctgcatttctgtgtcatggttctgtttcttaatcacgtgcggcggtgtctaagtggtgttaccagtgtacgcgcagtgaccttggatgacagtggctctttctcacagcctcccctgagctgtgagaaacagctttctctgtacatatgcaactcctaataaaaggcatatttcttcctgtt

SEQ ID NO: 71415 - DNA, 3960 bp, Artificial Sequence
  derived and/or modified sequence
atgaaggtcacagtatgcttcggcagaactagggtggttgtcccgtgtggcgatggacacatgaaagtgttttccctgatccagcaggccgtgactagataccggaaagcaatcgcaaaggatcctaactattggattcaggtgcaccgcctcgagcatggcgacggcggtatcctagacctggatgacatcctgtgcgacgtagcagacgataaggacaggctggtggctgtgttcgatgagcaagaccctcatcatggaggggacggcaccagtgctagcagcaccggaacccagtcccctgagatcttcggctctgagcttggtactaacaacgtctctgccttccagccctatcaggctacaagcgaaatcgaggtgaccccgagtgtccttcgggctaacatgcctcttcacgtccgacggtcctcagaccccgctttaattggcttgtctacttccgtgagtgattccaacttttcatccgaggagcctagtcgtaagaatcctaccagatggtccacaacggcgggtttcttaaaacagaatacagccggaagcccaaagacttgcgacagaaagaaggacgagaactataggtcgctgcctcgagacacctctaattggagcaatcagttccagagagacaacgctcgcagtagcctgagtgcctctcatccgatggtcgggaaatggttggagaagcaggaacaggatgaagacggcactgaagaggacaacagccgggtggaaccagtggggcatgctgatactggactcgagcatataccaaatttttccctcgacgacatggtgaaactggtggaagtaccaaacgatggtggcccactgggcattcacgtcgttccatttagtgccagaggagggaggaccttgggtttgctggtgaagaggctcgagaaagggggtaaggctgagcatgaaaacctgtttagagagaacgactgtatcgtcaggattaatgacggcgacctgagaaataggcggtttgagcaagcccaacacatgttccggcaagccatgcgtacccctattatctggtttcatgtagtccccgctgctaacaaagagcagtacgagcaactttctcagtctgagaagaataattactactccagcagattctcacccgattcacagtacatcgataatcggtctgtcaactccgccggactacacacggtccagcgagcaccacgcctgaatcacccacccgaacagatcgattcccactctaggctcccccatagcgcccacccatccggtaaacctccctccgcccctgcctctgccccacagaacgtcttctccaccacagtgtcttctgggtacaatacgaagaagatcggcaagcgtctaaacattcaactgaagaaaggcacagaagggctggggttttccataacctcccgcgacgtcacgatcggcggatcagcccctatctatgtaaaaaatattctaccaaggggtgctgcaatccaggatggtcgccttaaagcaggggacaggttaattgaggtcaatggagtggacctcgtgggaaaaagtcaagaggaagtggtatctcttctgcgatcaactaagatggaaggtacagtctccttgttagtgtttcgccaagaagatgcctttcaccccagggaactcaacgctgagccctcccagatgcagatcccgaaagaaacaaaggcagaggatgaagatatagtgttgactcccgacggcacgcgggagtttctgaccttcgaggtgccactgaacgattccggctcggctgggctcggtgttagtgttaaaggtaacagatcaaaagagaatcacgccgatttaggcatttttgtcaaatctattatcaatggcggagctgccagtaaggacgggaggctgcgcgtgaacgatcagttgatcgcggtgaatggcgagtcactgctcggaaaaaccaatcaggatgccatggaaacacttcgaagaagcatgtcaactgaaggaaacaagaggggtatgattcaactgatagtggcaaggcgaatcagtaagtgtaacgagctcaaaagtcccggttcgcccccagggcctgaactgcccatcgagaccgccctggatgatcgcgagaggcgaatatctcacagcctgtactcaggaatcgagggcctggacgaatcccctagcaggaacgctgctctcagtcgcattatgggcgaatctggaaaataccagcttagccctactgtgaatatgccacaggacgacaccgtgatcatcgaagacgatcgactgccagtgctgcctccacacctctccgaccagtcatcaagcagctcccatgacgatgtcgggttcgtgaccgcggacgccggtacgtgggctaaggccgctatatccgactcggctgattgctcccttagtcccgacgtagatccggtgctggctttccagcgcgaaggcttcgggagacagtcgatgtcagaaaagaggactaaacagttctccgacgcctcccagctcgacttcgtcaagaccaggaaatcgaaatccatggacttaggcatcgcagatgagaccaagcttaataccgtggacgaccaaaaggccggttctccgtccagggacgtgggaccaagtcttggacttaagaaatccagtagcctggaatccctacagactgccgttgcagaagtcacccttaacggagacatacctttccatcgacctcgcccacgcattatcagagggaggggatgcaacgagtcttttcgggcagctattgacaagtcctacgacaaacccgcagtggatgatgacgacgaaggcatggaaacactggaagaggacacggaagagtcttctcgcagcggcagggagtcagtttccacagcctctgaccagccatcacacagcctcgaaagacagatgaacggaaatcaggaaaaaggtgataagaccgataggaagaaagataagaccgggaaggagaaaaagaaggaccgggataaggaaaaggacaaaatgaaggccaagaagggaatgctgaagggtctgggagacatgtttcgcatccaggctaagactcgagagttcagggaaagacaagcgcgtgaaagagactacgccgagatccaggattttcatagaactttcggctgcgatgacgaactcatgtacggtggagttagctcttatgagggatctatggcccttaatgccagaccccagtcccccagagaagggcacatgatggacgctctatatgcacaggtgaagaaaccaagaaacagcaagccttcacccgtggactcgaaccgctctacaccttcgaaccacgatcgcatccagcggttgcgccaggagtttcagcaggccaagcaggacgaagatgtcgaggaccggagacggacatactcattcgaacagccttggccaaatgctcgccctgctacacagtccggcagacatagcgtctcagtcgaagtccagatgcagcgccaacggcaggaagagcgggaatcatctcagcaggcccagcgccagtatagctctctgcccaggcaatctcgaaagaatgcatcaagcgtgagccaggactcttgggagcagaattactcaccgggagaagggttccagtctgcgaaggagaatcctcggtacagtagttatcaggggtccagaaatgggtacctggggggacacggattcaatgcaagggtgatgcttgagacacaggagctgctcaggcaggagcagagaagaaaggagcagcaaatgaagaagcaaccaccctctgaagggccttcgaactatgactcgtacaagaaagtgcaggacccgagctacgctccgccaaaaggcccttttcgccaagatgtccctccaagtcccagccaagtggctagattgaaccgactgcagactcccgaaaagggccgaccattctactcctag

SEQ ID NO: 71416 - DNA, 3960 bp, Artificial Sequence
  derived and/or modified sequence
atgaaggtgaccgtgtgcttcggcagaaccagagtggtggtgccctgcggcgacggccacatgaaggtgttcagcctgatccagcaggccgtgaccagatacagaaaggccatcgccaaggaccccaactactggatccaggtgcacagactggagcacggcgacggcggcatcctggacctggacgacatcctgtgcgacgtggccgacgacaaggacagactggtggccgtgttcgacgagcaggacccccaccacggcggcgacggcaccagcgccagcagcaccggcacccagagccccgagatcttcggcagcgagctgggcaccaacaacgtgagcgccttccagccctaccaggccaccagcgagatcgaggtgacccccagcgtgctgagagccaacatgcccctgcacgtgagaagaagcagcgaccccgccctgatcggcctgagcaccagcgtgagcgacagcaacttcagcagcgaggagcccagcagaaagaaccccaccagatggagcaccaccgccggcttcctgaagcagaacaccgccggcagccccaagacctgcgacagaaagaaggacgagaactacagaagcctgcccagagacaccagcaactggagcaaccagttccagagagacaacgccagaagcagcctgagcgccagccaccccatggtgggcaagtggctggagaagcaggagcaggacgaggacggcaccgaggaggacaacagcagagtggagcccgtgggccacgccgacaccggcctggagcacatccccaacttcagcctggacgacatggtgaagctggtggaggtgcccaacgacggcggccccctgggcatccacgtggtgcccttcagcgccagaggcggcagaaccctgggcctgctggtgaagagactggagaagggcggcaaggccgagcacgagaacctgttcagagagaacgactgcatcgtgagaatcaacgacggcgacctgagaaacagaagattcgagcaggcccagcacatgttcagacaggccatgagaacccccatcatctggttccacgtggtgcccgccgccaacaaggagcagtacgagcagctgagccagagcgagaagaacaactactacagcagcagattcagccccgacagccagtacatcgacaacagaagcgtgaacagcgccggcctgcacaccgtgcagagagcccccagactgaaccacccccccgagcagatcgacagccacagcagactgccccacagcgcccaccccagcggcaagccccccagcgcccccgccagcgccccccagaacgtgttcagcaccaccgtgagcagcggctacaacaccaagaagatcggcaagagactgaacatccagctgaagaagggcaccgagggcctgggcttcagcatcaccagcagagacgtgaccatcggcggcagcgcccccatctacgtgaagaacatcctgcccagaggcgccgccatccaggacggcagactgaaggccggcgacagactgatcgaggtgaacggcgtggacctggtgggcaagagccaggaggaggtggtgagcctgctgagaagcaccaagatggagggcaccgtgagcctgctggtgttcagacaggaggacgccttccaccccagagagctgaacgccgagcccagccagatgcagatccccaaggagaccaaggccgaggacgaggacatcgtgctgacccccgacggcaccagagagttcctgaccttcgaggtgcccctgaacgacagcggcagcgccggcctgggcgtgagcgtgaagggcaacagaagcaaggagaaccacgccgacctgggcatcttcgtgaagagcatcatcaacggcggcgccgccagcaaggacggcagactgagagtgaacgaccagctgatcgccgtgaacggcgagagcctgctgggcaagaccaaccaggacgccatggagaccctgagaagaagcatgagcaccgagggcaacaagagaggcatgatccagctgatcgtggccagaagaatcagcaagtgcaacgagctgaagagccccggcagcccccccggccccgagctgcccatcgagaccgccctggacgacagagagagaagaatcagccacagcctgtacagcggcatcgagggcctggacgagagccccagcagaaacgccgccctgagcagaatcatgggcgagagcggcaagtaccagctgagccccaccgtgaacatgccccaggacgacaccgtgatcatcgaggacgacagactgcccgtgctgcccccccacctgagcgaccagagcagcagcagcagccacgacgacgtgggcttcgtgaccgccgacgccggcacctgggccaaggccgccatcagcgacagcgccgactgcagcctgagccccgacgtggaccccgtgctggccttccagagagagggcttcggcagacagagcatgagcgagaagagaaccaagcagttcagcgacgccagccagctggacttcgtgaagaccagaaagagcaagagcatggacctgggcatcgccgacgagaccaagctgaacaccgtggacgaccagaaggccggcagccccagcagagacgtgggccccagcctgggcctgaagaagagcagcagcctggagagcctgcagaccgccgtggccgaggtgaccctgaacggcgacatccccttccacagacccagacccagaatcatcagaggcagaggctgcaacgagagcttcagagccgccatcgacaagagctacgacaagcccgccgtggacgacgacgacgagggcatggagaccctggaggaggacaccgaggagagcagcagaagcggcagagagagcgtgagcaccgccagcgaccagcccagccacagcctggagagacagatgaacggcaaccaggagaagggcgacaagaccgacagaaagaaggacaagaccggcaaggagaagaagaaggacagagacaaggagaaggacaagatgaaggccaagaagggcatgctgaagggcctgggcgacatgttcagaatccaggccaagaccagagagttcagagagagacaggccagagagagagactacgccgagatccaggacttccacagaaccttcggctgcgacgacgagctgatgtacggcggcgtgagcagctacgagggcagcatggccctgaacgccagaccccagagccccagagagggccacatgatggacgccctgtacgcccaggtgaagaagcccagaaacagcaagcccagccccgtggacagcaacagaagcacccccagcaaccacgacagaatccagagactgagacaggagttccagcaggccaagcaggacgaggacgtggaggacagaagaagaacctacagcttcgagcagccctggcccaacgccagacccgccacccagagcggcagacacagcgtgagcgtggaggtgcagatgcagagacagagacaggaggagagagagagcagccagcaggcccagagacagtacagcagcctgcccagacagagcagaaagaacgccagcagcgtgagccaggacagctgggagcagaactacagccccggcgagggcttccagagcgccaaggagaaccccagatacagcagctaccagggcagcagaaacggctacctgggcggccacggcttcaacgccagagtgatgctggagacccaggagctgctgagacaggagcagagaagaaaggagcagcagatgaagaagcagccccccagcgagggccccagcaactacgacagctacaagaaggtgcaggaccccagctacgccccccccaagggccccttcagacaggacgtgccccccagccccagccaggtggccagactgaacagactgcagacccccgagaagggcagacccttctacagctag

SEQ ID NO: 71417 - protein, 1310 aa, Artificial Sequence
  derived and/or modified sequence
MKVTVCFGRTRVVVPCGDGHMKVFSLIQQAVTRYRKAIAKDPNYWIQVHRLEHGDGGILDLDDILCDVADDKDRLVAVFDEQDPHHGGDGTSASSTGTQSPEIFGSELGTNNVSAFQPYQATSEIEVTPSVLRANMPLHVRRSSDPALIGLSTSVSDSNFSSEEPSRKNPTRWSTTAGFLKQNTAGSPKTCDRKKDENYRSLPRDTSNWSNQFQRDNARSSLSASHPMVGKWLEKQEQDEDGTEEDNSRVEPVGHADTGLEHIPNFSLDDMVKLVEVPNDGGPLGIHVVPFSARGGRTLGLLVKRLEKGGKAEHENLFRENDCIVRINDGDLRNRRFEQAQHMFRQAMRTPIIWFHVVPAANKEQYEQLSQSEKNNYYSSRFSPDSQYIDNRSVNSAGLHTVQRAPRLNHPPEQIDSHSRLPHSAHPSGKPPSAPASAPQNVFSTTVSSGYNTKKIGKRLNIQLKKGTEGLGFSITSRDVTIGGSAPIYVKNILPRGAAIQDGRLKAGDRLIEVNGVDLVGKSQEEVVSLLRSTKMEGTVSLLVFRQEDAFHPRELKAEDEDIVLTPDGTREFLTFEVPLNDSGSAGLGVSVKGNRSKENHADLGIFVKSIINGGAASKDGRLRVNDQLIAVNGESLLGKTNQDAMETLRRSMSTEGNKRGMIQLIVARRISKCNELKSPGSPPGPELPIETALDDRERRISHSLYSGIEGLDESPSRNAALSRIMGKYQLSPTVNMPQDDTVIIEDDRLPVLPPHLSDQSSSSSHDDVGFVTADAGTWAKAAISDSADCSLSPDVDPVLAFQREGFGRQIADETKLNTVDDQKAGSPSRDVGPSLGLKKSSSLESLQTAVAEVTLNGDIPFHRPRPRIIRGRGCNESFRAAIDKSYDKPAVDDDDEGMETLEEDTEESSRSGRESVSTASDQPSHSLERQMNGNQEKGDKTDRKKDKTGKEKKKDRDKEKDKMKAKKGMLKGLGDMFRFGKHRKDDKIEKTGKIKIQESFTSEEERIRMKQEQERIQAKTREFRERQARERDYAEIQDFHRTFGCDDELMYGGVSSYEGSMALNARPQSPREGHMMDALYAQVKKPRNSKPSPVDSNRSTPSNHDRIQRLRQEFQQAKQDEDVEDRRRTYSFEQPWPNARPATQSGRHSVSVEVQMQRQRQEERESSQQAQRQYSSLPRQSRKNASSVSQDSWEQNYSPGEGFQSAKENPRYSSYQGSRNGYLGGHGFNARVMLETQELLRQEQRRKEQQMKKQPPSEGPSNYDSYKKVQDPSYAPPKGPFRQDVPPSPSQVARLNRLQTPEKGRPFYS

SEQ ID NO: 71418 - DNA, 3933 bp, Artificial Sequence
  derived and/or modified sequence
atgaaggtaacagtttgttttgggagaactcgggtggtagttccgtgtggcgatggccatatgaaggtattcagtctgattcagcaagccgtgacaagatataggaaggcgatcgctaaggatcccaactattggatacaggtgcaccgtctggagcatggggacggaggaatcttggacctggatgacatcctgtgcgatgtcgccgacgacaaggaccggttagtcgctgtgttcgatgagcaggacccgcaccatggtggcgatggtacgtcagcctctagcacaggcacgcagtcccccgaaatttttggttctgagctgggcactaataatgtgtccgcttttcaaccctaccaggcaacctccgagatcgaagtgacacccagcgtgctgcgggctaacatgccactccatgtgagaagatcatcggaccctgctctcatcggcctctcaacatctgtatctgactccaatttcagcagcgaggagccctcgcggaaaaatcctacacgatggtctacaactgccggttttttaaagcagaacactgctgggtcccccaagacttgtgatcgtaaaaaagatgaaaactaccgtagtctgcctagagatacttccaattggtcaaaccaatttcagagggataatgcgcgatctagtctctcggcctcacacccaatggtgggaaaatggttggagaaacaggagcaggatgaggacggaaccgaggaagacaacagcagggtggagcccgtgggccacgccgatactggactagagcacatacctaatttctcattggacgacatggtcaaattagtggaggtgcctaacgatggaggtccgcttggaatccatgtcgtgcccttctccgccaggggcggacgcaccctgggccttctggtgaagcgcctcgaaaaaggggggaaagccgaacatgaaaacctgtttcgggagaacgactgtatagtaagaattaacgacggggatttgcgaaatcggcggttcgagcaggcccagcatatgttcagacaagccatgcggacacccatcatctggttccacgtcgtgccagctgcaaataaggaacagtacgaacagttgtcacagagcgagaaaaataactactactcaagcaggttttcaccggatagccagtacatcgacaacaggtccgtcaattcagcaggtctgcacactgtgcagcgcgcgcccagactcaaccatccacccgaacagattgactctcattctcggctccctcatagcgcacacccctccgggaagccacccagcgcccctgcgagtgcaccacagaacgtgttctccaccaccgtgagctcaggctataatactaaaaaaattggtaaaaggctgaatatccagctcaaaaaggggacagagggtctgggcttcagtatcacctcacgagacgttaccatcggaggctcagcaccaatctacgtgaaaaatatcctccctaggggggccgccattcaggacgggagactcaaagctggtgaccgcctgattgaggtgaacggcgtagaccttgttgggaaatctcaggaagaggtggtctctctgcttcggagcaccaaaatggaaggtacagtatccctcttggtttttcgccaagaggatgctttccatccacgggaactcaaggccgaggacgaggatattgtgttgacacctgacggaactagggagtttctaacttttgaagtccctctgaacgacagcgggtccgctggcctcggcgtctctgtgaaaggcaaccgctccaaagagaaccacgccgacctaggcatcttcgtgaagtcaattattaatggaggggccgcgagcaaggacggtcgcctgcgcgtgaatgatcagctgatcgcagtgaacggtgagagtttgttaggaaagaccaaccaagatgcgatggagacgctccggcgcagcatgtctaccgaaggcaacaagagaggcatgatccagctcatcgtagcgcggaggattagcaaatgtaatgagttgaaaagccctggaagcccccctgggcctgagttgccgatcgagactgcactagacgacagggagagacgaatcagccatagcctgtacagcggtatcgaaggtctcgatgagtctcctagtcgtaatgccgctttatcgcggattatgggtaagtaccagctgtctcctacagtcaacatgccgcaggacgacacagtgattatagaagatgatcggcttccagtcctgccaccccacctgtccgaccagagcagttccagtagccatgacgatgtggggtttgtaactgccgatgctgggacctgggctaaggctgctattagcgacagcgccgactgtagcttgagtccagacgtggatccggtactagcgttccagcgggaggggttcgggagacagatcgccgatgaaaccaaacttaacacagttgatgaccagaaagcagggagccccagcagagacgtcggtccaagcctcgggttgaagaagtcaagcagtttggaatcgctccaaaccgcggttgctgaagttactctcaatggagacatcccttttcacagaccaagacccagaattatcaggggtcgcggttgtaatgaatcattccgagccgccatcgataagtcttatgataaacccgcagtagatgatgacgacgaagggatggagacgcttgaggaagataccgaggagtcttccagaagtggccgcgaaagcgtgtccaccgccagcgaccaacctagccacagcctggaacggcagatgaacgggaaccaggagaagggcgataagactgaccgaaaaaaggacaaaacggggaaggaaaaaaagaaggatagagataaggagaaggacaagatgaaagcaaagaaaggcatgctgaagggcctcggggatatgttcaggtttggtaaacacagaaaggatgacaagatagagaaaacagggaagattaaaatccaggagagcttcacttccgaagaagaacggattcgcatgaagcaggaacaggagagaatacaggccaaaacaagggaatttagagagagacaagctagggagagagactacgccgagatccaagacttccacagaacctttggctgtgacgacgaacttatgtatggcggcgtaagctcgtatgaaggttctatggctctgaatgcccggcctcagagccctagggagggacatatgatggacgcgttatatgcccaggtgaaaaagcctaggaacagtaaaccaagccctgtagattcaaataggtctaccccatcgaatcatgataggatccagaggctgaggcaggagtttcaacaagctaagcaggatgaagacgtggaggacagacgcagaacgtactcgtttgagcagccttggccaaacgcccgtcccgcaacccagtccggccggcacagtgtctccgtagaagtacagatgcagcgtcagcgtcaggaggagcgggaaagctcccaacaagcccaacgacagtacagctctctccctagacagtctaggaagaacgcttcaagtgtgtcgcaggactcttgggagcagaactacagtcctggggaaggctttcagtcagcaaaggagaaccctaggtacagtagctaccaggggagtagaaacggctacctgggcggacatgggtttaacgcacgtgttatgttggagacccaggaacttctgagacaggaacagcgacgtaaggagcagcaaatgaaaaaacaacctccctctgaaggaccctccaactatgattcatacaagaaagtacaggatcccagctacgcccccccaaagggcccctttcggcaggatgtcccccccagcccgtcccaagtggcgcgactgaatcgactccagacccctgagaaaggcaggcccttctatagctag

SEQ ID NO: 71419 - DNA, 3933 bp, Artificial Sequence
  derived and/or modified sequence
atgaaggtgacagtgtgctttggaagaaccagggtggtggtgccctgtggagatggccacatgaaggtgttcagcctcatccagcaggccgtgacccgctacaggaaggccatcgccaaggaccccaactactggatccaggtgcaccggctggagcacggagatggcggcatcctggacctggatgacatcctgtgtgatgtggctgatgacaaggaccggctggtggccgtgtttgatgagcaggacccccaccacggcggagatggcaccagcgccagcagcacaggcacccagagccctgagatcttcggcagcgagctgggcaccaacaacgtgtctgccttccagccctaccaggccaccagcgagattgaggtgacccccagcgtgctgcgggccaacatgcccctgcacgtgagaagaagcagtgaccctgccctgattggcctgagcacctctgtgtctgacagcaacttcagcagcgaggagcccagcaggaagaaccccacccgctggagcaccacagctggcttcctgaagcagaacacagctggcagccccaagacctgtgacaggaagaaggatgagaactaccgcagcctgccccgggacaccagcaactggagcaaccagttccagagggacaatgcccggagcagcctgagcgccagccaccccatggtgggcaagtggctggagaagcaggagcaggatgaagatggaacagaggaggacaacagccgggtggagcctgtgggccacgccgacaccggcctggagcacatccccaacttcagcctggatgacatggtgaagctggtggaggtgcccaatgatggcggccccctgggcatccacgtggtgcccttcagcgcccggggcggccgcaccctgggcctgctggtgaagaggctggagaagggcggcaaggccgagcatgaaaatctcttccgggagaatgactgcatcgtgcgcatcaatgatggagacctgaggaacagaagatttgagcaggcccagcacatgttccggcaggccatgaggacccccatcatctggttccacgtggtgcctgctgccaacaaggagcagtatgagcagctgagccagagcgagaagaacaactactacagcagccgcttctccccagacagccagtacatcgacaacagatctgtgaacagcgctggcctgcacacagtgcagagggccccccggctgaaccaccccccagagcagattgacagccacagccggctgccccacagcgcccaccccagcggcaagcccccatctgccccagccagcgccccccagaatgtgttcagcaccaccgtgagcagcggctacaacaccaagaagattggcaagaggctgaacatccagctgaagaagggcacagagggcctgggcttcagcatcaccagcagagatgtgaccatcggcggcagcgcccccatctacgtgaagaacatcctgcccaggggggccgccatccaggacggccgcctgaaggccggggacaggctcatcgaggtgaatggagtggacctggtgggcaagagccaggaggaggtggtgtccctgctgcggagcaccaagatggagggcaccgtgtccctgctggtgttccggcaggaggatgccttccacccccgggagctgaaggcagaagatgaagatattgtgctgaccccagatggcacccgggagttcctgacctttgaggtgcccctgaatgattctggcagcgctggcctgggcgtgtctgtgaagggcaacagaagcaaagaaaatcatgctgacctgggcatctttgtgaagagcatcatcaatggaggagctgccagcaaggatggccgcctgcgggtgaatgaccagctgattgctgtgaatggagagagcctgctgggcaagaccaaccaggatgccatggagaccctgcggcgctccatgagcacagagggcaacaagaggggcatgatccagctgattgtggcccggcgcatcagcaaatgtaatgagctgaagagccctggcagccccccaggccctgagctgcccatcgagacagccctggatgaccgggagcggcgcatcagccacagcctgtacagcggcatcgagggcctggatgagagccccagcagaaatgctgccctgagccgcatcatgggcaagtaccagctgagccccaccgtgaacatgccccaggatgacaccgtcatcattgaagatgaccggctgcctgtgctgcccccccacctgagtgaccagagcagcagcagcagccatgatgatgtgggctttgtgacagcagatgctggcacctgggccaaggccgccatcagtgacagcgctgactgcagcctgagcccagatgtggaccctgtgctggccttccagcgggagggcttcggccggcagattgctgatgagaccaagctgaacacagtggatgaccagaaggccggcagccccagcagagatgtgggccccagcctgggcctgaagaagagcagcagcctggagagcctgcagacagctgtggccgaggtgaccctgaatggagacatccccttccaccggccccggccccgcatcatccggggccggggctgcaatgaaagcttccgggccgccatcgacaagagctatgacaagccagctgtggatgatgatgatgagggcatggagaccctggaggaggacacagaggagagcagccgcagcggccgggagagcgtgtccacagccagtgaccagcccagccacagcctggagcggcagatgaatggaaaccaggagaagggggacaagacagacaggaagaaggacaagacaggcaaggagaagaagaaggaccgggacaaggagaaggacaagatgaaggccaagaagggcatgctgaagggcctgggggacatgttccgctttgggaagcacaggaaggatgacaagattgagaagacaggcaagatcaagatccaggagagcttcaccagcgaggaggagcgcatccgcatgaagcaggagcaggagcgcatccaggccaagacccgggagttccgggagcggcaggcccgggagcgggactatgcagagatccaggacttccacaggaccttcggctgtgatgatgagctgatgtatggaggagtgtcctcctatgagggctccatggccctgaatgcccggccccagagcccccgggagggccacatgatggatgccctgtatgcccaggtgaagaagcccaggaacagcaagcccagccctgtggacagcaacagaagcacccccagcaaccacgaccgcatccagaggctgcggcaggagttccagcaggccaagcaggatgaagatgtggaggacagaagaaggacctacagctttgagcagccctggcccaatgcccggcctgccacccagagcggccgccacagcgtgtctgtggaggtgcagatgcagaggcagaggcaggaggagcgggagagcagccagcaggcccagaggcagtacagcagcctgccccggcagagcaggaagaatgccagctctgtgtcccaggacagctgggagcagaactacagccctggagagggcttccagagcgccaaggagaacccccgctacagcagctaccagggcagcagaaatggctacctgggcggccacggcttcaatgcccgggtgatgctggagacccaggagctgctgcggcaggagcagaggaggaaggagcagcagatgaagaagcagccccccagcgagggccccagcaactatgacagctacaagaaggtgcaggaccccagctatgccccacccaagggccccttccggcaggatgtgccccccagccccagccaggtggcccggctgaaccggctgcagaccccagagaagggccggcccttctacagctag

SEQ ID NO: 71420 - DNA, 3933 bp, Artificial Sequence
  derived and/or modified sequence
atgaaggtgaccgtgtgcttcggccggacccgggtggtggtgccctgcggggacggacacatgaaggtgttcagtttaatccaacaggctgtgaccagataccgcaaggccatcgctaaggatcctaattactggatacaggtgcacaggctcgaacacggagatggcgggatactcgacctggacgacatcctatgtgacgtggctgacgacaaggatcggctggtggcggtgttcgacgaacaggaccctcatcacgggggcgatggcaccagcgcctcctccaccggtactcagagcccggagattttcggatcggagctgggaaccaataacgtttctgcgttccagccttatcaagcaaccagtgagattgaagtgaccccctctgtgttgagagctaacatgccattgcacgtaagacggagttctgacccagccctgattggcctcagtacctccgtttcagattcaaatttctcgtcagaggaaccctcaaggaagaacccaactcgctggagcaccacggccggattccttaaacagaataccgccggctccccaaagacttgtgatcggaagaaggatgaaaactaccgttccctccccagagacacatccaattggtctaaccaattccagagggacaacgcccgcagtagcttatccgccagccaccctatggtcggcaagtggttggaaaagcaagagcaggacgaggacggaactgaggaagacaattcgcgggtcgaaccggtgggccacgctgataccggactggagcatatcccaaatttctcactcgacgatatggtcaagctcgttgaagtgccgaatgacgggggtccattggggattcacgttgtaccattctcagctaggggcggacgtaccctcggacttctcgtgaaacgcctggagaagggcggcaaggctgaacatgaaaacctgtttcgagagaacgactgtatcgtgaggatcaatgatggcgacttacgtaaccggcgctttgaacaggcccaacacatgttcaggcaggccatgagaaccccaattatctggtttcatgtcgtgccagccgccaataaagagcagtacgaacaactgtcgcagagcgagaagaacaattactacagtagccgcttttcaccagacagccagtacattgataacagatctgttaattccgccggcctgcatacagtgcagcgcgcgcctcgactcaatcacccaccggaacaaatagactcccatagtagattaccacacagtgcccacccctctgggaaacctccctccgctcccgcatctgcacctcaaaatgtcttctccacaactgtgtcgtctgggtacaacacgaaaaagatagggaagagactgaacatccagctgaagaaaggcaccgagggccttgggttctcaataacaagtagggatgtgacaataggcggaagcgcacccatttatgtcaagaatatattgccccgaggcgccgccatccaagatgggcgtctgaaggccggggataggctgatcgaagtgaatggtgtggacctagtcggaaaaagccaggaagaggtagtgagcctactgaggagcacaaaaatggaaggcactgtcagtctcctggtgtttcgccaggaggatgcttttcaccccagagaacttaaagccgaggacgaagatatcgttcttaccccagacgggacccgggaattcctgaccttcgaggttccccttaacgatagtgggtccgccgggctgggtgtctctgttaaaggcaatcgttccaaagagaatcacgcggatctcggcattttcgttaaaagtatcattaacgggggggccgcttccaaggacgggcgattaagggtgaatgaccagttgatcgcagtgaacggcgagtctcttctcggaaagactaaccaggacgctatggaaacgctgcgacgttccatgtcgaccgagggtaacaaacgagggatgattcagctaatagtggctcgcagaatttccaaatgcaatgaactgaaatccccaggctcacccccaggacctgaactgccaattgagaccgctttggatgaccgcgagcgccgcatcagccattctctctatagtggaatcgaggggttggatgagagcccttcaagaaacgcagcactctctcgtatcatggggaagtatcagctctctcccactgtgaacatgccacaggatgataccgtaattattgaggatgatcggctgcccgttctgcccccacacctgtccgatcagtcctcttcctcaagccacgatgacgtaggcttcgtaacagctgacgccgggacatgggctaaggcagctatatcagacagtgcagactgcagcctttcgccagatgtagaccccgtgctagcttttcagcgtgagggattcggccgccagattgccgacgaaactaaattaaacactgtggacgaccagaaggctggatcaccttctagagatgttggtccgagccttggcttgaagaagagctctagtttggaatccctgcagaccgcggtagctgaggtgactctcaacggagatattccatttcaccgaccccgcccgagaatcatcagaggtcggggctgtaatgagtcctttagagccgctattgataaatcttatgacaagccagccgtagacgatgatgacgaaggcatggaaactctggaagaagatacggaagaatcgtcaagatcaggcagggagagcgtgtctacagcctcggaccaaccctcccacagtctggaaaggcaaatgaacgggaaccaggagaaaggtgataaaaccgaccgaaagaaggacaagaccggaaaagagaagaaaaaagatcgtgacaaggagaaagataaaatgaaagctaagaaggggatgttgaaggggctcggagacatgttccgcttcggcaaacatcgaaaggatgataaaatcgagaagaccggaaagatcaaaatccaggaaagttttacttccgaggaagaaaggattcgcatgaagcaagaacaagaaagaatccaggcgaagacacgagaattccgggagaggcaggcccgggaaagagactatgccgagatccaggatttccataggacattcggatgcgacgatgaactgatgtatggcggcgtatctagctacgaaggaagcatggccctgaatgcacgcccacaatcaccccgagaagggcatatgatggatgcgctttacgcgcaggtgaagaagccccggaactccaaacctagtccggtggatagtaatcggtccaccccaagtaaccatgatcggattcaacggctgagacaggaatttcagcaggcaaagcaggacgaagacgttgaagacagaaggagaacctactcatttgaacagccctggccaaacgcacgacccgctacacaatctggacgacactccgttagcgtagaagtacagatgcagaggcaacgacaggaggagcgagagtcaagtcagcaggctcagcgacagtacagcagtctcccacggcagagccggaagaacgcctcctctgtatcacaggactcttgggaacagaattactcccctggggagggctttcagtccgcgaaagaaaatcctaggtactcttcgtatcaaggttccaggaacggctatctcggcgggcatggatttaacgctagagtcatgctggaaactcaggaactacttagacaggagcaacgccgaaaggaacaacagatgaaaaagcagccgccctcagagggaccaagcaattacgactcctacaagaaagttcaggaccctagctatgctccccctaagggcccctttcgccaggacgtgcctccatctccctcacaggtcgcccgactgaatcgattgcagactccggaaaaagggagacccttctatagctag

SEQ ID NO: 71421 - DNA, 5867 bp, Artificial Sequence
  derived and/or modified sequence
gcggccccgagcgagcgccagcgccacacagccccgggcagccgccggcgagcgcgccgcgacgccgaacaggtggccggaggctgcgggcgccgcggcggggagaggcgaggcaagccccgggcgaagcgaggcgaggcgagggcggccgggccgggcatgcgagctgagcggccccccggcgtcgccgccgcctgcccgcgcccctagccgcccgcgcgcccgagtccccagcggctcctccgcgcccagcgtcctcggtcccggcctcggctgctccggctgcgctcggcgaggggcgcgggcccgcccgcggcggcggcggcatgaaagtgaccgtgtgcttcggacggacccgggtggtcgtgccgtgcggggacggccacatgaaagttttcagcctcatccagcaggcggtgacccgctaccggaaggccatcgccaaggatccaaactactggatacaggtgcatcgcttggaacatggagatggaggaatactagaccttgatgacattctttgtgatgtagcagacgataaagacagactggtagcagtgtttgatgagcaggatccacatcacggaggtgatggcaccagtgccagttccacgggtacccagagcccagagatatttggtagtgagcttggcaccaacaatgtctcagcctttcagccttaccaagcaacaagtgaaattgaggtcacaccttcagtccttcgagcaaatatgcctcttcatgttcgacgcagtagtgacccagctctaattggcctctccacttctgtcagtgatagtaatttttcctctgaagagccttcaaggaaaaatcccacacgctggtcaacaacagctggcttcctcaagcagaacactgctgggagtcctaaaacctgcgacaggaagaaagatgaaaactacagaagcctcccgcgggatactagtaactggtctaaccaatttcagagagacaatgctcgctcgtctctgagtgccagtcacccaatggtgggcaagtggctggagaaacaagaacaggatgaggatgggacagaagaggataacagtcgtgttgaacctgttggacatgctgacacgggtttggagcatatacccaacttttctctggatgatatggtaaagctcgtagaagtccccaacgatggagggcctctgggaatccacgtagtgcctttcagtgctcgaggcggcagaaccctggggttattagtaaaacgattggagaaaggtggtaaagctgaacatgaaaatctttttcgtgagaatgattgcattgtcaggattaatgatggcgaccttcgaaatagaagatttgaacaagcacaacatatgtttcgccaagccatgcgtacacccatcatttggttccatgtggttcctgcagcaaataaagagcagtatgaacaactatcccaaagtgagaagaacaattactattcaagccgttttagccctgacagccagtatattgacaacaggagtgtgaacagtgcagggcttcacacggtgcagagagcaccccgactgaaccacccgcctgagcagatagactctcactcaagactacctcatagcgcacacccctcgggaaaaccaccatccgctccagcctcggcacctcagaatgtatttagtacgactgtaagcagtggttataacaccaaaaaaataggcaagaggcttaatatccagcttaagaaaggtacagaaggtttgggattcagcatcacttccagagatgtaacaataggtggctcagctccaatctatgtgaaaaacattctcccccggggggcggccattcaggatggccgacttaaggcaggagacagacttatagaggtaaatggagtagatttagtgggcaaatcccaagaggaagttgtttcgctgttgagaagcaccaagatggaaggaactgtgagccttctggtctttcgccaggaagacgccttccacccaagggaactgaaagcagaagatgaggatattgttcttacacctgatggcaccagggaatttctgacatttgaagtcccacttaatgattcaggatctgcaggccttggtgtcagtgtcaaaggtaaccggtcaaaagagaaccacgcagatttgggaatctttgtcaagtccattattaatggaggagcagcatctaaagatggaaggcttcgggtgaatgatcaactgatagcagtaaatggagaatccctgttgggcaagacaaaccaagatgccatggaaaccctaagaaggtctatgtctactgaaggcaataaacgaggaatgatccagcttattgttgcaaggagaataagcaagtgcaatgagctgaagtcacctgggagcccccctggacctgagctgcccattgaaacagcgttggatgatagagaacgaagaatttcccattccctctacagtgggattgaggggcttgatgaatcgcccagcagaaatgctgccctcagtaggataatgggtaaataccagctgtcccctacagtgaatatgccccaagatgacactgtcattatagaagatgacaggttgccagtgcttcctccacatctctctgaccagtcctcttccagctcccatgatgatgtggggtttgtgacggcagatgctggtacttgggccaaggctgcaatcagtgattcagccgactgctctttgagtccagatgttgatccagttcttgcttttcaacgagaaggatttggacgtcagatagctgacgagactaaactcaatacagtggatgaccagaaagcaggttctcccagcagagatgtgggtccttccctgggtctgaagaagtcaagctcgttggagagtctgcagaccgcagttgccgaggtgactttgaatggggatattcctttccatcgtccacggccgcggataatcagaggcaggggatgcaatgagagcttcagagctgccatcgacaaatcttatgataaacccgcggtagatgatgatgatgaaggcatggagaccttggaagaagacacagaagaaagttcaagatcagggagagagtctgtatccacagccagtgatcagccttcccactctctggagagacaaatgaatggaaaccaagagaaaggtgataagactgatagaaaaaaggataaaactggaaaagaaaagaagaaagatagagataaggagaaggataaaatgaaagccaagaagggaatgctgaagggcttgggagacatgttcaggtttggcaaacatcgaaaagatgacaagattgagaaaacgggtaaaataaaaatacaggaatcctttacatcagaagaggagaggatacgaatgaagcaggagcaggagaggattcaagccaaaactcgagaatttagggaacgacaagctcgagagcgtgactatgctgaaattcaagattttcatcggacatttggctgtgatgatgagttaatgtatgggggagtttcttcttatgaaggttccatggctctcaacgctagacctcagagcccacgagaagggcatatgatggatgctttgtatgcccaagtcaagaagccgcggaattccaaaccctcacctgtagacagtaacagatcaactcctagcaatcatgatcggatacagcgtctgaggcaagaatttcagcaagcaaagcaagatgaagatgtagaagatcgtcggcggacctatagttttgagcaaccctggccgaacgcacggccggcgacgcagagcgggcgacactcggtgtccgtggaggtgcagatgcagcggcagcggcaggaggagcgcgagagctcccagcaggcccagcgccagtacagctctctgcctcggcaaagcaggaaaaatgccagctcggtctcccaggactcttgggagcagaactactcccctggggaaggcttccagagtgccaaagagaaccccaggtactccagctaccaaggctccaggaacggctacctgggaggacatggcttcaacgccagggtcatgctggaaactcaggagctccttcgccaggaacagaggcggaaggagcagcagatgaagaagcagcctccttccgaggggcccagcaactatgactcgtataagaaagtccaggaccccagttacgcccctcccaaggggcccttccggcaagatgtgcccccctccccttctcaggttgcgaggctgaacagacttcagactcctgagaaagggaggcccttctattcctgagcacgcaaataacggatgcttcatgtcgcgcaataaaagacattttcctatgaagacttgtattttgggagtttttttaaaacctcgatggtactatggagtatttctgttgttggtatcagtgcctttaagcggtgtaggcaaagaaatggaaggccttaatgtctttgccactatgtctcaagtgtctgtttcatggaaggatttcccaccctgtgacaatcatctgtttgaggtgttcatatgctctgcgcctctccacagtaccaggaatctcggccctactcatgagttgtccgcggcttggttgtaacatccctgcaccacttgcagtgacaaattcacctgaagtggaggatgacgtgcggccctgtttctccctctaagttctcttagctatgggatgacatcttagtctctggtggaggaaaagtgggcgacatacaccaaaaattggggctttctggtacttcacagcacagccatttgtcgtactttgtcatcactgtggttttctctttcctttctcagctctttgtgacgggagagtcggtcatcctattacagaagctaagccatagtccaacattgtttggtcaccatgggggtccttttgtaactgccttatgactcaacattaccaataaagtgatgatcctggtctgcgtttatacatacgcttgttcggtcctgttcctgacacgtgggttgagtcaccacagctctgtgtggggaacgtgggagacaggagtggctcctgccgggggaagctgggcctgccattggccctgtgtctatcatgaggggagagctaagaaagaaattctcctaggaagagctcatggcccagtacatcctagtaattattttaattagtttttgttctgacagcttgtcaggaagggcacagaatgggacagagataaaccagacagtcattttgatctgctctctacggtttttcaagtcagaggcaattgatgcttgtctaatgcatccacacactgcatgtctgactggcgatgccgcgctcctaagtagttctgccatgaaacataaaagacaaaggaaaagccgttacacatcacacagagaacattttcgggtcccacagcggtggtggcaggaagctcactctcgcgtcagtattagagtgtgtgtgtgggtctcggggatctcggtggctcccatcttccttcattgttctgaacatcctgtattgtaaaccatggctggggtgctaaagtgcctgtgaatcccgatgtggaaaaagctggaggtgaaagctcagcataccatgtatttactttaaaaacagaaaaaaagacatgtatggatatgtctattttttttttattggcacattgtatttttgtgttgacttgtttttagaaatgatgtgtccacacacgtacccgtgtctcttctgcatttctgtgtcatggttctgtttcttaatcacgtgcggcggtgtctaagtggtgttaccagtgtacgcgcagtgaccttggatgacagtggctctttctcacagcctcccctgagctgtgagaaacagctttctctgtacatatgcaactcctaataaaaggcatatttcttcctgtt

SEQ ID NO: 71422 - DNA, 3933 bp, Artificial Sequence
  derived and/or modified sequence
atgaaggtgacagtgtgtttcgggagaacgcgagtggtggtgccatgcggggatgggcacatgaaggtcttttctcttattcaacaggctgtgactcgttacaggaaagcaatcgctaaggacccgaattattggatccaggtgcatcggctggagcatggagatggaggtattctcgatctagacgatattctgtgtgatgtcgccgatgacaaggatcggctggtcgccgtgttcgatgagcaggaccctcatcacggcggtgatggaacaagtgcgtcctccacagggacccagtcacctgaaatttttggctccgagctcggcacgaacaatgtctccgcttttcagccttatcaggccacatccgagattgaagtgacaccttctgtgctgcgagcaaatatgcctctccatgtgcggcgatccagcgatcctgctcttatcggcctcagtactagcgtgtccgattccaatttttctagcgaggaacctagcagaaagaatcctaccaggtggtcgactacggcgggattcctgaagcagaataccgccggttccccaaagacctgtgatcgaaaaaaggatgaaaactatcggtcgctgcctcgagacacttctaattggtctaaccagtttcaacgcgataatgctcgctctagtttaagtgccagccaccccatggtgggcaaatggctggaaaaacaggaacaggatgaagatggtactgaagaggacaattcacgagttgaacccgttggtcatgcagataccggattggagcatattccaaactttagcctagacgacatggtaaaactcgtggaagtccctaacgacgggggtcctctgggtattcatgtggtccctttttccgccagggggggtcggactcttggcctactggtcaagaggttagagaaagggggaaaagcagaacacgagaatctgttcagggaaaacgattgcatcgtgcgaatcaacgacggagacctccgtaacaggagattcgagcaggcccaacacatgtttcgtcaggctatgcgcaccccaataatatggtttcacgtggtgcccgcagctaataaggaacagtacgagcaactgtctcaatcagagaagaacaattactacagctcccgattcagccctgattcccaatacattgataaccggagtgtcaatagtgctggccttcacactgtgcagagagccccacggttgaaccacccaccagagcagatagactctcacagccggttgccacactccgctcacccgagcggcaagcccccttcggccccagcttccgcccctcaaaacgtgttcagcaccacagttagtagcggttacaacactaaaaaaattggcaaacgcctgaatatccaactgaagaagggtaccgaaggcttgggtttttcaattacctcccgggatgtcaccatcggcggttccgcacctatctatgttaagaacattttaccacgaggcgcagcaatacaggatggccgtcttaaagccggtgatcgcttgattgaggtcaatggagttgatctcgttgggaaaagtcaagaagaggtggtgtccttgcttagaagcacaaaaatggaggggaccgtgagcctgctggtcttcagacaggaagacgcatttcaccccagggagcttaaagccgaggacgaggacatcgtcctgacccccgatggcacgagggagtttctgacctttgaggttcccctcaacgactctggatcagctggccttggagtctcggtcaagggcaatagatcaaaagaaaaccatgcagatcttggaatctttgtaaagtccataatcaacggaggggcagcaagtaaagatggccgtctccgcgtaaatgaccaactaatcgccgttaacggggaatcattactgggaaagaccaatcaagatgccatggagaccttaagacgcagtatgtcaaccgaagggaataaacggggaatgattcagctaatagttgcaagacgcatctccaagtgcaacgaattaaagtctccaggcagtccgccaggccctgagctcccaattgagaccgccctcgatgaccgggaaaggcggatcagtcattctttatacagcggtatcgagggcttggatgagtcaccctccaggaacgcggcactgtcccggattatgggtaagtaccagctgtctccgacggtgaacatgccccaagacgataccgtaattattgaagatgacaggctgcccgtgttacccccacacctgagcgaccagtcaagctcttctagccatgacgacgtcggtttcgtcactgcggatgctgggacctgggccaaggcagcgatttcagatagtgcggactgttcattgagtcctgacgtcgaccccgtactggccttccagcgagaggggtttggcagacagatcgctgacgagactaagctcaacaccgtagacgaccagaaggcaggatcaccatctagggacgtgggcccttctcttgggctaaaaaaaagctcgagtctcgagagcttgcaaaccgccgtcgcagaagtgactctgaacggggatatccctttccatcgcccaagaccaaggataatacgcggacggggttgcaacgagagcttcagggcagccatagacaaatcttatgataagcccgcagtggacgacgacgatgaaggaatggaaacactcgaggaggacaccgaagaatccagtaggtccggcagggagagtgtgtctaccgcgtcagatcagccttctcactccttagaacggcaaatgaatgggaaccaggagaagggagacaagacggaccggaagaaggacaagacggggaaggaaaagaagaaggatcgggacaaagaaaaagacaagatgaaggccaagaaggggatgttgaaggggctaggggatatgtttaggtttggtaaacaccgcaaagatgataagatcgaaaaaacaggtaaaattaaaattcaagaatcattcactagtgaggaggagcggatacggatgaagcaggagcaggagcggatccaggcaaaaactcgcgagttccgcgaacgccaagcacgggagcgggattacgcagaaatccaggactttcatcgtacattcggatgtgacgatgagctcatgtatggcggtgtgtcaagctacgaggggagtatggccctgaacgctaggccacagtcacctcgggagggacatatgatggacgccctgtacgcacaggttaagaagccacgtaacagcaagccgagtccagtcgactcaaatcggagtacccccagcaaccacgaccgaatacagcgactgagacaggagtttcagcaagctaagcaggatgaagacgtggaagaccggcgtaggacatatagctttgagcagccctggcctaatgccaggcctgccacgcagtccggacgccattcagtatcagtggaggtgcagatgcagcgccaaagacaggaagagcgcgaatcgagccagcaagcccagaggcagtattcctctttgccacgtcagtcccggaagaatgcatcttctgtgagccaggattcctgggagcaaaactacagccctggcgaaggcttccaatcagcaaaggagaaccccaggtatagcagttatcagggctctcgcaacgggtatctgggtggccatgggtttaatgcccgagtgatgctggaaacacaggaactcttgcgccaggaacagaggcgaaaagagcagcaaatgaaaaagcaacccccaagtgagggaccttccaactacgacagctacaaaaaggtgcaggacccctcttacgctcctcccaagggtccctttcgccaagatgtgcctccaagccccagtcaggtggcccgactgaataggttacaaactcccgaaaagggccgtccattctactcgtag

SEQ ID NO: 71423 - DNA, 3933 bp, Artificial Sequence
  derived and/or modified sequence
atgaaggtgaccgtgtgcttcggcagaaccagagtggtggtgccctgcggcgacggccacatgaaggtgttcagcctgatccagcaggccgtgaccagatacagaaaggccatcgccaaggaccccaactactggatccaggtgcacagactggagcacggcgacggcggcatcctggacctggacgacatcctgtgcgacgtggccgacgacaaggacagactggtggccgtgttcgacgagcaggacccccaccacggcggcgacggcaccagcgccagcagcaccggcacccagagccccgagatcttcggcagcgagctgggcaccaacaacgtgagcgccttccagccctaccaggccaccagcgagatcgaggtgacccccagcgtgctgagagccaacatgcccctgcacgtgagaagaagcagcgaccccgccctgatcggcctgagcaccagcgtgagcgacagcaacttcagcagcgaggagcccagcagaaagaaccccaccagatggagcaccaccgccggcttcctgaagcagaacaccgccggcagccccaagacctgcgacagaaagaaggacgagaactacagaagcctgcccagagacaccagcaactggagcaaccagttccagagagacaacgccagaagcagcctgagcgccagccaccccatggtgggcaagtggctggagaagcaggagcaggacgaggacggcaccgaggaggacaacagcagagtggagcccgtgggccacgccgacaccggcctggagcacatccccaacttcagcctggacgacatggtgaagctggtggaggtgcccaacgacggcggccccctgggcatccacgtggtgcccttcagcgccagaggcggcagaaccctgggcctgctggtgaagagactggagaagggcggcaaggccgagcacgagaacctgttcagagagaacgactgcatcgtgagaatcaacgacggcgacctgagaaacagaagattcgagcaggcccagcacatgttcagacaggccatgagaacccccatcatctggttccacgtggtgcccgccgccaacaaggagcagtacgagcagctgagccagagcgagaagaacaactactacagcagcagattcagccccgacagccagtacatcgacaacagaagcgtgaacagcgccggcctgcacaccgtgcagagagcccccagactgaaccacccccccgagcagatcgacagccacagcagactgccccacagcgcccaccccagcggcaagccccccagcgcccccgccagcgccccccagaacgtgttcagcaccaccgtgagcagcggctacaacaccaagaagatcggcaagagactgaacatccagctgaagaagggcaccgagggcctgggcttcagcatcaccagcagagacgtgaccatcggcggcagcgcccccatctacgtgaagaacatcctgcccagaggcgccgccatccaggacggcagactgaaggccggcgacagactgatcgaggtgaacggcgtggacctggtgggcaagagccaggaggaggtggtgagcctgctgagaagcaccaagatggagggcaccgtgagcctgctggtgttcagacaggaggacgccttccaccccagagagctgaaggccgaggacgaggacatcgtgctgacccccgacggcaccagagagttcctgaccttcgaggtgcccctgaacgacagcggcagcgccggcctgggcgtgagcgtgaagggcaacagaagcaaggagaaccacgccgacctgggcatcttcgtgaagagcatcatcaacggcggcgccgccagcaaggacggcagactgagagtgaacgaccagctgatcgccgtgaacggcgagagcctgctgggcaagaccaaccaggacgccatggagaccctgagaagaagcatgagcaccgagggcaacaagagaggcatgatccagctgatcgtggccagaagaatcagcaagtgcaacgagctgaagagccccggcagcccccccggccccgagctgcccatcgagaccgccctggacgacagagagagaagaatcagccacagcctgtacagcggcatcgagggcctggacgagagccccagcagaaacgccgccctgagcagaatcatgggcaagtaccagctgagccccaccgtgaacatgccccaggacgacaccgtgatcatcgaggacgacagactgcccgtgctgcccccccacctgagcgaccagagcagcagcagcagccacgacgacgtgggcttcgtgaccgccgacgccggcacctgggccaaggccgccatcagcgacagcgccgactgcagcctgagccccgacgtggaccccgtgctggccttccagagagagggcttcggcagacagatcgccgacgagaccaagctgaacaccgtggacgaccagaaggccggcagccccagcagagacgtgggccccagcctgggcctgaagaagagcagcagcctggagagcctgcagaccgccgtggccgaggtgaccctgaacggcgacatccccttccacagacccagacccagaatcatcagaggcagaggctgcaacgagagcttcagagccgccatcgacaagagctacgacaagcccgccgtggacgacgacgacgagggcatggagaccctggaggaggacaccgaggagagcagcagaagcggcagagagagcgtgagcaccgccagcgaccagcccagccacagcctggagagacagatgaacggcaaccaggagaagggcgacaagaccgacagaaagaaggacaagaccggcaaggagaagaagaaggacagagacaaggagaaggacaagatgaaggccaagaagggcatgctgaagggcctgggcgacatgttcagattcggcaagcacagaaaggacgacaagatcgagaagaccggcaagatcaagatccaggagagcttcaccagcgaggaggagagaatcagaatgaagcaggagcaggagagaatccaggccaagaccagagagttcagagagagacaggccagagagagagactacgccgagatccaggacttccacagaaccttcggctgcgacgacgagctgatgtacggcggcgtgagcagctacgagggcagcatggccctgaacgccagaccccagagccccagagagggccacatgatggacgccctgtacgcccaggtgaagaagcccagaaacagcaagcccagccccgtggacagcaacagaagcacccccagcaaccacgacagaatccagagactgagacaggagttccagcaggccaagcaggacgaggacgtggaggacagaagaagaacctacagcttcgagcagccctggcccaacgccagacccgccacccagagcggcagacacagcgtgagcgtggaggtgcagatgcagagacagagacaggaggagagagagagcagccagcaggcccagagacagtacagcagcctgcccagacagagcagaaagaacgccagcagcgtgagccaggacagctgggagcagaactacagccccggcgagggcttccagagcgccaaggagaaccccagatacagcagctaccagggcagcagaaacggctacctgggcggccacggcttcaacgccagagtgatgctggagacccaggagctgctgagacaggagcagagaagaaaggagcagcagatgaagaagcagccccccagcgagggccccagcaactacgacagctacaagaaggtgcaggaccccagctacgccccccccaagggccccttcagacaggacgtgccccccagccccagccaggtggccagactgaacagactgcagacccccgagaagggcagacccttctacagctag

SEQ ID NO: 71424 - protein, 1266 aa, Artificial Sequence
  derived and/or modified sequence
MKVTVCFGRTRVVVPCGDGHMKVFSLIQQAVTRYRKAIAKDPNYWIQVHRLEHGDGGILDLDDILCDVADDKDRLVAVFDEQDPHHGGDGTSASSTGTQSPEIFGSELGTNNVSAFQPYQATSEIEVTPSVLRANMPLHVRRSSDPALIGLSTSVSDSNFSSEEPSRKNPTRWSTTAGFLKQNTAGSPKTCDRKDEDGTEEDNSRVEPVGHADTGLEHIPNFSLDDMVKLVEVPNDGGPLGIHVVPFSARGGRTLGLLVKRLEKGGKAEHENLFRENDCIVRINDGDLRNRRFEQAQHMFRQAMRTPIIWFHVVPAANKEQYEQLSQSEKNNYYSSRFSPDSQYIDNRSVNSAGLHTVQRAPRLNHPPEQIDSHSRLPHSAHPSGKPPSAPASAPQNVFSTTVSSGYNTKKIGKRLNIQLKKGTEGLGFSITSRDVTIGGSAPIYVKNILPRGAAIQDGRLKAGDRLIEVNGVDLVGKSQEEVVSLLRSTKMEGTVSLLVFRQEDAFHPRELKAEDEDIVLTPDGTREFLTFEVPLNDSGSAGLGVSVKGNRSKENHADLGIFVKSIINGGAASKDGRLRVNDQLIAVNGESLLGKTNQDAMETLRRSMSTEGNKRGMIQLIVARRISKCNELKSPGSPPGPELPIETALDDRERRISHSLYSGIEGLDESPSRNAALSRIMGKYQLSPTVNMPQDDTVIIEDDRLPVLPPHLSDQSSSSSHDDVGFVTADAGTWAKAAISDSADCSLSPDVDPVLAFQREGFGRQIADETKLNTVDDQKAGSPSRDVGPSLGLKKSSSLESLQTAVAEVTLNGDIPFHRPRPRIIRGRGCNESFRAAIDKSYDKPAVDDDDEGMETLEEDTEESSRSGRESVSTASDQPSHSLERQMNGNQEKGDKTDRKKDKTGKEKKKDRDKEKDKMKAKKGMLKGLGDMFRFGKHRKDDKIEKTGKIKIQESFTSEEERIRMKQEQERIQAKTREFRERQARERDYAEIQDFHRTFGCDDELMYGGVSSYEGSMALNARPQSPREGHMMDALYAQVKKPRNSKPSPVDSNRSTPSNHDRIQRLRQEFQQAKQDEDVEDRRRTYSFEQPWPNARPATQSGRHSVSVEVQMQRQRQEERESSQQAQRQYSSLPRQSRKNASSVSQDSWEQNYSPGEGFQSAKENPRYSSYQGSRNGYLGGHGFNARVMLETQELLRQEQRRKEQQMKKQPPSEGPSNYDSYKKVQDPSYAPPKGPFRQDVPPSPSQVARLNRLQTPEKGRPFYS

SEQ ID NO: 71425 - DNA, 3801 bp, Artificial Sequence
  derived and/or modified sequence
atgaaggtaaccgtgtgttttggacgtactcgggtggtggtgccctgcggcgacggccacatgaaagtcttttcactgattcagcaagcggtcacccggtataggaaggccatcgcaaaggatccaaactactggatacaggttcaccgcctggaacatggtgatggggggatcctggatttagatgacattctgtgcgatgtggcagacgacaaggataggctggttgcagtgttcgacgagcaggatcctcaccatggaggggacggcacaagcgcttccagtactggcacgcagtcccccgagattttcggtagcgagcttgggactaataacgtgtcagcatttcagccgtaccaggctacttccgaaatagaagtgaccccaagcgtcctgagagccaacatgccgctccatgtccgtcggtcgagcgatccagcgctcatcggcttatcaacctctgtgagtgactccaacttctctagcgaggagccgtctcgaaaaaatccgactcggtggtcaacgactgctggctttctgaagcagaacactgccggcagtccaaaaacttgtgacagaaaggatgaggacggcactgaagaggataattcacgggtagagcccgtaggacatgctgacacaggcttggagcatatccccaacttctccctggacgatatggttaaactcgtagaagttccaaatgacgggggcccccttgggattcacgtggtcccattctcagcccgcggggggcgcactctgggcctgctcgttaagagactcgagaaggggggtaaggcggagcatgaaaatcttttccgcgagaacgactgcatcgttcgcatcaatgatggggatctgaggaataggaggtttgagcaagcccaacacatgttccggcaggctatgcgaacaccgataatatggttccacgttgtgcctgcagccaacaaagaacagtacgagcagctgtcccagtccgagaagaataactattatagctcccgcttttctcctgacagccaatacatcgacaacaggtctgtaaactccgcagggctacacaccgttcagcgagcccctaggcttaatcatcctccagagcagatcgacagccactcacgactccctcactcagcacacccgagcgggaagcctccgtctgctcctgcttccgcaccccagaatgtgtttagcacaacagtcagcagcggctataacaccaagaagataggaaagcggttgaatattcaactcaaaaagggcacagagggcctgggctttagcattacatcgcgtgacgtgactattggaggcagcgcacctatttatgtgaaaaatattctgccacgaggagccgctattcaggacggaaggctcaaagccggcgatcgtctcattgaagtgaatggagtggacctggtcggcaaaagccaggaggaagtagtctctctgctcaggagcactaagatggagggaactgtgtcgctgttggtgttcagacaggaagatgccttccaccctcgcgaattaaaggctgaggatgaggacatagtcctgacacccgacggcacccgtgaattcttaacgtttgaagtgcctctcaacgatagcgggagcgctgggttaggagtatcagttaaaggaaaccgatccaaagagaaccatgcagatctgggaatcttcgtgaaatctatcataaacggtggggctgccagtaaggatgggaggctccgtgtcaatgaccagctgatagcggtcaatggcgaatctctgcttggtaagacaaatcaggatgccatggaaaccttgaggaggtcaatgagcaccgagggaaataaaagggggatgatccagttgatagtggcacgccggatcagcaaatgcaacgagcttaagtccccgggcagtccaccggggccggagctgccaatagaaacagccctcgacgacagggagagacggatttctcatagcctctattcagggatcgagggcctggatgagtccccctcccggaatgctgcgttgagccggataatgggtaaataccagttatccccaacagtaaacatgcctcaggatgatacagtcatcatcgaggacgataggcttccggttctgcctccccacttgtctgatcagtccagcagctccagccacgatgacgttggttttgtaacagccgatgccggcacttgggcaaaggcagctatctcagatagcgccgattgttcgttgtccccggacgtggaccccgtgctagctttccagcgcgagggtttcggccggcagattgccgatgagaccaaactgaatacagtcgacgaccagaaggctggctcaccttccagggatgtaggaccttcgttgggcctgaaaaagtcaagttcactggaatctctgcagacagcagtggccgaggtgacgttgaacggcgatataccatttcacaggccgcgtcctcgcatcatccgggggcgaggctgcaatgagtccttccgggcggccatcgataaatcatacgataagcctgccgtcgacgacgatgacgaggggatggagaccctggaggaagacaccgaggagagttcccgcagcggccgggagtcagtgtccacagcaagtgatcaacccagtcattccctggaaagacagatgaacggcaaccaagagaaaggggacaaaacagatagaaagaaggataagacaggaaaagaaaagaagaaggatcgggataaagagaaggacaagatgaaagccaaaaagggcatgctcaagggcctcggggacatgttcaggttcggcaaacaccgcaaggacgacaaaattgagaagacaggtaaaattaaaatacaggagtccttcacctcggaggaagaaagaatcagaatgaaacaggaacaagaacggatacaagcaaaaacacgtgaattcagagagcggcaagcccgggagcgagactacgccgagattcaggatttccatcgaacttttggctgtgatgatgaactgatgtatggcggagtgtcatcgtatgaggggagcatggctttaaacgctagaccccagtcccctcgggagggacatatgatggatgctctatatgcccaggtaaagaaaccacggaacagcaagccttcacccgttgacagcaaccggagcacgccatcaaaccacgatcggatccagagactcaggcaggagttccagcaggctaaacaggacgaggatgtcgaggaccgaagacgaacgtattcctttgaacaaccttggcccaatgctaggcccgctactcagagcggtagacactccgttagcgtggaggtccagatgcagcgacagcgtcaagaggaaagagagagctcacagcaagcacagcgtcagtattcttctctgcctaggcagtctaggaagaatgcaagcagtgtaagtcaggatagttgggagcagaattactcccctggagaaggtttccagagtgcgaaggagaacccaaggtatagtagttatcaaggtagtcgtaacgggtacctaggcggccatggatttaacgcacgggtcatgctagaaacacaggaactgttgcgccaggagcagcggcgcaaagagcaacagatgaaaaagcagccaccctcagagggtccctctaattatgatagctataagaaggtacaagatccatcttacgccccacctaaaggaccatttaggcaagacgtgccacctagcccatcacaggtggccaggttgaacaggcttcagactcccgaaaagggaaggcctttctactcttag

SEQ ID NO: 71426 - DNA, 3801 bp, Artificial Sequence
  derived and/or modified sequence
atgaaggtgacagtgtgctttggaagaaccagggtggtggtgccctgtggagatggccacatgaaggtgttcagcctcatccagcaggccgtgacccgctacaggaaggccatcgccaaggaccccaactactggatccaggtgcaccggctggagcacggagatggcggcatcctggacctggatgacatcctgtgtgatgtggctgatgacaaggaccggctggtggccgtgtttgatgagcaggacccccaccacggcggagatggcaccagcgccagcagcacaggcacccagagccctgagatcttcggcagcgagctgggcaccaacaacgtgtctgccttccagccctaccaggccaccagcgagattgaggtgacccccagcgtgctgcgggccaacatgcccctgcacgtgagaagaagcagtgaccctgccctgattggcctgagcacctctgtgtctgacagcaacttcagcagcgaggagcccagcaggaagaaccccacccgctggagcaccacagctggcttcctgaagcagaacacagctggcagccccaagacctgtgacaggaaggatgaagatggaacagaggaggacaacagccgggtggagcctgtgggccacgccgacaccggcctggagcacatccccaacttcagcctggatgacatggtgaagctggtggaggtgcccaatgatggcggccccctgggcatccacgtggtgcccttcagcgcccggggcggccgcaccctgggcctgctggtgaagaggctggagaagggcggcaaggccgagcatgaaaatctcttccgggagaatgactgcatcgtgcgcatcaatgatggagacctgaggaacagaagatttgagcaggcccagcacatgttccggcaggccatgaggacccccatcatctggttccacgtggtgcctgctgccaacaaggagcagtatgagcagctgagccagagcgagaagaacaactactacagcagccgcttctccccagacagccagtacatcgacaacagatctgtgaacagcgctggcctgcacacagtgcagagggccccccggctgaaccaccccccagagcagattgacagccacagccggctgccccacagcgcccaccccagcggcaagcccccatctgccccagccagcgccccccagaatgtgttcagcaccaccgtgagcagcggctacaacaccaagaagattggcaagaggctgaacatccagctgaagaagggcacagagggcctgggcttcagcatcaccagcagagatgtgaccatcggcggcagcgcccccatctacgtgaagaacatcctgcccaggggggccgccatccaggacggccgcctgaaggccggggacaggctcatcgaggtgaatggagtggacctggtgggcaagagccaggaggaggtggtgtccctgctgcggagcaccaagatggagggcaccgtgtccctgctggtgttccggcaggaggatgccttccacccccgggagctgaaggcagaagatgaagatattgtgctgaccccagatggcacccgggagttcctgacctttgaggtgcccctgaatgattctggcagcgctggcctgggcgtgtctgtgaagggcaacagaagcaaagaaaatcatgctgacctgggcatctttgtgaagagcatcatcaatggaggagctgccagcaaggatggccgcctgcgggtgaatgaccagctgattgctgtgaatggagagagcctgctgggcaagaccaaccaggatgccatggagaccctgcggcgctccatgagcacagagggcaacaagaggggcatgatccagctgattgtggcccggcgcatcagcaaatgtaatgagctgaagagccctggcagccccccaggccctgagctgcccatcgagacagccctggatgaccgggagcggcgcatcagccacagcctgtacagcggcatcgagggcctggatgagagccccagcagaaatgctgccctgagccgcatcatgggcaagtaccagctgagccccaccgtgaacatgccccaggatgacaccgtcatcattgaagatgaccggctgcctgtgctgcccccccacctgagtgaccagagcagcagcagcagccatgatgatgtgggctttgtgacagcagatgctggcacctgggccaaggccgccatcagtgacagcgctgactgcagcctgagcccagatgtggaccctgtgctggccttccagcgggagggcttcggccggcagattgctgatgagaccaagctgaacacagtggatgaccagaaggccggcagccccagcagagatgtgggccccagcctgggcctgaagaagagcagcagcctggagagcctgcagacagctgtggccgaggtgaccctgaatggagacatccccttccaccggccccggccccgcatcatccggggccggggctgcaatgaaagcttccgggccgccatcgacaagagctatgacaagccagctgtggatgatgatgatgagggcatggagaccctggaggaggacacagaggagagcagccgcagcggccgggagagcgtgtccacagccagtgaccagcccagccacagcctggagcggcagatgaatggaaaccaggagaagggggacaagacagacaggaagaaggacaagacaggcaaggagaagaagaaggaccgggacaaggagaaggacaagatgaaggccaagaagggcatgctgaagggcctgggggacatgttccgctttgggaagcacaggaaggatgacaagattgagaagacaggcaagatcaagatccaggagagcttcaccagcgaggaggagcgcatccgcatgaagcaggagcaggagcgcatccaggccaagacccgggagttccgggagcggcaggcccgggagcgggactatgcagagatccaggacttccacaggaccttcggctgtgatgatgagctgatgtatggaggagtgtcctcctatgagggctccatggccctgaatgcccggccccagagcccccgggagggccacatgatggatgccctgtatgcccaggtgaagaagcccaggaacagcaagcccagccctgtggacagcaacagaagcacccccagcaaccacgaccgcatccagaggctgcggcaggagttccagcaggccaagcaggatgaagatgtggaggacagaagaaggacctacagctttgagcagccctggcccaatgcccggcctgccacccagagcggccgccacagcgtgtctgtggaggtgcagatgcagaggcagaggcaggaggagcgggagagcagccagcaggcccagaggcagtacagcagcctgccccggcagagcaggaagaatgccagctctgtgtcccaggacagctgggagcagaactacagccctggagagggcttccagagcgccaaggagaacccccgctacagcagctaccagggcagcagaaatggctacctgggcggccacggcttcaatgcccgggtgatgctggagacccaggagctgctgcggcaggagcagaggaggaaggagcagcagatgaagaagcagccccccagcgagggccccagcaactatgacagctacaagaaggtgcaggaccccagctatgccccacccaagggccccttccggcaggatgtgccccccagccccagccaggtggcccggctgaaccggctgcagaccccagagaagggccggcccttctacagctag

SEQ ID NO: 71427 - DNA, 3801 bp, Artificial Sequence
  derived and/or modified sequence
atgaaggtgaccgtgtgcttcggccggacccgggtggtggtgccctgtggcgacggtcatatgaaagtgttctccctcatacagcaggctgtcacccgttaccgaaaagctatagccaaagatcctaattactggatccaggtacaccgtctggaacatggagatgggggtatcctcgacctggatgacattctatgcgatgtggctgacgataaagacagactcgttgcagtgtttgacgagcaggacccccaccatggaggcgacggtaccagtgcttctagcaccgggacccagtctcctgagatctttggcagcgaactggggacaaataatgtcagtgccttccagccataccaggcaacatccgagatcgaggtgacacccagtgtgctgagagctaatatgcccttgcatgtacggagaagttctgaccctgcgctgatcgggctctctacctccgtgtccgattcgaacttcagtagcgaggaaccctctcgcaaaaacccaactagatggtccacaacagcaggattcctgaagcaaaatactgccggaagcccaaagacctgcgatcggaaagacgaagacgggactgaagaggacaacagcagagtggagcccgtgggtcacgcagacaccggcctggagcatatccccaacttcagtctcgacgacatggtgaagctggtcgaagtgcctaacgatggcggtcctctcggcatccatgtagtgcccttcagcgcccgcgggggtcgcaccttaggcctcctcgttaagcgtcttgaaaaagggggtaaggcggaacatgagaaccttttcagagagaatgactgtattgtgaggattaacgacggcgatctgcgcaatcggcgcttcgaacaggctcagcatatgttcaggcaggccatgagaactcccattatttggtttcatgtggtcccggccgccaataaagagcagtatgagcagctgtctcaaagcgaaaaaaataattattacagcagccgcttctcacctgattcacagtacatagataataggagcgttaactcggctgggcttcatacggtgcaaagagcgccccgccttaatcaccctcccgagcaaattgattcccactcccggcttcctcattccgcacatccttctggcaaacctccatctgctccagcgtctgcaccccagaacgtcttctccaccaccgtctctagcggctataacacaaaaaaaattgggaaaagactcaatattcagttgaagaaaggcacggagggcctcggattctccattacttcccgtgatgtgacaatagggggctccgcacccatctacgtcaaaaatattctccctcgcggcgcagcaattcaggacgggcgattgaaagctggagaccggctgattgaggttaatggcgtcgacctggttggcaagtcccaagaagaggtcgtgtctctgctaagaagcacaaaaatggaggggacagtctctctgctggtcttccgccaggaggatgccttccacccacgcgagctcaaagccgaggatgaagatattgtcctcaccccagacggcactagggaatttttaacattcgaagttccactgaacgattccggctctgccgggctaggcgtatctgttaagggtaatcgctcgaaggagaaccacgctgacctggggatctttgtgaagagcattatcaatggaggcgcagccagtaaggatggccgcctgagagtaaacgaccagctgatcgcagtaaacggtgaatcattgctggggaagacaaatcaggatgctatggaaactctgaggagaagtatgtccaccgaaggcaacaagcgaggcatgattcaactgattgtggcccgacgcatctcaaaatgcaatgagcttaaatcgcccggatctccaccgggccccgagctgcccattgagaccgccctggatgaccgggaaagacggatctcacattccctttatagtggtattgagggcttagatgaaagtccatctaggaacgccgcccttagtcgaatcatgggaaagtatcaactatcccctacagtcaatatgccccaggacgatacagtcattattgaggacgaccgtctgcccgtgctgcccccacacttgtcagatcagagctcgtcaagtagtcacgatgatgtcggcttcgtaaccgcagatgccggcacctgggctaaggctgctatttcggacagtgctgattgctcactgagtcctgatgtcgatcctgtgctcgctttccagagagaggggtttggaaggcagattgcagatgaaaccaaactcaataccgtggacgatcagaaggcagggtctccaagtagggatgtcggaccgtccttggggctgaaaaaatcgtcttccctggagagtctccagactgctgtggctgaagtaacactcaatggggatatcccttttcaccggccgcgtcctcggatcattcgagggagagggtgcaatgaaagcttcagagcagctatcgataagtcatacgataaaccagccgtggacgacgatgatgaaggaatggagacattagaggaggatacagaagagagcagccgttcggggcgagagtctgtttccacagcttccgatcaaccctcccactccctcgagcgtcaaatgaacggaaaccaggagaagggggataaaactgatagaaaaaaggacaaaaccggaaaggagaagaagaaggaccgagataaggaaaaggacaaaatgaaagctaagaagggcatgctgaaaggcctcggcgacatgttcagatttggaaaacaccgaaaggatgataaaatcgagaaaacaggaaaaatcaagattcaagagagtttcacttctgaagaagagagaatcagaatgaaacaggagcaggagagaatacaagccaaaacacgtgagtttcgggagcgccaagcaagagagagagactacgccgaaatccaggattttcataggacgttcggttgcgacgatgagcttatgtatggtggggtttcctcctatgaagggagcatggcactcaacgcgcgaccacagtctcctagagagggtcacatgatggatgctttgtatgcccaggtcaagaagccgcgtaattcgaagccctcacccgtggactcaaacaggagcacaccatctaaccacgacaggattcagcgcctacggcaggaatttcagcaagctaagcaggacgaagacgttgaggataggcgaagaacttacagttttgaacagccatggcctaatgcccggcctgccacccagagcggccggcactctgtcagtgtcgaagtccagatgcaacgacagcgccaggaagagcgagaatctagccagcaggcccaaagacagtattcatccctgccgcggcaaagccgtaaaaatgctagtagcgtttcccaggacagttgggaacaaaactacagcccaggcgagggttttcagagcgcaaaggagaaccctagatacagctcatatcagggctcccgtaacggatacctaggaggccatggctttaatgcccgggtgatgctggagacacaggagctgctgagacaggaacagcggcgtaaagaacagcaaatgaaaaagcaacctccctctgaggggccctcaaattacgattcctacaagaaagttcaagatccttcctatgccccccctaagggcccattcagacaagacgtgccaccttcacctagccaagtggcacggcttaacagactgcaaacacccgaaaaagggagacccttctacagctag

SEQ ID NO: 71428 - DNA, 5740 bp, Artificial Sequence
  derived and/or modified sequence
cccagcggccccgagcgagcgccagcgccacacagccccgggcagccgccggcgagcgcgccgcgacgccgaacaggtggccggaggctgcgggcgccgcggcggggagaggcgaggcaagccccgggcgaagcgaggcgaggcgagggcggccgggccgggcatgcgagctgagcggccccccggcgtcgccgccgcctgcccgcgcccctagccgcccgcgcgcccgagtccccagcggctcctccgcgcccagcgtcctcggtcccggcctcggctgctccggctgcgctcggcgaggggcgcgggcccgcccgcggcggcggcggcatgaaagtgaccgtgtgcttcggacggacccgggtggtcgtgccgtgcggggacggccacatgaaagttttcagcctcatccagcaggcggtgacccgctaccggaaggccatcgccaaggatccaaactactggatacaggtgcatcgcttggaacatggagatggaggaatactagaccttgatgacattctttgtgatgtagcagacgataaagacagactggtagcagtgtttgatgagcaggatccacatcacggaggtgatggcaccagtgccagttccacgggtacccagagcccagagatatttggtagtgagcttggcaccaacaatgtctcagcctttcagccttaccaagcaacaagtgaaattgaggtcacaccttcagtccttcgagcaaatatgcctcttcatgttcgacgcagtagtgacccagctctaattggcctctccacttctgtcagtgatagtaatttttcctctgaagagccttcaaggaaaaatcccacacgctggtcaacaacagctggcttcctcaagcagaacactgctgggagtcctaaaacctgcgacaggaaggatgaggatgggacagaagaggataacagtcgtgttgaacctgttggacatgctgacacgggtttggagcatatacccaacttttctctggatgatatggtaaagctcgtagaagtccccaacgatggagggcctctgggaatccacgtagtgcctttcagtgctcgaggcggcagaaccctggggttattagtaaaacgattggagaaaggtggtaaagctgaacatgaaaatctttttcgtgagaatgattgcattgtcaggattaatgatggcgaccttcgaaatagaagatttgaacaagcacaacatatgtttcgccaagccatgcgtacacccatcatttggttccatgtggttcctgcagcaaataaagagcagtatgaacaactatcccaaagtgagaagaacaattactattcaagccgttttagccctgacagccagtatattgacaacaggagtgtgaacagtgcagggcttcacacggtgcagagagcaccccgactgaaccacccgcctgagcagatagactctcactcaagactacctcatagcgcacacccctcgggaaaaccaccatccgctccagcctcggcacctcagaatgtatttagtacgactgtaagcagtggttataacaccaaaaaaataggcaagaggcttaatatccagcttaagaaaggtacagaaggtttgggattcagcatcacttccagagatgtaacaataggtggctcagctccaatctatgtgaaaaacattctcccccggggggcggccattcaggatggccgacttaaggcaggagacagacttatagaggtaaatggagtagatttagtgggcaaatcccaagaggaagttgtttcgctgttgagaagcaccaagatggaaggaactgtgagccttctggtctttcgccaggaagacgccttccacccaagggaactgaaagcagaagatgaggatattgttcttacacctgatggcaccagggaatttctgacatttgaagtcccacttaatgattcaggatctgcaggccttggtgtcagtgtcaaaggtaaccggtcaaaagagaaccacgcagatttgggaatctttgtcaagtccattattaatggaggagcagcatctaaagatggaaggcttcgggtgaatgatcaactgatagcagtaaatggagaatccctgttgggcaagacaaaccaagatgccatggaaaccctaagaaggtctatgtctactgaaggcaataaacgaggaatgatccagcttattgttgcaaggagaataagcaagtgcaatgagctgaagtcacctgggagcccccctggacctgagctgcccattgaaacagcgttggatgatagagaacgaagaatttcccattccctctacagtgggattgaggggcttgatgaatcgcccagcagaaatgctgccctcagtaggataatgggtaaataccagctgtcccctacagtgaatatgccccaagatgacactgtcattatagaagatgacaggttgccagtgcttcctccacatctctctgaccagtcctcttccagctcccatgatgatgtggggtttgtgacggcagatgctggtacttgggccaaggctgcaatcagtgattcagccgactgctctttgagtccagatgttgatccagttcttgcttttcaacgagaaggatttggacgtcagatagctgacgagactaaactcaatacagtggatgaccagaaagcaggttctcccagcagagatgtgggtccttccctgggtctgaagaagtcaagctcgttggagagtctgcagaccgcagttgccgaggtgactttgaatggggatattcctttccatcgtccacggccgcggataatcagaggcaggggatgcaatgagagcttcagagctgccatcgacaaatcttatgataaacccgcggtagatgatgatgatgaaggcatggagaccttggaagaagacacagaagaaagttcaagatcagggagagagtctgtatccacagccagtgatcagccttcccactctctggagagacaaatgaatggaaaccaagagaaaggtgataagactgatagaaaaaaggataaaactggaaaagaaaagaagaaagatagagataaggagaaggataaaatgaaagccaagaagggaatgctgaagggcttgggagacatgttcaggtttggcaaacatcgaaaagatgacaagattgagaaaacgggtaaaataaaaatacaggaatcctttacatcagaagaggagaggatacgaatgaagcaggagcaggagaggattcaagccaaaactcgagaatttagggaacgacaagctcgagagcgtgactatgctgaaattcaagattttcatcggacatttggctgtgatgatgagttaatgtatgggggagtttcttcttatgaaggttccatggctctcaacgctagacctcagagcccacgagaagggcatatgatggatgctttgtatgcccaagtcaagaagccgcggaattccaaaccctcacctgtagacagtaacagatcaactcctagcaatcatgatcggatacagcgtctgaggcaagaatttcagcaagcaaagcaagatgaagatgtagaagatcgtcggcggacctatagttttgagcaaccctggccgaacgcacggccggcgacgcagagcgggcgacactcggtgtccgtggaggtgcagatgcagcggcagcggcaggaggagcgcgagagctcccagcaggcccagcgccagtacagctctctgcctcggcaaagcaggaaaaatgccagctcggtctcccaggactcttgggagcagaactactcccctggggaaggcttccagagtgccaaagagaaccccaggtactccagctaccaaggctccaggaacggctacctgggaggacatggcttcaacgccagggtcatgctggaaactcaggagctccttcgccaggaacagaggcggaaggagcagcagatgaagaagcagcctccttccgaggggcccagcaactatgactcgtataagaaagtccaggaccccagttacgcccctcccaaggggcccttccggcaagatgtgcccccctccccttctcaggttgcgaggctgaacagacttcagactcctgagaaagggaggcccttctattcctgagcacgcaaataacggatgcttcatgtcgcgcaataaaagacattttcctatgaagacttgtattttgggagtttttttaaaacctcgatggtactatggagtatttctgttgttggtatcagtgcctttaagcggtgtaggcaaagaaatggaaggccttaatgtctttgccactatgtctcaagtgtctgtttcatggaaggatttcccaccctgtgacaatcatctgtttgaggtgttcatatgctctgcgcctctccacagtaccaggaatctcggccctactcatgagttgtccgcggcttggttgtaacatccctgcaccacttgcagtgacaaattcacctgaagtggaggatgacgtgcggccctgtttctccctctaagttctcttagctatgggatgacatcttagtctctggtggaggaaaagtgggcgacatacaccaaaaattggggctttctggtacttcacagcacagccatttgtcgtactttgtcatcactgtggttttctctttcctttctcagctctttgtgacgggagagtcggtcatcctattacagaagctaagccatagtccaacattgtttggtcaccatgggggtccttttgtaactgccttatgactcaacattaccaataaagtgatgatcctggtctgcgtttatacatacgcttgttcggtcctgttcctgacacgtgggttgagtcaccacagctctgtgtggggaacgtgggagacaggagtggctcctgccgggggaagctgggcctgccattggccctgtgtctatcatgaggggagagctaagaaagaaattctcctaggaagagctcatggcccagtacatcctagtaattattttaattagtttttgttctgacagcttgtcaggaagggcacagaatgggacagagataaaccagacagtcattttgatctgctctctacggtttttcaagtcagaggcaattgatgcttgtctaatgcatccacacactgcatgtctgactggcgatgccgcgctcctaagtagttctgccatgaaacataaaagacaaaggaaaagccgttacacatcacacagagaacattttcgggtcccacagcggtggtggcaggaagctcactctcgcgtcagtattagagtgtgtgtgtgggtctcggggatctcggtggctcccatcttccttcattgttctgaacatcctgtattgtaaaccatggctggggtgctaaagtgcctgtgaatcccgatgtggaaaaagctggaggtgaaagctcagcataccatgtatttactttaaaaacagaaaaaaagacatgtatggatatgtctattttttttttattggcacattgtatttttgtgttgacttgtttttagaaatgatgtgtccacacacgtacccgtgtctcttctgcatttctgtgtcatggttctgtttcttaatcacgtgcggcggtgtctaagtggtgttaccagtgtacgcgcagtgaccttggatgacagtggctctttctcacagcctcccctgagctgtgagaaacagctttctctgtacatatgcaactcctaataaaaggcatatttcttcctgttc

SEQ ID NO: 71429 - DNA, 3801 bp, Artificial Sequence
  derived and/or modified sequence
atgaaagtgacagtctgtttcggtcgtactcgagttgtcgtcccctgcggggacggtcacatgaaggtattttcccttattcagcaggccgtgaccagataccgcaaagcgatcgcgaaagacccgaattactggatccaggtccatcggctggagcacggggacggcggtattctggacctggatgacatcttatgcgatgtggctgacgacaaagataggctagtggccgtgtttgacgagcaagacccacaccacggtggtgatgggacatccgcctcatcaactggaacccagtctccagaaatatttggaagcgagctggggacaaacaatgttagtgccttccagccctaccaggctacgagtgagatcgaagtcacacccagcgtgctcagggctaacatgcccctgcacgtcagaaggagttccgatcccgcactgatcggcctgtcaacaagcgtgtctgatagtaacttctcaagtgaagagccctctcgcaaaaaccctaccaggtggagcaccaccgctggatttctcaagcaaaataccgccggaagccccaagacgtgtgatcggaaagatgaggacggaacagaagaggacaatagtcgtgtagagcctgtgggacatgctgacaccggattggagcatatacctaacttctcgctggatgatatggtgaagctggttgaagtgcccaacgacggaggccctctcggtatccacgtggtgcccttcagcgcaagaggcggaaggaccctcgggctgctggtgaaacgtctggagaaaggcggaaaggccgagcacgaaaatcttttccgcgagaacgattgtatcgtgcggatcaacgacggcgatctcagaaaccgtcgattcgagcaggcacagcatatgttcaggcaggcaatgaggaccccaatcatctggttccatgtggtaccagcagcaaataaggaacagtacgagcagctgtcccaatcagaaaagaataactattactcatcccggttttcaccagacagccaatacatagacaatcggtccgtaaacagcgctggtctgcacaccgttcaaagggccccacggctgaaccacccgccagaacagatagactcccacagccggctgcctcattctgctcatccctccgggaaaccacccagcgcacctgcttctgccccacaaaatgtgtttagcacaacagtgtcttctggatacaacaccaagaaaatcggcaagaggctgaacattcagttgaaaaagggtaccgagggactcggtttctcgataacgtctcgggatgtgacaatcggcggttctgccccaatttacgtgaagaacatcttaccacggggtgccgcaattcaggacgggagattaaaagctggtgacaggctgatagaagttaacggcgtggaccttgtgggtaagagccaagaggaggtggtgtcacttctgcgctctacaaagatggagggaactgtgtccttgctcgtatttagacaggaggacgcgttccacccgagggagctcaaagcagaggacgaggacatcgtcctcactcccgacggcaccagggagttccttaccttcgaggttcctctgaatgatagcgggtctgctggcctaggagtgagtgtcaaaggcaatcgatctaaggagaatcatgctgatctggggattttcgtgaaaagcattattaacgggggagcggctagcaaggacggcagactgcgggtgaatgatcagctgattgctgtgaatggtgagtcactcctcggtaaaaccaaccaagacgccatggaaacgctgaggagaagcatgtccaccgaaggcaataagagaggaatgattcagctcattgtggccaggcgcatctcgaaatgtaacgagctgaaatctccagggtcgcccccaggcccagaactgcccatcgagactgcgcttgatgaccgtgagcggaggatttctcatagtctgtatagtggcatcgaaggactcgacgagtccccatcacgcaacgcagccctctcccggatcatgggcaaataccagttatcccccactgtcaatatgccgcaagacgataccgttataatcgaagacgatcgtctgcccgtgctcccacctcacctgtcggatcagagctcatctagcagccatgatgacgtgggcttcgtgaccgccgacgcgggtacttgggccaaggcagctatatcagatagcgccgattgttctctctcgccggacgtggaccccgtactggccttccagcgcgaggggtttggcagacagattgccgatgaaacaaagctgaacacagttgacgaccaaaaggcaggttccccgtcccgggacgttggaccctcattgggcctgaagaaaagcagctccctggaaagtctccagactgccgtcgcagaggtgacccttaatggagacataccatttcatcgacctaggccaaggatcatacggggacggggttgcaatgaaagctttcgggctgctatcgacaagagctatgacaaaccagccgtggacgacgacgacgagggaatggagactctggaggaggatactgaagagagctcgcgaagtggtcgggaaagtgtgagcactgccagcgatcaaccgagtcactctctcgagaggcagatgaatggcaaccaggaaaagggggacaaaaccgatcggaagaaggacaaaacaggaaaggagaagaagaaagatagagacaaggaaaaagacaagatgaaagccaaaaagggtatgctgaaggggctgggtgatatgtttaggtttgggaaacaccgaaaggatgacaagatcgagaagactggcaaaatcaagatccaagagtcatttacaagtgaagaggaacggatcaggatgaaacaagagcaagagcgtatccaggccaagacacgagaatttagagagcgccaggctagggagcgggactacgccgagatacaagatttccacagaacttttggctgcgatgacgaactgatgtacggtggcgtgtccagctacgagggcagcatggctctgaacgcacgccctcagtctccacgcgaaggccatatgatggatgccctgtacgcccaggtgaagaagccaagaaacagcaagcccagccccgtggattccaaccgctcgacacccagcaatcacgacaggatacagcgcctacgtcaagaattccagcaggctaaacaagatgaggatgtggaagataggcgacggacctattccttcgaacagccatggccaaacgcacggccagccactcagtcaggtcggcattccgtgtccgtggaagttcagatgcaacgacagaggcaagaagagcgggaaagttcacaacaggcccagcggcagtactcttcactccctcggcagagtcggaaaaatgccagcagtgtttcacaggattcttgggagcaaaattacagtcctggggagggtttccaatctgcaaaggagaacccccgatattcttcttaccagggttctcgcaacggatatcttggcggtcacggctttaatgcccgtgtgatgctggagacccaggaactccttaggcaggagcagcggaggaaagagcagcagatgaaaaaacagccgccaagcgagggaccatcaaactacgactcttataagaaagtgcaagatccttcttacgctccaccaaaaggcccattcaggcaagacgtgcctccatcaccttcccaagttgcaaggctcaatcggctccagactcctgagaagggaagacccttctactcatag

SEQ ID NO: 71430 - DNA, 3801 bp, Artificial Sequence
  derived and/or modified sequence
atgaaggtgaccgtgtgcttcggcagaaccagagtggtggtgccctgcggcgacggccacatgaaggtgttcagcctgatccagcaggccgtgaccagatacagaaaggccatcgccaaggaccccaactactggatccaggtgcacagactggagcacggcgacggcggcatcctggacctggacgacatcctgtgcgacgtggccgacgacaaggacagactggtggccgtgttcgacgagcaggacccccaccacggcggcgacggcaccagcgccagcagcaccggcacccagagccccgagatcttcggcagcgagctgggcaccaacaacgtgagcgccttccagccctaccaggccaccagcgagatcgaggtgacccccagcgtgctgagagccaacatgcccctgcacgtgagaagaagcagcgaccccgccctgatcggcctgagcaccagcgtgagcgacagcaacttcagcagcgaggagcccagcagaaagaaccccaccagatggagcaccaccgccggcttcctgaagcagaacaccgccggcagccccaagacctgcgacagaaaggacgaggacggcaccgaggaggacaacagcagagtggagcccgtgggccacgccgacaccggcctggagcacatccccaacttcagcctggacgacatggtgaagctggtggaggtgcccaacgacggcggccccctgggcatccacgtggtgcccttcagcgccagaggcggcagaaccctgggcctgctggtgaagagactggagaagggcggcaaggccgagcacgagaacctgttcagagagaacgactgcatcgtgagaatcaacgacggcgacctgagaaacagaagattcgagcaggcccagcacatgttcagacaggccatgagaacccccatcatctggttccacgtggtgcccgccgccaacaaggagcagtacgagcagctgagccagagcgagaagaacaactactacagcagcagattcagccccgacagccagtacatcgacaacagaagcgtgaacagcgccggcctgcacaccgtgcagagagcccccagactgaaccacccccccgagcagatcgacagccacagcagactgccccacagcgcccaccccagcggcaagccccccagcgcccccgccagcgccccccagaacgtgttcagcaccaccgtgagcagcggctacaacaccaagaagatcggcaagagactgaacatccagctgaagaagggcaccgagggcctgggcttcagcatcaccagcagagacgtgaccatcggcggcagcgcccccatctacgtgaagaacatcctgcccagaggcgccgccatccaggacggcagactgaaggccggcgacagactgatcgaggtgaacggcgtggacctggtgggcaagagccaggaggaggtggtgagcctgctgagaagcaccaagatggagggcaccgtgagcctgctggtgttcagacaggaggacgccttccaccccagagagctgaaggccgaggacgaggacatcgtgctgacccccgacggcaccagagagttcctgaccttcgaggtgcccctgaacgacagcggcagcgccggcctgggcgtgagcgtgaagggcaacagaagcaaggagaaccacgccgacctgggcatcttcgtgaagagcatcatcaacggcggcgccgccagcaaggacggcagactgagagtgaacgaccagctgatcgccgtgaacggcgagagcctgctgggcaagaccaaccaggacgccatggagaccctgagaagaagcatgagcaccgagggcaacaagagaggcatgatccagctgatcgtggccagaagaatcagcaagtgcaacgagctgaagagccccggcagcccccccggccccgagctgcccatcgagaccgccctggacgacagagagagaagaatcagccacagcctgtacagcggcatcgagggcctggacgagagccccagcagaaacgccgccctgagcagaatcatgggcaagtaccagctgagccccaccgtgaacatgccccaggacgacaccgtgatcatcgaggacgacagactgcccgtgctgcccccccacctgagcgaccagagcagcagcagcagccacgacgacgtgggcttcgtgaccgccgacgccggcacctgggccaaggccgccatcagcgacagcgccgactgcagcctgagccccgacgtggaccccgtgctggccttccagagagagggcttcggcagacagatcgccgacgagaccaagctgaacaccgtggacgaccagaaggccggcagccccagcagagacgtgggccccagcctgggcctgaagaagagcagcagcctggagagcctgcagaccgccgtggccgaggtgaccctgaacggcgacatccccttccacagacccagacccagaatcatcagaggcagaggctgcaacgagagcttcagagccgccatcgacaagagctacgacaagcccgccgtggacgacgacgacgagggcatggagaccctggaggaggacaccgaggagagcagcagaagcggcagagagagcgtgagcaccgccagcgaccagcccagccacagcctggagagacagatgaacggcaaccaggagaagggcgacaagaccgacagaaagaaggacaagaccggcaaggagaagaagaaggacagagacaaggagaaggacaagatgaaggccaagaagggcatgctgaagggcctgggcgacatgttcagattcggcaagcacagaaaggacgacaagatcgagaagaccggcaagatcaagatccaggagagcttcaccagcgaggaggagagaatcagaatgaagcaggagcaggagagaatccaggccaagaccagagagttcagagagagacaggccagagagagagactacgccgagatccaggacttccacagaaccttcggctgcgacgacgagctgatgtacggcggcgtgagcagctacgagggcagcatggccctgaacgccagaccccagagccccagagagggccacatgatggacgccctgtacgcccaggtgaagaagcccagaaacagcaagcccagccccgtggacagcaacagaagcacccccagcaaccacgacagaatccagagactgagacaggagttccagcaggccaagcaggacgaggacgtggaggacagaagaagaacctacagcttcgagcagccctggcccaacgccagacccgccacccagagcggcagacacagcgtgagcgtggaggtgcagatgcagagacagagacaggaggagagagagagcagccagcaggcccagagacagtacagcagcctgcccagacagagcagaaagaacgccagcagcgtgagccaggacagctgggagcagaactacagccccggcgagggcttccagagcgccaaggagaaccccagatacagcagctaccagggcagcagaaacggctacctgggcggccacggcttcaacgccagagtgatgctggagacccaggagctgctgagacaggagcagagaagaaaggagcagcagatgaagaagcagccccccagcgagggccccagcaactacgacagctacaagaaggtgcaggaccccagctacgccccccccaagggccccttcagacaggacgtgccccccagccccagccaggtggccagactgaacagactgcagacccccgagaagggcagacccttctacagctag

SEQ ID NO: 71431 - protein, 1244 aa, Artificial Sequence
  derived and/or modified sequence
MKVTVCFGRTRVVVPCGDGHMKVFSLIQQAVTRYRKAIAKDPNYWIQVHRLEHGDGGILDLDDILCDVADDKDRLVAVFDEQDPHHGGDGTSASSTGTQSPEIFGSELGTNNVSAFQPYQATSEIEVTPSVLRANMPLHVRRSSDPALIGLSTSVSDSNFSSEEPSRKNPTRWSTTAGFLKQNTAGSPKTCDRKDEDGTEEDNSRVEPVGHADTGLEHIPNFSLDDMVKLVEVPNDGGPLGIHVVPFSARGGRTLGLLVKRLEKGGKAEHENLFRENDCIVRINDGDLRNRRFEQAQHMFRQAMRTPIIWFHVVPAANKEQYEQLSQSEKNNYYSSRFSPDSQYIDNRSVNSAGLHTVQRAPRLNHPPEQIDSHSRLPHSAHPSGKPPSAPASAPQNVFSTTVSSGYNTKKIGKRLNIQLKKGTEGLGFSITSRDVTIGGSAPIYVKNILPRGAAIQDGRLKAGDRLIEVNGVDLVGKSQEEVVSLLRSTKMEGTVSLLVFRQEDAFHPRELKAEDEDIVLTPDGTREFLTFEVPLNDSGSAGLGVSVKGNRSKENHADLGIFVKSIINGGAASKDGRLRVNDQLIAVNGESLLGKTNQDAMETLRRSMSTEGNKRGMIQLIVARRISKCNELKSPGSPPGPELPIETALDDRERRISHSLYSGIEGLDESPSRNAALSRIMGKYQLSPTVNMPQDDTVIIEDDRLPVLPPHLSDQSSSSSHDDVGFVTADAGTWAKAAISDSADCSLSPDVDPVLAFQREGFGRQSMSEKRTKQFSDASQLDFVKTRKSKSMDLGSSPSRDVGPSLGLKKSSSLESLQTAVAEVTLNGDIPFHRPRPRIIRGRGCNESFRAAIDKSYDKPAVDDDDEGMETLEEDTEESSRSGRESVSTASDQPSHSLERQMNGNQEKGDKTDRKKDKTGKEKKKDRDKEKDKMKAKKGMLKGLGDMFRIQAKTREFRERQARERDYAEIQDFHRTFGCDDELMYGGVSSYEGSMALNARPQSPREGHMMDALYAQVKKPRNSKPSPVDSNRSTPSNHDRIQRLRQEFQQAKQDEDVEDRRRTYSFEQPWPNARPATQSGRHSVSVEVQMQRQRQEERESSQQAQRQYSSLPRQSRKNASSVSQDSWEQNYSPGEGFQSAKENPRYSSYQGSRNGYLGGHGFNARVMLETQELLRQEQRRKEQQMKKQPPSEGPSNYDSYKKVQDPSYAPPKGPFRQDVPPSPSQVARLNRLQTPEKGRPFYS

SEQ ID NO: 71432 - DNA, 3735 bp, Artificial Sequence
  derived and/or modified sequence
atgaaagtcaccgtttgcttcggccggaccagggtcgtggttccgtgcggcgatggacacatgaaggtgtttagcctaatccagcaggccgtgacaaggtaccgaaaagcaatcgccaaggaccctaactactggatccaggtccaccggctcgaacacggagatggaggaattctggatctggatgatatcctgtgcgatgttgctgatgacaaagaccgtcttgtggcggtcttcgatgaacaggacccacatcatggtggcgacgggacaagcgcctcctccacaggaactcagtccccagagatatttggcagcgagctggggactaacaacgtctccgccttccagccatatcaggcgactagcgaaattgaagtcaccccatccgtattaagagcaaatatgccgctccacgtcagaaggagcagcgacccggcactgattggcttgtcgaccagcgtgtcagatagcaactttagttctgaggagcctagtcgcaagaatccgactcgctggtcgacgacagctggattccttaaacagaacaccgccggatcaccaaagacctgtgacaggaaggatgaagatggcacagaggaggataacagtcgtgttgagcctgtggggcacgccgacacggggctggagcacatccctaatttcagtctggacgatatggttaagctagtcgaggtgccgaacgatggtggtcctttaggaatacatgtcgtcccattcagcgccagaggcgggagaaccctcgggctgttagtgaagcgcctagagaagggcgggaaggcagagcacgaaaacctgtttagagagaatgattgcattgtgcggatcaatgacggggacttgaggaaccggcggttcgaacaagcccaacacatgttccggcaagccatgaggacccctatcatttggtttcatgtggtccctgccgcgaacaaagagcaatatgaacagctctcacagagtgaaaagaataactactacagtagtcgcttcagtcctgatagccagtatatcgacaaccgatctgttaactcagctgggctccacaccgtccagagggctccacgcctgaaccacccccccgaacagattgatagccatagccgccttcctcactccgctcatccgtctggtaaaccgccgtccgcccctgcaagtgccccacagaatgtgttctctacaaccgtgtcaagcgggtataatacaaagaagatcggaaagagactaaacattcagctcaaaaagggaacagagggcctggggttcagtataacaagcagagacgtgactatcgggggctccgctccaatctacgttaaaaacattcttccacgcggtgccgcgatccaagatggacgccttaaggctggagatagacttattgaggtaaacggtgtggatttagtgggaaagtctcaggaggaagtggtgtctctgctccgctctaccaaaatggaggggactgtgtcgctccttgtgtttagacaggaggacgctttccaccctagggaactgaaggcagaagatgaggacatagtcctgacacctgacggcactagagagtttctgacattcgaggtgcccctgaatgactctggctctgcaggattgggcgtgtcagttaagggaaatcggtccaaagaaaaccatgccgatttaggcatttttgtgaaatctatcattaatggcggagccgcatctaaggatggtcgactcagggtgaacgaccagctcatagccgttaatggcgagtcattgctcggcaaaaccaatcaggatgcgatggagactctaagacggagtatgagcaccgaggggaacaagcgtggcatgatacaattgatcgtggccagaaggatttcaaagtgtaacgaacttaaatcaccaggcagcccacctggcccagagcttccgatcgagactgcattggacgaccgtgaaaggcgaatctcgcattcgctttacagcggtatcgagggcttagacgagagtccaagccggaacgccgctcttagccggatcatggggaaatatcaattgtctcccacagtcaatatgccccaagatgacactgtaattattgaggacgatcgcctgcccgttttgccaccacatctttcagatcagtcatcctcctcctcgcatgatgacgtgggatttgtgacggcagatgctgggacttgggcaaaggccgccataagcgacagcgcagactgctcattaagcccagatgtggatccagtgctcgcatttcaacgtgaaggattcggaagacagagcatgtctgagaaacggactaaacaattcagtgatgctagccaacttgatttcgtaaagactagaaagtccaagagcatggacctgggttccagccccagccgggacgttggtccctcactgggattgaagaagtcgagctcactggaatcactgcagactgccgttgctgaggttaccctcaatggggacataccattccaccgacctcgtcccaggatcatccggggcaggggatgtaacgagagcttccgcgcagccattgataagtcatacgataagccagctgtggacgatgacgacgagggaatggaaactctcgaggaggacacagaggagtcctccagatcagggcgcgaatctgtctccaccgcctccgaccagccctcccacagtcttgagagacagatgaatggcaaccaagagaagggtgacaaaactgacaggaagaaagacaagacaggaaaggaaaagaagaaggaccgtgacaaggagaaggacaagatgaaagctaagaaagggatgctcaagggcctgggcgacatgttccgaattcaggcgaagaccagggagtttagggagcgacaggcccgggagcgtgattacgcagagattcaggactttcacaggacttttgggtgtgacgatgagctgatgtacggaggggtaagcagttacgagggctcaatggccctcaacgcaaggcctcagtcaccccgcgaaggacacatgatggacgctctgtacgctcaggtcaagaaaccacgcaattcaaaacccagtcctgttgattcaaaccggagcaccccatctaatcatgaccgcattcagcgactcagacaggagttccaacaggctaaacaggatgaagacgttgaggaccgccggcggacttattctttcgaacagccctggcccaatgcgaggcccgccacgcagagcggccgccactccgtgtctgtggaagtccaaatgcagagacaacggcaggaagaacgggagtcgtctcaacaggcgcagaggcagtactcgtcgctacctcggcagagcagaaagaacgcatcatccgtctcccaggacagctgggagcagaactactcccccggcgaaggctttcagtcggctaaagagaatccacggtattctagttatcaaggaagcagaaacgggtatctgggcgggcatggtttcaacgcacgtgtcatgctcgagacccaggagctgcttcgacaggagcaacgacgcaaggagcagcaaatgaaaaagcagccaccctcggaggggcccagtaactacgactcatacaaaaaggtgcaagatccaagctatgctccacccaagggtccttttagacaggacgtcccaccatcgccttcccaggtggctaggttaaatcggctccaaacacctgaaaaaggtcgccctttctacagctag

SEQ ID NO: 71433 - DNA, 3735 bp, Artificial Sequence
  derived and/or modified sequence
atgaaggtgacagtgtgctttggaagaaccagggtggtggtgccctgtggagatggccacatgaaggtgttcagcctcatccagcaggccgtgacccgctacaggaaggccatcgccaaggaccccaactactggatccaggtgcaccggctggagcacggagatggcggcatcctggacctggatgacatcctgtgtgatgtggctgatgacaaggaccggctggtggccgtgtttgatgagcaggacccccaccacggcggagatggcaccagcgccagcagcacaggcacccagagccctgagatcttcggcagcgagctgggcaccaacaacgtgtctgccttccagccctaccaggccaccagcgagattgaggtgacccccagcgtgctgcgggccaacatgcccctgcacgtgagaagaagcagtgaccctgccctgattggcctgagcacctctgtgtctgacagcaacttcagcagcgaggagcccagcaggaagaaccccacccgctggagcaccacagctggcttcctgaagcagaacacagctggcagccccaagacctgtgacaggaaggatgaagatggaacagaggaggacaacagccgggtggagcctgtgggccacgccgacaccggcctggagcacatccccaacttcagcctggatgacatggtgaagctggtggaggtgcccaatgatggcggccccctgggcatccacgtggtgcccttcagcgcccggggcggccgcaccctgggcctgctggtgaagaggctggagaagggcggcaaggccgagcatgaaaatctcttccgggagaatgactgcatcgtgcgcatcaatgatggagacctgaggaacagaagatttgagcaggcccagcacatgttccggcaggccatgaggacccccatcatctggttccacgtggtgcctgctgccaacaaggagcagtatgagcagctgagccagagcgagaagaacaactactacagcagccgcttctccccagacagccagtacatcgacaacagatctgtgaacagcgctggcctgcacacagtgcagagggccccccggctgaaccaccccccagagcagattgacagccacagccggctgccccacagcgcccaccccagcggcaagcccccatctgccccagccagcgccccccagaatgtgttcagcaccaccgtgagcagcggctacaacaccaagaagattggcaagaggctgaacatccagctgaagaagggcacagagggcctgggcttcagcatcaccagcagagatgtgaccatcggcggcagcgcccccatctacgtgaagaacatcctgcccaggggggccgccatccaggacggccgcctgaaggccggggacaggctcatcgaggtgaatggagtggacctggtgggcaagagccaggaggaggtggtgtccctgctgcggagcaccaagatggagggcaccgtgtccctgctggtgttccggcaggaggatgccttccacccccgggagctgaaggcagaagatgaagatattgtgctgaccccagatggcacccgggagttcctgacctttgaggtgcccctgaatgattctggcagcgctggcctgggcgtgtctgtgaagggcaacagaagcaaagaaaatcatgctgacctgggcatctttgtgaagagcatcatcaatggaggagctgccagcaaggatggccgcctgcgggtgaatgaccagctgattgctgtgaatggagagagcctgctgggcaagaccaaccaggatgccatggagaccctgcggcgctccatgagcacagagggcaacaagaggggcatgatccagctgattgtggcccggcgcatcagcaaatgtaatgagctgaagagccctggcagccccccaggccctgagctgcccatcgagacagccctggatgaccgggagcggcgcatcagccacagcctgtacagcggcatcgagggcctggatgagagccccagcagaaatgctgccctgagccgcatcatgggcaagtaccagctgagccccaccgtgaacatgccccaggatgacaccgtcatcattgaagatgaccggctgcctgtgctgcccccccacctgagtgaccagagcagcagcagcagccatgatgatgtgggctttgtgacagcagatgctggcacctgggccaaggccgccatcagtgacagcgctgactgcagcctgagcccagatgtggaccctgtgctggccttccagcgggagggcttcggccggcagagcatgtctgagaagaggaccaagcagttcagtgatgccagccagctggactttgtgaagaccaggaagagcaagtccatggacctgggcagcagccccagcagagatgtgggccccagcctgggcctgaagaagagcagcagcctggagagcctgcagacagctgtggccgaggtgaccctgaatggagacatccccttccaccggccccggccccgcatcatccggggccggggctgcaatgaaagcttccgggccgccatcgacaagagctatgacaagccagctgtggatgatgatgatgagggcatggagaccctggaggaggacacagaggagagcagccgcagcggccgggagagcgtgtccacagccagtgaccagcccagccacagcctggagcggcagatgaatggaaaccaggagaagggggacaagacagacaggaagaaggacaagacaggcaaggagaagaagaaggaccgggacaaggagaaggacaagatgaaggccaagaagggcatgctgaagggcctgggggacatgttccgcatccaggccaagacccgggagttccgggagcggcaggcccgggagcgggactatgcagagatccaggacttccacaggaccttcggctgtgatgatgagctgatgtatggaggagtgtcctcctatgagggctccatggccctgaatgcccggccccagagcccccgggagggccacatgatggatgccctgtatgcccaggtgaagaagcccaggaacagcaagcccagccctgtggacagcaacagaagcacccccagcaaccacgaccgcatccagaggctgcggcaggagttccagcaggccaagcaggatgaagatgtggaggacagaagaaggacctacagctttgagcagccctggcccaatgcccggcctgccacccagagcggccgccacagcgtgtctgtggaggtgcagatgcagaggcagaggcaggaggagcgggagagcagccagcaggcccagaggcagtacagcagcctgccccggcagagcaggaagaatgccagctctgtgtcccaggacagctgggagcagaactacagccctggagagggcttccagagcgccaaggagaacccccgctacagcagctaccagggcagcagaaatggctacctgggcggccacggcttcaatgcccgggtgatgctggagacccaggagctgctgcggcaggagcagaggaggaaggagcagcagatgaagaagcagccccccagcgagggccccagcaactatgacagctacaagaaggtgcaggaccccagctatgccccacccaagggccccttccggcaggatgtgccccccagccccagccaggtggcccggctgaaccggctgcagaccccagagaagggccggcccttctacagctag

SEQ ID NO: 71434 - DNA, 3735 bp, Artificial Sequence
  derived and/or modified sequence
atgaaggtgaccgtgtgcttcggccggacccgggtggtggtgccctgtggcgatggacatatgaaggtttttagtttgatccagcaggccgtcactagatatcgaaaagcaatcgcgaaagatccaaactactggatccaggtacaccggctggaacacggagatggaggtattctcgacctcgacgacattctctgcgacgtggctgacgataaggaccgtttggtcgccgtttttgatgaacaggacccgcatcacggaggagacggtacctctgcaagcagcacaggtacacagagcccagagatcttcggctccgaactgggcacaaacaatgtgagcgctttccagccatatcaggcaacatcagagattgaggtgaccccctctgtgctgagagcaaacatgccgctccatgtcagacggtcgtcagaccctgccctgataggtttatccactagtgtgagcgactcaaatttctctagcgaggaaccatcgagaaaaaatccaacgcgatggtctaccacggctgggttcctcaagcagaacacggcaggctcaccaaagacatgtgaccggaaagatgaggacggaactgaggaggacaatagtcgggtcgaaccagttggacatgccgacactggactcgaacatatacccaacttttctctggatgatatggtaaagttagtggaagtgccgaacgacggaggacccctcggtattcacgtcgtccctttctccgctcgaggaggtcgcactctgggcctcctggtcaaacggctcgaaaagggcggaaaggcagagcacgagaatctgtttagagagaatgactgtattgtcaggattaatgacggtgatctccgtaacaggcgctttgaacaggcccagcacatgtttaggcaggccatgaggacgcccattatttggtttcacgtggttcctgccgccaacaaagaacagtacgaacaactgtcccagagtgaaaaaaacaattactactcctctcgattcagccctgatagtcagtacattgacaatcgctcggtcaattccgccgggctgcatactgtgcagcgcgcgcccagactgaatcatccccctgagcaaattgattcccactctagactgcctcactcagctcacccctcaggcaaacccccaagcgcgcccgcgtccgcaccccagaacgtcttttcgaccactgtttcatcaggctacaacactaagaagatcggaaagaggctcaatattcagctgaaaaagggcacagaaggcctgggtttctccattacctctagggacgtgaccatcggaggttcagctccaatctacgtcaagaacattctcccacggggggctgctattcaggatgggagactgaaggcgggtgaccgacttatcgaggtaaatggtgtggacctcgtgggcaagtctcaggaagaggttgtctctctgctccgctcaaccaagatggaagggaccgtgtccctgttagtctttaggcaggaggatgcttttcacccaagggagctgaaagcggaggatgaagacatcgttctcacacccgacggtactcgggagttccttacattcgaagtgcccttaaatgattcgggctcagccggactgggggtatcagtcaagggaaatcggtccaaagaaaaccacgctgatttggggatcttcgttaaaagtattataaatggcggagcggcttccaaggatggcagactgcgagtgaacgatcaactgattgcagtgaacggtgaatccctcctgggcaaaactaatcaggatgctatggaaaccctccgcaggtccatgtctaccgagggcaacaagcgaggaatgatccagcttattgtcgctcggaggatttctaagtgcaacgagctcaaatcccctggttcaccacccggccctgagctaccgatcgagaccgccttggacgacagggagagaaggatttcacacagcctctactctggcatcgaaggcttggacgagtcgcctagtagaaatgctgctctttcccggatcatgggcaaataccagctttctcccaccgttaacatgccccaagatgatacggtcatcatcgaggatgacaggctcccggtcctgcccccgcacttaagtgaccagagtagttcttccagccacgacgacgttgggttcgtcaccgccgatgcaggaacctgggccaaggccgccatttcggattcagctgattgcagtcttagccccgatgtcgacccagtccttgccttccagagggagggctttggcaggcagtccatgagtgagaaacggaccaaacagttctctgacgcctcccagctggacttcgttaagacccgcaagtcaaagtctatggacctcggatcttctccatccagggacgtgggaccatcactgggattaaagaaaagcagttctctagagtctctgcagaccgccgtggcggaggtcaccctgaatggggatattccattccatcgcccccgtccccgcattattcgcggcagagggtgtaacgagagctttcgggctgccatcgacaaaagctatgacaaacctgccgtggatgacgatgacgaaggcatggagacgctcgaggaggatacagaggaatcctccaggagcgggcgtgaaagtgtcagcaccgcctctgaccagccctctcacagtctggagcgacaaatgaatggtaaccaagaaaaaggcgataaaactgataggaagaaagacaagaccggaaaggagaagaaaaaggatcgggataaagagaaggataaaatgaaagccaagaaggggatgttgaaaggattgggtgacatgtttcgtatacaggcaaagactcgagagtttcgggagagacaggcacgagaaagggattacgccgagattcaagacttccaccggacattcgggtgtgacgatgagctgatgtacggcggtgtatccagttatgaagggtccatggcactgaacgccaggccccaatccccacgcgaaggccacatgatggatgcactgtacgcacaagtcaagaaacctcgtaattccaagccgtcaccggttgattctaatcgtagcacgccctccaatcatgataggatacagcgcctcaggcaagaatttcagcaagcgaagcaggatgaagatgtagaggacagacgtcggacgtactcctttgaacagccttggcccaacgctcgaccagccacgcagtccggacgacatagtgtgtcagtggaggtgcagatgcagaggcagcgacaagaagaacgcgagtcatcacaacaggcacagagacagtacagctccctccctcggcagtctcggaagaacgcaagttcagttagccaggacagttgggaacaaaattactctccaggggagggttttcaatctgcgaaagagaatcctcgatacagtagttatcaaggcagcaggaacgggtacctgggaggacacggattcaacgcccgggtgatgttagaaacccaggaacttcttcgacaggagcagaggaggaaggaacagcaaatgaaaaagcaaccaccaagtgaaggcccgagcaactacgactcatacaagaaagtccaagacccctcatatgctcctccaaagggccccttcagacaggacgtgccaccctctccatcccaggtagcacggcttaatcgactccaaacccccgagaaaggacgaccgttttatagctag

SEQ ID NO: 71435 - DNA, 5669 bp, Artificial Sequence
  derived and/or modified sequence
gcggccccgagcgagcgccagcgccacacagccccgggcagccgccggcgagcgcgccgcgacgccgaacaggtggccggaggctgcgggcgccgcggcggggagaggcgaggcaagccccgggcgaagcgaggcgaggcgagggcggccgggccgggcatgcgagctgagcggccccccggcgtcgccgccgcctgcccgcgcccctagccgcccgcgcgcccgagtccccagcggctcctccgcgcccagcgtcctcggtcccggcctcggctgctccggctgcgctcggcgaggggcgcgggcccgcccgcggcggcggcggcatgaaagtgaccgtgtgcttcggacggacccgggtggtcgtgccgtgcggggacggccacatgaaagttttcagcctcatccagcaggcggtgacccgctaccggaaggccatcgccaaggatccaaactactggatacaggtgcatcgcttggaacatggagatggaggaatactagaccttgatgacattctttgtgatgtagcagacgataaagacagactggtagcagtgtttgatgagcaggatccacatcacggaggtgatggcaccagtgccagttccacgggtacccagagcccagagatatttggtagtgagcttggcaccaacaatgtctcagcctttcagccttaccaagcaacaagtgaaattgaggtcacaccttcagtccttcgagcaaatatgcctcttcatgttcgacgcagtagtgacccagctctaattggcctctccacttctgtcagtgatagtaatttttcctctgaagagccttcaaggaaaaatcccacacgctggtcaacaacagctggcttcctcaagcagaacactgctgggagtcctaaaacctgcgacaggaaggatgaggatgggacagaagaggataacagtcgtgttgaacctgttggacatgctgacacgggtttggagcatatacccaacttttctctggatgatatggtaaagctcgtagaagtccccaacgatggagggcctctgggaatccacgtagtgcctttcagtgctcgaggcggcagaaccctggggttattagtaaaacgattggagaaaggtggtaaagctgaacatgaaaatctttttcgtgagaatgattgcattgtcaggattaatgatggcgaccttcgaaatagaagatttgaacaagcacaacatatgtttcgccaagccatgcgtacacccatcatttggttccatgtggttcctgcagcaaataaagagcagtatgaacaactatcccaaagtgagaagaacaattactattcaagccgttttagccctgacagccagtatattgacaacaggagtgtgaacagtgcagggcttcacacggtgcagagagcaccccgactgaaccacccgcctgagcagatagactctcactcaagactacctcatagcgcacacccctcgggaaaaccaccatccgctccagcctcggcacctcagaatgtatttagtacgactgtaagcagtggttataacaccaaaaaaataggcaagaggcttaatatccagcttaagaaaggtacagaaggtttgggattcagcatcacttccagagatgtaacaataggtggctcagctccaatctatgtgaaaaacattctcccccggggggcggccattcaggatggccgacttaaggcaggagacagacttatagaggtaaatggagtagatttagtgggcaaatcccaagaggaagttgtttcgctgttgagaagcaccaagatggaaggaactgtgagccttctggtctttcgccaggaagacgccttccacccaagggaactgaaagcagaagatgaggatattgttcttacacctgatggcaccagggaatttctgacatttgaagtcccacttaatgattcaggatctgcaggccttggtgtcagtgtcaaaggtaaccggtcaaaagagaaccacgcagatttgggaatctttgtcaagtccattattaatggaggagcagcatctaaagatggaaggcttcgggtgaatgatcaactgatagcagtaaatggagaatccctgttgggcaagacaaaccaagatgccatggaaaccctaagaaggtctatgtctactgaaggcaataaacgaggaatgatccagcttattgttgcaaggagaataagcaagtgcaatgagctgaagtcacctgggagcccccctggacctgagctgcccattgaaacagcgttggatgatagagaacgaagaatttcccattccctctacagtgggattgaggggcttgatgaatcgcccagcagaaatgctgccctcagtaggataatgggtaaataccagctgtcccctacagtgaatatgccccaagatgacactgtcattatagaagatgacaggttgccagtgcttcctccacatctctctgaccagtcctcttccagctcccatgatgatgtggggtttgtgacggcagatgctggtacttgggccaaggctgcaatcagtgattcagccgactgctctttgagtccagatgttgatccagttcttgcttttcaacgagaaggatttggacgtcagagtatgtcagaaaaacgcacaaagcaattttcagatgccagtcaattggatttcgttaaaacacgaaaatcaaaaagcatggatttaggtagttctcccagcagagatgtgggtccttccctgggtctgaagaagtcaagctcgttggagagtctgcagaccgcagttgccgaggtgactttgaatggggatattcctttccatcgtccacggccgcggataatcagaggcaggggatgcaatgagagcttcagagctgccatcgacaaatcttatgataaacccgcggtagatgatgatgatgaaggcatggagaccttggaagaagacacagaagaaagttcaagatcagggagagagtctgtatccacagccagtgatcagccttcccactctctggagagacaaatgaatggaaaccaagagaaaggtgataagactgatagaaaaaaggataaaactggaaaagaaaagaagaaagatagagataaggagaaggataaaatgaaagccaagaagggaatgctgaagggcttgggagacatgttcaggattcaagccaaaactcgagaatttagggaacgacaagctcgagagcgtgactatgctgaaattcaagattttcatcggacatttggctgtgatgatgagttaatgtatgggggagtttcttcttatgaaggttccatggctctcaacgctagacctcagagcccacgagaagggcatatgatggatgctttgtatgcccaagtcaagaagccgcggaattccaaaccctcacctgtagacagtaacagatcaactcctagcaatcatgatcggatacagcgtctgaggcaagaatttcagcaagcaaagcaagatgaagatgtagaagatcgtcggcggacctatagttttgagcaaccctggccgaacgcacggccggcgacgcagagcgggcgacactcggtgtccgtggaggtgcagatgcagcggcagcggcaggaggagcgcgagagctcccagcaggcccagcgccagtacagctctctgcctcggcaaagcaggaaaaatgccagctcggtctcccaggactcttgggagcagaactactcccctggggaaggcttccagagtgccaaagagaaccccaggtactccagctaccaaggctccaggaacggctacctgggaggacatggcttcaacgccagggtcatgctggaaactcaggagctccttcgccaggaacagaggcggaaggagcagcagatgaagaagcagcctccttccgaggggcccagcaactatgactcgtataagaaagtccaggaccccagttacgcccctcccaaggggcccttccggcaagatgtgcccccctccccttctcaggttgcgaggctgaacagacttcagactcctgagaaagggaggcccttctattcctgagcacgcaaataacggatgcttcatgtcgcgcaataaaagacattttcctatgaagacttgtattttgggagtttttttaaaacctcgatggtactatggagtatttctgttgttggtatcagtgcctttaagcggtgtaggcaaagaaatggaaggccttaatgtctttgccactatgtctcaagtgtctgtttcatggaaggatttcccaccctgtgacaatcatctgtttgaggtgttcatatgctctgcgcctctccacagtaccaggaatctcggccctactcatgagttgtccgcggcttggttgtaacatccctgcaccacttgcagtgacaaattcacctgaagtggaggatgacgtgcggccctgtttctccctctaagttctcttagctatgggatgacatcttagtctctggtggaggaaaagtgggcgacatacaccaaaaattggggctttctggtacttcacagcacagccatttgtcgtactttgtcatcactgtggttttctctttcctttctcagctctttgtgacgggagagtcggtcatcctattacagaagctaagccatagtccaacattgtttggtcaccatgggggtccttttgtaactgccttatgactcaacattaccaataaagtgatgatcctggtctgcgtttatacatacgcttgttcggtcctgttcctgacacgtgggttgagtcaccacagctctgtgtggggaacgtgggagacaggagtggctcctgccgggggaagctgggcctgccattggccctgtgtctatcatgaggggagagctaagaaagaaattctcctaggaagagctcatggcccagtacatcctagtaattattttaattagtttttgttctgacagcttgtcaggaagggcacagaatgggacagagataaaccagacagtcattttgatctgctctctacggtttttcaagtcagaggcaattgatgcttgtctaatgcatccacacactgcatgtctgactggcgatgccgcgctcctaagtagttctgccatgaaacataaaagacaaaggaaaagccgttacacatcacacagagaacattttcgggtcccacagcggtggtggcaggaagctcactctcgcgtcagtattagagtgtgtgtgtgggtctcggggatctcggtggctcccatcttccttcattgttctgaacatcctgtattgtaaaccatggctggggtgctaaagtgcctgtgaatcccgatgtggaaaaagctggaggtgaaagctcagcataccatgtatttactttaaaaacagaaaaaaagacatgtatggatatgtctattttttttttattggcacattgtatttttgtgttgacttgtttttagaaatgatgtgtccacacacgtacccgtgtctcttctgcatttctgtgtcatggttctgtttcttaatcacgtgcggcggtgtctaagtggtgttaccagtgtacgcgcagtgaccttggatgacagtggctctttctcacagcctcccctgagctgtgagaaacagctttctctgtacatatgcaactcctaataaaaggcatatttcttcctgtt

SEQ ID NO: 71436 - DNA, 3735 bp, Artificial Sequence
  derived and/or modified sequence
atgaaggtcacagtctgtttcggtaggacccgcgtggtggtgccatgtggcgatggccacatgaaagtgttttcacttatacagcaggctgtcacccgttaccgcaaagccatcgccaaggatccaaattattggattcaggtgcaccgcttggaacacggcgacggaggcattctggacctggacgatattctgtgtgacgttgccgatgataaggaccgactggtggccgtcttcgacgaacaagatcctcaccacggtggcgacggcaccagcgcttcaagtactggcacccagtctcccgagatttttggatccgaactggggaccaacaacgtctctgccttccaaccctaccaggccacaagcgaaatcgaggtaacgccaagcgtgctgcgggcaaatatgcccttgcatgttcgccgttcaagcgaccctgcgctgatcggcctgagcacaagcgtcagtgactccaacttctctagcgaggaacccagtaggaaaaatcctacaaggtggagcacgacggctggctttctgaagcagaacaccgccggaagtccaaaaacttgtgaccggaaggatgaggatggtactgaagaggacaattctcgggtcgagccagtgggtcacgccgatacggggctggaacacatcccaaacttctccttagatgacatggtcaagctggtggaggtgccaaatgacggtgggcctctgggaatccatgtggtccctttcagcgccagagggggacggacactgggactgcttgttaaacggctggagaaaggcggaaaggctgagcatgagaacctattcagagagaacgactgtattgtaaggattaacgacggagacttgaggaatcgaaggttcgagcaggcccagcacatgtttcgccaggccatgcggacaccaattatatggttccatgtggttcccgctgcaaataaggagcagtacgagcagttgagccagagtgaaaagaacaattactacagttcgagattttctccagatagtcagtatattgacaataggtctgtcaattcagcaggcctccacaccgtgcagagagctcctagactaaatcatcctcctgagcagatcgactcacattcccgattgcctcattccgcccaccccagcggaaagcctccctcagcccctgccagcgctccgcagaacgttttctccacaactgtgtcaagcggctataataccaagaagattggcaaacgactgaatatccagcttaagaagggaaccgagggattgggtttcagcatcactagcagggacgtcactatcggaggaagcgctcctatatatgtgaaaaatatcctgccacgcggagcggcaattcaggacggcaggctaaaagctggggacaggcttattgaggtgaacggcgtagatctagtgggtaagtcacaggaggaggttgttagcttgctgcggtccacaaagatggaaggcactgtgtcactccttgtgtttcggcaagaagacgccttccatcccagagaactgaaagctgaagacgaggacatagtgcttacccccgatggaaccagagaatttctgaccttcgaagttccactgaacgattctggatcagccggtctgggcgtttcagtgaagggaaatcggtcaaaagagaaccatgctgacctaggcatcttcgttaagtctattataaacgggggtgcggcatcaaaggacggccgtttacgggtgaacgatcagctcatcgctgttaatggggagagtttacttggaaagacaaaccaggacgctatggagacccttcgaagaagcatgtccaccgaggggaacaaacggggaatgatacagctcatcgtcgccagacgcatttcgaagtgtaacgagctcaagtcaccgggaagccctccaggaccagaactgccaatcgaaacggcgcttgacgaccgcgaacggaggatttcacacagcctgtatagcggaatcgagggcttggacgagtctccaagcagaaacgccgctctctcccgcataatgggaaagtatcaactctccccgacagtgaatatgccgcaggacgataccgtgattattgaagatgatcggttgcctgtgcttcccccacacctctccgaccagagttcaagctcctcccacgatgacgtggggtttgttacagcagacgccggaacatgggcaaaggcagcaatcagcgacagtgccgattgttccctttctccagacgtcgatccagtcctagcttttcagagagagggctttggccgtcaaagtatgtcagagaaaaggacaaaacagttctcagatgctagccagctggactttgttaagactaggaagtcgaagtctatggatctcggaagcagcccatcgcgagatgtcggtcctagcctcggcttaaagaagtctagcagtctggaatcactccagacggctgtggcagaggtgacactgaacggggatattccctttcatcgtccacgcccaaggatcatacgaggaagagggtgcaatgaatcctttagggcagctatcgacaagtcttacgataaacctgcagtggatgatgacgacgaggggatggagacattagaggaggataccgaggagtccagccggtcgggtagagaaagcgtgagtacagcgagtgatcagccttcacattctctcgaacgtcagatgaatggtaatcaagaaaagggcgataagacagaccggaaaaaggataagaccgggaaggaaaaaaagaaagacagggataaagaaaaggataaaatgaaggccaagaaaggtatgttgaaaggcctcggagatatgttccgaatccaagctaagacgcgggaattccgcgagaggcaagcgcgagagcgagactacgcggagatccaggattttcacaggacatttggttgtgatgacgaattgatgtacgggggagttagctcttacgaaggctctatggccctgaacgcccgacctcagtcccccagagagggacacatgatggacgccctctacgcccaggtcaagaaaccgcgtaacagcaagccgagtccagtcgatagcaatcggtctactccaagcaaccatgataggatccagcgactgcgacaggaattccagcaggctaagcaggacgaggatgtggaggatcgcagaagaacttattccttcgaacagccctggccgaacgcccgtccagccacacagagcggtcggcacagcgtgagcgttgaagtgcaaatgcagagacaaagacaggaagaacgcgaatcatctcagcaggctcaacgtcagtacagcagcctgcctaggcaaagtaggaagaacgctagcagcgtgtcccaggatagttgggagcagaattactcccccggtgagggatttcagagtgccaaggagaaccccaggtattctagctaccagggctcccgcaacggatatcttgggggtcacggttttaatgcaagggtgatgctggaaacacaggagctcctcaggcaggagcagaggcgcaaggagcagcagatgaaaaaacagcccccatctgaaggccctagtaattacgactcatacaagaaggtgcaggatccatcttatgctccacccaagggtccgttccgccaggacgtacctccatctccatcccaggtcgctcgtctgaatcgactccagacccctgaaaaaggcaggcctttttattcatag

SEQ ID NO: 71437 - DNA, 3735 bp, Artificial Sequence
  derived and/or modified sequence
atgaaggtgaccgtgtgcttcggcagaaccagagtggtggtgccctgcggcgacggccacatgaaggtgttcagcctgatccagcaggccgtgaccagatacagaaaggccatcgccaaggaccccaactactggatccaggtgcacagactggagcacggcgacggcggcatcctggacctggacgacatcctgtgcgacgtggccgacgacaaggacagactggtggccgtgttcgacgagcaggacccccaccacggcggcgacggcaccagcgccagcagcaccggcacccagagccccgagatcttcggcagcgagctgggcaccaacaacgtgagcgccttccagccctaccaggccaccagcgagatcgaggtgacccccagcgtgctgagagccaacatgcccctgcacgtgagaagaagcagcgaccccgccctgatcggcctgagcaccagcgtgagcgacagcaacttcagcagcgaggagcccagcagaaagaaccccaccagatggagcaccaccgccggcttcctgaagcagaacaccgccggcagccccaagacctgcgacagaaaggacgaggacggcaccgaggaggacaacagcagagtggagcccgtgggccacgccgacaccggcctggagcacatccccaacttcagcctggacgacatggtgaagctggtggaggtgcccaacgacggcggccccctgggcatccacgtggtgcccttcagcgccagaggcggcagaaccctgggcctgctggtgaagagactggagaagggcggcaaggccgagcacgagaacctgttcagagagaacgactgcatcgtgagaatcaacgacggcgacctgagaaacagaagattcgagcaggcccagcacatgttcagacaggccatgagaacccccatcatctggttccacgtggtgcccgccgccaacaaggagcagtacgagcagctgagccagagcgagaagaacaactactacagcagcagattcagccccgacagccagtacatcgacaacagaagcgtgaacagcgccggcctgcacaccgtgcagagagcccccagactgaaccacccccccgagcagatcgacagccacagcagactgccccacagcgcccaccccagcggcaagccccccagcgcccccgccagcgccccccagaacgtgttcagcaccaccgtgagcagcggctacaacaccaagaagatcggcaagagactgaacatccagctgaagaagggcaccgagggcctgggcttcagcatcaccagcagagacgtgaccatcggcggcagcgcccccatctacgtgaagaacatcctgcccagaggcgccgccatccaggacggcagactgaaggccggcgacagactgatcgaggtgaacggcgtggacctggtgggcaagagccaggaggaggtggtgagcctgctgagaagcaccaagatggagggcaccgtgagcctgctggtgttcagacaggaggacgccttccaccccagagagctgaaggccgaggacgaggacatcgtgctgacccccgacggcaccagagagttcctgaccttcgaggtgcccctgaacgacagcggcagcgccggcctgggcgtgagcgtgaagggcaacagaagcaaggagaaccacgccgacctgggcatcttcgtgaagagcatcatcaacggcggcgccgccagcaaggacggcagactgagagtgaacgaccagctgatcgccgtgaacggcgagagcctgctgggcaagaccaaccaggacgccatggagaccctgagaagaagcatgagcaccgagggcaacaagagaggcatgatccagctgatcgtggccagaagaatcagcaagtgcaacgagctgaagagccccggcagcccccccggccccgagctgcccatcgagaccgccctggacgacagagagagaagaatcagccacagcctgtacagcggcatcgagggcctggacgagagccccagcagaaacgccgccctgagcagaatcatgggcaagtaccagctgagccccaccgtgaacatgccccaggacgacaccgtgatcatcgaggacgacagactgcccgtgctgcccccccacctgagcgaccagagcagcagcagcagccacgacgacgtgggcttcgtgaccgccgacgccggcacctgggccaaggccgccatcagcgacagcgccgactgcagcctgagccccgacgtggaccccgtgctggccttccagagagagggcttcggcagacagagcatgagcgagaagagaaccaagcagttcagcgacgccagccagctggacttcgtgaagaccagaaagagcaagagcatggacctgggcagcagccccagcagagacgtgggccccagcctgggcctgaagaagagcagcagcctggagagcctgcagaccgccgtggccgaggtgaccctgaacggcgacatccccttccacagacccagacccagaatcatcagaggcagaggctgcaacgagagcttcagagccgccatcgacaagagctacgacaagcccgccgtggacgacgacgacgagggcatggagaccctggaggaggacaccgaggagagcagcagaagcggcagagagagcgtgagcaccgccagcgaccagcccagccacagcctggagagacagatgaacggcaaccaggagaagggcgacaagaccgacagaaagaaggacaagaccggcaaggagaagaagaaggacagagacaaggagaaggacaagatgaaggccaagaagggcatgctgaagggcctgggcgacatgttcagaatccaggccaagaccagagagttcagagagagacaggccagagagagagactacgccgagatccaggacttccacagaaccttcggctgcgacgacgagctgatgtacggcggcgtgagcagctacgagggcagcatggccctgaacgccagaccccagagccccagagagggccacatgatggacgccctgtacgcccaggtgaagaagcccagaaacagcaagcccagccccgtggacagcaacagaagcacccccagcaaccacgacagaatccagagactgagacaggagttccagcaggccaagcaggacgaggacgtggaggacagaagaagaacctacagcttcgagcagccctggcccaacgccagacccgccacccagagcggcagacacagcgtgagcgtggaggtgcagatgcagagacagagacaggaggagagagagagcagccagcaggcccagagacagtacagcagcctgcccagacagagcagaaagaacgccagcagcgtgagccaggacagctgggagcagaactacagccccggcgagggcttccagagcgccaaggagaaccccagatacagcagctaccagggcagcagaaacggctacctgggcggccacggcttcaacgccagagtgatgctggagacccaggagctgctgagacaggagcagagaagaaaggagcagcagatgaagaagcagccccccagcgagggccccagcaactacgacagctacaagaaggtgcaggaccccagctacgccccccccaagggccccttcagacaggacgtgccccccagccccagccaggtggccagactgaacagactgcagacccccgagaagggcagacccttctacagctag

SEQ ID NO: 71438 - protein, 1031 aa, Artificial Sequence
  derived and/or modified sequence
MKVTVCFGRTRVVVPCGDGHMKVFSLIQQAVTRYRKAIAKDPNYWIQVHRLEHGDGGILDLDDILCDVADDKDRLVAVFDEQDPHHGGDGTSASSTGTQSPEIFGSELGTNNVSAFQPYQATSEIEVTPSVLRANMPLHVRRSSDPALIGLSTSVSDSNFSSEEPSRKNPTRWSTTAGFLKQNTAGSPKTCDRKKDENYRSLPRDTSNWSNQFQRDNARSSLSASHPMVGKWLEKQEQDEDGTEEDNSRVEPVGHADTGLEHIPNFSLDDMVKLVEVPNDGGPLGIHVVPFSARGGRTLGLLVKRLEKGGKAEHENLFRENDCIVRINDGDLRNRRFEQAQHMFRQAMRTPIIWFHVVPAANKEQYEQLSQSEKNNYYSSRFSPDSQYIDNRSVNSAGLHTVQRAPRLNHPPEQIDSHSRLPHSAHPSGKPPSAPASAPQNVFSTTVSSGYNTKKIGKRLNIQLKKGTEGLGFSITSRDVTIGGSAPIYVKNILPRGAAIQDGRLKAGDRLIEVNGVDLVGKSQEEVVSLLRSTKMEGTVSLLVFRQEDAFHPRELNAEPSQMQIPKETKAEDEDIVLTPDGTREFLTFEVPLNDSGSAGLGVSVKGNRSKENHADLGIFVKSIINGGAASKDGRLRVNDQLIAVNGESLLGKTNQDAMETLRRSMSTEGNKRGMIQLIVARRISKCNELKSPGSPPGPELPIETALDDRERRISHSLYSGIEGLDESPSRNAALSRIMGKYQLSPTVNMPQDDTVIIEDDRLPVLPPHLSDQSSSSSHDDVGFVTADAGTWAKAAISDSADCSLSPDVDPVLAFQREGFGRQSMSEKRTKQFSDASQLDFVKTRKSKSMDLGIADETKLNTVDDQKAGSPSRDVGPSLGLKKSSSLESLQTAVAEVTLNGDIPFHRPRPRIIRGRGCNESFRAAIDKSYDKPAVDDDDEGMETLEEDTEESSRSGRESVSTASDQPSHSLERQMNGNQEKGDKTDRKKDKTGKEKKKDRDKEKDKMKAKKGMLKGLGDMFSLAKLKPEKR

SEQ ID NO: 71439 - DNA, 3096 bp, Artificial Sequence
  derived and/or modified sequence
atgaaagtgaccgtttgctttggaagaactcgggtagttgtgccatgtggagacggccatatgaaagtttttagccttatccagcaggccgtgacccgatatcggaaagctatcgcgaaagaccctaactactggattcaggtgcaccggttagagcacggagacgggggcatcctggacctcgacgacatcttatgtgacgtcgctgatgacaaagaccggttggtcgcagtgtttgatgaacaggatccacatcacgggggtgatgggacgagtgcctcctcaactggaacacagagccccgagatttttggatcagagttaggcactaacaacgtgagcgctttccaaccttaccaggccacgtctgaaatcgaggtcactccttcagtgctgcgagccaacatgcccctccatgtgcggaggtcctctgacccggctttgatcggcctctccacatcagtttccgactcgaacttttcctcggaggagccctctcggaaaaatcctacccgctggtccactactgctgggttcttgaaacagaacacggcagggtctccaaagacctgtgatcgcaaaaaggatgaaaattaccgcagccttccccgtgacacctccaattggtccaaccaatttcagcgtgataatgccaggtcctccctgagtgccagccaccccatggttggcaagtggctggagaagcaggaacaggatgaggacggaacagaggaagataacagtagagtggagccggtaggacacgcggatactggcctggagcatattcccaattttagccttgacgatatggtaaagcttgttgaagtccctaatgatggaggacctctagggatccatgttgtccccttctccgcacggggtggccgcacattggggctgctcgtgaagagactcgagaaaggcgggaaggccgagcatgaaaatctattcagggaaaatgattgcatcgttcggatcaacgatggagacctcagaaaccggcgatttgaacaggcccagcacatgtttagacaagccatgcgcacccccattatctggtttcatgtggtcccggcagccaataaagagcagtacgaacagctgagccagtccgaaaagaacaattattactcatctcgatttagtccagacagtcagtacattgataatagatcagtgaattccgcagggttgcacacagtgcaaagggctccacgcctgaatcacccaccagaacagattgacagccattctaggcttcctcatagtgcgcatcctagtggcaagccccccagtgcacctgcgtctgcacctcagaatgtgtttagcactaccgtgagtagcggttacaacaccaaaaagattgggaagaggctcaatatccagctgaaaaaaggcaccgaaggcttgggcttctcgataactagtagagacgtgacaataggaggctctgctccaatctacgtcaaaaatatccttcctaggggggccgctatccaagatggccggcttaaggcgggcgacaggctcattgaagtcaatggcgtggacctcgtggggaagtcccaagaagaagtggtctccttgctccgctcgaccaagatggaggggaccgtatcactgctagtgtttcggcaggaagatgcattccaccctcgcgaactgaacgctgagcccagccagatgcaaattcccaaggaaacaaaagctgaggatgaggacatcgtgctgactcctgatggcaccagagaattcctgacatttgaagtgccactcaacgattcagggtcagccggacttggtgtgtccgtaaagggcaaccggtcgaaggaaaaccacgccgacctaggcatcttcgtgaaatccatcataaacggaggggccgcaagcaaggacggaagacttcgggtcaatgaccagctgattgcggtgaacggggaatcgttgctgggcaaaactaaccaagacgcgatggaaacattacgtcgctctatgagcaccgagggcaacaagcgggggatgatccagctcatcgtggcgcgccggatatctaaatgtaacgaacttaagagtccgggaagcccacccggtcccgaacttcctatcgagacagccctcgatgacagggagagaaggattagtcacagcttgtattctggaatagagggactggacgagtcacctagccgcaacgctgctctctcgcggattatgggtaagtatcagctttctcccacggtcaacatgccccaggatgacaccgtaatcatcgaagacgatagactcccagttttgcctccccacctgtctgaccagtcctctagctcttcccatgatgacgttggctttgtgaccgcagatgctggtacctgggctaaggctgcaatcagtgactccgcagattgttccttgtcccctgatgtcgatcccgtgttggccttccaacgcgagggttttggacggcaatcaatgagcgagaaaagaacgaagcagtttagtgacgccagtcagctagacttcgtcaagaccaggaagtctaagagcatggacctcgggatcgcagatgagacaaagctgaacacagtagacgaccaaaaggccggaagtccgagccgggatgtgggaccaagtctcggacttaagaaatcttcttctctagagagtctgcagactgccgtagctgaagtaacacttaatggcgatattccctttcacaggccacggccacgcatcatcaggggaagggggtgcaacgaatcttttagagctgctattgataaatcctacgataaacccgcggtcgacgacgatgacgagggcatggaaaccctcgaagaggacaccgaggaatcatcacggtcaggtagagagtccgtatcaaccgcaagcgatcaaccgagtcatagtctggaacgccaaatgaatgggaatcaggaaaaaggagacaaaacagatcggaagaaggataagaccggtaaggaaaaaaagaaagaccgggataaggaaaaagataaaatgaaggctaagaagggcatgctcaaagggctcggtgatatgttctcacttgctaaattgaagcccgagaaacggtag

SEQ ID NO: 71440 - DNA, 3096 bp, Artificial Sequence
  derived and/or modified sequence
atgaaggtgacagtgtgctttggaagaaccagggtggtggtgccctgtggagatggccacatgaaggtgttcagcctcatccagcaggccgtgacccgctacaggaaggccatcgccaaggaccccaactactggatccaggtgcaccggctggagcacggagatggcggcatcctggacctggatgacatcctgtgtgatgtggctgatgacaaggaccggctggtggccgtgtttgatgagcaggacccccaccacggcggagatggcaccagcgccagcagcacaggcacccagagccctgagatcttcggcagcgagctgggcaccaacaacgtgtctgccttccagccctaccaggccaccagcgagattgaggtgacccccagcgtgctgcgggccaacatgcccctgcacgtgagaagaagcagtgaccctgccctgattggcctgagcacctctgtgtctgacagcaacttcagcagcgaggagcccagcaggaagaaccccacccgctggagcaccacagctggcttcctgaagcagaacacagctggcagccccaagacctgtgacaggaagaaggatgagaactaccgcagcctgccccgggacaccagcaactggagcaaccagttccagagggacaatgcccggagcagcctgagcgccagccaccccatggtgggcaagtggctggagaagcaggagcaggatgaagatggaacagaggaggacaacagccgggtggagcctgtgggccacgccgacaccggcctggagcacatccccaacttcagcctggatgacatggtgaagctggtggaggtgcccaatgatggcggccccctgggcatccacgtggtgcccttcagcgcccggggcggccgcaccctgggcctgctggtgaagaggctggagaagggcggcaaggccgagcatgaaaatctcttccgggagaatgactgcatcgtgcgcatcaatgatggagacctgaggaacagaagatttgagcaggcccagcacatgttccggcaggccatgaggacccccatcatctggttccacgtggtgcctgctgccaacaaggagcagtatgagcagctgagccagagcgagaagaacaactactacagcagccgcttctccccagacagccagtacatcgacaacagatctgtgaacagcgctggcctgcacacagtgcagagggccccccggctgaaccaccccccagagcagattgacagccacagccggctgccccacagcgcccaccccagcggcaagcccccatctgccccagccagcgccccccagaatgtgttcagcaccaccgtgagcagcggctacaacaccaagaagattggcaagaggctgaacatccagctgaagaagggcacagagggcctgggcttcagcatcaccagcagagatgtgaccatcggcggcagcgcccccatctacgtgaagaacatcctgcccaggggggccgccatccaggacggccgcctgaaggccggggacaggctcatcgaggtgaatggagtggacctggtgggcaagagccaggaggaggtggtgtccctgctgcggagcaccaagatggagggcaccgtgtccctgctggtgttccggcaggaggatgccttccacccccgggagctgaatgctgagcccagccagatgcagatccccaaggagaccaaggccgaggatgaggacatcgtgctgaccccagatggcacccgggagttcctgacctttgaggtgcccctgaatgacagcggcagcgctggcctgggcgtgtctgtgaagggcaacagaagcaaggagaaccacgccgacctgggcatctttgtgaagagcatcatcaatggaggagctgccagcaaggatggccgcctgcgggtgaatgaccagctgattgctgtgaatggagagagcctgctgggcaagaccaaccaggatgccatggagaccctgcggcgctccatgagcacagagggcaacaagaggggcatgatccagctgattgtggcccggcgcatcagcaagtgcaatgagctgaagagccctggcagccccccaggccctgagctgcccattgaaacagccctggatgaccgggagcggcgcatcagccacagcctgtacagcggcatcgagggcctggatgagagccccagcagaaatgctgccctgagccgcatcatgggcaagtaccagctgagccccaccgtgaacatgccccaggatgacaccgtcatcattgaagatgaccggctgcctgtgctgcccccccacctgagtgaccagagcagcagcagcagccatgatgatgtgggctttgtgacagcagatgctggcacctgggccaaggccgccatcagtgacagcgctgactgcagcctgagcccagatgtggaccctgtgctggccttccagcgggagggcttcggccggcagagcatgtctgagaagaggaccaagcagttcagtgatgccagccagctggactttgtgaagaccaggaagagcaagtccatggacctgggcattgctgatgagaccaagctgaacacagtggatgaccagaaggccggcagccccagcagagatgtgggccccagcctgggcctgaagaagagcagcagcctggagagcctgcagacagctgtggccgaggtgaccctgaatggagacatccccttccaccggccccggccccgcatcatccggggccggggctgcaatgaaagcttccgggccgccatcgacaagagctatgacaagccagctgtggatgatgatgatgagggcatggagaccctggaggaggacacagaggagagcagccgcagcggccgggagagcgtgtccacagccagtgaccagcccagccacagcctggagcggcagatgaatggaaaccaggagaagggggacaagacagacaggaagaaggacaagacaggcaaggagaagaagaaggaccgggacaaggagaaggacaagatgaaggccaagaagggcatgctgaagggcctgggggacatgttcagcctggccaagctgaagccagagaagaggtag

SEQ ID NO: 71441 - DNA, 3096 bp, Artificial Sequence
  derived and/or modified sequence
atgaaggtgaccgtgtgcttcggccggacccgggtggtggtgccctgcggagatgggcatatgaaggtcttttccctcattcaacaagccgttacgaggtacaggaaggcaattgctaaagatccaaattactggatccaggtgcatcgcctggaacacggtgacggcgggatcctggatctggatgacatcctctgcgacgtcgctgacgacaaggaccgtctggttgccgtttttgatgaacaggacccccaccatggtggggacgggacctctgcgtcatcaacagggactcaatcacctgagatcttcggctcagagttaggcaccaacaatgtgagcgctttccaaccctatcaagccacatccgaaattgaggtcacaccaagcgtattgagagcgaacatgcccctgcatgtgaggcgaagtagcgatccggccctcataggactctctacatctgtttcggactcaaacttcagtagcgaggaaccatcccgcaagaatcccaccaggtggtccacaactgctgggttcctaaaacagaatacagccgggtctccgaaaacctgcgatagaaagaaggatgagaattacagatcactccccagggacactagcaattggtccaatcagttccagagagataatgcaaggtcttcgctgagcgccagccaccctatggttgggaagtggcttgaaaagcaggaacaggacgaggacgggacagaggaggataattctagggtcgagcccgtcggccacgccgacacaggactggaacacattccaaatttttcgcttgatgacatggtgaagttggtcgaggtgccgaacgacgggggcccccttggaatccatgttgttccgttcagtgccaggggaggccgcaccctgggcttactggttaagaggctcgaaaaaggcgggaaggctgagcatgagaatctttttcgcgagaacgattgtatagtgaggattaacgacggcgacctgcgtaatcgtcggttcgaacaggctcagcacatgttccggcaagctatgcggacacccattatatggttccacgtcgtgcccgcagccaataaggaacagtacgagcaattgagtcagtcggagaaaaacaactactattcaagccgtttctccccggattcccagtatattgataatcggagcgtcaacagcgctgggctccataccgtccaacgggcacccaggctgaaccacccaccagaacagatcgacagtcatagccgcctgcctcacagcgcccacccaagcggaaagccgcccagcgcacccgcctcagctccacagaatgtgttctctaccacggtcagctctgggtataataccaaaaaaatcggaaagagactgaatattcagctgaagaaggggaccgagggcctgggctttagcataacctcacgggatgtgacgatcggtggctccgccccaatctacgtgaaaaacatcttacctcgtggggccgccattcaggatggccggctgaaagccggagaccgattgatagaggtgaacggggtcgatttggtgggcaagtctcaggaggaggtggtgtcgctcctcaggtcgaccaaaatggagggcaccgtctcactgctggtgtttcggcaggaagatgcattccatccacgggagctcaacgcagaaccgtcccagatgcagatcccaaaggaaacgaaagccgaggatgaagatattgtcctgactcctgatggaactcgggaattcctgacctttgaggtgccgctgaatgacagtggttccgcgggcctaggcgtcagcgtgaagggcaaccgcagcaaggaaaaccacgccgatctgggcatctttgtgaagtcgatcataaatggaggcgctgcaagtaaggacggacggttgcgggttaatgaccagttgatcgccgtcaacggcgaatccttgctgggaaagaccaaccaggatgctatggagacacttcggcgttcaatgtccaccgaggggaataagcgaggcatgatccagttgatagttgctaggcgcatatctaaatgcaacgagcttaaatcacctggctctccgccaggacccgaactgcccatagagacagcactggatgaccgggaacgccgcatttctcatagtctgtacagcgggattgaagggctggacgagtcgcctagcaggaacgcggccctgtccagaataatggggaagtatcaactgagtcctacagtcaacatgccccaggatgataccgttataattgaggatgatagattgcccgttcttccaccccacctgtctgatcagagctcctcctcctctcatgacgatgtgggatttgttaccgctgacgccggtacctgggccaaggccgccatcagcgactcagccgactgttctttgtccccagacgtagatccggtgttggccttccagagggagggattcggccgccagagtatgtctgagaaacgaaccaagcagttctctgacgcatcccagctagatttcgtcaagactagaaaatcaaaatccatggacttggggatagctgacgaaacgaaactaaacaccgttgatgatcagaaagcgggaagtccatctagagacgtcgggccttccctgggtctgaagaagtcatcaagtttagaatccctgcagaccgctgtggcagaggtaacactgaatggtgacatcccatttcacaggccacgaccaaggataatccgaggccgggggtgtaacgagtcttttcgggccgcaatagataaatcttacgataagcccgcagtcgatgacgatgatgaagggatggagactttggaggaagacacggaagagtcctctcggtcgggtagggagagcgtctctacagccagtgaccaacctagccactccctagaaaggcaaatgaatggcaatcaggagaagggtgataaaaccgaccgcaagaaggacaagacaggcaaagagaaaaaaaaagacagagacaaggaaaaagataagatgaaggccaagaaaggaatgctgaaagggctcggtgatatgtttagtctagctaagttaaagcccgaaaagcgctag

SEQ ID NO: 71442 - DNA, 3518 bp, Artificial Sequence
  derived and/or modified sequence
cccagcggccccgagcgagcgccagcgccacacagccccgggcagccgccggcgagcgcgccgcgacgccgaacaggtggccggaggctgcgggcgccgcggcggggagaggcgaggcaagccccgggcgaagcgaggcgaggcgagggcggccgggccgggcatgcgagctgagcggccccccggcgtcgccgccgcctgcccgcgcccctagccgcccgcgcgcccgagtccccagcggctcctccgcgcccagcgtcctcggtcccggcctcggctgctccggctgcgctcggcgaggggcgcgggcccgcccgcggcggcggcggcatgaaagtgaccgtgtgcttcggacggacccgggtggtcgtgccgtgcggggacggccacatgaaagttttcagcctcatccagcaggcggtgacccgctaccggaaggccatcgccaaggatccaaactactggatacaggtgcatcgcttggaacatggagatggaggaatactagaccttgatgacattctttgtgatgtagcagacgataaagacagactggtagcagtgtttgatgagcaggatccacatcacggaggtgatggcaccagtgccagttccacgggtacccagagcccagagatatttggtagtgagcttggcaccaacaatgtctcagcctttcagccttaccaagcaacaagtgaaattgaggtcacaccttcagtccttcgagcaaatatgcctcttcatgttcgacgcagtagtgacccagctctaattggcctctccacttctgtcagtgatagtaatttttcctctgaagagccttcaaggaaaaatcccacacgctggtcaacaacagctggcttcctcaagcagaacactgctgggagtcctaaaacctgcgacaggaagaaagatgaaaactacagaagcctcccgcgggatactagtaactggtctaaccaatttcagagagacaatgctcgctcgtctctgagtgccagtcacccaatggtgggcaagtggctggagaaacaagaacaggatgaggatgggacagaagaggataacagtcgtgttgaacctgttggacatgctgacacgggtttggagcatatacccaacttttctctggatgatatggtaaagctcgtagaagtccccaacgatggagggcctctgggaatccacgtagtgcctttcagtgctcgaggcggcagaaccctggggttattagtaaaacgattggagaaaggtggtaaagctgaacatgaaaatctttttcgtgagaatgattgcattgtcaggattaatgatggcgaccttcgaaatagaagatttgaacaagcacaacatatgtttcgccaagccatgcgtacacccatcatttggttccatgtggttcctgcagcaaataaagagcagtatgaacaactatcccaaagtgagaagaacaattactattcaagccgttttagccctgacagccagtatattgacaacaggagtgtgaacagtgcagggcttcacacggtgcagagagcaccccgactgaaccacccgcctgagcagatagactctcactcaagactacctcatagcgcacacccctcgggaaaaccaccatccgctccagcctcggcacctcagaatgtatttagtacgactgtaagcagtggttataacaccaaaaaaataggcaagaggcttaatatccagcttaagaaaggtacagaaggtttgggattcagcatcacttccagagatgtaacaataggtggctcagctccaatctatgtgaaaaacattctcccccggggggcggccattcaggatggccgacttaaggcaggagacagacttatagaggtaaatggagtagatttagtgggcaaatcccaagaggaagttgtttcgctgttgagaagcaccaagatggaaggaactgtgagccttctggtctttcgccaggaagacgccttccacccaagggaactgaatgcagagccaagccagatgcagattccaaaagaaacgaaagcagaagatgaggatattgttcttacacctgatggcaccagggaatttctgacatttgaagtcccacttaatgattcaggatctgcaggccttggtgtcagtgtcaaaggtaaccggtcaaaagagaaccacgcagatttgggaatctttgtcaagtccattattaatggaggagcagcatctaaagatggaaggcttcgggtgaatgatcaactgatagcagtaaatggagaatccctgttgggcaagacaaaccaagatgccatggaaaccctaagaaggtctatgtctactgaaggcaataaacgaggaatgatccagcttattgttgcaaggagaataagcaagtgcaatgagctgaagtcacctgggagcccccctggacctgagctgcccattgaaacagcgttggatgatagagaacgaagaatttcccattccctctacagtgggattgaggggcttgatgaatcgcccagcagaaatgctgccctcagtaggataatgggtaaataccagctgtcccctacagtgaatatgccccaagatgacactgtcattatagaagatgacaggttgccagtgcttcctccacatctctctgaccagtcctcttccagctcccatgatgatgtggggtttgtgacggcagatgctggtacttgggccaaggctgcaatcagtgattcagccgactgctctttgagtccagatgttgatccagttcttgcttttcaacgagaaggatttggacgtcagagtatgtcagaaaaacgcacaaagcaattttcagatgccagtcaattggatttcgttaaaacacgaaaatcaaaaagcatggatttaggtatagctgacgagactaaactcaatacagtggatgaccagaaagcaggttctcccagcagagatgtgggtccttccctgggtctgaagaagtcaagctcgttggagagtctgcagaccgcagttgccgaggtgactttgaatggggatattcctttccatcgtccacggccgcggataatcagaggcaggggatgcaatgagagcttcagagctgccatcgacaaatcttatgataaacccgcggtagatgatgatgatgaaggcatggagaccttggaagaagacacagaagaaagttcaagatcagggagagagtctgtatccacagccagtgatcagccttcccactctctggagagacaaatgaatggaaaccaagagaaaggtgataagactgatagaaaaaaggataaaactggaaaagaaaagaagaaagatagagataaggagaaggataaaatgaaagccaagaagggaatgctgaagggcttgggagacatgttcagccttgccaaactgaagcccgagaagagatgaacaacaaagcgattcaaaacatgtcttgaacagcacatattgcacagttgttgttttttttaaacaaacaataaatttacttttaatgaatt

SEQ ID NO: 71443 - DNA, 3096 bp, Artificial Sequence
  derived and/or modified sequence
atgaaggtcactgtctgcttcggtaggacacgggttgttgtcccatgtggagacggtcatatgaaggtcttttccctgatacagcaagcagtcactagataccgcaaggcaatagcaaaagacccaaactactggatccaggtgcaccggctagagcacggagatgggggaatccttgatctggacgatatcctgtgtgatgtggccgacgataaagatagactcgtagccgttttcgacgagcaggacccgcatcatgggggagatggcacatctgcttcatccaccggaacccagagccctgagattttcggttccgaactgggcacgaacaacgtctcagcattccagccatatcaggcaactagcgagatagaggttacccctagtgtcttgagggcgaacatgcccctccatgtgcggaggtcatccgaccctgctttgatcggtctaagcactagtgtgagcgactcaaatttctccagcgaggagcctagcagaaaaaatcccactcggtggagcactaccgcaggatttttgaaacagaacactgcaggttccccgaaaacttgtgaccgcaaaaaagatgaaaactatcgaagcctgccacgcgacacgagtaactggtctaatcagttccaaagggacaacgctcggtcctcgctctcggcctcccatccaatggtggggaaatggctggaaaaacaggaacaggacgaggacggcacagaggaagataactccagagtcgagcctgtaggacatgcagacactggactcgaacatatcccgaatttcagcctggacgacatggttaagttagttgaggtcccgaacgacggtggtcccctggggatccatgtggtgccattttccgccaggggcggtaggacgctgggcctgctggtgaagcgcctggaaaagggtggaaaggccgagcacgaaaacctgtttagagagaacgactgtatcgtaagaatcaacgacggtgatctgcgcaaccgtcgctttgagcaggcacaacatatgttcagacaggccatgcgaaccccaatcatctggttccacgtcgtgccggctgcaaacaaagaacagtatgaacagctgtctcaatcggagaagaataactactactcctctagattttcgccagacagtcagtatattgacaatagatcagtcaacagcgctgggttgcatacagttcagcgcgctccaaggctcaatcatccacctgaacaaattgattcccacagcagactgcctcactctgcacatccctccgggaaaccccctagcgctccggcttccgcaccccagaatgtgtttagcaccaccgtatcaagtgggtacaataccaaaaaaataggaaaaaggctgaatatccagctcaaaaaaggtactgaaggactcgggtttagcataacaagtcgtgatgtcaccatcggcggaagcgcgccaatatatgtaaaaaacatacttcctaggggtgccgctattcaggatgggaggcttaaagcaggggacaggctcattgaggttaacggggtcgacctggtggggaagtcgcaggaggaggtggtgtccctcctgcgcagcaccaagatggaaggtaccgtctcgttgctcgttttccggcaagaagacgccttccatcccagagaacttaacgccgaaccatctcagatgcaaattcctaaggagaccaaagcagaagacgaggatatagtgttgacacccgatgggacaagggagttcctgacctttgaggtgccgctgaacgactcgggctcagccggattgggtgtcagcgtcaaaggcaataggagcaaagaaaaccatgctgacctgggtatatttgtgaagtctatcatcaatggtggagctgcaagcaaagacggccgactcagagtcaatgaccagctcatcgccgtgaacggcgaatctctgctcggcaaaaccaaccaggacgctatggagactttaagacggtccatgtctactgaaggaaataagcgtggcatgatacagttaatcgttgcaaggcgaataagtaaatgcaatgagcttaagtcccctggatccccgccaggcccagagctccccatcgaaaccgctctggatgaccgcgagcgcagaatcagtcactcgctgtactcggggatcgagggtctggatgagtcacctagcaggaatgccgcactgagccgcatcatggggaaataccagctgagccctacagtaaatatgccccaagatgacacagtgataattgaggacgacaggttgccagtactgccgccacatctgtcagaccagtcctctagcagctcccacgatgatgtaggtttcgtgactgccgatgcaggaacttgggccaaagcggctatcagcgattccgctgattgtagtctttcacctgatgtcgatcctgtgctggctttccagcgcgagggctttggcagacagagcatgtctgaaaagcgaacaaaacagtttagtgacgcgagccagttagactttgtgaagactaggaagtctaagagcatggatctgggaatcgccgacgaaacaaagctgaacaccgtcgatgatcaaaaggcgggttctcccagtagagatgtggggccatccctgggtttgaaaaagtctagctccctggaaagccttcagacagccgtcgcagaagtgacacttaacggtgatatccctttccataggcccagaccacgaatcatacgcggaagagggtgtaacgaaagcttccgagcggctattgataaaagctacgataagcccgcagtggatgacgacgacgaaggaatggagaccctggaagaggataccgaagaatcatcccgttccggaagagagtccgtttccacggcctcagaccagccctcccattctctcgagcgccagatgaacggaaaccaggagaagggggacaagacggaccggaagaaggacaaaacaggtaaggaaaagaagaaagatagggacaaagagaaagacaaaatgaaggcgaaaaaaggcatgttgaaaggactcggagacatgttctctctggccaagcttaagccagagaaacgatag

SEQ ID NO: 71444 - DNA, 3096 bp, Artificial Sequence
  derived and/or modified sequence
atgaaggtgaccgtgtgcttcggcagaaccagagtggtggtgccctgcggcgacggccacatgaaggtgttcagcctgatccagcaggccgtgaccagatacagaaaggccatcgccaaggaccccaactactggatccaggtgcacagactggagcacggcgacggcggcatcctggacctggacgacatcctgtgcgacgtggccgacgacaaggacagactggtggccgtgttcgacgagcaggacccccaccacggcggcgacggcaccagcgccagcagcaccggcacccagagccccgagatcttcggcagcgagctgggcaccaacaacgtgagcgccttccagccctaccaggccaccagcgagatcgaggtgacccccagcgtgctgagagccaacatgcccctgcacgtgagaagaagcagcgaccccgccctgatcggcctgagcaccagcgtgagcgacagcaacttcagcagcgaggagcccagcagaaagaaccccaccagatggagcaccaccgccggcttcctgaagcagaacaccgccggcagccccaagacctgcgacagaaagaaggacgagaactacagaagcctgcccagagacaccagcaactggagcaaccagttccagagagacaacgccagaagcagcctgagcgccagccaccccatggtgggcaagtggctggagaagcaggagcaggacgaggacggcaccgaggaggacaacagcagagtggagcccgtgggccacgccgacaccggcctggagcacatccccaacttcagcctggacgacatggtgaagctggtggaggtgcccaacgacggcggccccctgggcatccacgtggtgcccttcagcgccagaggcggcagaaccctgggcctgctggtgaagagactggagaagggcggcaaggccgagcacgagaacctgttcagagagaacgactgcatcgtgagaatcaacgacggcgacctgagaaacagaagattcgagcaggcccagcacatgttcagacaggccatgagaacccccatcatctggttccacgtggtgcccgccgccaacaaggagcagtacgagcagctgagccagagcgagaagaacaactactacagcagcagattcagccccgacagccagtacatcgacaacagaagcgtgaacagcgccggcctgcacaccgtgcagagagcccccagactgaaccacccccccgagcagatcgacagccacagcagactgccccacagcgcccaccccagcggcaagccccccagcgcccccgccagcgccccccagaacgtgttcagcaccaccgtgagcagcggctacaacaccaagaagatcggcaagagactgaacatccagctgaagaagggcaccgagggcctgggcttcagcatcaccagcagagacgtgaccatcggcggcagcgcccccatctacgtgaagaacatcctgcccagaggcgccgccatccaggacggcagactgaaggccggcgacagactgatcgaggtgaacggcgtggacctggtgggcaagagccaggaggaggtggtgagcctgctgagaagcaccaagatggagggcaccgtgagcctgctggtgttcagacaggaggacgccttccaccccagagagctgaacgccgagcccagccagatgcagatccccaaggagaccaaggccgaggacgaggacatcgtgctgacccccgacggcaccagagagttcctgaccttcgaggtgcccctgaacgacagcggcagcgccggcctgggcgtgagcgtgaagggcaacagaagcaaggagaaccacgccgacctgggcatcttcgtgaagagcatcatcaacggcggcgccgccagcaaggacggcagactgagagtgaacgaccagctgatcgccgtgaacggcgagagcctgctgggcaagaccaaccaggacgccatggagaccctgagaagaagcatgagcaccgagggcaacaagagaggcatgatccagctgatcgtggccagaagaatcagcaagtgcaacgagctgaagagccccggcagcccccccggccccgagctgcccatcgagaccgccctggacgacagagagagaagaatcagccacagcctgtacagcggcatcgagggcctggacgagagccccagcagaaacgccgccctgagcagaatcatgggcaagtaccagctgagccccaccgtgaacatgccccaggacgacaccgtgatcatcgaggacgacagactgcccgtgctgcccccccacctgagcgaccagagcagcagcagcagccacgacgacgtgggcttcgtgaccgccgacgccggcacctgggccaaggccgccatcagcgacagcgccgactgcagcctgagccccgacgtggaccccgtgctggccttccagagagagggcttcggcagacagagcatgagcgagaagagaaccaagcagttcagcgacgccagccagctggacttcgtgaagaccagaaagagcaagagcatggacctgggcatcgccgacgagaccaagctgaacaccgtggacgaccagaaggccggcagccccagcagagacgtgggccccagcctgggcctgaagaagagcagcagcctggagagcctgcagaccgccgtggccgaggtgaccctgaacggcgacatccccttccacagacccagacccagaatcatcagaggcagaggctgcaacgagagcttcagagccgccatcgacaagagctacgacaagcccgccgtggacgacgacgacgagggcatggagaccctggaggaggacaccgaggagagcagcagaagcggcagagagagcgtgagcaccgccagcgaccagcccagccacagcctggagagacagatgaacggcaaccaggagaagggcgacaagaccgacagaaagaaggacaagaccggcaaggagaagaagaaggacagagacaaggagaaggacaagatgaaggccaagaagggcatgctgaagggcctgggcgacatgttcagcctggccaagctgaagcccgagaagagatag

SEQ ID NO: 71445 - protein, 988 aa, Artificial Sequence
  derived and/or modified sequence
MKVTVCFGRTRVVVPCGDGHMKVFSLIQQAVTRYRKAIAKDPNYWIQVHRLEHGDGGILDLDDILCDVADDKDRLVAVFDEQDPHHGGDGTSASSTGTQSPEIFGSELGTNNVSAFQPYQATSEIEVTPSVLRANMPLHVRRSSDPALIGLSTSVSDSNFSSEEPSRKNPTRWSTTAGFLKQNTAGSPKTCDRKKDENYRSLPRDTSNWSNQFQRDNARSSLSASHPMVGKWLEKQEQDEDGTEEDNSRVEPVGHADTGLEHIPNFSLDDMVKLVEVPNDGGPLGIHVVPFSARGGRTLGLLVKRLEKGGKAEHENLFRENDCIVRINDGDLRNRRFEQAQHMFRQAMRTPIIWFHVVPAANKEQYEQLSQSEKNNYYSSRFSPDSQYIDNRSVNSAGLHTVQRAPRLNHPPEQIDSHSRLPHSAHPSGKPPSAPASAPQNVFSTTVSSGYNTKKIGKRLNIQLKKGTEGLGFSITSRDVTIGGSAPIYVKNILPRGAAIQDGRLKAGDRLIEVNGVDLVGKSQEEVVSLLRSTKMEGTVSLLVFRQEDAFHPRELKAEDEDIVLTPDGTREFLTFEVPLNDSGSAGLGVSVKGNRSKENHADLGIFVKSIINGGAASKDGRLRVNDQLIAVNGESLLGKTNQDAMETLRRSMSTEGNKRGMIQLIVARRISKCNELKSPGSPPGPELPIETALDDRERRISHSLYSGIEGLDESPSRNAALSRIMGKYQLSPTVNMPQDDTVIIEDDRLPVLPPHLSDQSSSSSHDDVGFVTADAGTWAKAAISDSADCSLSPDVDPVLAFQREGFGRQIADETKLNTVDDQKAGSPSRDVGPSLGLKKSSSLESLQTAVAEVTLNGDIPFHRPRPRIIRGRGCNESFRAAIDKSYDKPAVDDDDEGMETLEEDTEESSRSGRESVSTASDQPSHSLERQMNGNQEKGDKTDRKKDKTGKEKKKDRDKEKDKMKAKKGMLKGLGDMFSLAKLKPEKR

SEQ ID NO: 71446 - DNA, 2967 bp, Artificial Sequence
  derived and/or modified sequence
atgaaggtcaccgtgtgcttcggccggacaagagtggtggtcccgtgtggagacggtcacatgaaggtcttctccctgattcaacaggcggtaacccgatataggaaggctatagcaaaagaccctaactactggattcaggtgcacagactcgagcacggagatggtgggatattagatttagatgatattctgtgcgatgttgccgacgataaagatcggttagtcgcagtattcgatgaacaggatccgcatcacggtggcgacgggaccagcgcttcctccacgggaactcagtctcccgaaatatttgggtcagagctcggcaccaataacgtgtccgcgttccaaccgtaccaggccacaagcgagatcgaagtcaccccctccgtgctgagagcaaacatgccgttgcatgttcggcgtagtagcgatcccgcactgatcggtttgagcactagtgtttccgactccaatttttctagcgaggaaccatcacgcaaaaatcctaccaggtggtccacgacagctggctttctcaagcagaacacagccggctcacctaaaacgtgtgatagaaagaaggacgaaaactacaggtccctcccacgtgacaccagtaattggtccaatcagttccagagagataacgccagaagctcactgtcagcctctcacccaatggttggcaagtggctggaaaaacaggagcaggacgaggacggaacagaagaagataatagccgcgtggaaccagtcgggcacgcggacaccggcctggaacatatcccaaatttcagcctcgatgacatggtcaaactggtggaagtgcctaacgacggaggacccctgggaattcatgtagtacccttcagcgctcgcggtggtagaacattgggcctccttgtcaagagactagagaaaggcggaaaagccgaacatgagaatctgttccgggaaaacgattgcatcgtgcgaataaacgacggagacctgcgaaatagacggtttgagcaggctcagcacatgttccggcaggcaatgcggacccctattatctggttccacgtagtgcccgcggccaataaagaacagtatgagcagctgtcgcagtccgagaagaataactactactcgtcacgcttcagccctgattctcagtacatcgataatcgctcagtgaattctgcaggcttacacaccgtacaacgcgcgcctaggttaaatcaccctccggaacaaatcgatagccattcacgacttccccactctgctcacccttcaggcaagcctccttctgccccagcatcagcgccccagaacgtcttcagcactaccgtgtctagtgggtataacaccaagaaaatcggcaaacgcctgaacattcagctgaaaaaaggcactgagggactcgggttctctattacctcccgcgacgtgaccatcggagggagtgcaccaatctacgtgaaaaatatcctccctcgtggggctgcaatacaggatggccgccttaaagctggagacagactgattgaagtcaacggagtggacctggtggggaagagccaagaggaagttgtgtccctgctccgcagtactaaaatggaaggcactgtgagcttgttagtttttcgtcaggaggacgccttccatccacgggagctgaaggcggaggatgaggatatcgtgctcacacctgatgggacgcgggagtttctcacatttgaagtgcctcttaacgatagtggctctgctgggctcggagtgtcagttaaaggaaatagatctaaagagaatcacgctgatttaggaatcttcgttaaatcgattatcaacggaggagcggcatctaaggacggccgcctccgggtgaacgaccagttgatagcggtgaatggggagtctctactgggcaaaaccaaccaagacgccatggagacactccgccgtagcatgtctacggaagggaataagcgcggaatgattcaactcattgtagcgcggaggatttcaaaatgcaatgaactaaaatcacccggaagcccgcccggcccagagctccccatcgagacagccctcgacgacagggagaggcggatctctcattctctctactcaggtattgagggcttggacgaaagtcctagcaggaatgctgccttatctaggatcatggggaaataccagctgagcccaaccgtgaatatgcctcaggatgacaccgtgataatcgaggatgatcgattaccggtcctgccgcctcacctgagcgatcaatcttcctctagcagccatgacgacgtaggtttcgttactgccgacgcaggaacttgggcaaaagccgcgatatccgacagcgcagattgctcgctctcgccagacgtggatcctgtgctggcctttcagagagagggcttcgggaggcaaatcgctgatgagactaaattaaacaccgtggatgatcagaaggctgggtccccttcccgcgatgtagggccgtccctcggtctcaaaaagtcatctagtttggagtcactacagactgctgtcgccgaggttactctgaatggcgatatcccattccatcgccctagaccaaggattatccgcgggcgcggatgcaatgagagctttcgggctgcaatagacaagtcctatgacaaacctgctgtcgacgacgatgatgaggggatggagaccctcgaagaggatacagaagagtcctcaagatccggtcgagagtccgtgtctacagcgtctgatcagccctcgcattccctggaaagacagatgaatggcaatcaggagaaaggggacaaaacagaccgtaagaaggataaaaccggtaaggagaaaaagaaggatcgggataaagagaaggacaaaatgaaagctaaaaagggaatgctcaagggcctgggggatatgttcagcctggccaaactcaaaccggagaaaagatag

SEQ ID NO: 71447 - DNA, 2967 bp, Artificial Sequence
  derived and/or modified sequence
atgaaggtgacagtgtgctttggaagaaccagggtggtggtgccctgtggagatggccacatgaaggtgttcagcctcatccagcaggccgtgacccgctacaggaaggccatcgccaaggaccccaactactggatccaggtgcaccggctggagcacggagatggcggcatcctggacctggatgacatcctgtgtgatgtggctgatgacaaggaccggctggtggccgtgtttgatgagcaggacccccaccacggcggagatggcaccagcgccagcagcacaggcacccagagccctgagatcttcggcagcgagctgggcaccaacaacgtgtctgccttccagccctaccaggccaccagcgagattgaggtgacccccagcgtgctgcgggccaacatgcccctgcacgtgagaagaagcagtgaccctgccctgattggcctgagcacctctgtgtctgacagcaacttcagcagcgaggagcccagcaggaagaaccccacccgctggagcaccacagctggcttcctgaagcagaacacagctggcagccccaagacctgtgacaggaagaaggatgagaactaccgcagcctgccccgggacaccagcaactggagcaaccagttccagagggacaatgcccggagcagcctgagcgccagccaccccatggtgggcaagtggctggagaagcaggagcaggatgaagatggaacagaggaggacaacagccgggtggagcctgtgggccacgccgacaccggcctggagcacatccccaacttcagcctggatgacatggtgaagctggtggaggtgcccaatgatggcggccccctgggcatccacgtggtgcccttcagcgcccggggcggccgcaccctgggcctgctggtgaagaggctggagaagggcggcaaggccgagcatgaaaatctcttccgggagaatgactgcatcgtgcgcatcaatgatggagacctgaggaacagaagatttgagcaggcccagcacatgttccggcaggccatgaggacccccatcatctggttccacgtggtgcctgctgccaacaaggagcagtatgagcagctgagccagagcgagaagaacaactactacagcagccgcttctccccagacagccagtacatcgacaacagatctgtgaacagcgctggcctgcacacagtgcagagggccccccggctgaaccaccccccagagcagattgacagccacagccggctgccccacagcgcccaccccagcggcaagcccccatctgccccagccagcgccccccagaatgtgttcagcaccaccgtgagcagcggctacaacaccaagaagattggcaagaggctgaacatccagctgaagaagggcacagagggcctgggcttcagcatcaccagcagagatgtgaccatcggcggcagcgcccccatctacgtgaagaacatcctgcccaggggggccgccatccaggacggccgcctgaaggccggggacaggctcatcgaggtgaatggagtggacctggtgggcaagagccaggaggaggtggtgtccctgctgcggagcaccaagatggagggcaccgtgtccctgctggtgttccggcaggaggatgccttccacccccgggagctgaaggcagaagatgaagatattgtgctgaccccagatggcacccgggagttcctgacctttgaggtgcccctgaatgattctggcagcgctggcctgggcgtgtctgtgaagggcaacagaagcaaagaaaatcatgctgacctgggcatctttgtgaagagcatcatcaatggaggagctgccagcaaggatggccgcctgcgggtgaatgaccagctgattgctgtgaatggagagagcctgctgggcaagaccaaccaggatgccatggagaccctgcggcgctccatgagcacagagggcaacaagaggggcatgatccagctgattgtggcccggcgcatcagcaaatgtaatgagctgaagagccctggcagccccccaggccctgagctgcccatcgagacagccctggatgaccgggagcggcgcatcagccacagcctgtacagcggcatcgagggcctggatgagagccccagcagaaatgctgccctgagccgcatcatgggcaagtaccagctgagccccaccgtgaacatgccccaggatgacaccgtcatcattgaagatgaccggctgcctgtgctgcccccccacctgagtgaccagagcagcagcagcagccatgatgatgtgggctttgtgacagcagatgctggcacctgggccaaggccgccatcagtgacagcgctgactgcagcctgagcccagatgtggaccctgtgctggccttccagcgggagggcttcggccggcagattgctgatgagaccaagctgaacacagtggatgaccagaaggccggcagccccagcagagatgtgggccccagcctgggcctgaagaagagcagcagcctggagagcctgcagacagctgtggccgaggtgaccctgaatggagacatccccttccaccggccccggccccgcatcatccggggccggggctgcaatgaaagcttccgggccgccatcgacaagagctatgacaagccagctgtggatgatgatgatgagggcatggagaccctggaggaggacacagaggagagcagccgcagcggccgggagagcgtgtccacagccagtgaccagcccagccacagcctggagcggcagatgaatggaaaccaggagaagggggacaagacagacaggaagaaggacaagacaggcaaggagaagaagaaggaccgggacaaggagaaggacaagatgaaggccaagaagggcatgctgaagggcctgggggacatgttcagcctggccaagctgaagccagagaagaggtag

SEQ ID NO: 71448 - DNA, 2967 bp, Artificial Sequence
  derived and/or modified sequence
atgaaggtgaccgtgtgcttcggccggacccgggtggtggtgccctgtggagacgggcacatgaaggtgttcagcctgatccagcaggcggtcacgaggtacagaaaggcaattgccaaggaccctaactactggattcaggtccaccgcctcgagcacggcgacggtggaatccttgatctggacgacattctctgcgacgttgccgacgataaagaccgtctggtggctgtgttcgacgagcaggatcctcatcatggtggagacggcacttcagcaagcagtaccggtacccagtcccctgagatcttcggatctgaactgggcaccaataacgtttcagcgttccaaccttaccaggccacttccgagatagaagtcaccccatcggtcctgagggctaatatgcctctgcatgtgcgcaggtcgagcgaccctgcacttatcggcttgtcaacctcagtgagcgacagcaatttcagttccgaagagccctcccggaagaaccccacgaggtggtccacgacagccggcttcctgaagcaaaacaccgctggttctccgaagacttgcgacagaaaaaaggacgagaattaccgttcccttccacgcgatacttctaattggagcaaccagtttcaacgcgataatgctcgctcttcactctctgcttcccacccgatggtgggcaaatggctggaaaaacaggagcaggacgaagacgggacggaagaggataacagccgggttgaacccgtgggccatgctgataccggactggagcatataccgaatttcagcctcgacgacatggtgaaactcgtggaggttccaaatgacggcggccccctcggaatccatgtggttccatttagcgcccggggtggcagaactcttggcctccttgtgaagaggctcgagaaaggggggaaagccgagcatgagaatctgtttcgcgagaacgattgcatagtgcggatcaatgatggcgacctgcggaacaggcgtttcgagcaggcccagcacatgtttcggcaggccatgcgcaccccaattatatggttccacgtggtgccagccgccaataaggaacaatatgagcagctttcacagagcgagaagaataattattatagtagtcggttctcccccgactcgcaatacattgacaacaggtccgtcaacagtgccggcctgcacacagtgcagagagccccccgattaaatcatccccccgaacagatcgactcccactctaggctgcctcactccgcccatcccagcggaaagccgccaagcgcacctgcctccgctccacagaacgtcttctcgactactgtgtcaagtggctataataccaaaaagattggcaaacgtctaaacatccagttgaagaagggcacagagggtctggggttcagcattacgtcacgggacgtcacaatcggcggaagcgcgccaatctatgtgaagaacattttgccccggggggccgctatccaggatgggaggctgaaggcaggggatcgactgatcgaagtgaatggggtggatctcgtcggcaaatctcaggaggaggtggtttccctgcttagatctacaaaaatggaggggactgtgtcactgttagtgtttaggcaggaagatgccttccacccccgagaactgaaggccgaagatgaggacattgtcctcacacctgacggcacccgggagttcctcactttcgaagtgccactaaacgatagcggcagcgcggggctgggtgtgtccgtgaaaggaaatagaagcaaagagaaccacgcagacttgggaatcttcgtaaagtcgattatcaacggcggggccgcctccaaggatggaaggctccgggttaatgatcagcttatcgcggttaatggagagtcactgttaggtaaaacgaatcaggacgccatggaaacactgagaagaagcatgtcaaccgaaggcaacaaaaggggaatgatccagctcattgtcgcccggcggatttcaaagtgtaacgagcttaagtctcctggcagccctcctggtcccgaactgcccattgagaccgctttagacgaccgggaacgtaggatctcacacagcctgtacagtggaatagaaggtctcgatgaatcaccctcccgaaatgctgcactgtccagaattatgggtaagtaccagctcagtccaaccgttaacatgccccaagacgacactgtaatcattgaggacgataggttacccgtgctgcctcctcatctgtcagatcagtctagcagtagctctcatgatgacgtcggcttcgtcaccgccgacgccggtacatgggccaaagccgcaatctcagacagtgctgactgctcactttctccagacgtggatccagttctggcgtttcagagagaaggatttggcagacagatagccgacgaaaccaaacttaatacagtggatgatcagaaggccgggtcgccatcccgagacgtagggccatccttggggctaaaaaagtccagctctctggagtccctacagaccgccgtggcagaggtgaccctaaatggcgacattcctttccaccgcccacgccccagaattatcaggggcaggggctgcaacgagtcttttagggccgccatcgacaagagttatgacaagcctgccgtagatgacgatgatgaggggatggaaacactagaggaggacactgaggagtcgtctaggagcgggcgggagtcagtttccaccgcaagcgatcagcctagccatagcttggagcgacagatgaatggcaaccaggaaaaaggagataagaccgatcgcaaaaaagataagactggtaaagaaaaaaagaaggacagggataaggagaaagacaagatgaaggccaagaagggcatgctcaaagggctgggtgacatgttttcattggccaagctgaagccagagaagagatag

SEQ ID NO: 71449 - DNA, 3389 bp, Artificial Sequence
  derived and/or modified sequence
gcggccccgagcgagcgccagcgccacacagccccgggcagccgccggcgagcgcgccgcgacgccgaacaggtggccggaggctgcgggcgccgcggcggggagaggcgaggcaagccccgggcgaagcgaggcgaggcgagggcggccgggccgggcatgcgagctgagcggccccccggcgtcgccgccgcctgcccgcgcccctagccgcccgcgcgcccgagtccccagcggctcctccgcgcccagcgtcctcggtcccggcctcggctgctccggctgcgctcggcgaggggcgcgggcccgcccgcggcggcggcggcatgaaagtgaccgtgtgcttcggacggacccgggtggtcgtgccgtgcggggacggccacatgaaagttttcagcctcatccagcaggcggtgacccgctaccggaaggccatcgccaaggatccaaactactggatacaggtgcatcgcttggaacatggagatggaggaatactagaccttgatgacattctttgtgatgtagcagacgataaagacagactggtagcagtgtttgatgagcaggatccacatcacggaggtgatggcaccagtgccagttccacgggtacccagagcccagagatatttggtagtgagcttggcaccaacaatgtctcagcctttcagccttaccaagcaacaagtgaaattgaggtcacaccttcagtccttcgagcaaatatgcctcttcatgttcgacgcagtagtgacccagctctaattggcctctccacttctgtcagtgatagtaatttttcctctgaagagccttcaaggaaaaatcccacacgctggtcaacaacagctggcttcctcaagcagaacactgctgggagtcctaaaacctgcgacaggaagaaagatgaaaactacagaagcctcccgcgggatactagtaactggtctaaccaatttcagagagacaatgctcgctcgtctctgagtgccagtcacccaatggtgggcaagtggctggagaaacaagaacaggatgaggatgggacagaagaggataacagtcgtgttgaacctgttggacatgctgacacgggtttggagcatatacccaacttttctctggatgatatggtaaagctcgtagaagtccccaacgatggagggcctctgggaatccacgtagtgcctttcagtgctcgaggcggcagaaccctggggttattagtaaaacgattggagaaaggtggtaaagctgaacatgaaaatctttttcgtgagaatgattgcattgtcaggattaatgatggcgaccttcgaaatagaagatttgaacaagcacaacatatgtttcgccaagccatgcgtacacccatcatttggttccatgtggttcctgcagcaaataaagagcagtatgaacaactatcccaaagtgagaagaacaattactattcaagccgttttagccctgacagccagtatattgacaacaggagtgtgaacagtgcagggcttcacacggtgcagagagcaccccgactgaaccacccgcctgagcagatagactctcactcaagactacctcatagcgcacacccctcgggaaaaccaccatccgctccagcctcggcacctcagaatgtatttagtacgactgtaagcagtggttataacaccaaaaaaataggcaagaggcttaatatccagcttaagaaaggtacagaaggtttgggattcagcatcacttccagagatgtaacaataggtggctcagctccaatctatgtgaaaaacattctcccccggggggcggccattcaggatggccgacttaaggcaggagacagacttatagaggtaaatggagtagatttagtgggcaaatcccaagaggaagttgtttcgctgttgagaagcaccaagatggaaggaactgtgagccttctggtctttcgccaggaagacgccttccacccaagggaactgaaagcagaagatgaggatattgttcttacacctgatggcaccagggaatttctgacatttgaagtcccacttaatgattcaggatctgcaggccttggtgtcagtgtcaaaggtaaccggtcaaaagagaaccacgcagatttgggaatctttgtcaagtccattattaatggaggagcagcatctaaagatggaaggcttcgggtgaatgatcaactgatagcagtaaatggagaatccctgttgggcaagacaaaccaagatgccatggaaaccctaagaaggtctatgtctactgaaggcaataaacgaggaatgatccagcttattgttgcaaggagaataagcaagtgcaatgagctgaagtcacctgggagcccccctggacctgagctgcccattgaaacagcgttggatgatagagaacgaagaatttcccattccctctacagtgggattgaggggcttgatgaatcgcccagcagaaatgctgccctcagtaggataatgggtaaataccagctgtcccctacagtgaatatgccccaagatgacactgtcattatagaagatgacaggttgccagtgcttcctccacatctctctgaccagtcctcttccagctcccatgatgatgtggggtttgtgacggcagatgctggtacttgggccaaggctgcaatcagtgattcagccgactgctctttgagtccagatgttgatccagttcttgcttttcaacgagaaggatttggacgtcagatagctgacgagactaaactcaatacagtggatgaccagaaagcaggttctcccagcagagatgtgggtccttccctgggtctgaagaagtcaagctcgttggagagtctgcagaccgcagttgccgaggtgactttgaatggggatattcctttccatcgtccacggccgcggataatcagaggcaggggatgcaatgagagcttcagagctgccatcgacaaatcttatgataaacccgcggtagatgatgatgatgaaggcatggagaccttggaagaagacacagaagaaagttcaagatcagggagagagtctgtatccacagccagtgatcagccttcccactctctggagagacaaatgaatggaaaccaagagaaaggtgataagactgatagaaaaaaggataaaactggaaaagaaaagaagaaagatagagataaggagaaggataaaatgaaagccaagaagggaatgctgaagggcttgggagacatgttcagccttgccaaactgaagcccgagaagagatgaacaacaaagcgattcaaaacatgtcttgaacagcacatattgcacagttgttgttttttttaaacaaacaataaatttacttttaatgaattctta

SEQ ID NO: 71450 - DNA, 2967 bp, Artificial Sequence
  derived and/or modified sequence
atgaaggtgacagtgtgcttcggccgtacacgggtggttgtgccgtgcggcgatggtcacatgaaggtgttcagcctgatccagcaggccgtaacccggtaccgcaaggccatagccaaggatcccaattattggatacaagttcatcgcctggaacacggcgacggcggaattcttgacctggatgatattctatgtgatgtagccgacgacaaagatcggcttgttgcggtctttgacgagcaggatccccaccatggtggggatggaacttcagcgtccagcacaggcacacagagccctgaaattttcggctccgaactcgggactaacaacgtgagtgcgttccagccttaccaggcaacaagcgagatagaagtgacgccaagcgtcctgcgagcaaatatgcctctgcacgtacgacgctcatctgacccagccctcattggtttaagtactagcgtcagcgattctaatttttcttccgaggagccaagtcggaagaatcccacacgatggtctaccaccgctggatttctaaaacagaataccgccggatctccgaagacgtgtgataggaaaaaggacgaaaattaccgtagtcttccaagagatacctcaaattggtctaaccagtttcagagagataatgctcggtcctcgctgtcagcctcacatcccatggttggaaagtggctggaaaaacaagagcaggatgaagacgggacagaagaggacaactcccgtgttgaacctgtaggacacgcagacacagggctcgagcatatccccaacttctctttagacgacatggtcaaattagtggaagtgcctaatgatggaggccctctgggtatccacgtggtcccattcagcgcccgtgggggacgtacactgggcttgttggtgaagagactcgagaaaggagggaaagctgagcacgaaaacctctttcgggaaaacgactgcatcgtgcggattaacgatggagatctgagaaaccgcaggtttgaacaggcccagcacatgtttcgtcaggccatgagaacacctatcatctggtttcatgtggtcccagctgccaacaaggagcagtacgagcaactatctcaaagcgagaagaacaactattactcctcccggtttagcccggactcccaatatattgataacaggagcgtaaatagcgctggtttacataccgtccagcgtgcccctcgcttgaaccaccctcctgaacaaatcgacagtcactctagactgccccacagcgcacaccctagtgggaaacccccttctgcacccgctagcgctccccagaatgtcttctctaccacagtctccagcggatataatactaaaaaaatcggcaaaaggttgaacattcagctgaaaaagggaactgagggtttagggtttagtataacatcccgcgacgtgactattggtggctctgctcctatttatgtgaaaaacattctgccacgcggagcagccattcaggatgggcgactcaaagctggcgataggttaatcgaagttaatggtgttgacttggttggcaagagccaagaagaggtggtttctcttttacgatcaactaaaatggagggaacagtgtccctcctcgtgttcagacaagaggatgcatttcacccgagggagctgaaagccgaggatgaagacatagtcttgactccagacggcacgagagagtttttgacctttgaggttccactgaatgacagcggttctgcaggcctcggagttagtgtgaaggggaatcgatccaaggaaaaccacgcagatctcggcatttttgtgaagagtattattaacggcggagccgcttcgaaagacgggaggttacgggtgaacgatcagttaatagcggtgaatggagaaagtctgctggggaagaccaatcaggatgcaatggagactctgaggcggtctatgagcactgagggcaataaaagaggaatgatccagctgattgtagctcggcgaattagcaaatgtaacgaattgaagtcacctggtagtccacccggaccagaacttccgatcgagaccgcattagatgatcgagagcgcagaattagtcatagtctgtatagtggaatagaagggctcgacgagtctcccagtcgcaatgctgctctaagcagaatcatggggaaataccagctctcccccaccgtgaacatgcctcaggatgatactgtcatcatcgaggacgaccgccttcccgttctgcctcctcatctgagcgaccagagtagctccagcagtcacgatgacgtcggtttcgtgacggccgacgcagggacctgggccaaggctgcaatctccgatagtgcagattgttcactgtctcctgatgtggaccctgtgctggcttttcagcgggaaggcttcgggcgacagatagccgacgagaccaaactcaacactgtggatgaccagaaagctggaagtccctccagagatgtaggaccttccctggggctgaagaagagctccagtctagagagtctccagactgcagttgccgaagttacattaaatggtgacataccatttcaccgaccacgaccacggattatacggggaaggggctgcaacgaaagcttcagggcagctatagataagagctacgataagccggctgtcgatgacgatgacgagggaatggaaaccttggaggaggacactgaggaaagtagtcgcagcgggagagagtcagtgagcacagctagcgaccagccatctcatagtctcgagcgccagatgaatggaaatcaggagaagggggataaaactgaccggaaaaaggacaagaccggaaaggagaagaagaaggatcgagacaaagaaaaggacaagatgaaagccaagaaaggcatgctaaagggactgggcgacatgttctcactggcaaagttgaaacccgaaaagaggtag

SEQ ID NO: 71451 - DNA, 2967 bp, Artificial Sequence
  derived and/or modified sequence
atgaaggtgaccgtgtgcttcggcagaaccagagtggtggtgccctgcggcgacggccacatgaaggtgttcagcctgatccagcaggccgtgaccagatacagaaaggccatcgccaaggaccccaactactggatccaggtgcacagactggagcacggcgacggcggcatcctggacctggacgacatcctgtgcgacgtggccgacgacaaggacagactggtggccgtgttcgacgagcaggacccccaccacggcggcgacggcaccagcgccagcagcaccggcacccagagccccgagatcttcggcagcgagctgggcaccaacaacgtgagcgccttccagccctaccaggccaccagcgagatcgaggtgacccccagcgtgctgagagccaacatgcccctgcacgtgagaagaagcagcgaccccgccctgatcggcctgagcaccagcgtgagcgacagcaacttcagcagcgaggagcccagcagaaagaaccccaccagatggagcaccaccgccggcttcctgaagcagaacaccgccggcagccccaagacctgcgacagaaagaaggacgagaactacagaagcctgcccagagacaccagcaactggagcaaccagttccagagagacaacgccagaagcagcctgagcgccagccaccccatggtgggcaagtggctggagaagcaggagcaggacgaggacggcaccgaggaggacaacagcagagtggagcccgtgggccacgccgacaccggcctggagcacatccccaacttcagcctggacgacatggtgaagctggtggaggtgcccaacgacggcggccccctgggcatccacgtggtgcccttcagcgccagaggcggcagaaccctgggcctgctggtgaagagactggagaagggcggcaaggccgagcacgagaacctgttcagagagaacgactgcatcgtgagaatcaacgacggcgacctgagaaacagaagattcgagcaggcccagcacatgttcagacaggccatgagaacccccatcatctggttccacgtggtgcccgccgccaacaaggagcagtacgagcagctgagccagagcgagaagaacaactactacagcagcagattcagccccgacagccagtacatcgacaacagaagcgtgaacagcgccggcctgcacaccgtgcagagagcccccagactgaaccacccccccgagcagatcgacagccacagcagactgccccacagcgcccaccccagcggcaagccccccagcgcccccgccagcgccccccagaacgtgttcagcaccaccgtgagcagcggctacaacaccaagaagatcggcaagagactgaacatccagctgaagaagggcaccgagggcctgggcttcagcatcaccagcagagacgtgaccatcggcggcagcgcccccatctacgtgaagaacatcctgcccagaggcgccgccatccaggacggcagactgaaggccggcgacagactgatcgaggtgaacggcgtggacctggtgggcaagagccaggaggaggtggtgagcctgctgagaagcaccaagatggagggcaccgtgagcctgctggtgttcagacaggaggacgccttccaccccagagagctgaaggccgaggacgaggacatcgtgctgacccccgacggcaccagagagttcctgaccttcgaggtgcccctgaacgacagcggcagcgccggcctgggcgtgagcgtgaagggcaacagaagcaaggagaaccacgccgacctgggcatcttcgtgaagagcatcatcaacggcggcgccgccagcaaggacggcagactgagagtgaacgaccagctgatcgccgtgaacggcgagagcctgctgggcaagaccaaccaggacgccatggagaccctgagaagaagcatgagcaccgagggcaacaagagaggcatgatccagctgatcgtggccagaagaatcagcaagtgcaacgagctgaagagccccggcagcccccccggccccgagctgcccatcgagaccgccctggacgacagagagagaagaatcagccacagcctgtacagcggcatcgagggcctggacgagagccccagcagaaacgccgccctgagcagaatcatgggcaagtaccagctgagccccaccgtgaacatgccccaggacgacaccgtgatcatcgaggacgacagactgcccgtgctgcccccccacctgagcgaccagagcagcagcagcagccacgacgacgtgggcttcgtgaccgccgacgccggcacctgggccaaggccgccatcagcgacagcgccgactgcagcctgagccccgacgtggaccccgtgctggccttccagagagagggcttcggcagacagatcgccgacgagaccaagctgaacaccgtggacgaccagaaggccggcagccccagcagagacgtgggccccagcctgggcctgaagaagagcagcagcctggagagcctgcagaccgccgtggccgaggtgaccctgaacggcgacatccccttccacagacccagacccagaatcatcagaggcagaggctgcaacgagagcttcagagccgccatcgacaagagctacgacaagcccgccgtggacgacgacgacgagggcatggagaccctggaggaggacaccgaggagagcagcagaagcggcagagagagcgtgagcaccgccagcgaccagcccagccacagcctggagagacagatgaacggcaaccaggagaagggcgacaagaccgacagaaagaaggacaagaccggcaaggagaagaagaaggacagagacaaggagaaggacaagatgaaggccaagaagggcatgctgaagggcctgggcgacatgttcagcctggccaagctgaagcccgagaagagatag

SEQ ID NO: 71452 - protein, 1114 aa, Artificial Sequence
  derived and/or modified sequence
MERSPGEGPSPSPMDQPSAPSDPTDQPPAAHAKPDPGSGGQPAGPGAAGEALAVLTSFGRRLLVLIPVYLAGAVGLSVGFVLFGLALYLGWRRVRDEKERSLRAARQLLDDEEQLTAKTLYMSHRELPAWVSFPDVEKAEWLNKIVAQVWPFLGQYMEKLLAETVAPAVRGSNPHLQTFTFTRVELGEKPLRIIGVKVHPGQRKEQILLDLNISYVGDVQIDVEVKKYFCKAGVKGMQLHGVLRVILEPLIGDLPFVGAVSMFFIRRPTLDINWTGMTNLLDIPGLSSLSDTMIMDSIAAFLVLPNRLLVPLVPDLQDVAQLRSPLPRGIIRIHLLAARGLSSKDKYVKGLIEGKSDPYALVRLGTQTFCSRVIDEELNPQWGETYEVMVHEVPGQEIEVEVFDKDPDKDDFLGRMKLDVGKVLQASVLDDWFPLQGGQGQVHLRLEWLSLLSDAEKLEQVLQWNWGVSSRPDPPSAAILVVYLDRAQDLPMVTSELYPPQLKKGNKEPNPMVQLSIQDVTQESKAVYSTNCPVWEEAFRFFLQDPQSQELDVQVKDDSRALTLGALTLPLARLLTAPELILDQWFQLSSSGPNSRLYMKLVMRILYLDSSEICFPTVPGCPGAWDVDSENPQRGSSVDAPPRPCHTTPDSQFGTEHVLRIHVLEAQDLIAKDRFLGGLVKGKSDPYVKLKLAGRSFRSHVVREDLNPRWNEVFEVIVTSVPGQELEVEVFDKDLDKDDFLGRCKVRLTTVLNSGFLDEWLTLEDVPSGRLHLRLERLTPRPTAAELEEVLQVNSLIQTQKSAELAAALLSIYMERAEDLPLRKGTKHLSPYATLTVGDSSHKTKTISQTSAPVWDESASFLIRKPHTESLELQVRGEGTGVLGSLSLPLSELLVADQLCLDRWFTLSSGQGQVLLRAQLGILVSQHSGVEAHSHSYSHSSSSLSEEPELSGGPPHITSSAPELRQRLTHVDSPLEAPAGPLGQVKLTLWYYSEERKLVSIVHGCRSLRQNGRDPPDPYVSLLLLPDKNRGTKRRTSQKKRTLSPEFNERFEWELPLDEAQRRKLDVSVKSNSSFMSRERELLGKVQLDLAETDLSQGVARWYDLMDNKDKGSS

SEQ ID NO: 71453 - DNA, 3345 bp, Artificial Sequence
  derived and/or modified sequence
atggagagaagccccggcgagggccccagccccagccccatggaccagcccagcgcccccagcgaccccaccgaccagccccccgccgcccacgccaagcccgaccccggcagcggcggccagcccgccggccccggcgccgccggcgaggccctggccgtgctgaccagcttcggcagaagactgctggtgctgatccccgtgtacctggccggcgccgtgggcctgagcgtgggcttcgtgctgttcggcctggccctgtacctgggctggagaagagtgagagacgagaaggagagaagcctgagagccgccagacagctgctggacgacgaggagcagctgaccgccaagaccctgtacatgagccacagagagctgcccgcctgggtgagcttccccgacgtggagaaggccgagtggctgaacaagatcgtggcccaggtgtggcccttcctgggccagtacatggagaagctgctggccgagaccgtggcccccgccgtgagaggcagcaacccccacctgcagaccttcaccttcaccagagtggagctgggcgagaagcccctgagaatcatcggcgtgaaggtgcaccccggccagagaaaggagcagatcctgctggacctgaacatcagctacgtgggcgacgtgcagatcgacgtggaggtgaagaagtacttctgcaaggccggcgtgaagggcatgcagctgcacggcgtgctgagagtgatcctggagcccctgatcggcgacctgcccttcgtgggcgccgtgagcatgttcttcatcagaagacccaccctggacatcaactggaccggcatgaccaacctgctggacatccccggcctgagcagcctgagcgacaccatgatcatggacagcatcgccgccttcctggtgctgcccaacagactgctggtgcccctggtgcccgacctgcaggacgtggcccagctgagaagccccctgcccagaggcatcatcagaatccacctgctggccgccagaggcctgagcagcaaggacaagtacgtgaagggcctgatcgagggcaagagcgacccctacgccctggtgagactgggcacccagaccttctgcagcagagtgatcgacgaggagctgaacccccagtggggcgagacctacgaggtgatggtgcacgaggtgcccggccaggagatcgaggtggaggtgttcgacaaggaccccgacaaggacgacttcctgggcagaatgaagctggacgtgggcaaggtgctgcaggccagcgtgctggacgactggttccccctgcagggcggccagggccaggtgcacctgagactggagtggctgagcctgctgagcgacgccgagaagctggagcaggtgctgcagtggaactggggcgtgagcagcagacccgacccccccagcgccgccatcctggtggtgtacctggacagagcccaggacctgcccatggtgaccagcgagctgtaccccccccagctgaagaagggcaacaaggagcccaaccccatggtgcagctgagcatccaggacgtgacccaggagagcaaggccgtgtacagcaccaactgccccgtgtgggaggaggccttcagattcttcctgcaggacccccagagccaggagctggacgtgcaggtgaaggacgacagcagagccctgaccctgggcgccctgaccctgcccctggccagactgctgaccgcccccgagctgatcctggaccagtggttccagctgagcagcagcggccccaacagcagactgtacatgaagctggtgatgagaatcctgtacctggacagcagcgagatctgcttccccaccgtgcccggctgccccggcgcctgggacgtggacagcgagaacccccagagaggcagcagcgtggacgccccccccagaccctgccacaccacccccgacagccagttcggcaccgagcacgtgctgagaatccacgtgctggaggcccaggacctgatcgccaaggacagattcctgggcggcctggtgaagggcaagagcgacccctacgtgaagctgaagctggccggcagaagcttcagaagccacgtggtgagagaggacctgaaccccagatggaacgaggtgttcgaggtgatcgtgaccagcgtgcccggccaggagctggaggtggaggtgttcgacaaggacctggacaaggacgacttcctgggcagatgcaaggtgagactgaccaccgtgctgaacagcggcttcctggacgagtggctgaccctggaggacgtgcccagcggcagactgcacctgagactggagagactgacccccagacccaccgccgccgagctggaggaggtgctgcaggtgaacagcctgatccagacccagaagagcgccgagctggccgccgccctgctgagcatctacatggagagagccgaggacctgcccctgagaaagggcaccaagcacctgagcccctacgccaccctgaccgtgggcgacagcagccacaagaccaagaccatcagccagaccagcgcccccgtgtgggacgagagcgccagcttcctgatcagaaagccccacaccgagagcctggagctgcaggtgagaggcgagggcaccggcgtgctgggcagcctgagcctgcccctgagcgagctgctggtggccgaccagctgtgcctggacagatggttcaccctgagcagcggccagggccaggtgctgctgagagcccagctgggcatcctggtgagccagcacagcggcgtggaggcccacagccacagctacagccacagcagcagcagcctgagcgaggagcccgagctgagcggcggccccccccacatcaccagcagcgcccccgagctgagacagagactgacccacgtggacagccccctggaggcccccgccggccccctgggccaggtgaagctgaccctgtggtactacagcgaggagagaaagctggtgagcatcgtgcacggctgcagaagcctgagacagaacggcagagacccccccgacccctacgtgagcctgctgctgctgcccgacaagaacagaggcaccaagagaagaaccagccagaagaagagaaccctgagccccgagttcaacgagagattcgagtgggagctgcccctggacgaggcccagagaagaaagctggacgtgagcgtgaagagcaacagcagcttcatgagcagagagagagagctgctgggcaaggtgcagctggacctggccgagaccgacctgagccagggcgtggccagatggtacgacctgatggacaacaaggacaagggcagcagctag

SEQ ID NO: 71454 - DNA, 3577 bp, Artificial Sequence
  derived and/or modified sequence
aggcaacctccagccagtccctgggtcgggcggatcctcccagaggtggcacaatggagcgatctccaggagagggccccagccccagccccatggaccagccctctgctccctccgaccccactgaccagccccccgctgctcacgcaaagccagacccaggttctgggggccaacctgctggccctggcgcggcgggtgaggccctggcggtgctgacttcattcgggaggcggttgctggtgctgatacctgtgtatttggccggggcagtgggactcagcgtgggtttcgtgctcttcggcctcgccctctacctgggctggcgccgggtccgcgacgagaaagaacggagccttcgagcagcgaggcagctactggacgacgaggagcagctcactgcgaaaactctctatatgagtcatcgagagctacctgcctgggtcagcttcccagacgtggaaaaggctgaatggctcaataagattgtggcccaggtctggcccttcctgggccagtatatggagaagcttctggctgaaactgtggctccggctgttaggggatctaacccccatctgcaaacatttacatttacacgagtggaactgggtgaaaagccattgcgcatcattggagtcaaggttcacccaggtcagagaaaagagcagatcctgctggacttgaacatcagctatgtaggtgatgtgcagattgatgtggaagtgaagaaatatttttgcaaagcaggagtcaagggcatgcagctacatggcgttttgcgggtgatactggagccactcattggggaccttcccttcgtgggggctgtgtcaatgttcttcatccgacgcccgaccctagacatcaactggacagggatgaccaacctgctggatatcccaggacttagctcactctctgacaccatgatcatggactccattgctgccttcctcgtgttgcccaaccgattactggtgccccttgtgcctgaccttcaagatgtggctcagttgcgttcccctctgcccaggggcattattcgaattcacctgctggctgctcgagggctgagttccaaggacaaatatgtgaagggcctgattgagggcaagtcagacccatatgcacttgtgcgtttgggtacccagacattctgcagtcgtgtcattgatgaagaactcaacccacagtggggagagacttatgaggtgatggtacacgaggtcccagggcaggagattgaagtggaggtgttcgacaaggatccagataaagatgactttctgggcagaatgaagctggatgtagggaaggtgttacaggctagcgttctggatgattggttccctctacaaggtgggcaaggccaagttcacttgaggctagaatggctgtcacttttgtcagatgcagagaaactggagcaggttctacagtggaattggggagtctcctctcgaccagatcccccgtcagctgccatcttagttgtctacctggatcgggcccaggatcttcctatggtgacctctgaattgtacccaccacagctgaagaaggggaacaaggaacccaaccctatggtacaactgtcaattcaggatgtgactcaggagagcaaggctgtctacagtaccaactgcccagtgtgggaggaagcgttccggttcttcctacaagaccctcaaagccaggagctcgatgtgcaagtgaaggatgattccagggccctgactttaggagcactgacgctgcctctggcccgcctgctgactgccccagaactcatcctggaccagtggttccagctcagcagctctggtccaaactccagactctatatgaaactagtcatgaggatcctgtacttggattcatcagaaatatgcttccccacggtgcctggttgtcctggtgcttgggacgtggacagtgagaatccccagagaggcagcagtgtggatgccccacctcgaccctgtcacacgactcctgatagccagtttgggactgagcatgtgcttcggatccatgtattagaggcccaggacctgattgccaaagaccgtttcttggggggactggtgaagggcaagtcagacccctatgtcaaactaaagttggcaggacgaagcttccggagccatgttgttcgggaagatctcaatccccgctggaatgaggtttttgaggtgatcgtcacatcagttccaggccaagagctagaggttgaagtctttgacaaggacttggacaaggatgattttctgggcaggtgtaaagtgcgtctcaccacagtcttaaacagtggcttccttgatgagtggctgaccctggaggatgtcccatctggccgcctgcacttgcgcctggagcgtctcaccccccgtcccactgctgctgagttagaggaggtgctgcaggtgaatagtttgatccagactcagaagagtgcggagctggctgcggccctgctatccatctatatggagcgggcagaggacctcccgctgcgaaaaggcaccaagcacctcagcccttatgctactctcactgtgggagatagttctcataaaaccaagactatttcgcaaacttcagcccctgtctgggatgagagtgcctcctttctcatcaggaaaccacacactgagagcctagagttgcaggttcggggtgagggcactggcgtgctgggctcattatccctgcccctctcagagctcctcgtggctgaccagctctgcttggaccgctggtttacactcagcagtggtcaggggcaggtgctactgagagcacagctagggatcctggtgtcccagcactcgggagtggaagctcatagccacagctacagccacagctcctcatcgctgagtgaagaaccagagctctcggggggaccccctcacatcacctcctcagccccagagctccggcagcgcctaacacatgttgacagtccccttgaggctccagccgggcctctgggccaggtgaaactgactctgtggtactacagtgaagaacgaaagctggtcagcattgttcatggttgccggtcccttcgacagaatggacgtgatcctcctgatccctatgtgtcactgttgctactgccagacaagaaccgaggcaccaagaggaggacctcacagaagaagaggaccctgagtcctgaatttaatgaacggtttgagtgggaactccccctggatgaggcccagagacgaaagctggatgtctctgtcaagtctaattcctccttcatgtcaagagagcgtgagctgctggggaaggtgcagctggacctagctgagacagacctttcccagggtgtagcccggtggtatgacctgatggacaacaaggacaagggcagctcctaggagctggcgagtcccagcctgactgctctgtcttcctgccttcgtctcgctccatcaccgcctcaatgtgatgagcctaaagctagggtccaagggcagagcctgtgcccttcagccctttcacctaacaggcccatattcgggcctttgcctgaccaaagagaagaaccgtatgttcc

SEQ ID NO: 71455 - DNA, 3727 bp, Artificial Sequence
  derived and/or modified sequence
aggcaacctccagccagtccctgggtcgggcggatcctcccagaggtggcacaatggagcgatctccaggagagggccccagccccagccccatggaccagccctctgctccctccgaccccactgaccagccccccgctgctcacgcaaagccagacccaggttctgggggccaacctgctggccctggcgcggcgggtgaggccctggcggtgctgacttcattcgggaggcggttgctggtgctgatacctgtgtatttggccggggcagtgggactcagcgtgggtttcgtgctcttcggcctcgccctctacctgggctggcgccgggtccgcgacgagaaagaacggagccttcgagcagcgaggcagctactggacgacgaggagcagctcactgcgaaaactctctatatgagtcatcgagagctacctgcctgggtcagcttcccagacgtggaaaaggctgaatggctcaataagattgtggcccaggtctggcccttcctgggccagtatatggagaagcttctggctgaaactgtggctccggctgttaggggatctaacccccatctgcaaacatttacatttacacgagtggaactgggtgaaaagccattgcgcatcattggagtcaaggttcacccaggtcagagaaaagagcagatcctgctggacttgaacatcagctatgtaggtgatgtgcagattgatgtggaagtgaagaaatatttttgcaaagcaggagtcaagggcatgcagctacatggcgttttgcgggtgatactggagccactcattggggaccttcccttcgtgggggctgtgtcaatgttcttcatccgacgcccgaccctagacatcaactggacagggatgaccaacctgctggatatcccaggacttagctcactctctgacaccatgatcatggactccattgctgccttcctcgtgttgcccaaccgattactggtgccccttgtgcctgaccttcaagatgtggctcagttgcgttcccctctgcccaggggcattattcgaattcacctgctggctgctcgagggctgagttccaaggacaaatatgtgaagggcctgattgagggcaagtcagacccatatgcacttgtgcgtttgggtacccagacattctgcagtcgtgtcattgatgaagaactcaacccacagtggggagagacttatgaggtgatggtacacgaggtcccagggcaggagattgaagtggaggtgttcgacaaggatccagataaagatgactttctgggcagaatgaagctggatgtagggaaggtgttacaggctagcgttctggatgattggttccctctacaaggtgggcaaggccaagttcacttgaggctagaatggctgtcacttttgtcagatgcagagaaactggagcaggttctacagtggaattggggagtctcctctcgaccagatcccccgtcagctgccatcttagttgtctacctggatcgggcccaggatcttcctatggtgacctctgaattgtacccaccacagctgaagaaggggaacaaggaacccaaccctatggtacaactgtcaattcaggatgtgactcaggagagcaaggctgtctacagtaccaactgcccagtgtgggaggaagcgttccggttcttcctacaagaccctcaaagccaggagctcgatgtgcaagtgaaggatgattccagggccctgactttaggagcactgacgctgcctctggcccgcctgctgactgccccagaactcatcctggaccagtggttccagctcagcagctctggtccaaactccagactctatatgaaactagtcatgaggatcctgtacttggattcatcagaaatatgcttccccacggtgcctggttgtcctggtgcttgggacgtggacagtgagaatccccagagaggcagcagtgtggatgccccacctcgaccctgtcacacgactcctgatagccagtttgggactgagcatgtgcttcggatccatgtattagaggcccaggacctgattgccaaagaccgtttcttggggggactggtgaagggcaagtcagacccctatgtcaaactaaagttggcaggacgaagcttccggagccatgttgttcgggaagatctcaatccccgctggaatgaggtttttgaggtgatcgtcacatcagttccaggccaagagctagaggttgaagtctttgacaaggacttggacaaggatgattttctgggcaggtgtaaagtgcgtctcaccacagtcttaaacagtggcttccttgatgagtggctgaccctggaggatgtcccatctggccgcctgcacttgcgcctggagcgtctcaccccccgtcccactgctgctgagttagaggaggtgctgcaggtgaatagtttgatccagactcagaagagtgcggagctggctgcggccctgctatccatctatatggagcgggcagaggacctcccgctgcgaaaaggcaccaagcacctcagcccttatgctactctcactgtgggagatagttctcataaaaccaagactatttcgcaaacttcagcccctgtctgggatgagagtgcctcctttctcatcaggaaaccacacactgagagcctagagttgcaggttcggggtgagggcactggcgtgctgggctcattatccctgcccctctcagagctcctcgtggctgaccagctctgcttggaccgctggtttacactcagcagtggtcaggggcaggtgctactgagagcacagctagggatcctggtgtcccagcactcgggagtggaagctcatagccacagctacagccacagctcctcatcgctgagtgaagaaccagagctctcggggggaccccctcacatcacctcctcagccccagagctccggcagcgcctaacacatgttgacagtccccttgaggctccagccgggcctctgggccaggtgaaactgactctgtggtactacagtgaagaacgaaagctggtcagcattgttcatggttgccggtcccttcgacagaatggacgtgatcctcctgatccctatgtgtcactgttgctactgccagacaagaaccgaggcaccaagaggaggacctcacagaagaagaggaccctgagtcctgaatttaatgaacggtttgagtgggaactccccctggatgaggcccagagacgaaagctggatgtctctgtcaagtctaattcctccttcatgtcaagagagcgtgagctgctggggaaggtgcagctggacctagctgagacagacctttcccagggtgtagcccggtggtatgacctgatggacaacaaggacaagggcagctcctaggagctggcgagtcccagcctgactgctctgtcttcctgccttcgtctcgctccatcaccgcctcaatgtgatgagcctaaagctagggtccaagggcagagcctgtgcccttcagccctttcacctaacaggcccatattcgggcctttgcctgaccaaagagaagaaccgtatgttccctttactgcacggcctttatccttctgggcccctggggcggggacctgagctggctgtttcctgctttgcctgcacattgttctcccttcctcccaactcctcagggccttctgtatctgtgcctggatcttacattaaacatcatactc

SEQ ID NO: 71456 - DNA, 3345 bp, Artificial Sequence
  derived and/or modified sequence
atggaacggtcacctggcgaaggtccgtccccttctccaatggatcagccttccgctccgtctgatcctaccgaccagcccccagctgcccacgctaagccggacccagggagcggaggccagcctgccggtcccggcgcagccggggaagcgttagccgtactcacttccttcgggagacggctgttggtcttaatcccagtttatttagccggggctgttgggctcagtgtcgggttcgtcctgttcggactggccctgtacttgggatggcgccgcgtcagggatgaaaaagagcggtccctcagggcagctaggcagctcctggacgatgaggaacaactgactgcgaaaacactatacatgtcccatcgggagcttccagcgtgggtgtccttccccgatgttgaaaaagcggagtggctcaataagatagtggcccaggtctggcccttcttagggcagtacatggaaaagctgctcgctgaaacagtggctcccgccgtaaggggcagcaaccctcatcttcagactttcacatttactagggtcgaacttggagaaaagcccctgaggatcataggcgttaaagttcatccaggccaacggaaggaacagattctgctggatttgaacatcagctatgtgggcgacgtgcagattgatgtcgaggtcaaaaagtatttttgcaaggcaggagttaagggaatgcagctgcatggcgtcctgagggtcatactcgagcccctgatcggcgatctcccattcgtgggagctgtctcaatgttctttattaggaggcccaccctcgacattaactggaccgggatgaccaacctgctcgacatccctgggctctcgtccttatctgatacaatgatcatggattctattgctgctttcctcgtgctgcctaatcggctgttggtgccactggtcccagatctccaggatgtcgcacagctcagatctcccctgccacgtggcatcattcggatccatctgctcgcagccagaggtctgtcctctaaagacaaatacgtgaaggggctgatagaaggaaagtcagatccctatgccctggttcgactcggcacccagaccttctgctcgcgcgtcatcgacgaggagctgaatcctcagtggggggagacctatgaagttatggtccacgaagtgcccggccaggagattgaagtggaagtgtttgataaggatcccgacaaagatgacttcctgggaagaatgaagttagacgtaggaaaggtactgcaagcctctgtccttgatgactggttcccgctgcaaggcggacaaggccaagtccatctaaggctggaatggttgtccttgctttccgacgccgaaaagctggagcaagtgcttcagtggaactggggagtcagctcccggcccgaccctcctagcgccgccattctcgttgtgtacttggacagagcacaagacctgccgatggttacctccgaattgtacccaccgcagctcaagaagggcaacaaggagcccaaccccatggtccagctgagcatccaggacgtaacacaggagtcaaaggcagtgtactcaacaaattgccctgtgtgggaggaggcgttccgatttttcctgcaggaccctcagtctcaggagctggatgtccaggttaaggacgacagtagggccctgactctaggtgccctcaccctccccttggcccgcctacttacggctcccgagttgatactagaccaatggttccaactctctagctctgggcccaatagccgactctacatgaagctcgttatgagaatattatacctggatagttcggagatctgctttcctactgtgcccggctgccctggagcatgggatgtcgactctgaaaacccccaaagaggaagttctgtcgacgctccacctagaccatgtcatacgacgccagactcccagttcggaaccgaacatgtactaagaattcacgtactcgaagctcaggatttgatcgccaaggacaggtttctcggcgggctcgttaagggcaaatctgatccttatgtcaaattgaaactggcgggacgttcctttagaagccacgtcgtgagagaggatttaaacccacgctggaacgaagtctttgaggtcatcgtgacctctgtacctggccaggagctcgaggtggaagttttcgacaaagacctggacaaagacgacttcctaggccggtgtaaagtgaggcttacaacagtgctgaattctggcttcctcgatgagtggctaacactggaggatgttcctagtggtcgcttgcacttgcgattagagaggctgacgcccagaccgacagctgctgagctcgaagaggtgctgcaggtgaacagcttgatccagactcagaagtccgctgaattggcggcggctttgctgagcatctatatggaaagagcagaggatctccctctcaggaaggggacaaagcacctgagtccctatgccactttgaccgtgggagactctagtcataaaactaagaccatttcgcagacctctgcgcctgtgtgggacgaaagtgcttcttttttgattagaaagccacatacggagtccctggagcttcaggttaggggggagggaactggagtactgggcagcctctctctgcctctttctgaactcctggttgctgatcagctgtgtcttgataggtggttcacattatcgtccggccagggacaggtgctcctgagagcccagctgggtatactggtgagccaacacagtggagtggaggcccatagccactcctactcacatagctcttcgtccctcagcgaggagcctgagcttagcgggggccccccacacatcacatcatccgcgcctgaacttaggcagcgattaactcacgtcgacagccctctggaggctccagccgggcctctcgggcaggtcaaactcaccctctggtactatagtgaagagagaaaactggtgagcattgtgcacggatgcaggagtctcagacaaaatggtagagacccaccagatccctacgtgagcctgttgctcctccccgataaaaaccgtgggactaagcggagaaccagccagaaaaaaagaaccctgtctcccgaatttaatgaacgctttgagtgggaactcccacttgatgaagctcaacggaggaagttggacgttagcgtaaaaagtaacagctcatttatgtcgcgagagagagagctactagggaaggttcagctggacctcgctgaaaccgacctctcgcagggcgtggctaggtggtacgatctcatggacaataaagacaagggctcttcgtag

SEQ ID NO: 71457 - DNA, 3345 bp, Artificial Sequence
  derived and/or modified sequence
atggagagaagcccaggggagggcccatcccccagcccaatggatcaacctagcgctcccagcgatcctactgatcaaccgccggctgcgcacgcgaagccagatcctggctcgggagggcaaccagctggccctggggccgctggcgaagcacttgccgttctgactagcttcgggcgacgtttactcgtgctcatccctgtgtaccttgcaggagccgtcggcctaagcgtaggatttgtgcttttcggcctagccctatacctgggatggcggagggtgcgggacgaaaaagagcgaagcctgcgcgccgcgcgccagctcctcgacgatgaagaacagctgaccgccaagaccttgtatatgtcacaccgggaacttcccgcctgggtgagctttcctgacgtggaaaaggccgagtggctgaataaaatcgtagcccaagtgtggcccttcctgggtcagtacatggaaaaactgctggccgagaccgtagccccggccgtccgagggtcgaatccgcacctgcaaacctttaccttcactagggttgaactgggagagaaacccctcaggattatcggagtaaaagtccacccaggtcagaggaaagagcagatccttcttgatctgaatatctcatacgtcggagacgtccagattgatgtcgaggttaaaaagtacttctgcaaggctggagtcaaaggtatgcagctccatggagttctgagagtcatcctcgagccactgattggggatctgccgtttgtgggcgcggtgagcatgttttttattcgccgtccaacccttgacattaactggacaggcatgaccaatctgttggacatcccaggactgagtagtttgagtgatactatgataatggattccatcgccgcattcttggttctaccaaaccgcctgctcgtccccttggtgcccgacctgcaggatgtggcgcagctgagatcccccctgccacgagggattattcgaatccatttgctggcggccagagggctgtcttcgaaggataagtatgtgaaaggcctaatcgagggcaagtcagatccctacgcattggtgcgcctgggcacccagacattctgttcacgggtaattgacgaggaactcaatcctcagtggggtgagacttacgaggtgatggtgcacgaggtgcccgggcaggagatcgaggtggaggtttttgataaggatcctgacaaggacgattttttaggccgtatgaagctggatgtcgggaaagttttacaggcgtccgtgctggacgattggttcccactccaaggcgggcaaggtcaggttcatctccggctggaatggcttagtctgctgtcagacgctgaaaaactagagcaggtgctgcagtggaattggggggtcagctctcgaccggatccaccgagcgctgcgattttggtagtgtatctagatagggcacaggatcttccaatggtaacaagtgaattgtatcctcctcagcttaaaaagggaaataaagagccaaacccaatggtgcagctcagcatccaggatgttacacaggaatctaaggccgtctacagcacaaactgcccagtgtgggaggaagcatttcgattcttcctgcaagacccccagtcccaagaactggacgtccaagtcaaagatgactccagagccctgaccctgggcgccctgacgctaccattggctcggctcttaacggcccctgagctgattctggaccaatggtttcagctttcatcatcaggcccgaacagtcggctctatatgaagttggtgatgcgcatattgtacctggactcctccgagatttgttttcctaccgttcccgggtgtccaggggcttgggatgttgatagcgaaaaccctcaaagaggctccagcgtagacgccccgcctcgcccttgtcacacgactcccgacagtcagttcggcactgagcatgtgcttaggattcacgtactagaagcgcaggacctgattgctaaagatagattcctaggcggcctggtgaaaggaaaatccgacccctatgttaagctcaagctggctggccgaagcttccgctcccatgtcgtgagggaggacctgaatccaaggtggaacgaggtattcgaagtcatcgtgactagtgtaccaggccaggagttagaagtcgaagtcttcgataaggacctcgataaggatgacttccttggcagatgcaaggtgcggctgacaactgttctcaacagtggcttcctggatgagtggctcaccctcgaggacgtcccttcgggtaggctgcaccttagactggaaaggctgaccccaagacccactgccgcagaattagaggaggtgctccaggtcaatagtctcatccaaacccagaagagtgcggagttggcagcagcactcttgagtatctacatggagagggcagaggacctccccttacggaagggaactaaacacctgtccccatatgctactctcacagtgggtgactctagccataagaccaagactatatctcagacaagcgcccccgtatgggacgaaagcgccagctttctgattcgcaagccccacacagaatctcttgaattacaggtaaggggagaagggactggcgtactgggcagtttatccctccccctgtcagagctcctcgtggccgaccagctctgcctggataggtggtttactctgagctccggtcagggccaggtgttactgcgcgcacaactgggtatcctggtgtcccaacattccggcgtggaggcccactcacatagctacagccattcatccagctccctgtcagaggaacccgagttgagcggaggccctccacatataacatcctccgctccagagctgcgccagcggctgacacatgttgactcgcccctcgaagcccctgcagggccactcgggcaggtgaagctaaccctgtggtactattcagaagagcggaagctggtgtccatcgttcacggatgtaggagcctgcggcagaacggccgagatccccccgatccttacgtcagcttactactcttgcctgacaagaacagaggtaccaaacgcaggacttctcagaagaagcgtactctatctccagagttcaacgagcggtttgaatgggagctccctctcgatgaggcacagaggcgcaagcttgatgtgtcggtaaagtccaacagttcgtttatgtcacgcgaaagagaattgctcggtaaggtccaactcgaccttgctgagaccgacctgtcacagggggtcgctcggtggtacgatcttatggataacaaagacaaggggagtagttag

SEQ ID NO: 71458 - DNA, 3345 bp, Artificial Sequence
  derived and/or modified sequence
atggagaggagccctggagagggccccagccccagccccatggaccagcccagcgcccccagcgaccccacagaccagcccccagctgcccacgccaagccagaccccggcagcggcggccagcctgctggccctggagctgctggggaggccctggccgtgctgaccagctttggccggcggctgctggtgctgatccctgtgtacctggccggggctgtgggcctgtctgtgggctttgtgctgtttggcctggccctgtacctgggctggaggagagtgagagatgagaaggagaggagcctgcgggccgcccggcagctgctggatgatgaggagcagctgacagccaagaccctgtacatgagccaccgggagctgcctgcctgggtgtccttcccagatgtggagaaggccgagtggctgaacaagatcgtggcccaggtgtggcccttcctgggccagtacatggagaagctgctggccgagaccgtggccccagctgtgcggggcagcaacccccacctgcagaccttcaccttcaccagggtggagctgggggagaagcccctgcgcatcatcggcgtgaaggtgcaccctggccagaggaaggagcagatcctgctggacctgaacatctcctatgtgggagatgtgcagattgatgtggaggtgaagaagtacttctgcaaggccggcgtgaagggcatgcagctgcacggcgtgctgcgggtcatcctggagcccctgattggagacctgccctttgtgggcgctgtgtccatgttcttcatccggcggcccaccctggacatcaactggacaggcatgaccaacctgctggacatccctggcctgagcagcctgagtgacaccatgatcatggacagcattgctgccttcctggtgctgcccaaccggctgctggtgcccctggtgcctgacctgcaggatgtggcccagctgcggagccccctgccccggggcatcatccgcatccacctgctggccgcccggggcctgagcagcaaggacaagtatgtgaagggcctcatcgagggcaagagtgacccctatgccctggtgcggctgggcacccagaccttctgcagccgggtgattgatgaggagctgaacccccagtggggcgagacctatgaggtgatggtgcatgaggtgcccggccaggagattgaggtggaggtgtttgacaaggaccctgacaaggatgacttcctgggccgcatgaagctggatgtgggcaaggtgctgcaggcctctgtgctggatgactggttccccctgcagggcggccagggccaggtgcacctgcggctggagtggctgagcctgctgagtgatgctgagaagctggagcaggtgctgcagtggaactggggcgtgagcagcaggccagacccccccagcgctgccatcctggtggtgtacctggaccgggcccaggacctgcccatggtgaccagcgagctgtacccaccccagctgaagaagggcaacaaggagcccaaccccatggtgcagctgagcatccaggatgtgacccaggagagcaaggctgtgtacagcaccaactgccctgtgtgggaggaggccttccgcttcttcctgcaggacccccagagccaggagctggatgtgcaggtgaaggatgacagccgggccctgaccctgggcgccctgaccctgcccctggcccggctgctgacagcccctgagctgatcctggaccagtggttccagctgagcagcagcggccccaacagccggctgtacatgaagctggtgatgaggatcctgtacctggacagcagcgagatctgcttccccaccgtgcccggctgccctggggcctgggatgtggacagcgagaacccccagaggggcagctctgtggatgccccaccccggccctgccacaccaccccagacagccagtttggaacagaacatgtgctgcgcatccacgtgctggaggcccaggacctgattgccaaggaccgcttcctgggcggcctggtgaagggcaagagtgacccctacgtgaagctgaagctggccggccgctccttccgcagccacgtggtgcgggaggacctgaacccccgctggaatgaggtgtttgaggtgattgtgacctctgtgcccggccaggagctggaggtggaggtgtttgacaaggacctggacaaggatgacttcctgggccgctgcaaggtgcggctgaccaccgtgctgaacagcggcttcctggatgagtggctgaccctggaggatgtgcccagcggccgcctgcacctgcggctggagcggctgaccccccggcccacagctgctgagctggaggaggtgctgcaggtgaacagcctcatccagacccagaagtctgctgagctggccgccgccctgctgagcatctacatggagagagctgaggacctgcccctgaggaagggcaccaagcacctgagcccctatgccaccctgactgtgggggacagcagccacaagaccaagaccatcagccagaccagcgcccctgtgtgggatgagagcgccagcttcctgatcaggaagccccacacagagagcctggagctgcaggtgcggggggagggcaccggggtgctgggcagcctgagcctgcccctgtctgagctgctggtggccgaccagctgtgcctggaccgctggttcaccctgagcagcggccagggccaggtgctgctgcgggcccagctgggcatcctggtgtcccagcacagcggcgtggaggcccacagccacagctacagccacagcagcagcagcctgtctgaggagcctgagctgagcggcggccccccccacatcaccagcagcgcccctgagctgcggcagaggctgacccacgtggacagccccctggaggccccagctggccccctgggccaggtgaagctgaccctgtggtactacagcgaggagaggaagctggtgtccatcgtgcacggctgccgcagcctgcggcagaatggccgggaccccccagacccctacgtgtccctgctgctgctgcctgacaagaacagaggcaccaagaggaggaccagccagaagaagaggaccctgagccctgagttcaatgaaagatttgagtgggagctgcccctggatgaggcccagaggaggaagctggatgtgtctgtgaagagcaacagcagcttcatgagccgggagcgggagctgctgggcaaggtgcagctggacctggccgagacagacctgagccagggcgtggcccgctggtatgacctgatggacaacaaggacaagggcagcagctag

SEQ ID NO: 71459 - DNA, 3345 bp, Artificial Sequence
  derived and/or modified sequence
atggagcggagccccggcgagggccccagccccagccccatggaccaacctagtgctccatccgatcccactgaccagccaccggcagcacatgctaaaccggacccaggtagcggaggacagccagcaggaccaggggctgcaggtgaagctctggcagtgctaacgtccttcggacggaggctccttgttctaattccagtgtatctggcaggagcagtaggcctgtcagtgggctttgtgctcttcgggctcgcattgtatttagggtggagaagggtccgggatgagaaggagcggtcactgcgggcggcccgacagttgctagacgatgaggagcagctgaccgcaaagaccttatatatgtctcaccgggaactacctgcttgggttagcttcccggatgttgaaaaagcagagtggctcaacaagattgtcgctcaagtttggccgtttctagggcaatacatggagaagctactggccgaaacagtcgcacccgcagtgaggggctccaacccccacctgcagactttcaccttcacccgggtggaattgggcgagaaaccactcaggatcattggtgtcaaggtgcaccccggccagagaaaggagcagattcttctggatctgaatatcagctacgttggcgatgttcagattgatgtggaggttaaaaagtacttctgtaaagctggggtcaaagggatgcagctccatggcgtgcttcgcgtgatactcgagcctttgatcggcgatttgccatttgtgggcgctgtgagcatgtttttcattaggaggcccaccctggatattaattggactggcatgacaaatcttttagacatccccggtctgagctcgttgtccgatacaatgattatggacagcatcgcagctttcctcgttctgccaaaccgcctgttagtgcccttggttcctgatctccaggatgtggcccagcttagaagccctctgccacgggggatcatccgcattcacctgctcgccgctcggggcttgtcatcgaaggacaagtacgtgaaaggcctgatcgagggaaagagtgatccttacgctttagtcagactgggtactcaaactttctgctctcgggtgatcgacgaagagctgaacccccaatggggcgaaacgtacgaggtcatggttcatgaggtccctggacaggagattgaggtggaggtctttgacaaagaccctgataaggatgactttctgggcaggatgaaattggacgtgggtaaggtgctccaggcctccgtgttagacgactggtttccccttcaggggggtcaagggcaagtgcacttgagactggagtggttgagtctgctttctgatgccgaaaagcttgaacaggtgttacaatggaattggggggtgtcatcacgtccagatcctccatcggcagccatcctcgtggtctatctcgacagggcccaagaccttcccatggttaccagtgaactttatccaccgcagctgaagaagggtaataaagagccaaacccaatggtccagctttccatccaggacgtcacacaggagtccaaggccgtctactccactaattgtcctgtctgggaggaggcatttcggttcttcctgcaagaccctcagtcgcaggagcttgacgttcaagtgaaagacgatagtcgagccctcactctgggcgcactgaccttgcctctggcacgcctattgaccgctcctgaattaatcttggatcagtggttccagctttcatcaagcgggcccaattcccgcctatacatgaagctagtaatgcgcatcctgtatctcgattcctcagaaatctgtttccctacggtgcctgggtgccccggggcctgggacgtggattctgagaatccacagcgcggctccagtgtggacgccccccctaggccatgccacacaactcccgactctcagtttggtactgagcatgtccttcgaattcacgtcttagaggcacaggatctgatagctaaagatagatttctgggcgggttggtaaaaggcaagtccgacccttacgtgaagttgaagttagcaggtagatcctttaggagtcacgtggtgagagaagatttgaatccccgctggaatgaggtgtttgaagtgattgtcacatcagtccccggccaggaacttgaagtggaggtattcgacaaagacctggacaaagacgacttcctcggtcgctgtaaggtgcgtctgaccaccgttctgaattcagggttccttgatgagtggctgactttagaagatgttccctctggacgactgcacctcaggttggagaggctgacaccacgtcccactgcagctgagctggaagaggtactgcaagtaaactcactgatacaaacacagaagtctgcggagctggccgccgctttgttgagtatatatatggaacgagcggaggacttacctctaagaaaaggaaccaaacatttgtctccttacgcaacccttaccgtcggggattcatcgcacaaaacaaagacaatctctcagacaagcgctcctgtttgggacgagtctgcatccttcctcattcggaagcctcacaccgaatctctggagcttcaagtccgcggtgagggcaccggtgtactcggcagcttgtcactccccctgagcgaactgctggtcgccgatcagttatgcctcgaccgctggttcacacttagctcaggacagggacaggtgttgctccgcgctcagttaggtatactggtgtctcagcactctggcgtagaagctcacagtcacagctattcccattcttcctcctcactgagcgaggagccagaactaagcggaggcccaccacatataaccagttccgccccagagctgaggcagcggttgacccacgtagacagtccactcgaggcaccagctggacctctgggccaagtcaaacttacactttggtactactccgaagaacgaaagctcgtatccattgttcacggttgcagatcattgcgccagaatgggcgtgatcctcctgacccatatgttagcctgctgctgctgcccgacaagaacagaggcaccaagcggaggacttcccaaaagaaacgcaccctttccccagagtttaacgaaaggttcgagtgggagctgccacttgacgaagcacagcgaaggaagctggacgtctccgtcaagtctaattccagcttcatgtcccgggaaagagagctcctgggcaaagtgcaacttgatctggccgaaacagacctgagtcagggggtggctcggtggtatgacctgatggataacaaagataaaggttcctcctag

SEQ ID NO: 71460 - DNA, 3345 bp, Artificial Sequence
  derived and/or modified sequence
atggagcggagccccggcgagggccccagccccagccccatggaccagccatccgcaccaagcgatcctaccgaccagcccccagcagcccatgccaaacctgacccggggagtggtggacagcctgccggcccgggcgcggctggggaagccttagccgtactcacttctttcgggcgccggctgctcgtcctgatcccagtttacctcgccggcgcagtcgggctttcagtgggcttcgtgctgttcgggctggcactctacctgggctggcggcgggtgagagacgagaaagagcggtcactgagagccgctcggcaactgcttgacgatgaggagcagttaactgccaaaacactgtacatgtcccaccgagagctgccagcctgggtctccttccccgacgtagaaaaggccgagtggctgaataagatcgtcgcccaagtctggccctttctgggccagtatatggaaaagttattagccgagaccgtcgcgccagcagtgcgtggcagcaatcctcatctgcaaaccttcacattcacccgggtcgagttaggcgagaaaccgctcagaattataggggttaaagttcatcctgggcagcggaaggagcaaatactcttggatctcaatatctcttatgtgggggatgtgcagattgatgtggaagtcaaaaagtatttttgtaaggcaggggtcaaaggcatgcagctgcatggcgtgctgagagtaatcttggagcctctcatcggcgaccttcccttcgtcggtgctgtgtccatgttttttattaggcggcccacgttggacatcaactggacaggcatgactaatctgctggacatccctggcctgtcgtctctatctgacaccatgattatggacagtattgccgcattcctcgtgctgccgaatcgtctgcttgtgccacttgtccctgacctgcaagacgtggctcagttgcgctctccactgccgcggggcattattaggatacaccttctggccgctaggggcctctcttcgaaggacaaatacgtgaaaggtctgatcgagggtaagtccgacccttacgcactggtcagacttggaacccaaacattttgcagccgggtcatcgacgaggagctgaacccccagtggggcgagacctatgaggtgatggtacatgaggtgccaggacaggaaatagaagtggaggtattcgacaaggatcctgataaagacgatttccttgggagaatgaagctcgatgtcggcaaggtgcttcaggcttccgttctcgacgactggttcccactgcagggcgggcagggtcaggttcacttgcggctagagtggctctccctgctatcagatgctgagaagttggagcaagtgctccaatggaattggggcgtaagttcccggccagaccctccgtctgctgccatcctggtcgtttacctcgatcgcgctcaagatttacctatggtgacctccgaactgtaccccccacaattgaagaaagggaacaaggagcctaatccaatggtgcaactctccatccaggacgtgacacaggagtccaaagccgtgtactctacaaattgccctgtgtgggaagaggcttttcgcttttttttgcaggacccccaaagccaggaattggacgtgcaggtcaaagatgactcacgggcactgacgctgggggctttgactcttccacttgccagacttctcactgcccctgagttaatacttgaccagtggtttcaactctccagctccggccctaattctcggctgtatatgaagctggtgatgcgtatcctgtatctcgacagcagcgagatttgtttccctactgtgcccggatgcccaggggcctgggatgtggattctgaaaacccacaaagaggctcaagcgtggatgctccaccccgcccttgccacacaacaccagatagccagtttggcaccgaacacgtcctcaggatccacgtgctggaagcccaagatctgattgccaaagatagattcctaggcggtctggtcaaggggaagagtgacccatatgtcaagctcaagctggctggtcggtctttccggtcgcacgtagtgagagaggacttgaatccgcgatggaatgaggtgttcgaagtcatcgtgacttctgtgcctggtcaggagctcgaggtcgaagtattcgataaagatctcgataaggacgactttctggggcgctgcaaggtcaggcttaccacggtgctgaattctggcttcctggacgaatggctaacattggaagacgtaccaagtggacgactgcacctgcgacttgagcgccttaccccaagacccacagcagctgagctggaggaggtgctgcaggtgaacagcctaatccaaacccaaaaaagtgccgagctggctgccgccctgctgagtatctacatggagcgcgcagaggatcttcctctgcggaagggcaccaaacacctctctccttatgccaccctgacagttggcgatagtagccacaagaccaaaacaatctcccagaccagcgccccagtttgggacgagtccgcctcattcttgattagaaagccccacacagaatcgcttgagcttcaggtaaggggagagggaactggagtgctcggctcattgtcattgcctctttctgagctcctggtcgcagaccagctctgccttgatcgttggttcactttgagtagcggtcagggtcaggtccttctgagagcccaattggggatacttgtctcgcagcattcaggagtggaagcccacagccattcctattctcacagttctagctcgctttcggaggaaccagagttatctggtggaccccctcacatcacatccagcgctcctgaactgaggcagaggctgactcacgtcgatagcccgctagaagccccggccggtcctctcgggcaagtcaaactgacgttatggtactattcagaagagcggaagctggtgtcaattgtccatggctgccgctctctgcggcagaatggccgggacccccctgatccttatgtgtcactccttcttctgcctgacaagaacagaggcacaaaaagacggaccagccagaaaaagagaactttaagccccgaatttaacgagaggttcgaatgggagctaccgctggacgaggctcagcgtcggaagttggacgttagcgtgaagagcaatagttcgtttatgtcccgggagcgagagctgctgggcaaagtgcagctcgatctcgctgaaactgacctgagccagggagtagcgcgttggtatgaccttatggataacaaagataaggggtcgagctag

SEQ ID NO: 71461 - DNA, 3345 bp, Artificial Sequence
  derived and/or modified sequence
atggaacgtagccctggagagggacccagcccctctcctatggatcaacccagtgcaccctctgaccccacagatcagccacctgcggctcacgctaaacccgaccctggaagtggaggacaacctgccggtcccggagccgctggagaggccttggccgtcctcaccagtttcggaaggcgcctgcttgtgctcatccctgtttacctggctggagctgtcggtctttctgtggggtttgtactgtttggattagccctctacctgggatggaggcgcgtgagagacgaaaaagagcgctctctgagagccgcaagacagctcctagatgacgaagaacagctgacggccaagacattgtacatgtcccatagagagctccctgcatgggtgagctttcccgatgtggaaaaggctgagtggctgaataagatcgtggctcaggtgtggccttttctgggtcagtatatggaaaagctcttagctgagaccgtcgcccctgcagtcagagggagcaatcctcacctgcagacttttaccttcacgagggtggaactaggtgaaaagccgctgaggataattggggtcaaggtccatcccggacagcgcaaggaacagatcttactcgacctcaacatttcatatgtgggtgacgtccagatagacgtcgaagtgaaaaaatatttttgtaaagccggagtgaagggcatgcaactgcacggcgtgctgagagtgattctggagccattgatcggtgacttgcctttcgtgggcgcagtgtccatgttctttattcgcaggcccaccttagacatcaattggaccggaatgaccaacctgctggatatccctggcctatcaagtctttctgataccatgatcatggactctattgccgcatttttggtgttaccaaatcggttgttggtgccattggttcctgaccttcaggatgtcgcacagctgcggtcacctttacctaggggaattatccggattcatctcctggccgctcgtgggctgtctagcaaggataagtatgtcaagggcctgatcgaggggaagagcgacccctacgcattagttaggctggggacccagaccttctgcagtagagtgattgatgaggagctgaacccccagtggggggagacctacgaggtgatggtgcacgaggtgcccggacaagagattgaggtggaggtcttcgataaggatcctgacaaggacgactttttggggaggatgaaactggacgtggggaaggttctgcaagcttccgttttggacgactggttccctttacaggggggacaaggacaggtgcatctgcggcttgagtggctgtcacttctaagtgacgcagagaagcttgagcaggtgctccagtggaactggggggtttcctcccggccagatcccccttcggctgcaatcctcgtggtctacctggatagagcacaggatcttcctatggttacttctgaactctacccaccccagctgaaaaagggcaataaggagccaaatccaatggtccagctgagtattcaagatgtgacccaggagtctaaggcagtgtattccaccaactgcccagtgtgggaagaagctttccgatttttcctgcaagacccacaaagccaggaactcgatgtccaggtgaaagatgactcaagggcattgacacttggcgctctaaccctgccgctcgctagactcttgacagcacccgagctgatccttgatcagtggttccaactctctagctctggcccaaactcccggctatacatgaaattggtgatgcgtatcctttacctggacagttccgagatatgtttccccactgtgcccggttgtccaggcgcatgggatgttgactctgaaaacccacagcggggatctagcgttgacgcccctcccaggccctgccacaccactccagattcccaattcggcacagaacacgttcttaggattcacgtcttggaagctcaggatctgatcgctaaagatcgcttccttggtggtttagtgaaggggaagtcagatccttacgtcaagctcaaactagccggaagatccttcaggtcacacgtggtgcgggaggatctgaatccgaggtggaatgaggtcttcgaggtgattgtgacttcagtgcctggtcaagaactggaggtcgaagtgttcgacaaggacctggacaaagatgacttcctaggcaggtgtaaagtcagacttacgactgtgcttaattccggattcttggatgagtggctgacactggaagatgtgccgagcggcaggttacatctgaggttggagcggctcactcctagacccacggcggctgaactcgaggaggtgctgcaggtcaacagcttaatacagacccagaaatccgccgagcttgctgccgctttgcttagtatctacatggagcgcgctgaggacttgcccttgagaaaagggaccaaacatctgagcccctacgctactcttactgtcggggactcttcccataagaccaaaactatcagtcagacctccgctccggtctgggacgaatctgcctctttcctcatcaggaagccacacacagaaagtctggagctgcaggttcgcggagaaggcaccggtgtgctcggtagcctgtcacttcctttgtcagaactgctcgttgcagaccaattatgcctggacaggtggttcacactttccagcgggcaggggcaagtcctgctgcgggctcagcttggaatcttggtgagtcagcacagcggcgtcgaggctcactcgcatagctattcccattctagttccagcctgagcgaagagccggagctgtcaggaggcccaccgcacatcacttcaagtgcccctgaattaagacagagactcacccacgtagatagccctctggaggcccctgcaggtcccctaggtcaggtcaaactgacactttggtattactccgaagaaaggaaacttgtatccatagtgcacgggtgtcgctcactcagacagaatgggagggaccctcccgacccctacgtgtccctcctgcttcttcctgataaaaacagagggacgaagaggcggacctctcaaaagaaacgcacattgagcccggagttcaacgagagattcgagtgggagctccctctggacgaagcacagcggaggaagctggacgtgtcagtgaagtccaattccagtttcatgtctcgggagagagaactgcttgggaaggtgcaactcgacctggcagagacggaccttagccagggggtggctagatggtacgacttgatggacaataaggacaagggatcttcctag

SEQ ID NO: 71462 - DNA, 3345 bp, Artificial Sequence
  derived and/or modified sequence
atggagagatcaccgggagaggggccttctccaagtccaatggatcaacctagtgccccatctgatcctacggatcaacctccagctgcccatgctaagcccgacccagggagcgggggtcagccagctgggcctggagccgcaggtgaggcactcgccgtgctgacctcattcgggaggcgcctcctggtgctcatcccagtgtatctggcaggagcggttgggcttagtgtgggctttgtgctgttcggtttagctctgtacttaggctggcgtcgcgtgcgagatgagaaagagcggagcctgcgggcagcacgacagttgctagacgacgaagagcagttgacagcgaaaactctttatatgtcccacagggaactccccgcatgggtttccttccccgacgtcgaaaaggccgagtggctgaacaaaatcgtggctcaagtttggccattcctcggccagtatatggaaaagctgctcgccgagactgtggctcctgctgtgagggggtctaatccacacttgcagactttcacctttaccagagtcgaactgggcgaaaagcctctcagaatcattggggttaaggtgcaccctgggcagcgcaaagagcagatcctgctcgatctcaacataagttatgtaggtgacgttcagatcgatgtggaagtgaaaaaatatttttgtaaggcgggtgtgaagggaatgcagctccacggcgtcctgcgggtgatactggagcctctgatcggcgacctcccctttgttggcgctgtctccatgtttttcatccggaggcctacgttagacatcaactggaccggtatgactaacctgctggacatccctggattgagctccctgtcggataccatgattatggacagtatcgccgcatttctcgtgttacctaatagactgcttgtgcccctcgtgcctgatctgcaagacgtggctcagctgagatctcccctcccaaggggaatcatcagaatccacctacttgccgcacgcggactcagcagcaaagataagtacgtcaaggggctcattgaaggtaagtctgacccatacgctctggtccgattgggtacacagacattttgttcacgggtgatcgacgaggagctcaatccccagtggggcgagacatacgaggtgatggtgcatgaggttcctggacaggagatcgaggtggaagtgttcgacaaggacccagacaaagacgattttcttggacggatgaagctcgatgtcggcaaagtgctgcaggcttccgtgctggacgactggtttccattgcagggcggacagggtcaggtccaccttaggctggaatggctgtccctgctaagcgacgcagagaagctggagcaggtgctgcagtggaattggggggtatccagccggcctgatcccccttctgcggctattctggtcgtctacctggatagagcacaggacctgccgatggttacttcggaactgtacccgcctcagctcaaaaaaggaaacaaggaaccgaaccctatggtgcaactgtccatacaagatgtgacccaggagtccaaagccgtgtactcaactaattgtccagtgtgggaggaggcctttcgtttcttcctgcaggatcctcagtcccaggagctcgacgtccaggtaaaagatgattcacgtgcactgacactgggagccctgacgttacctctggccaggctgctgactgctccagaactgattttggatcagtggtttcagctgtctagctctggaccgaacagtcgactgtacatgaagttggtcatgcggatcctgtatctcgactcttctgaaatctgtttcccaacagtgcccggatgtcccggagcctgggatgtggacagtgagaacccacaacgcggaagtagcgttgatgcacccccaaggccctgccatactacgccagattcgcagtttggcactgagcacgtgctgaggatccacgtgctggaagcgcaggatctcatagccaaggacagatttctgggagggctggtaaagggtaagagtgatccttacgtcaaactgaaactggctggccgaagttttaggtctcacgtcgtgagggaagatctgaacccaagatggaatgaggtcttcgaagtaatcgtgacgagcgttcccggacaggagctggaggtggaggtttttgacaaggatttggataaggatgactttcttggcaggtgtaaagttcgtctgactacagtcctgaactccgggtttctggacgagtggctcactttggaggatgtcccctcaggaagattacatctcagactggagaggctgactccccgacctacagcagccgaactggaggaggtgctgcaggtcaatagcctgattcagactcagaagtcagccgaactggccgcagctctcctgagtatctacatggagcgggctgaagatttgcctctccgtaagggcaccaagcacctgtccccatacgccactcttacagttggcgactcctcacataagactaaaaccattagccagacatccgccccagtttgggacgagagcgcctctttcctaatccgtaagccccacacggaatctctggagctccaggtccggggtgagggtacaggcgttctaggatcgctgtccctgcctctgagcgaactgttggtcgctgaccagctgtgtctggatcgttggttcacactgtctagcggccagggccaggtgctactgagggctcagttaggaatcttggtgtcacagcacagtggggtggaagcacattctcattcctattcacacagtagcagcagccttagcgaagaacctgagctgtccggcggacccccacacataacatccagcgcgcctgaactgcgccaacgactgacccacgttgattcacccctcgaggccccagccggacccctcgggcaggtgaaactgactctttggtactactcggaagagcggaaactggtgagtattgtgcacggatgccgctcactccgccagaatggacgagatcccccagacccctacgttagcctccttctactacccgacaagaatcgcggaacgaaaaggagaacatctcagaagaagcgaacactgtctcccgagtttaacgagaggttcgagtgggaactgcctttggatgaggcccaaaggcggaagctggacgtttccgtgaagtcgaatagctcattcatgtctcgcgagcgggaactcctaggaaaggtccaactagacctggctgagaccgacctgtcacagggggtcgctcgatggtacgacctcatggataataaagataagggaagcagctag

SEQ ID NO: 71463 - protein, 376 aa, Artificial Sequence
  derived and/or modified sequence
MWYHRLSHLHSRLQDLLKGGVIYPALPQPNFKSLLPLAVHWHHTASKSLTCAWQQHEDHFELKYANTVMRFDYVWLRDHCRSASCYNSKTHQRSLDTASVDLCIKPKTIRLDETTLFFTWPDGHVTKYDLNWLVKNSYEGQKQKVIQPRILWNAEIYQQAQVPSVDCQSFLETNEGLKKFLQNFLLYGIAFVENVPPTQEHTEKLAERISLIRETIYGRMWYFTSDFSRGDTAYTKLALDRHTDTTYFQEPCGIQVFHCLKHEGTGGRTLLVDGFYAAEQVLQKAPEEFELLSKVPLKHEYIEDVGECHNHMIGIGPVLNIYPWNKELYLIRLFKEKQNTVNRQWNSSLQCDIPERILTYRHFVSGTSIEHRGSLI

SEQ ID NO: 71464 - DNA, 1131 bp, Artificial Sequence
  derived and/or modified sequence
atgtggtaccacagactgagccacctgcacagcagactgcaggacctgctgaagggcggcgtgatctaccccgccctgccccagcccaacttcaagagcctgctgcccctggccgtgcactggcaccacaccgccagcaagagcctgacctgcgcctggcagcagcacgaggaccacttcgagctgaagtacgccaacaccgtgatgagattcgactacgtgtggctgagagaccactgcagaagcgccagctgctacaacagcaagacccaccagagaagcctggacaccgccagcgtggacctgtgcatcaagcccaagaccatcagactggacgagaccaccctgttcttcacctggcccgacggccacgtgaccaagtacgacctgaactggctggtgaagaacagctacgagggccagaagcagaaggtgatccagcccagaatcctgtggaacgccgagatctaccagcaggcccaggtgcccagcgtggactgccagagcttcctggagaccaacgagggcctgaagaagttcctgcagaacttcctgctgtacggcatcgccttcgtggagaacgtgccccccacccaggagcacaccgagaagctggccgagagaatcagcctgatcagagagaccatctacggcagaatgtggtacttcaccagcgacttcagcagaggcgacaccgcctacaccaagctggccctggacagacacaccgacaccacctacttccaggagccctgcggcatccaggtgttccactgcctgaagcacgagggcaccggcggcagaaccctgctggtggacggcttctacgccgccgagcaggtgctgcagaaggcccccgaggagttcgagctgctgagcaaggtgcccctgaagcacgagtacatcgaggacgtgggcgagtgccacaaccacatgatcggcatcggccccgtgctgaacatctacccctggaacaaggagctgtacctgatcagactgttcaaggagaagcagaacaccgtgaacagacagtggaacagcagcctgcagtgcgacatccccgagagaatcctgacctacagacacttcgtgagcggcaccagcatcgagcacagaggcagcctgatctag

SEQ ID NO: 71465 - DNA, 1131 bp, Artificial Sequence
  derived and/or modified sequence
atgtggtatcacagactttctcatctgcattcccggctgcaggatttactcaaggggggagtaatctatcctgcccttccccaaccaaactttaagtctcttctaccccttgccgtgcattggcaccacaccgcttctaagagtttaacttgcgcgtggcaacagcacgaagatcacttcgagctgaagtacgccaacacagtcatgaggttcgactacgtttggctgagagaccactgccgctccgcttcctgctacaattctaaaactcatcagcgttccttggacaccgccagcgtcgatctttgtatcaaacctaagactatacgcttggatgaaactacactgtttttcacctggccggacggacacgtaactaaatatgacttgaattggctggtgaaaaacagttatgaaggacagaaacagaaagtgatccagccacgaatcttatggaatgccgagatctaccagcaagcccaagtgccctctgtggattgtcagtcatttttggagactaatgagggactcaagaaatttctgcagaattttttgttatatggtattgcctttgttgagaatgtccccccgactcaggagcacaccgagaaattagcagagcggatttccctcatcagagaaaccatttacgggcggatgtggtactttactagtgatttctcaagaggagacactgcatacaccaaactcgcgttggatcggcacacggacacaacctatttccaggaaccttgcggtattcaggtattccattgtctgaagcacgagggaactggaggtaggacccttctcgtggatggcttttacgccgccgagcaggtgctgcagaaggccccagaagaattcgagcttctcagtaaggtgcctcttaagcacgagtacatagaggacgtcggcgaatgtcataaccacatgattggcattggaccagtgcttaacatctatccttggaataaagagctgtatctgatacgcctctttaaggaaaagcagaacaccgtaaacagacagtggaactcctcactacaatgtgacatcccagaacgcatcctaacttatcggcactttgtcagcggcaccagtatcgaacaccgggggagtctgatctag

SEQ ID NO: 71466 - DNA, 1131 bp, Artificial Sequence
  derived and/or modified sequence
atgtggtaccaccggctgagccacctgcacagccggctgcaggacctgctgaagggcggcgtcatctacccagccctgccccagcccaacttcaagagcctgctgcccctggccgtgcactggcaccacacagccagcaagagcctgacctgtgcctggcagcagcacgaggaccactttgagctgaagtatgccaacacagtgatgagatttgattatgtgtggctgcgggaccactgccgcagcgccagctgctacaacagcaagacccaccagaggagcctggacacagcctctgtggacctgtgcatcaagcccaagaccatccggctggatgagaccaccctcttcttcacctggccagatggccacgtgaccaagtatgacctgaactggctggtgaagaacagctatgagggccagaagcagaaggtgatccagccccgcatcctgtggaatgctgagatctaccagcaggcccaggtgcccagcgtggactgccagagcttcctggagaccaatgaaggcctgaagaagttcctgcagaacttcctgctgtatggaattgcctttgtggagaatgtgccccccacccaggagcacacagagaagctggccgagcgcatcagcctcatccgggagaccatctacggccgcatgtggtacttcaccagtgacttcagcagaggagacacagcctacaccaagctggccctggacagacacacagacaccacctacttccaggagccctgtggcatccaggtgttccactgcctgaagcatgagggcactggaggccgcaccctgctggtggatggcttctatgctgctgagcaggtgctgcagaaggcccctgaggagtttgagctgctgagcaaggtgcccctgaagcatgagtacattgaagatgtgggggagtgccacaaccacatgattggaattggccctgtgctgaacatctacccctggaacaaggagctgtacctgatccgcctcttcaaggagaagcagaacacagtgaaccggcagtggaacagcagcctgcagtgtgacatccctgagcgcatcctgacctaccgccactttgtgtctggcaccagcattgagcaccggggcagcctcatctag

SEQ ID NO: 71467 - DNA, 1131 bp, Artificial Sequence
  derived and/or modified sequence
atgtggtaccaccggctgagccacctgcacagccggctgcaggacctgttgaagggcggggtgatctacccagcactgccgcaaccaaacttcaagtcactcttgcctttggccgtgcattggcaccacaccgcgtccaagtccctcacttgtgcatggcagcaacacgaagaccacttcgagctcaagtatgctaacacagtgatgcgatttgattacgtatggcttagagaccattgcagaagcgcttcatgctacaacagcaaaactcatcaacgctcgctagataccgcatcagtggacctgtgtattaaacccaagacaattaggctagacgagacgaccctgtttttcacttggcccgatggccatgtgaccaaatacgacctgaattggctggtcaagaacagttacgaaggccagaagcagaaagttattcagccccgtatcctgtggaacgcagaaatctatcagcaggcgcaagtcccgtcagtggattgccagagcttccttgaaacgaacgagggcctgaagaagttcctgcagaatttccttctgtacggcattgcgtttgtggagaatgtacccccaacccaggaacacactgagaagttggctgaaagaattagcctgatccgagagacgatttatgggcgtatgtggtactttacctccgatttttctcgcggagatacggcttatactaaacttgctcttgatcgccataccgacacaacttactttcaggaaccatgtgggatccaggtgttccattgcttgaagcatgaggggaccggcggccggaccctgctcgtggacggattctacgcagctgaacaggtgttgcagaaagccccagaggagttcgaattactgtcaaaagtgccattgaagcatgaatatatagaagatgtgggcgagtgccataaccacatgatcggcatcggacccgtgctcaatatctatccctggaacaaggaactgtatctaatccgcctgtttaaggaaaagcagaacacagtgaatagacaatggaattcttctctccaatgcgacattcccgagcggatactgacatatcgccacttcgtgtctggaacaagcatagaacaccggggaagcctgatttag

SEQ ID NO: 71468 - DNA, 1131 bp, Artificial Sequence
  derived and/or modified sequence
atgtggtaccacagactttcccacctccattcaaggctgcaggacctgctgaagggcggtgtaatttacccagctctcccacagcccaacttcaagagtcttcttcccctagcggtgcactggcaccatacggctagcaaaagtctgacttgcgcttggcaacaacacgaggaccacttcgaactgaagtacgcaaacactgtgatgcggtttgattacgtctggctgcgcgaccactgccgctctgctagctgttataactccaaaactcatcagaggtcattagatacagccagtgtggatctttgcatcaaacccaagactatcaggttggacgagactaccctgttctttacatggcctgatggtcacgtcaccaagtacgaccttaattggttagtcaaaaattcatatgaagggcaaaagcagaaggtgatccaacctcgaatcctttggaacgctgaaatttatcagcaggcccaggtgccctcagtggactgccagtcttttcttgaaaccaatgaaggcctcaagaagttcctccaaaattttctcctgtacggcatagcatttgttgaaaatgtgccccctacccaagagcatacagagaagctcgcggagcgcatcagcttaatccgcgaaaccatttatggtcgcatgtggtactttacatccgacttctcacgtggggacaccgcctacaccaaactcgcactggacagacatacggacacaacatactttcaggagccctgcggcattcaggtcttccactgcctgaaacatgaggggacaggaggaaggacgttgctcgtggacgggttttacgccgcagagcaggtgctccagaaggcgcctgaggaatttgagttgctttcaaaggttccgttaaagcacgagtacatcgaggatgtcggggagtgccacaaccatatgattggcataggccctgtgttaaacatctacccttggaataaagagttgtatctgatccgtctcttcaaggaaaagcagaatacagtaaatcgtcagtggaactcctcattacaatgtgacatacctgagagaatcctgacctatcgccactttgtgagtgggacatccattgagcatcgcggttcgttaatctag

SEQ ID NO: 71469 - DNA, 1248 bp, Artificial Sequence
  derived and/or modified sequence
ggcgggtgaaaggctgcctcccgagactctccttgcttggaattctgcccactctgcggagttagcagtcacgacctccagcacaggatgtggtaccacagattgtcccacctacacagcaggcttcaggacttgctgaagggaggagtcatatatccggcccttccacagcccaacttcaaaagcttacttcctttagctgtccattggcaccatacagcctccaagtctctgacttgtgcttggcagcaacatgaagatcattttgagctgaaatatgctaataccgtgatgcgctttgattacgtctggcttcgagaccactgccgctcagcatcgtgctacaactctaagactcaccagcgcagcctggatactgccagtgtggatttatgtatcaagccaaagaccattcgtctggatgagaccacactctttttcacttggccagatggtcatgtgactaaatatgatttgaattggctggtgaaaaacagctatgaagggcagaaacaaaaagtcatccagcctagaatactatggaatgctgaaatctaccagcaagcccaagttccatcggtagattgccagagcttcttagaaaccaacgagggactgaagaagtttctgcaaaactttctgctctatggaattgcattcgtagaaaatgtccctcccactcaagagcacacagagaagttggcagaaaggatcagcttaatcagagaaaccatttatgggaggatgtggtatttcacttcagacttctccagaggtgacactgcgtacaccaagctagctctggatcggcacactgacactacctattttcaagagccctgtggcattcaagtgtttcattgtcttaaacatgaaggaactggtggcaggacactgctagtagatggattctatgcagcagaacaggtacttcaaaaggcacctgaggaatttgaactcctcagtaaagtgccattgaagcatgaatatattgaagatgttggagaatgtcacaaccacatgattgggattgggccagtcttaaatatctacccatggaataaagagctgtatttgatcagattattcaaagaaaaacaaaacacggtcaacaggcagtggaactcctcactccaatgtgatattcctgagagaatattgacttatcgtcacttcgtctctgggacaagtattgaacataggggaagccttatataaaattgttcaataaacaaaagatgtctttaa

SEQ ID NO: 71470 - protein, 430 aa, Artificial Sequence
  derived and/or modified sequence
MGHLSAPLHRVRVPWQGLLLTASLLTFWNPPTTAQLTTESMPFNVAEGKEVLLLVHNLPQQLFGYSWYKGERVDGNRQIVGYAIGTQQATPGPANSGRETIYPNASLLIQNVTQNDTGFYTLQVIKSDLVNEEATGQFHVYPELPKPSISSNNSNPVEDKDAVAFTCEPETQDTTYLWWINNQSLPVSPRLQLSNGNRTLTLLSVTRNDTGPYECEIQNPVSANRSDPVTLNVTYGPDTPTISPSDTYYRPGANLSLSCYAASNPPAQYSWLINGTFQQSTQELFIPNITVNNSGSYTCHANNSVTGCNRTTVKTIIVTDNALPQENGLSPGAIAGIVIGVVALVALIAVALACFLHFGKTGRASDQRDLTEHKPSVSNHTQDHSNDPPNKMNEVTYSTLNFEAQQPTQPTSASPSLTATEIIYSEVKKQ

SEQ ID NO: 71471 - DNA, 1293 bp, Artificial Sequence
  derived and/or modified sequence
atgggtcatttatcagcacccctccatcgggtacgggtaccatggcagggactcctgttgaccgcttccttgttgaccttctggaaccctccgaccaccgcccagctcacaacagagagcatgccttttaacgtcgctgaagggaaagaggtgctgcttctcgtacacaacctgccacagcaactgtttggatactcttggtacaaaggcgagcgggttgacggaaatagacagattgttggttacgctataggaacccagcaggccacgccagggccagccaacagtggacgcgaaaccatctatcctaatgccagcctgctgatccagaacgtgactcagaacgatactggcttctataccctgcaggtgatcaagtccgacctggtgaatgaggaggccaccggacagtttcacgtgtatcctgaattgccgaagccttctatttcatccaataacagtaatcccgtggaagacaaagatgctgttgccttcacatgtgagcctgagacacaggacactacttacctgtggtggattaataaccaaagtctgcccgttagcccaaggcttcaactaagtaacgggaatcggacactcactctgttgtctgtgacacggaacgatactgggccgtatgaatgcgaaatccagaaccccgtgtcagctaaccggagcgacccagtgactctaaatgtcacttatggacctgatactccaaccatctccccttcagatacctattaccgccccggagctaacctgagtctaagttgctacgctgcatccaatcctcctgcccagtactcatggctgattaacggaaccttccagcagagcacgcaggagctgtttattcctaacatcaccgtcaataattcggggagctacacctgtcatgcaaacaactctgtcacgggctgtaataggaccacagtaaaaaccataattgtcaccgacaatgcattaccccaggagaatgggctctcaccgggggctatcgccgggattgtgataggcgtggtcgccctggtggcccttattgctgtggcgctggcttgttttcttcattttggcaaaaccggccgcgcctctgatcagcgtgatcttaccgagcataagcctagtgtctccaaccacacccaggaccactctaatgatccaccaaacaagatgaacgaagtgacatactcaactcttaacttcgaggcccaacagccaacacagcctacatccgcatctccaagcctgacggcaactgaaatcatctatagtgaagtaaaaaaacaatag

SEQ ID NO: 71472 - DNA, 1293 bp, Artificial Sequence
  derived and/or modified sequence
atgggccacctgagcgcccccctgcaccgggtgcgggtgccctggcagggcctgctgctgacagccagcctgctgaccttctggaacccccccaccacagcccagctgaccacagagagcatgcccttcaacgtggccgagggcaaggaggtgctgctgctggtgcacaacctgccccagcagctgtttggctacagctggtacaagggggagcgggtggatggcaaccggcagatcgtgggctacgccatcggcacccagcaggccaccccaggccctgccaacagcggccgggagaccatctacccaaatgccagcctgctgatccagaatgtgacccagaatgacaccggcttctacaccctgcaggtgatcaagagtgacctggtgaatgaggaggccaccggccagttccacgtgtacccagagctgcccaagcccagcatcagcagcaacaacagcaaccctgtggaggacaaggatgctgtggccttcacctgtgagcctgagacccaggacaccacctacctgtggtggatcaacaaccagagcctgcctgtgagcccccggctgcagctgagcaatggaaacagaaccctgaccctgctgtctgtgaccagaaatgacaccggcccctatgaatgtgagatccagaaccctgtgtctgccaacagaagtgaccctgtgaccctgaatgtgacctacggccctgacacccccaccatcagccccagcgacacctactacagacctggggccaacctgagcctgagctgctatgctgccagcaaccccccagcccagtacagctggctgatcaatggcaccttccagcagagcacccaggagctgttcatccccaacatcaccgtgaacaacagcggcagctacacctgccacgccaacaacagcgtgacaggctgcaacagaaccaccgtgaagaccatcatcgtgacagacaatgccctgccccaggagaatggcctgagccctggggccatcgccggcatcgtgattggagtggtggccctggtggccctgattgctgtggccctggcctgcttcctgcactttgggaagacaggccgggccagtgaccagagggacctgacagagcacaagcccagcgtgagcaaccacacccaggaccacagcaatgacccccccaacaagatgaatgaggtgacctacagcaccctgaactttgaggcccagcagcccacccagcccaccagcgccagccccagcctgacagccacagagatcatctacagcgaggtgaagaagcagtag

SEQ ID NO: 71473 - DNA, 1293 bp, Artificial Sequence
  derived and/or modified sequence
atgggccacctgagcgcccccctgcaccgggtgcgggtgccctggcagggtctgctgttaactgccagcctgcttactttctggaatccgcctactaccgctcagctgaccactgagtccatgccgttcaacgtcgccgagggaaaagaggtgttactgctggtccacaacttgccgcaacagctgtttggatatagctggtacaagggagagcgcgtggacggaaaccgtcagatagtggggtatgcgattggaacccagcaggccacaccgggcccagccaactctggcagagagactatttatcctaacgcctctctgttaattcaaaatgtcacccagaatgacactggattttatacgctgcaggtaatcaagtccgacttggtcaatgaagaagccaccgggcagttccatgtttatcccgagctcccaaagccaagtatatcatcaaataatagcaacccagttgaagacaaagatgcagtcgcttttacttgcgaaccagagacccaagataccacatacttatggtggattaacaatcagtcccttccagtgtcaccgcgcctgcagttaagcaacggaaataggacgttgactctgttaagtgttactaggaacgacaccgggccttacgagtgcgagatccagaatcccgtgagtgctaatcgatctgacccagtcaccttaaatgttacttacggcccagacacacctaccatatcgccctcagacacctattaccgcccaggcgccaatctcagtcttagctgctatgccgcaagcaatccaccagcgcaatactcctggcttataaacggtacattccagcagagcacccaggaactgttcatcccgaatattacagttaacaacagcggatcatatacttgtcatgccaacaactcggttaccggctgcaaccgaactacagttaagactatcatcgtaactgacaacgctctgccccaagaaaatggtctcagtcccggtgccatcgcgggcatcgtcatcggcgttgtggcactagttgctcttatcgcggtggcacttgcctgcttcctccactttgggaaaactggcagggccagcgatcagcgagacctcacagaacataaaccttctgtgagcaaccatacccaggatcattcaaacgatcccccaaacaaaatgaatgaggtgacttactcaacactcaatttcgaggcacagcagcccacccagcctacgtcagcctcaccctcactcacagccaccgaaattatctattcagaagtaaaaaagcagtag

SEQ ID NO: 71474 - DNA, 1293 bp, Artificial Sequence
  derived and/or modified sequence
atgggccatctttccgccccacttcaccgcgttagagtaccctggcaggggctcctcctcaccgcatcccttcttactttttggaatccccctaccaccgcacagttgacaacagagtcaatgccatttaatgtggctgaaggtaaagaagtgctgctcctcgtccataatctgccacagcagctgttcggctactcctggtacaagggggaaagggtggacggcaatcggcagatcgttgggtatgccatagggacacagcaggccactccgggacctgctaattccgggcgagagaccatctaccctaacgccagtcttctgattcagaatgtaactcagaatgataccggtttttacactttacaggtcatcaaaagtgatctcgtcaatgaggaagcaaccggacagttccatgtgtatcctgagttaccaaagcccagcatcagcagcaacaatagtaaccctgtcgaggataaggatgctgtcgcattcacctgtgagcccgaaacacaggacactacctatctttggtggatcaataaccagtctttgcctgtttccccaaggctgcagttgagcaacggaaacaggacattgaccctcctgagcgtgaccaggaacgacaccggcccatatgagtgcgaaattcagaatccagttagtgctaacaggagcgaccctgtcaccttgaacgttacttatggccctgatacgcctacaatctccccatccgatacgtattacagacccggtgccaacctgtccctttcctgttacgcagctagcaatccgcctgcccaatattcctggcttattaatggaaccttccagcagtccacacaggagctttttatccccaatatcaccgtgaataattcaggtagttacacttgccatgcaaataattcagtgaccggctgcaatcggaccaccgtcaaaacaatcatcgtgacggataacgcgcttccacaggagaatggactatcccccggagcaattgccggtatcgtgataggcgtagtggccttggtagcgcttatcgctgttgctctggcttgctttctgcactttggtaagacgggcagggcatcagaccagagagatcttacggaacacaagccctcagtatccaaccatacacaggaccactccaacgaccctcccaacaaaatgaatgaagtcacatatagcaccctgaactttgaggctcagcaacccacccagccaaccagtgcctccccctccttgaccgccactgagatcatctactccgaagtgaaaaagcagtag

SEQ ID NO: 71475 - DNA, 3230 bp, Artificial Sequence
  derived and/or modified sequence
aaagctctgggccccagggaggaggctcagcacagagagtggaaaacagcagaggtgacagagcagccgtgctcgaagcgttcctggagcccaagctctcctccacaggtgaagacagggccagcaggagacaccatggggcacctctcagccccacttcacagagtgcgtgtaccctggcaggggcttctgctcacagcctcacttctaaccttctggaacccgcccaccactgcccagctcactactgaatccatgccattcaatgttgcagaggggaaggaggttcttctccttgtccacaatctgccccagcaactttttggctacagctggtacaaaggggaaagagtggatggcaaccgtcaaattgtaggatatgcaataggaactcaacaagctaccccagggcccgcaaacagcggtcgagagacaatataccccaatgcatccctgctgatccagaacgtcacccagaatgacacaggattctacaccctacaagtcataaagtcagatcttgtgaatgaagaagcaactggacagttccatgtatacccggagctgcccaagccctccatctccagcaacaactccaaccctgtggaggacaaggatgctgtggccttcacctgtgaacctgagactcaggacacaacctacctgtggtggataaacaatcagagcctcccggtcagtcccaggctgcagctgtccaatggcaacaggaccctcactctactcagtgtcacaaggaatgacacaggaccctatgagtgtgaaatacagaacccagtgagtgcgaaccgcagtgacccagtcaccttgaatgtcacctatggcccggacacccccaccatttccccttcagacacctattaccgtccaggggcaaacctcagcctctcctgctatgcagcctctaacccacctgcacagtactcctggcttatcaatggaacattccagcaaagcacacaagagctctttatccctaacatcactgtgaataatagtggatcctatacctgccacgccaataactcagtcactggctgcaacaggaccacagtcaagacgatcatagtcactgataatgctctaccacaagaaaatggcctctcacctggggccattgctggcattgtgattggagtagtggccctggttgctctgatagcagtagccctggcatgttttctgcatttcgggaagaccggcagggcaagcgaccagcgtgatctcacagagcacaaaccctcagtctccaaccacactcaggaccactccaatgacccacctaacaagatgaatgaagttacttattctaccctgaactttgaagcccagcaacccacacaaccaacttcagcctccccatccctaacagccacagaaataatttattcagaagtaaaaaagcagtaatgaaacctgtcctgctcactgcagtgctgatgtatttcaagtctctcaccctcatcactaggagattcctttcccctgtaggggtagaggggtggggacagaaacaactttctcctactcttccttcctaataggcatctccaggctgcctggtcactgcccctctctcagtgtcaatagatgaaagtacattgggagtctgtaggaaacccaaccttcttgtcattgaaatttggcaaagctgactttgggaaagagggaccagaacttcccctcccttccccttttcccaacctggacttgttttaaacttgcctgttcagagcactcattccttcccacccccagtcctgtcctatcactctaattcggatttgccatagccttgaggttatgtccttttccattaagtacatgtgccaggaaacaagagagagagaaagtaaaggcagtaatgccttctcctatttctccaaagccttgtgtgaactcaccaaacacaagaaaatcaaatatataaccaatagtgaaatgccacacctttgtccactgtcagggttgtctacctgtaggatcagggtctaagcaccttggtgcttagctagaataccacctaatccttctggcaagcctgtcttcagagaacccactagaagcaactaggaaaatcacttgccaaaatccaaggcaattcctgatggaaaatgcaaaagcacatatatgttttaatatctttatgggctctgttcaaggcagtgctgagagggaggggttatagcttcaggagggaaccagcttctgataaacacaatctgctaggaacttgggaaaggaatcagagagctgcccttcagcgattatttaaattattgttaaagaatacacaatttggggtattgggatttttctccttttctctgagacattccaccattttaatttttgtaactgcttatttatgtgaaaagggttatttttacttagcttagctatgtcagccaatccgattgccttaggtgaaagaaaccaccgaaatccctcaggtcccttggtcaggagcctctcaagattttttttgtcagaggctccaaatagaaaataagaaaaggttttcttcattcatggctagagctagatttaactcagtttctaggcacctcagaccaatcatcaactaccattctattccatgtttgcacctgtgcattttctgtttgcccccattcactttgtcaggaaaccttggcctctgctaaggtgtatttggtccttgagaagtgggagcaccctacagggacactatcactcatgctggtggcattgtttacagctagaaagctgcactggtgctaatgccccttggggaaatggggctgtgaggaggaggattataacttaggcctagcctcttttaacagcctctgaaatttatcttttcttctatggggtctataaatgtatcttataataaaaaggaaggacaggaggaagacaggcaaatgtacttctcacccagtcttctacacagatggaatctctttggggctaagagaaaggttttattctatattgcttacctgatctcatgttaggcctaagaggctttctccaggaggattagcttggagttctctatactcaggtacctctttcagggttttctaaccctgacacggactgtgcatactttccctcatccatgctgtgctgtgttatttaatttttcctggctaagatcatgtctgaattatgtatgaaaattattctatgtttttataataaaaataatatatcagacatcg

SEQ ID NO: 71476 - DNA, 1293 bp, Artificial Sequence
  derived and/or modified sequence
atgggccacctgagcgcccccctgcacagagtgagagtgccctggcagggcctgctgctgaccgccagcctgctgaccttctggaacccccccaccaccgcccagctgaccaccgagagcatgcccttcaacgtggccgagggcaaggaggtgctgctgctggtgcacaacctgccccagcagctgttcggctacagctggtacaagggcgagagagtggacggcaacagacagatcgtgggctacgccatcggcacccagcaggccacccccggccccgccaacagcggcagagagaccatctaccccaacgccagcctgctgatccagaacgtgacccagaacgacaccggcttctacaccctgcaggtgatcaagagcgacctggtgaacgaggaggccaccggccagttccacgtgtaccccgagctgcccaagcccagcatcagcagcaacaacagcaaccccgtggaggacaaggacgccgtggccttcacctgcgagcccgagacccaggacaccacctacctgtggtggatcaacaaccagagcctgcccgtgagccccagactgcagctgagcaacggcaacagaaccctgaccctgctgagcgtgaccagaaacgacaccggcccctacgagtgcgagatccagaaccccgtgagcgccaacagaagcgaccccgtgaccctgaacgtgacctacggccccgacacccccaccatcagccccagcgacacctactacagacccggcgccaacctgagcctgagctgctacgccgccagcaacccccccgcccagtacagctggctgatcaacggcaccttccagcagagcacccaggagctgttcatccccaacatcaccgtgaacaacagcggcagctacacctgccacgccaacaacagcgtgaccggctgcaacagaaccaccgtgaagaccatcatcgtgaccgacaacgccctgccccaggagaacggcctgagccccggcgccatcgccggcatcgtgatcggcgtggtggccctggtggccctgatcgccgtggccctggcctgcttcctgcacttcggcaagaccggcagagccagcgaccagagagacctgaccgagcacaagcccagcgtgagcaaccacacccaggaccacagcaacgacccccccaacaagatgaacgaggtgacctacagcaccctgaacttcgaggcccagcagcccacccagcccaccagcgccagccccagcctgaccgccaccgagatcatctacagcgaggtgaagaagcagtag

SEQ ID NO: 71477 - protein, 359 aa, Artificial Sequence
  derived and/or modified sequence
MPFNVAEGKEVLLLVHNLPQQLFGYSWYKGERVDGNRQIVGYAIGTQQATPGPANSGRETIYPNASLLIQNVTQNDTGFYTLQVIKSDLVNEEATGQFHVYPELPKPSISSNNSNPVEDKDAVAFTCEPETQDTTYLWWINNQSLPVSPRLQLSNGNRTLTLLSVTRNDTGPYECEIQNPVSANRSDPVTLNVTYGPDTPTISPSDTYYRPGANLSLSCYAASNPPAQYSWLINGTFQQSTQELFIPNITVNNSGSYTCHANNSVTGCNRTTVKTIIVTEMAFHHVAKAGLKLLSSSNPPASTSQSAKITDNALPQENGLSPGAIAGIVIGVVALVALIAVALACFLHFGKTGSSGPLQ

SEQ ID NO: 71478 - protein, 461 aa, Artificial Sequence
  derived and/or modified sequence
MGHLSAPLHRVRVPWQGLLLTASLLTFWNPPTTAQLTTESMPFNVAEGKEVLLLVHNLPQQLFGYSWYKGERVDGNRQIVGYAIGTQQATPGPANSGRETIYPNASLLIQNVTQNDTGFYTLQVIKSDLVNEEATGQFHVYPELPKPSISSNNSNPVEDKDAVAFTCEPETQDTTYLWWINNQSLPVSPRLQLSNGNRTLTLLSVTRNDTGPYECEIQNPVSANRSDPVTLNVTYGPDTPTISPSDTYYRPGANLSLSCYAASNPPAQYSWLINGTFQQSTQELFIPNITVNNSGSYTCHANNSVTGCNRTTVKTIIVTERQNLTMLPRLDSNSWAQAILPSVSQSAEITDNALPQENGLSPGAIAGIVIGVVALVALIAVALACFLHFGKTGRASDQRDLTEHKPSVSNHTQDHSNDPPNKMNEVTYSTLNFEAQQPTQPTSASPSLTATEIIYSEVKKQ

SEQ ID NO: 71479 - protein, 321 aa, Artificial Sequence
  derived and/or modified sequence
MGHLSAPLHRVRVPWQGLLLTASLLTFWNPPTTAQLTTESMPFNVAEGKEVLLLVHNLPQQLFGYSWYKGERVDGNRQIVGYAIGTQQATPGPANSGRETIYPNASLLIQNVTQNDTGFYTLQVIKSDLVNEEATGQFHVYPELPKPSISSNNSNPVEDKDAVAFTCEPETQDTTYLWWINNQSLPVSPRLQLSNGNRTLTLLSVTRNDTGPYECEIQNPVSANRSDPVTLNVTYGPDTPTISPSDTYYRPGANLSLSCYAASNPPAQYSWLINGTFQQSTQELFIPNITVNNSGSYTCHANNSVTGCNRTTVKTIIVTGK

SEQ ID NO: 71480 - DNA, 1386 bp, Artificial Sequence
  derived and/or modified sequence
atgggacacctatccgctccccttcacagggtgcgggtcccctggcagggcctgctactgacagcctctcttttaaccttttggaatccacctacaacggcccagctgactaccgagtccatgcccttcaacgtggctgaagggaaggaggtattactgttggtccataacctccctcagcagttgtttggttattcctggtacaaaggcgaacgggtagatggcaaccgacaaatagtcggctacgctattggaactcagcaggctacgccaggacctgcgaacagcggtcgggaaactatctacccgaatgcctcacttctgatccagaacgttacacagaacgacacgggcttctataccctacaggttattaagtcagatctggtcaacgaggaggccaccggccagtttcacgtctaccccgagttgccgaagcccagcatctcctcaaacaactcaaaccccgtggaggacaaagacgccgtggcattcacctgtgaacctgagacgcaagacacaacctacctgtggtggataaacaaccagagtctgccggtaagccccagactgcaactgtcaaatggaaatcgaaccctcacactgcttagtgtcacgcgcaatgacaccggcccgtatgaatgcgagattcagaatccagtttctgcaaacagatcagacccagtgacactgaatgtgacgtatggtcccgacacacccaccataagtccaagcgatacctattacaggccaggcgccaacttgagcctgagctgttacgccgcctccaatccgcccgcccagtatagttggctcataaacggaacctttcagcagagcacccaggaattgttcatccctaatattaccgtgaataattctggcagctacacatgccacgcaaacaattcagttacgggttgcaatagaaccaccgtgaaaactataatcgtgactgaaagacagaatctgacaatgttgccccggctggatagcaactcttgggcccaagctattctgcccagcgtgagccagtcagccgaaataacggataatgccctcccacaagagaatggtttatctcccggtgcaatcgccggaatcgtgatcggtgtcgtggccctcgtggctctcatcgctgtggcgttggcctgcttcctgcattttgggaaaactggccgcgcatctgatcagcgcgacctcacggagcataagccatcagtgagcaatcacactcaggaccactccaacgacccacctaataaaatgaatgaagtgacttattccactttgaactttgaggcacagcagcccacgcaacccacgtctgcgtctccatccctcaccgccaccgagataatttacagcgaggtaaagaaacaatag

SEQ ID NO: 71481 - DNA, 1386 bp, Artificial Sequence
  derived and/or modified sequence
atgggccacctgagcgcccccctgcaccgggtgcgggtgccctggcagggcctgctgctgacagccagcctgctgaccttctggaacccccccaccacagcccagctgaccacagagagcatgcccttcaacgtggccgagggcaaggaggtgctgctgctggtgcacaacctgccccagcagctgtttggctacagctggtacaagggggagcgggtggatggcaaccggcagatcgtgggctacgccatcggcacccagcaggccaccccaggccctgccaacagcggccgggagaccatctacccaaatgccagcctgctgatccagaatgtgacccagaatgacaccggcttctacaccctgcaggtgatcaagagtgacctggtgaatgaggaggccaccggccagttccacgtgtacccagagctgcccaagcccagcatcagcagcaacaacagcaaccctgtggaggacaaggatgctgtggccttcacctgtgagcctgagacccaggacaccacctacctgtggtggatcaacaaccagagcctgcctgtgagcccccggctgcagctgagcaatggaaacagaaccctgaccctgctgtctgtgaccagaaatgacaccggcccctatgaatgtgagatccagaaccctgtgtctgccaacagaagtgaccctgtgaccctgaatgtgacctacggccctgacacccccaccatcagccccagcgacacctactacagacctggggccaacctgagcctgagctgctatgctgccagcaaccccccagcccagtacagctggctgatcaatggcaccttccagcagagcacccaggagctgttcatccccaacatcaccgtgaacaacagcggcagctacacctgccacgccaacaacagcgtgacaggctgcaacagaaccaccgtgaagaccatcatcgtgacagagcggcagaacctgaccatgctgccccggctggacagcaacagctgggcccaggccatcctgcccagcgtgtcccagagcgctgagatcacagacaatgccctgccccaggagaatggcctgagccctggggccatcgccggcatcgtcatcggcgtggtggccctggtggccctgattgctgtggccctggcctgcttcctgcactttgggaagacaggccgggccagtgaccagagggacctgacagagcacaagcccagcgtgagcaaccacacccaggaccacagcaatgacccccccaacaagatgaatgaggtgacctacagcaccctgaactttgaggcccagcagcccacccagcccaccagcgccagccccagcctgacagccacagagatcatctacagcgaggtgaagaagcagtag

SEQ ID NO: 71482 - DNA, 1386 bp, Artificial Sequence
  derived and/or modified sequence
atgggccacctgagcgcccccctgcaccgggtgcgggtgccctggcaggggctgttgctcaccgcgtcactccttaccttttggaacccccctacaactgcccagctaacaacagaatccatgccatttaatgtcgcagagggcaaggaagttctccttctagtgcacaatttgccccaacagctgttcggctacagctggtacaaaggggagcgcgttgacggcaacagacagatagtgggttatgccatcggaacccaacaggccacccctgggccagccaattctggcagagaaaccatctaccctaatgcgagtctgctgattcagaatgtgacccagaacgacacaggattctacaccctgcaagtgattaagagcgacttagttaacgaggaagccactggccagtttcacgtttatcctgagctgcctaaaccctccattagctccaacaacagtaacccggtcgaagataaagatgctgtggcttttacatgcgaaccagagacacaggacaccacatatctatggtggatcaacaatcagtcgctgcctgtaagtccaagactccagctgtccaacggaaacaggactctgaccctactcagtgtgacaaggaatgacacaggtccttacgaatgcgagatacagaatcctgtctctgcaaaccgctctgaccccgtgaccctcaacgtaacttatggccctgatacaccaactataagtccatcagatacttactacagacccggagcaaacctttccttaagctgttacgccgctagtaacccgcccgctcagtactcctggctgataaacggtacattccaacagtctacacaggaactttttatcccaaatattacagtaaataattccggcagttatacttgtcatgcaaataatagcgttacgggctgtaaccgaactaccgttaagaccatcattgtgacggagcgccagaatctgaccatgctgccacgcttagacagcaattcgtgggcacaggcaatattaccaagcgtcagccagtcagctgagatcactgataacgccctgcctcaggaaaatgggctttctccgggggcaattgcagggatagtcataggcgttgtagcccttgtcgccctcatagccgttgccctggcatgctttttgcactttggcaaaacaggcagagcctctgatcagagagacctcacagagcacaagccaagcgtgtctaatcacacgcaggaccattccaatgatccccctaataaaatgaacgaggtgacctattcgactctcaatttcgaagctcagcagcccacacagcctacgagtgctagcccgagcctgacagctactgaaataatctactcagaagtgaagaaacagtag

SEQ ID NO: 71483 - DNA, 1386 bp, Artificial Sequence
  derived and/or modified sequence
atggggcacctttctgccccacttcacagagtgagagtcccgtggcagggcctgctacttacagcctccttacttactttctggaatccgccaacaactgcacagctcaccactgaatctatgccttttaacgtggccgagggaaaagaagtgctgttattggtccataacttaccgcagcagctgttcggctattcctggtataaaggtgaaagggtcgatggcaacagacagattgttggctacgcaataggcactcaacaggcaacccctggtcctgcaaattcagggagagaaactatatatcctaacgcctcgctgcttatccagaatgtgacccagaacgacacaggcttctacaccctacaggttatcaagagcgacctggtgaatgaagaggccacgggtcagttccacgtctacccggaattacctaagccctcaatcagtagtaacaattccaaccctgtggaagataaagacgccgtggcctttacgtgtgagccagaaacgcaggacaccacttatttgtggtggattaacaaccaaagccttccagtaagccctagactgcagcttagtaacggcaacagaacgctgaccctattaagcgtgactaggaatgacacaggcccatacgagtgcgaaattcagaatccagtgtccgccaatcggtccgacccagtgactctcaacgtgacgtacggaccagacactccaactatttccccatctgacacctattaccgacccggtgcaaatctctcactctcctgctacgctgcctctaatccaccggctcagtactcttggttaataaacggaacattccagcagagcactcaggaacttttcattcccaacatcaccgtaaacaattccggttcctacacttgtcatgccaataattctgtgaccgggtgtaatagaacgactgtgaaaacaattattgtcaccgagaggcagaatctgacaatgttaccaaggctggatagtaacagttgggctcaagcaattctgccctctgtttcccagtctgcggagatcactgacaacgcgttgccccaggaaaatgggctcagtcccggagcaatcgcagggatcgtgatcggagtggtggcactggtggcactgattgctgtggctctggcctgttttttgcactttggcaagacagggcgagcttccgaccaacgggatctgaccgaacacaaacccagtgtgagtaaccacacacaggaccattccaatgatcctcccaacaagatgaatgaagttacttacagcacactcaactttgaagcacagcagccgactcagcccacctctgcctctccttcattgactgcgactgagattatctattctgaagtaaaaaaacaatag

SEQ ID NO: 71484 - DNA, 3302 bp, Artificial Sequence
  derived and/or modified sequence
aggctcagcacagagagtggaaaacagcagaggtgacagagcagccgtgctcgaagcgttcctggagcccaagctctcctccacaggtgaagacagggccagcaggagacaccatggggcacctctcagccccacttcacagagtgcgtgtaccctggcaggggcttctgctcacagcctcacttctaaccttctggaacccgcccaccactgcccagctcactactgaatccatgccattcaatgttgcagaggggaaggaggttcttctccttgtccacaatctgccccagcaactttttggctacagctggtacaaaggggaaagagtggatggcaaccgtcaaattgtaggatatgcaataggaactcaacaagctaccccagggcccgcaaacagcggtcgagagacaatataccccaatgcatccctgctgatccagaacgtcacccagaatgacacaggattctacaccctacaagtcataaagtcagatcttgtgaatgaagaagcaactggacagttccatgtatacccggagctgcccaagccctccatctccagcaacaactccaaccctgtggaggacaaggatgctgtggccttcacctgtgaacctgagactcaggacacaacctacctgtggtggataaacaatcagagcctcccggtcagtcccaggctgcagctgtccaatggcaacaggaccctcactctactcagtgtcacaaggaatgacacaggaccctatgagtgtgaaatacagaacccagtgagtgcgaaccgcagtgacccagtcaccttgaatgtcacctatggcccggacacccccaccatttccccttcagacacctattaccgtccaggggcaaacctcagcctctcctgctatgcagcctctaacccacctgcacagtactcctggcttatcaatggaacattccagcaaagcacacaagagctctttatccctaacatcactgtgaataatagtggatcctatacctgccacgccaataactcagtcactggctgcaacaggaccacagtcaagacgatcatagtcactgagagacagaatctcaccatgttacccaggctggactcgaactcctgggctcaagcaatcctcccatctgtttcccaaagtgctgagattacagataatgctctaccacaagaaaatggcctctcacctggggccattgctggcattgtgattggagtagtggccctggttgctctgatagcagtagccctggcatgttttctgcatttcgggaagaccggcagggcaagcgaccagcgtgatctcacagagcacaaaccctcagtctccaaccacactcaggaccactccaatgacccacctaacaagatgaatgaagttacttattctaccctgaactttgaagcccagcaacccacacaaccaacttcagcctccccatccctaacagccacagaaataatttattcagaagtaaaaaagcagtaatgaaacctgtcctgctcactgcagtgctgatgtatttcaagtctctcaccctcatcactaggagattcctttcccctgtaggggtagaggggtggggacagaaacaactttctcctactcttccttcctaataggcatctccaggctgcctggtcactgcccctctctcagtgtcaatagatgaaagtacattgggagtctgtaggaaacccaaccttcttgtcattgaaatttggcaaagctgactttgggaaagagggaccagaacttcccctcccttccccttttcccaacctggacttgttttaaacttgcctgttcagagcactcattccttcccacccccagtcctgtcctatcactctaattcggatttgccatagccttgaggttatgtccttttccattaagtacatgtgccaggaaacaagagagagagaaagtaaaggcagtaatgccttctcctatttctccaaagccttgtgtgaactcaccaaacacaagaaaatcaaatatataaccaatagtgaaatgccacacctttgtccactgtcagggttgtctacctgtaggatcagggtctaagcaccttggtgcttagctagaataccacctaatccttctggcaagcctgtcttcagagaacccactagaagcaactaggaaaatcacttgccaaaatccaaggcaattcctgatggaaaatgcaaaagcacatatatgttttaatatctttatgggctctgttcaaggcagtgctgagagggaggggttatagcttcaggagggaaccagcttctgataaacacaatctgctaggaacttgggaaaggaatcagagagctgcccttcagcgattatttaaattattgttaaagaatacacaatttggggtattgggatttttctccttttctctgagacattccaccattttaatttttgtaactgcttatttatgtgaaaagggttatttttacttagcttagctatgtcagccaatccgattgccttaggtgaaagaaaccaccgaaatccctcaggtcccttggtcaggagcctctcaagattttttttgtcagaggctccaaatagaaaataagaaaaggttttcttcattcatggctagagctagatttaactcagtttctaggcacctcagaccaatcatcaactaccattctattccatgtttgcacctgtgcattttctgtttgcccccattcactttgtcaggaaaccttggcctctgctaaggtgtatttggtccttgagaagtgggagcaccctacagggacactatcactcatgctggtggcattgtttacagctagaaagctgcactggtgctaatgccccttggggaaatggggctgtgaggaggaggattataacttaggcctagcctcttttaacagcctctgaaatttatcttttcttctatggggtctataaatgtatcttataataaaaaggaaggacaggaggaagacaggcaaatgtacttctcacccagtcttctacacagatggaatctctttggggctaagagaaaggttttattctatattgcttacctgatctcatgttaggcctaagaggctttctccaggaggattagcttggagttctctatactcaggtacctctttcagggttttctaaccctgacacggactgtgcatactttccctcatccatgctgtgctgtgttatttaatttttcctggctaagatcatgtctgaattatgtatgaaaattattctatgtttttataataaaaataatatatcagacatcga

SEQ ID NO: 71485 - DNA, 1386 bp, Artificial Sequence
  derived and/or modified sequence
atgggccacctgagcgcccccctgcacagagtgagagtgccctggcagggcctgctgctgaccgccagcctgctgaccttctggaacccccccaccaccgcccagctgaccaccgagagcatgcccttcaacgtggccgagggcaaggaggtgctgctgctggtgcacaacctgccccagcagctgttcggctacagctggtacaagggcgagagagtggacggcaacagacagatcgtgggctacgccatcggcacccagcaggccacccccggccccgccaacagcggcagagagaccatctaccccaacgccagcctgctgatccagaacgtgacccagaacgacaccggcttctacaccctgcaggtgatcaagagcgacctggtgaacgaggaggccaccggccagttccacgtgtaccccgagctgcccaagcccagcatcagcagcaacaacagcaaccccgtggaggacaaggacgccgtggccttcacctgcgagcccgagacccaggacaccacctacctgtggtggatcaacaaccagagcctgcccgtgagccccagactgcagctgagcaacggcaacagaaccctgaccctgctgagcgtgaccagaaacgacaccggcccctacgagtgcgagatccagaaccccgtgagcgccaacagaagcgaccccgtgaccctgaacgtgacctacggccccgacacccccaccatcagccccagcgacacctactacagacccggcgccaacctgagcctgagctgctacgccgccagcaacccccccgcccagtacagctggctgatcaacggcaccttccagcagagcacccaggagctgttcatccccaacatcaccgtgaacaacagcggcagctacacctgccacgccaacaacagcgtgaccggctgcaacagaaccaccgtgaagaccatcatcgtgaccgagagacagaacctgaccatgctgcccagactggacagcaacagctgggcccaggccatcctgcccagcgtgagccagagcgccgagatcaccgacaacgccctgccccaggagaacggcctgagccccggcgccatcgccggcatcgtgatcggcgtggtggccctggtggccctgatcgccgtggccctggcctgcttcctgcacttcggcaagaccggcagagccagcgaccagagagacctgaccgagcacaagcccagcgtgagcaaccacacccaggaccacagcaacgacccccccaacaagatgaacgaggtgacctacagcaccctgaacttcgaggcccagcagcccacccagcccaccagcgccagccccagcctgaccgccaccgagatcatctacagcgaggtgaagaagcagtag

SEQ ID NO: 71486 - protein, 368 aa, Artificial Sequence
  derived and/or modified sequence
MGHLSAPLHRVRVPWQGLLLTASLLTFWNPPTTAQLTTESMPFNVAEGKEVLLLVHNLPQQLFGYSWYKGERVDGNRQIVGYAIGTQQATPGPANSGRETIYPNASLLIQNVTQNDTGFYTLQVIKSDLVNEEATGQFHVYPELPKPSISSNNSNPVEDKDAVAFTCEPETQDTTYLWWINNQSLPVSPRLQLSNGNRTLTLLSVTRNDTGPYECEIQNPVSANRSDPVTLNVTYGPDTPTISPSDTYYRPGANLSLSCYAASNPPAQYSWLINGTFQQSTQELFIPNITVNNSGSYTCHANNSVTGCNRTTVKTIIVTDNALPQENGLSPGAIAGIVIGVVALVALIAVALACFLHFGKTGSSGPLQ

SEQ ID NO: 71487 - DNA, 1080 bp, Artificial Sequence
  derived and/or modified sequence
atgccattcaacgtggccgaaggaaaagaggtgctattactggtgcataacctgccccagcagctgttcggatattcctggtataaaggtgaacgggttgatgggaacaggcagattgtgggatatgcaatcggtacacagcaagccactcctggacctgccaacagcgggagggaaactatttaccccaacgcgtcactgctgattcagaacgtcacacagaatgacacaggattttacacgctgcaggtgattaagtctgacctggtgaacgaagaagccacgggccagttccatgtgtatccagaattacctaaaccgtctatcagttccaataacagcaatcccgtcgaggataaagacgcagttgcgttcacttgtgaacccgagactcaggacacaacctatctgtggtggattaacaatcaatcactgccagtgagccctcgacttcaactcagtaatgggaaccgcacactgacactcctcagcgttacaagaaatgacacaggcccttacgagtgcgagatccagaatccagtgagcgccaatagatctgaccccgtgactctcaacgtcacctatggacctgacactccgacaatttctccttcggatacctactatagaccaggcgccaacttatcgctctcctgctacgctgccagcaaccctcctgcccagtatagctggcttattaatggcacttttcagcagagcacgcaggagttgttcatccccaacatcacggtcaataatagtggatcctatacatgtcacgctaacaattcagtcaccgggtgcaataggactactgtaaagactatcatagtgaccgagatggccttccaccatgtggccaaggccgggctcaaactgctttcctcgtctaatccacctgctagtacgagtcagtcagcaaagatcaccgataatgccttgccccaggaaaatggccttagccctggagccatcgcaggcattgtaattggagtggtagcgctggtagcccttattgcagtcgccctcgcctgcttcttacattttggaaagactgggagtagcggccccctacaatag

SEQ ID NO: 71488 - DNA, 1107 bp, Artificial Sequence
  derived and/or modified sequence
atgggacatctctccgcaccgctccaccgagttcgtgtgccctggcagggcctcctactgacagcatctctgctgaccttttggaatccgccgactactgcgcagctgaccaccgagtcgatgccctttaatgtcgctgagggtaaagaggtgctgctcctggtgcataatctaccccagcagctgttcggctacagctggtataagggagagcgggtcgacgggaaccgtcaaatagtaggatacgctattgggacccagcaggcaacacccggccctgcaaattcagggcgcgaaaccatctatcccaacgcttcccttctgatccaaaacgttactcagaatgacaccggcttctataccctgcaggtgataaagtctgacctcgtgaatgaggaagccacagggcagttccacgtgtatcctgaacttcccaaacccagtatcagctctaataatagcaatccagttgaggataaggatgccgttgcctttacatgcgagcctgagactcaggacacgacttatctctggtggattaacaaccagtcactgcctgtgtcccctcgtctgcagctctccaacggaaatcggacactcaccctgctctcggtcactcgaaacgatactgggccttacgaatgcgagatacagaaccccgtttcagcaaaccggtctgatccagtaacactgaatgtcacctatggtccagatacccctaccatctctccttctgatacatactaccggcccggggcaaatttgagccttagctgttacgctgcgagcaatccccctgcccaatattcctggctaattaatggtacctttcagcagtcaacccaggagctctttattcctaacatcaccgtcaataatagcggctcctacacctgtcatgctaataatagtgtaacagggtgtaataggacaacagtcaagactataattgtcacggacaacgctctgccccaggagaacggattaagtcctggcgcgatagccgggattgtgataggagtggtcgccctggtggccctgattgcggtggctttggcatgctttcttcatttcggaaagacaggatcgagtgggcccctgcagtag

SEQ ID NO: 71489 - DNA, 1080 bp, Artificial Sequence
  derived and/or modified sequence
atgcccttcaacgtggccgagggcaaggaggtgctgctgctggtgcacaacctgccccagcagctgtttggctacagctggtacaagggggagcgggtggatggcaaccggcagatcgtgggctacgccatcggcacccagcaggccaccccaggccctgccaacagcggccgggagaccatctacccaaatgccagcctgctgatccagaatgtgacccagaatgacaccggcttctacaccctgcaggtgatcaagagtgacctggtgaatgaggaggccaccggccagttccacgtgtacccagagctgcccaagcccagcatcagcagcaacaacagcaaccctgtggaggacaaggatgctgtggccttcacctgtgagcctgagacccaggacaccacctacctgtggtggatcaacaaccagagcctgcctgtgagcccccggctgcagctgagcaatggaaacagaaccctgaccctgctgtctgtgaccagaaatgacaccggcccctatgaatgtgagatccagaaccctgtgtctgccaacagaagtgaccctgtgaccctgaatgtgacctacggccctgacacccccaccatcagccccagcgacacctactacagacctggggccaacctgagcctgagctgctatgctgccagcaaccccccagcccagtacagctggctgatcaatggcaccttccagcagagcacccaggagctgttcatccccaacatcaccgtgaacaacagcggcagctacacctgccacgccaacaacagcgtgacaggctgcaacagaaccaccgtgaagaccatcatcgtgacagagatggccttccaccacgtggccaaggccggcctgaagctgctgagcagcagcaaccccccagccagcaccagccagagcgccaagatcacagacaatgccctgccccaggagaatggcctgagccctggggccatcgccggcatcgtcatcggcgtggtggccctggtggccctgattgctgtggccctggcctgcttcctgcactttgggaagacaggcagcagcggccccctgcagtag

SEQ ID NO: 71490 - DNA, 1107 bp, Artificial Sequence
  derived and/or modified sequence
atgggccacctgagcgcccccctgcaccgggtgcgggtgccctggcagggcctgctgctgacagccagcctgctgaccttctggaacccccccaccacagcccagctgaccacagagagcatgcccttcaacgtggccgagggcaaggaggtgctgctgctggtgcacaacctgccccagcagctgtttggctacagctggtacaagggggagcgggtggatggcaaccggcagatcgtgggctacgccatcggcacccagcaggccaccccaggccctgccaacagcggccgggagaccatctacccaaatgccagcctgctgatccagaatgtgacccagaatgacaccggcttctacaccctgcaggtgatcaagagtgacctggtgaatgaggaggccaccggccagttccacgtgtacccagagctgcccaagcccagcatcagcagcaacaacagcaaccctgtggaggacaaggatgctgtggccttcacctgtgagcctgagacccaggacaccacctacctgtggtggatcaacaaccagagcctgcctgtgagcccccggctgcagctgagcaatggaaacagaaccctgaccctgctgtctgtgaccagaaatgacaccggcccctatgaatgtgagatccagaaccctgtgtctgccaacagaagtgaccctgtgaccctgaatgtgacctacggccctgacacccccaccatcagccccagcgacacctactacagacctggggccaacctgagcctgagctgctatgctgccagcaaccccccagcccagtacagctggctgatcaatggcaccttccagcagagcacccaggagctgttcatccccaacatcaccgtgaacaacagcggcagctacacctgccacgccaacaacagcgtgacaggctgcaacagaaccaccgtgaagaccatcatcgtgacagacaatgccctgccccaggagaatggcctgagccctggggccatcgccggcatcgtgattggagtggtggccctggtggccctgattgctgtggccctggcctgcttcctgcactttgggaagacaggcagcagcggccccctgcagtag

SEQ ID NO: 71491 - DNA, 1080 bp, Artificial Sequence
  derived and/or modified sequence
atgcccttcaacgtggccgagggcaaggaggtgctgctgctggtgcataatctgccccagcaactcttcggttacagttggtataagggagagcgagtggacggcaacagacagattgttgggtatgcaatcggaacccagcaagctacccccggaccagccaactccggtcgcgagacgatctaccctaatgcttccctgctcatccaaaatgttactcagaacgatacgggattctatacacttcaggtgatcaaatctgatctagtgaacgaggaggccaccggccaattccacgtatatcctgagctgccaaaaccttctataagcagcaataatagcaaccccgtggaggataaagacgcagttgcgttcacctgcgagcccgaaacgcaggatacaacatacctatggtggattaacaatcagtccctccctgtgtccccgaggcttcaactgtctaatgggaaccgaaccctaaccctgctatccgtgacaagaaatgatacaggcccgtatgaatgcgagatacagaaccctgttagtgcaaatagaagtgacccagtgaccctgaacgtaacgtatggtccggacacgcccactatttccccctctgatacatattatcggcccggcgctaacctgtctctaagctgttacgccgcctctaacccccccgctcagtactcttggctgattaatgggacattccagcagagtacccaggagctcttcattccaaacatcaccgtaaacaactctgggtcctacacctgccacgccaataattccgtcacaggttgcaaccggactaccgtgaaaactattatcgtgaccgagatggctttccaccatgtggctaaggctggcttgaagttgctatcatcatcaaaccccccggccagcacctcacagagcgctaagattaccgataatgcactgcctcaggaaaacggtctttcccccggcgcaattgcggggattgtaattggggtcgtggcactcgtggcgcttatcgcagtggccttggcttgtttcctgcacttcgggaagactggatcctcaggccccctccagtag

SEQ ID NO: 71492 - DNA, 1107 bp, Artificial Sequence
  derived and/or modified sequence
atgggccacctgagcgcccccctgcaccgggtgcgggtgccctggcaaggactgctactgaccgcgtctctcctaacattttggaaccccccaactactgcccagctgaccaccgagagcatgccttttaatgtggctgagggcaaggaggtcctcctgctcgttcacaacttgcctcaacagctcttcgggtacagctggtataagggggagagagtagacggcaacaggcagattgtgggttatgctatcggtacccagcaggccacacctggtccagctaactctgggcgcgagactatttatcccaatgcttcccttcttatccagaacgtgacccagaacgacacgggcttctatacactacaggtcataaagtctgacctggtgaacgaagaagccactggtcagttccatgtttacccggaactcccaaaacccagtatatcatcaaacaatagtaaccccgttgaagacaaggacgccgtggcttttacctgcgagccagaaactcaggacaccacatacctgtggtggattaacaaccagtctttgcccgtctcgcctcgcctacagctttccaatggcaatcggaccctaacactactttctgtcacaagaaatgacaccggcccctatgaatgtgagattcaaaaccctgtgtctgccaatcggtctgatcccgtcactttgaacgtgacgtatggtccggacaccccaacaatttcaccttcggacacatattacaggccaggcgccaatctgtctctttcctgctatgctgcgagcaacccccccgcccagtactcctggctgattaacggtactttccagcagtcaacacaggaactgttcatcccgaacatcacggttaacaattccggctcttacacatgccatgccaacaacagtgtcaccgggtgcaatcggaccacagtcaagacaatcatagtcacagataacgcattacctcaggaaaacggcttgtcacccggcgctattgcagggatcgtgatcggcgtcgtcgctctcgtagctctcattgctgtggcactcgcatgttttctacatttcggcaagactggcagctctgggccattgcagtag

SEQ ID NO: 71493 - DNA, 1080 bp, Artificial Sequence
  derived and/or modified sequence
atgccttttaacgtggctgaaggaaaagaggtcctgctgctggtgcacaatttgcctcagcagctcttcggatactcgtggtacaaaggcgagcgcgtggacggcaatcgccagatcgtaggatacgcaatcgggacgcaacaggccactccaggccctgccaattccggtcgcgaaaccatctatcctaacgcatccctcctgattcagaatgttactcaaaacgacaccggcttttacactctgcaggtcatcaagtcagacctggtgaatgaggaagcgactggacaatttcatgtgtatccagagttgcccaagcccagcatctcttcaaataatagcaaccccgtggaggataaagatgccgtagctttcacctgcgagccagaaacacaggacaccacctacttgtggtggattaacaaccagtccctgcccgtgtccccacggttgcagctgtctaatgggaataggacgctgactctgctaagtgtcactagaaacgataccgggccttacgagtgcgaaattcagaatccagtgtcagccaataggagcgatcccgtgacgttgaatgtcacctacgggcctgatactcctactatctctcctagcgacacatactaccggccaggggcaaacctgagcctgtcctgttatgccgcttccaaccccccagcccagtacagctggttgatcaacggcacatttcaacaaagcacccaagaactcttcataccgaacatcaccgtcaataacagcggctcttacacatgtcacgctaacaattcagtaacaggttgtaacagaacaaccgtgaaaacaattatcgtcacagagatggccttccaccacgttgctaaggccggactgaagctcctgtcgtccagcaacccccctgcctccacaagccagtccgcaaaaatcacggataacgctctgccccaagagaatggactatcccctggcgctatagctggcatagtgattggggtggtggccctggtcgcattgatagccgtggcattggcctgctttcttcactttggcaagactgggagctccggaccactccaatag

SEQ ID NO: 71494 - DNA, 1107 bp, Artificial Sequence
  derived and/or modified sequence
atggggcacctgtcagcccctctccaccgtgtcagggtaccatggcaggggctcctcctgacagcgtcgctgctcaccttctggaacccaccaacaaccgcccagttaactactgaatcaatgccattcaacgttgctgagggtaaggaagtcctgttgctagtacacaacctgccgcaacagctttttggctattcttggtacaaaggcgagagggtggatgggaataggcaaattgtaggctacgccattggaacgcagcaagccactcccggacccgcaaattccggacgcgagacaatttatcctaatgccagcttgctgatccagaacgtgacgcagaatgataccgggttctacactctccaggtgataaagagcgacctagtcaatgaggaggctactgggcagtttcatgtgtatcccgagctgccaaaaccctcgatctctagcaataactccaaccctgtcgaggataaggatgccgtggcatttacatgtgaacccgaaacacaggacacaacatatctatggtggattaacaatcagagcttgcccgttagtccacggctgcagctcagtaatgggaatcggacgctgaccctcctctcagtaacccggaatgacactggcccttacgagtgtgaaatacaaaaccctgtttcagcaaacagatcagatcccgtgactttgaacgtgacatatgggccagacacccccaccattagtccgtcagatacatattaccgtccaggggcaaacctcagcctgtcttgctacgcagcatctaatccccctgcacagtattcttggctaattaacggcacttttcaacaaagcacgcaggaactgttcatccccaatatcacagtgaataacagcggctcttacacctgccatgccaataacagtgtgacaggctgcaaccggacaacggttaaaaccattatcgttacagataatgccctccctcaagaaaatgggctgagtcccggagccattgccggaattgtcatcggggtggttgcactggttgcgctcatagcagtggctctagcatgctttctccacttcggtaagaccggctcgagtgggcctctgcagtag

SEQ ID NO: 71495 - DNA, 1427 bp, Artificial Sequence
  derived and/or modified sequence
agcacagagagtggaaaacagcagaggtgacagagcagccgtgctcgaagcgttcctggagcccaagctctcctccacaggtgaagacagggccagcaggagacaccatggggcacctctcagccccacttcacagagtgcgtgtaccctggcaggggcttctgctcacagcctcacttctaaccttctggaacccgcccaccactgcccagctcactactgaatccatgccattcaatgttgcagaggggaaggaggttcttctccttgtccacaatctgccccagcaactttttggctacagctggtacaaaggggaaagagtggatggcaaccgtcaaattgtaggatatgcaataggaactcaacaagctaccccagggcccgcaaacagcggtcgagagacaatataccccaatgcatccctgctgatccagaacgtcacccagaatgacacaggattctacaccctacaagtcataaagtcagatcttgtgaatgaagaagcaactggacagttccatgtatacccggagctgcccaagccctccatctccagcaacaactccaaccctgtggaggacaaggatgctgtggccttcacctgtgaacctgagactcaggacacaacctacctgtggtggataaacaatcagagcctcccggtcagtcccaggctgcagctgtccaatggcaacaggaccctcactctactcagtgtcacaaggaatgacacaggaccctatgagtgtgaaatacagaacccagtgagtgcgaaccgcagtgacccagtcaccttgaatgtcacctatggcccggacacccccaccatttccccttcagacacctattaccgtccaggggcaaacctcagcctctcctgctatgcagcctctaacccacctgcacagtactcctggcttatcaatggaacattccagcaaagcacacaagagctctttatccctaacatcactgtgaataatagtggatcctatacctgccacgccaataactcagtcactggctgcaacaggaccacagtcaagacgatcatagtcactgagatggcgtttcaccatgttgccaaggctggtctcaaactcctgagctcaagcaatccacccgcctccacctcccaaagtgctaagattacagataatgctctaccacaagaaaatggcctctcacctggggccattgctggcattgtgattggagtagtggccctggttgctctgatagcagtagccctggcatgttttctgcatttcgggaagaccggcagctcaggaccactccaatgacccacctaacaagatgaatgaagttacttattctaccctgaactttgaagcccagcaacccacacaaccaacttcagcctccccatccctaacagccacagaaataatttattcagaagt

SEQ ID NO: 71496 - DNA, 1263 bp, Artificial Sequence
  derived and/or modified sequence
gacaccatggggcacctctcagccccacttcacagagtgcgtgtaccctggcaggggcttctgctcacagcctcacttctaaccttctggaacccgcccaccactgcccagctcactactgaatccatgccattcaatgttgcagaggggaaggaggttcttctccttgtccacaatctgccccagcaactttttggctacagctggtacaaaggggaaagagtggatggcaaccgtcaaattgtaggatatgcaataggaactcaacaagctaccccagggcccgcaaacagcggtcgagagacaatataccccaatgcatccctgctgatccagaacgtcacccagaatgacacaggattctacaccctacaagtcataaagtcagatcttgtgaatgaagaagcaactggacagttccatgtatacccggagctgcccaagccctccatctccagcaacaactccaaccctgtggaggacaaggatgctgtggccttcacctgtgaacctgagactcaggacacaacctacctgtggtggataaacaatcagagcctcccggtcagtcccaggctgcagctgtccaatggcaacaggaccctcactctactcagtgtcacaaggaatgacacaggaccctatgagtgtgaaatacagaacccagtgagtgcgaaccgcagtgacccagtcaccttgaatgtcacctatggcccggacacccccaccatttccccttcagacacctattaccgtccaggggcaaacctcagcctctcctgctatgcagcctctaacccacctgcacagtactcctggcttatcaatggaacattccagcaaagcacacaagagctctttatccctaacatcactgtgaataatagtggatcctatacctgccacgccaataactcagtcactggctgcaacaggaccacagtcaagacgatcatagtcactgataatgctctaccacaagaaaatggcctctcacctggggccattgctggcattgtgattggagtagtggccctggttgctctgatagcagtagccctggcatgttttctgcatttcgggaagaccggcagctcaggaccactccaatgacccacctaacaagatgaatgaagttacttattctaccctgaactttgaagcccagcaacccacacaaccaacttcagcctccccatccctaacagccacagaaataatttattcagaagtaaaaaagcagtaatgaaacctgtcctgctc

SEQ ID NO: 71497 - DNA, 1080 bp, Artificial Sequence
  derived and/or modified sequence
atgcccttcaacgtggccgagggcaaggaggtgctgctgctggtgcacaacctgccccagcagctgttcggctacagctggtacaagggcgagagagtggacggcaacagacagatcgtgggctacgccatcggcacccagcaggccacccccggccccgccaacagcggcagagagaccatctaccccaacgccagcctgctgatccagaacgtgacccagaacgacaccggcttctacaccctgcaggtgatcaagagcgacctggtgaacgaggaggccaccggccagttccacgtgtaccccgagctgcccaagcccagcatcagcagcaacaacagcaaccccgtggaggacaaggacgccgtggccttcacctgcgagcccgagacccaggacaccacctacctgtggtggatcaacaaccagagcctgcccgtgagccccagactgcagctgagcaacggcaacagaaccctgaccctgctgagcgtgaccagaaacgacaccggcccctacgagtgcgagatccagaaccccgtgagcgccaacagaagcgaccccgtgaccctgaacgtgacctacggccccgacacccccaccatcagccccagcgacacctactacagacccggcgccaacctgagcctgagctgctacgccgccagcaacccccccgcccagtacagctggctgatcaacggcaccttccagcagagcacccaggagctgttcatccccaacatcaccgtgaacaacagcggcagctacacctgccacgccaacaacagcgtgaccggctgcaacagaaccaccgtgaagaccatcatcgtgaccgagatggccttccaccacgtggccaaggccggcctgaagctgctgagcagcagcaacccccccgccagcaccagccagagcgccaagatcaccgacaacgccctgccccaggagaacggcctgagccccggcgccatcgccggcatcgtgatcggcgtggtggccctggtggccctgatcgccgtggccctggcctgcttcctgcacttcggcaagaccggcagcagcggccccctgcagtag

SEQ ID NO: 71498 - DNA, 1107 bp, Artificial Sequence
  derived and/or modified sequence
atgggccacctgagcgcccccctgcacagagtgagagtgccctggcagggcctgctgctgaccgccagcctgctgaccttctggaacccccccaccaccgcccagctgaccaccgagagcatgcccttcaacgtggccgagggcaaggaggtgctgctgctggtgcacaacctgccccagcagctgttcggctacagctggtacaagggcgagagagtggacggcaacagacagatcgtgggctacgccatcggcacccagcaggccacccccggccccgccaacagcggcagagagaccatctaccccaacgccagcctgctgatccagaacgtgacccagaacgacaccggcttctacaccctgcaggtgatcaagagcgacctggtgaacgaggaggccaccggccagttccacgtgtaccccgagctgcccaagcccagcatcagcagcaacaacagcaaccccgtggaggacaaggacgccgtggccttcacctgcgagcccgagacccaggacaccacctacctgtggtggatcaacaaccagagcctgcccgtgagccccagactgcagctgagcaacggcaacagaaccctgaccctgctgagcgtgaccagaaacgacaccggcccctacgagtgcgagatccagaaccccgtgagcgccaacagaagcgaccccgtgaccctgaacgtgacctacggccccgacacccccaccatcagccccagcgacacctactacagacccggcgccaacctgagcctgagctgctacgccgccagcaacccccccgcccagtacagctggctgatcaacggcaccttccagcagagcacccaggagctgttcatccccaacatcaccgtgaacaacagcggcagctacacctgccacgccaacaacagcgtgaccggctgcaacagaaccaccgtgaagaccatcatcgtgaccgacaacgccctgccccaggagaacggcctgagccccggcgccatcgccggcatcgtgatcggcgtggtggccctggtggccctgatcgccgtggccctggcctgcttcctgcacttcggcaagaccggcagcagcggccccctgcagtag

SEQ ID NO: 71499 - protein, 419 aa, Artificial Sequence
  derived and/or modified sequence
MGTLSAPPCTQRIKWKGLLLTASLLNFWNLPTTAQVTIEAEPTKVSEGKDVLLLVHNLPQNLTGYIWYKGQMRDLYHYITSYVVDGEIIIYGPAYSGRETAYSNASLLIQNVTREDAGSYTLHIIKGDDGTRGVTGRFTFTLHLETPKPSISSSNLNPRETMEAVSLTCDPETPDASYLWWMNGQSLPMTHSLKLSETNRTLFLLGVTKYTAGPYECEIRNPVSASRSDPVTLNLLPKLPKPYITINNLNPRENKDVLNFTCEPKSENYTYIWWLNGQSLPVSPRVKRPIENRILILPSVTRNETGPYQCEIRDRYGGIRSDPVTLNVLYGPDLPRIYPSFTYYRSGEVLYLSCSADSNPPAQYSWTINEKFQLPGQKLFIRHITTKHSGLYVCSVRNSATGKESSKSMTVEVSDWTVP

SEQ ID NO: 71500 - DNA, 1260 bp, Artificial Sequence
  derived and/or modified sequence
atgggcaccttgagtgctcccccttgtacacagagaatcaaatggaagggcctcctgcttacagctagtctgcttaacttttggaatctccccaccacggcacaggtgaccattgaggccgagccgacaaaggtgagtgaaggtaaggacgtcctgctgctggtgcacaatttgccccagaatctcactggatacatatggtacaagggacaaatgagggatctgtaccactacataacctcctacgttgtcgatggggaaataattatttatggtcctgcctactccgggagggagacagcctattccaatgcttccctgcttatccaaaacgtgacaagggaagatgccggaagctacacactccacatcatcaagggtgacgacggtactcgcggagttactggcagattcacatttacgctgcacctggaaacaccgaaaccctcaattagcagttccaatctgaaccctagagagacaatggaggctgtgagtctcacttgtgacccagaaacgcctgacgccagctacctctggtggatgaacggtcaatctcttccaatgactcactcactgaagctgtctgagaccaatcggaccctctttttgcttggagtcactaaatacaccgccggaccctatgagtgtgagatccgtaaccctgtgagtgcttcccgctctgacccagtgactttaaacctgttgcccaaattgcctaaaccctacattactataaacaacttgaatccacgcgagaacaaagatgtcctcaactttacctgcgaaccaaagagtgagaactacacttatatctggtggctgaacgggcagagcttgccagtgtccccacgtgttaagcgacctatcgagaaccggattttgattctccctagtgtaactagaaatgagactggcccctaccagtgcgaaattagggatcgctacggcggcatccggtctgatcccgtgactctgaatgttctatatggtcccgaccttcctagaatttacccaagcttcacatattaccggtcaggtgaagtgctttatttaagctgttctgccgattccaacccacccgcccaatattcttggaccatcaatgaaaagttccagttgcccgggcagaaactgttcatccgtcatataaccacgaagcacagcgggttatatgtctgttccgtgcgtaattcagcaacagggaaagagtcttccaaaagcatgaccgtggaagtatcagattggacagtgccctag

SEQ ID NO: 71501 - DNA, 1260 bp, Artificial Sequence
  derived and/or modified sequence
atgggcaccctgagcgccccaccctgcacccagaggatcaagtggaagggcctgctgctgacagccagcctgctgaacttctggaacctgcccaccacagcccaggtgaccatcgaggccgagcccaccaaggtgtctgagggcaaggatgtgctgctgctggtgcacaacctgccccagaacctgaccggctacatctggtacaagggccagatgagggacctgtaccactacatcaccagctatgtggtggatggagagatcatcatctacggccctgcctacagcggccgggagacagcctacagcaatgccagcctgctgatccagaatgtgaccagagaagatgctggcagctacaccctgcacatcatcaagggagatgatggcacccggggcgtgacaggccgcttcaccttcaccctgcacctggagacccccaagcccagcatcagcagcagcaacctgaacccccgggagaccatggaggccgtgtccctgacctgtgaccctgagaccccagatgccagctacctgtggtggatgaatggccagagcctgcccatgacccacagcctgaagctgtctgagaccaacagaaccctcttcctgctgggcgtgaccaagtacacagctggcccctatgaatgtgagatccggaaccctgtgtctgccagcagaagtgaccctgtgaccctgaacctgctgcccaagctgcccaagccctacatcaccatcaacaacctgaacccccgggagaacaaggatgtgctgaacttcacctgtgagcccaagtctgagaactacacctacatctggtggctgaatggccagagcctgcctgtgagcccccgggtgaagaggcccattgaaaatcgcatcctgatcctgcccagcgtgaccagaaatgaaacaggcccctaccagtgtgagatccgggacagatatggaggcatccgcagtgaccctgtgaccctgaatgtgctgtatggccctgacctgccccgcatctaccccagcttcacctactaccgcagcggggaggtgctgtacctgagctgcagcgctgacagcaaccccccagcccagtacagctggaccatcaatgagaagttccagctgcccggccagaagctgttcatccgccacatcaccaccaagcacagcggcctgtatgtgtgcagcgtgagaaattctgccaccgggaaggagagcagcaagtccatgacagtggaggtgtctgactggacagtgccctag

SEQ ID NO: 71502 - DNA, 1260 bp, Artificial Sequence
  derived and/or modified sequence
atgggcaccctgagcgcccccccctgcacccagcggatcaagtggaagggtctgttgctgacagcaagtctcttgaacttctggaacctaccaacgacagcccaggttactatcgaggccgaacctactaaggtttctgagggtaaggatgtcttgctcctggtccacaacttgccccagaatctgactggatatatctggtataaagggcaaatgagggacctgtaccactacataacttcctatgtcgtggatggggagatcatcatctatggccctgcatattccggaagagagactgcgtactccaacgctagtctgctgattcagaacgtcactcgggaagatgctggctcgtacacactgcacattatcaagggagacgacggcacacgcggggttaccggtcgattcacattcacactacacctggagactccaaagccttccattagttcgagtaatctgaaccctagagagaccatggaggccgtcagtctcacctgtgatccggagacacccgatgctagctatctgtggtggatgaacgggcagtcgctcccaatgactcattccctgaaattgagcgaaaccaacagaactctgttcctgctaggtgtcactaagtataccgcaggaccctatgagtgcgagattcgcaaccccgtctcagcctcccgatctgatccagtaactttaaacttgctgccgaagctgccaaaaccttacatcacaattaacaatcttaatccaagagagaataaggacgttctgaatttcacttgtgagccaaagtcagaaaactatacctacatctggtggttaaatggacagtcactgccagtcagtccgcgcgtcaagcgccccatcgagaatcgcatcttgatcctgccaagcgtcaccagaaatgagaccggcccctatcagtgcgagatccgtgaccgctatggcgggatccgaagtgaccccgtgacactgaatgtgctgtacggccctgatctgccacgaatttatccatcttttacttactatcgcagtggagaagtcttgtatttatcttgtagcgcagattcgaatccaccagctcagtactcttggactattaatgaaaaattccaattgcctggtcagaaattgttcattaggcatatcactaccaaacactcgggtttatacgtgtgtagcgtgcgtaatagtgccaccggcaaggaatcgtctaagagcatgaccgtcgaggtttcagattggacggtcccttag

SEQ ID NO: 71503 - DNA, 2047 bp, Artificial Sequence
  derived and/or modified sequence
cctgggaagaggctcagcacagaaagaggaaggacagcacagctgacagccgtgctcagagagtttctggatcctaggcttatctccacagaggagaacacacaagcagcagagaccatgggaaccctctcagcccctccctgcacacagcgcatcaaatggaaggggctcctgctcacagcatcacttttaaacttctggaacctgcccaccactgcccaagtcacgattgaagccgagccaaccaaagtttccgaggggaaggatgttcttctacttgtccacaatttgccccagaatcttaccggctacatctggtacaaagggcaaatgagggacctctaccattacattacatcatatgtagtagacggtgaaataattatatatgggcctgcatatagtggacgagaaacagcatattccaatgcatccctgctgatccagaatgtcacccgggaggacgcaggatcctacaccttacacatcataaagggagatgatgggactagaggagtaactggacgtttcaccttcaccttacacctggagactcctaagccctccatctccagcagcaacttaaatcccagggagaccatggaggctgtgagcttaacctgtgaccctgagactccagacgcaagctacctgtggtggatgaatggtcagagcctccctatgactcacagcttgaagctgtccgaaaccaacaggaccctctttctattgggtgtcacaaagtatactgcaggaccctatgaatgtgaaatacggaacccagtgagtgccagccgcagtgacccagtcaccctgaatctcctcccgaagctgcccaagccctacatcaccatcaacaacttaaaccccagggagaataaggatgtcttaaacttcacctgtgaacctaagagtgagaactacacctacatttggtggctaaatggtcagagcctcccggtcagtcccagggtaaagcgacccattgaaaacaggatcctcattctacccagtgtcacgagaaatgaaacaggaccctatcaatgtgaaatacgggaccgatatggtggcatccgcagtgacccagtcaccctgaatgtcctctatggtccagacctccccagaatttacccttcattcacctattaccgttcaggagaagtcctctacttgtcctgttctgcggactctaacccaccggcacagtattcttggacaattaatgaaaagtttcagctaccaggacaaaagctctttatccgccatattactacaaagcatagcgggctctatgtttgctctgttcgtaactcagccactggcaaggaaagctccaaatccatgacagtcgaagtctctgactggacagttccctgaattctactagtacctccaattccattttctcccatggaatcactaagagcaagacccactctgttccagaagccctataagctggaggtggacaactcaatgtaaatttcatgggaaaacccttgtacgtgaagcatgagccactcagaactcaccaaaatattcgacaccataacaacagatgctcaaactgtaaaccaggacaacaagtggatgacttcacactgtggacagtttttcccaagatgtcagaacaagactccccatcatgatgaggctctcccccctcttaactgtccttgctcatgcctgcctctttcacttggcaggataatgcagtcattagaatttcacatgtagtagcttctgagagtaacaacagagtgtcagatatgtcatctcaacctcaaacttttacataacatctcagggggaaatgtggctctctccaccttgcatacagggctcccaatagaaatgaacacagagatattgcctgtgtgtttgcagagaagatggtttgtatgaagacgtaggaaagctgaaattataatagagtcccctttaaatccacattgtgtggatggctcttgccgtttcctaagagatacattgtaaaacgtgacagtaagacattctagcagaataaaacatgtaccacctttgctaa

SEQ ID NO: 71504 - DNA, 1260 bp, Artificial Sequence
  derived and/or modified sequence
atggggacactcagcgcacccccttgtacacagaggattaaatggaagggactactgcttacagcctcactgctcaatttctggaacttgcctacaacggcccaggtaacaatcgaggcagagcccactaaggtgtctgaaggaaaggacgtgctgttgcttgtgcacaacttgccgcaaaacttgacagggtacatctggtataaagggcagatgagagacctgtatcattacataacatcctatgtggttgacggggaaattattatctatggccctgcttacagtggtagggaaacagcgtacagcaatgcatcgctgctgattcagaatgttaccagggaggacgccggatcatatacattgcatatcatcaaaggagatgacgggaccaggggtgttacagggcgatttacatttaccctgcacctcgagacccccaagccatcaattagttcctctaatctgaatcctcgggagaccatggaagctgtctcactgacgtgcgacccagagacccctgacgcgtcatacctgtggtggatgaatggccaaagtttgccaatgacccacagccttaagctgagtgagactaatcgcaccttattcctcctaggggtgacgaagtacacagccggaccctatgaatgcgagatccgcaatcccgtgtcggccagtcgctctgaccccgtgactctgaatcttctgccgaagttgcccaaaccttatataacaataaataatcttaatcccagggaaaataaagacgtgctcaatttcacctgtgaaccaaagtctgagaattacacgtatatctggtggttgaatggtcagtcgcttcccgtgagccccagggtcaagcgtccaatcgagaatcgcatcctcatattgccgtctgtcacccggaatgaaacaggcccatatcagtgcgagatccgggatcgctacggcggaatacggagtgaccccgttacattgaacgtgctgtatggcccagatttgcctaggatctacccttccttcacatactacagaagtggcgaggtgctttaccttagctgctctgccgactctaatcccccagcccagtattcttggacgatcaacgagaaattccagctgcccggacagaaactctttatcaggcacatcaccactaagcacagtggcctctacgtctgcagcgttcgcaattctgctaccgggaaagagtcgtccaagtctatgacggtggaggtctccgactggacagtcccgtag

SEQ ID NO: 71505 - DNA, 1260 bp, Artificial Sequence
  derived and/or modified sequence
atgggcaccctgagcgcccccccctgcacccagagaatcaagtggaagggcctgctgctgaccgccagcctgctgaacttctggaacctgcccaccaccgcccaggtgaccatcgaggccgagcccaccaaggtgagcgagggcaaggacgtgctgctgctggtgcacaacctgccccagaacctgaccggctacatctggtacaagggccagatgagagacctgtaccactacatcaccagctacgtggtggacggcgagatcatcatctacggccccgcctacagcggcagagagaccgcctacagcaacgccagcctgctgatccagaacgtgaccagagaggacgccggcagctacaccctgcacatcatcaagggcgacgacggcaccagaggcgtgaccggcagattcaccttcaccctgcacctggagacccccaagcccagcatcagcagcagcaacctgaaccccagagagaccatggaggccgtgagcctgacctgcgaccccgagacccccgacgccagctacctgtggtggatgaacggccagagcctgcccatgacccacagcctgaagctgagcgagaccaacagaaccctgttcctgctgggcgtgaccaagtacaccgccggcccctacgagtgcgagatcagaaaccccgtgagcgccagcagaagcgaccccgtgaccctgaacctgctgcccaagctgcccaagccctacatcaccatcaacaacctgaaccccagagagaacaaggacgtgctgaacttcacctgcgagcccaagagcgagaactacacctacatctggtggctgaacggccagagcctgcccgtgagccccagagtgaagagacccatcgagaacagaatcctgatcctgcccagcgtgaccagaaacgagaccggcccctaccagtgcgagatcagagacagatacggcggcatcagaagcgaccccgtgaccctgaacgtgctgtacggccccgacctgcccagaatctaccccagcttcacctactacagaagcggcgaggtgctgtacctgagctgcagcgccgacagcaacccccccgcccagtacagctggaccatcaacgagaagttccagctgcccggccagaagctgttcatcagacacatcaccaccaagcacagcggcctgtacgtgtgcagcgtgagaaacagcgccaccggcaaggagagcagcaagagcatgaccgtggaggtgagcgactggaccgtgccctag

SEQ ID NO: 71506 - protein, 143 aa, Artificial Sequence
  derived and/or modified sequence
MGTLSAPPCTQRIKWKGLLLTASLLNFWNLPTTAQVTIEAEPTKVSEGKDVLLLVHNLPQNLTGYIWYKGQMRDLYHYITSYVVDGEIIIYGPAYSGRETAYSNASLLIQNVTREDAGSYTLHIIKGDDGTRGVTGRFTFTLH

SEQ ID NO: 71507 - protein, 417 aa, Artificial Sequence
  derived and/or modified sequence
MGTLSAPPCTQRIKWKGLLLTASLLNFWNLPTTAQVTIEAEPTKVSEGKDVLLLVHNLPQNLTGYIWYKGQMRDLYHYITSYVVDGEIIIYGPAYSGRETAYSNASLLIQNVTREDAGSYTLHIIKGDDGTRGVTGRFTFTLHLETPKPSISSSNLNPRETMEAVSLTCDPETPDASYLWWMNGQSLPMTHSLKLSETNRTLFLLGVTKYTAGPYECEIRNPVSASRSDPVTLNLLPKLPKPYITINNLNPRENKDVLNFTCEPKSENYTYIWWLNGQSLPVSPRVKRPIENRILILPSVTRNETGPYQCEIRDRYGGIRSDPVTLNVLYGPDLPRIYPSFTYYRSGEVLYLSCSADSNPPAQYSWTINEKFQLPGQKLFIRHITTKHSGLYVCSVRNSATGKESSKSMTVEVSEAL

SEQ ID NO: 71508 - DNA, 1254 bp, Artificial Sequence
  derived and/or modified sequence
atggggacgctttctgccccaccttgcacacaacgtatcaagtggaaggggctgctgcttacagcatccctactaaacttctggaacctccccacaaccgcacaggttacaattgaagctgagccgacaaaggtgtcggagggtaaagacgtgctcctcctggtgcataacctgccacagaatttgaccggatatatttggtacaagggacagatgagggacctctaccactatatcacctcctatgtcgtcgatggagaaatcattatatacggccccgcctactcagggcgggagacagcctattctaacgcgtccttgcttatccagaatgtaacccgagaggatgccgggtcatataccttgcatattattaaaggggacgacggaaccagaggagtaaccgggcggttcactttcaccttgcacctggagactcctaagcccagcatttcatcctctaatcttaatcctagagaaacgatggaagccgtctctctaacctgcgatcctgagactcctgacgcaagctacctctggtggatgaacggccagtcactgccaatgacccacagtctgaaattatctgaaaccaacaggacactgttcctcctcggtgtaactaaatacacagccgggccttacgagtgcgagattcggaatccagtttccgcctccagatcagacccagtgactctcaacctcctgcccaagctgccaaaaccatacatcaccatcaacaacctgaatcccagagagaacaaagacgtgctgaattttacctgcgagcccaagtcagagaactacacatatatttggtggctaaacggccaaagcctgccggttagccctcgcgttaagagacccattgagaatcgaatactcattctgccttcagttacacggaacgagacaggcccttaccagtgtgagatccgtgaccgctacggcggcatcagatcagacccagtgactctgaatgtgttatacgggcccgatctgccccggatctacccatcgtttacatattatcgctccggcgaagtgctgtacctcagctgctccgctgatagcaacccaccggcccagtactcttggactatcaatgagaaatttcagctgcctggtcagaagctatttatccggcacattacgactaaacacagcgggctgtatgtgtgcagcgtgcggaatagtgcaacaggtaaagaatctagcaagagtatgaccgtggaggtttcagaggcactctag

SEQ ID NO: 71509 - DNA, 1254 bp, Artificial Sequence
  derived and/or modified sequence
atgggcaccctgagcgccccaccctgcacccagaggatcaagtggaagggcctgctgctgacagccagcctgctgaacttctggaacctgcccaccacagcccaggtgaccatcgaggccgagcccaccaaggtgtctgagggcaaggatgtgctgctgctggtgcacaacctgccccagaacctgaccggctacatctggtacaagggccagatgagggacctgtaccactacatcaccagctatgtggtggatggagagatcatcatctacggccctgcctacagcggccgggagacagcctacagcaatgccagcctgctgatccagaatgtgaccagagaagatgctggcagctacaccctgcacatcatcaagggagatgatggcacccggggcgtgacaggccgcttcaccttcaccctgcacctggagacccccaagcccagcatcagcagcagcaacctgaacccccgggagaccatggaggccgtgtccctgacctgtgaccctgagaccccagatgccagctacctgtggtggatgaatggccagagcctgcccatgacccacagcctgaagctgtctgagaccaacagaaccctcttcctgctgggcgtgaccaagtacacagctggcccctatgaatgtgagatccggaaccctgtgtctgccagcagaagtgaccctgtgaccctgaacctgctgcccaagctgcccaagccctacatcaccatcaacaacctgaacccccgggagaacaaggatgtgctgaacttcacctgtgagcccaagtctgagaactacacctacatctggtggctgaatggccagagcctgcctgtgagcccccgggtgaagaggcccattgaaaatcgcatcctgatcctgcccagcgtgaccagaaatgaaacaggcccctaccagtgtgagatccgggacagatatggaggcatccgcagtgaccctgtgaccctgaatgtgctgtatggccctgacctgccccgcatctaccccagcttcacctactaccgcagcggggaggtgctgtacctgagctgcagcgctgacagcaaccccccagcccagtacagctggaccatcaatgagaagttccagctgcccggccagaagctgttcatccgccacatcaccaccaagcacagcggcctgtatgtgtgcagcgtgagaaattctgccaccgggaaggagagcagcaagtccatgacagtggaggtgtctgaggccctgtag

SEQ ID NO: 71510 - DNA, 1254 bp, Artificial Sequence
  derived and/or modified sequence
atgggcaccctgagcgcccccccctgcacccagcggatcaagtggaagggactcttgctcaccgctagcctgctcaatttctggaacctgcctacgacggctcaggtgactatcgaggctgagcccaccaaagtgagcgagggcaaggacgtgcttctcctggtccataacctgccccagaacctgaccggatatatctggtataagggacaaatgagggacttgtatcactacatcacatcctacgtcgttgacggggaaatcataatctatggcccagcttactccgggagagagaccgcctactccaatgcttccctgctgatacagaacgtgactcgggaagacgccggatcctatactcttcacattatcaagggggatgatggcacacggggagtcaccgggaggtttaccttcacactgcatctggagacccccaaaccctcaatatcatcatcaaacttgaaccccagggagaccatggaggcagtgagtctcacttgcgatccggagacacctgatgcttcatacctgtggtggatgaatggccagtcattgccaatgacccacagcctaaaactttcagagacaaacaggactcttttcctcctcggggtgacaaagtacaccgccggcccatacgagtgtgagattagaaatcccgtcagcgcatcccggtctgacccagtgactttaaacctccttcccaagcttccaaagccctatatcacaattaataaccttaatcccagggaaaacaaggatgtcttgaatttcacctgcgagcctaagagtgagaactacacctatatctggtggctcaatggccagtcactgcctgtctcccctcgggtgaaaagacccatcgaaaatcgcatccttatcctacccagcgtcaccaggaacgagactggaccctaccaatgcgagatcagggatcggtatggcggcatacgctccgaccccgttactctgaacgtcctgtacggaccagatctgccacggatttatccttcattcacatactacagaagcggtgaggtcctgtacttatcatgctctgcagattccaatccacccgcgcaatatagttggaccatcaacgaaaagttccaactgcccggccagaaattatttattcggcacattacgaccaaacactccggactgtatgtatgctcagtcaggaactccgcaactgggaaggagtcctcaaaatccatgacggtggaagtgagcgaagccctttag

SEQ ID NO: 71511 - DNA, 1903 bp, Artificial Sequence
  derived and/or modified sequence
gtgctcagagagtttctggatcctaggcttatctccacagaggagaacacacaagcagcagagaccatgggaaccctctcagcccctccctgcacacagcgcatcaaatggaaggggctcctgctcacagcatcacttttaaacttctggaacctgcccaccactgcccaagtcacgattgaagccgagccaaccaaagtttccgaggggaaggatgttcttctacttgtccacaatttgccccagaatcttaccggctacatctggtacaaagggcaaatgagggacctctaccattacattacatcatatgtagtagacggtgaaataattatatatgggcctgcatatagtggacgagaaacagcatattccaatgcatccctgctgatccagaatgtcacccgggaggacgcaggatcctacaccttacacatcataaagggagatgatgggactagaggagtaactggacgtttcaccttcaccttacacctggagactcctaagccctccatctccagcagcaacttaaatcccagggagaccatggaggctgtgagcttaacctgtgaccctgagactccagacgcaagctacctgtggtggatgaatggtcagagcctccctatgactcacagcttgaagctgtccgaaaccaacaggaccctctttctattgggtgtcacaaagtatactgcaggaccctatgaatgtgaaatacggaacccagtgagtgccagccgcagtgacccagtcaccctgaatctcctcccgaagctgcccaagccctacatcaccatcaacaacttaaaccccagggagaataaggatgtcttaaacttcacctgtgaacctaagagtgagaactacacctacatttggtggctaaatggtcagagcctcccggtcagtcccagggtaaagcgacccattgaaaacaggatcctcattctacccagtgtcacgagaaatgaaacaggaccctatcaatgtgaaatacgggaccgatatggtggcatccgcagtgacccagtcaccctgaatgtcctctatggtccagacctccccagaatttacccttcattcacctattaccgttcaggagaagtcctctacttgtcctgttctgcggactctaacccaccggcacagtattcttggacaattaatgaaaagtttcagctaccaggacaaaagctctttatccgccatattactacaaagcatagcgggctctatgtttgctctgttcgtaactcagccactggcaaggaaagctccaaatccatgacagtcgaagtctctgaagccctataagctggaggtggacaactcaatgtaaatttcatgggaaaacccttgtacgtgaagcatgagccactcagaactcaccaaaatattcgacaccataacaacagatgctcaaactgtaaaccaggacaacaagtggatgacttcacactgtggacagtttttcccaagatgtcagaacaagactccccatcatgatgaggctctcccccctcttaactgtccttgctcatgcctgcctctttcacttggcaggataatgcagtcattagaatttcacatgtagtagcttctgagagtaacaacagagtgtcagatatgtcatctcaacctcaaacttttacataacatctcagggggaaatgtggctctctccaccttgcatacagggctcccaatagaaatgaacacagagatattgcctgtgtgtttgcagagaagatggtttgtatgaagacgtaggaaagctgaaattataatagagtcccctttaaatccacattgtgtggatggctcttgccgtttcctaagagatacattgtaaaacgtgacagtaagacattctagcagaataaaacatgtaccacct

SEQ ID NO: 71512 - DNA, 1254 bp, Artificial Sequence
  derived and/or modified sequence
atggggaccctatccgcacctccatgcacccagaggatcaagtggaaaggcctgctgcttaccgcctcacttttaaatttctggaatctcccaaccactgctcaggttactattgaagctgagccaactaaagtaagcgaaggaaaggacgtgctgttacttgttcataacctgccccagaacctgaccgggtatatctggtataagggccagatgcgcgatttgtaccactacatcactagctatgtcgtggacggcgaaatcatcatctacggccctgcctactctggcagagagaccgcctattctaatgccagccttctcatacagaatgtgaccagggaagacgccggatcgtacaccctccacatcattaagggagacgacggcactcgcggagtgacaggccgatttacttttacattacacctggagacgcctaagccatccattagttctagcaatcttaacccgagagaaactatggaggcagtctctctgacctgtgatccagaaacccctgacgccagctatttatggtggatgaacggtcagagccttcctatgactcactcactgaaattgtcagagacgaatcggactctgtttctgctcggtgtgaccaagtacacagctgggccttacgagtgcgagattcgaaatccagtatcagcttcccgatctgatccagtaacgcttaacctgctgcctaagctccctaagccctatatcacaatcaataacctgaaccccagggagaacaaggacgtactgaattttacttgcgagcccaagtccgagaattacacatacatttggtggctaaacggccaaagtctgcccgtctcccctcgggtgaagcgccctatcgagaacaggattctgatccttcctagcgtgactcgcaacgagaccggcccttatcagtgcgagattcgagacaggtatggcggaattcggtccgacccggtgaccctaaacgttttatacggcccagatctgccccgaatttaccctagctttacttactatcggagcggagaagtgctctatctgtcttgcagcgccgattccaatcctcctgcacagtactcctggacgattaacgagaagttccagctccctggccagaagttgtttattcggcatatcaccactaaacactctgggctgtacgtatgctctgtgaggaattctgccacgggtaaagagagctccaagtctatgactgttgaagtcagcgaggcactgtag

SEQ ID NO: 71513 - DNA, 1254 bp, Artificial Sequence
  derived and/or modified sequence
atgggcaccctgagcgcccccccctgcacccagagaatcaagtggaagggcctgctgctgaccgccagcctgctgaacttctggaacctgcccaccaccgcccaggtgaccatcgaggccgagcccaccaaggtgagcgagggcaaggacgtgctgctgctggtgcacaacctgccccagaacctgaccggctacatctggtacaagggccagatgagagacctgtaccactacatcaccagctacgtggtggacggcgagatcatcatctacggccccgcctacagcggcagagagaccgcctacagcaacgccagcctgctgatccagaacgtgaccagagaggacgccggcagctacaccctgcacatcatcaagggcgacgacggcaccagaggcgtgaccggcagattcaccttcaccctgcacctggagacccccaagcccagcatcagcagcagcaacctgaaccccagagagaccatggaggccgtgagcctgacctgcgaccccgagacccccgacgccagctacctgtggtggatgaacggccagagcctgcccatgacccacagcctgaagctgagcgagaccaacagaaccctgttcctgctgggcgtgaccaagtacaccgccggcccctacgagtgcgagatcagaaaccccgtgagcgccagcagaagcgaccccgtgaccctgaacctgctgcccaagctgcccaagccctacatcaccatcaacaacctgaaccccagagagaacaaggacgtgctgaacttcacctgcgagcccaagagcgagaactacacctacatctggtggctgaacggccagagcctgcccgtgagccccagagtgaagagacccatcgagaacagaatcctgatcctgcccagcgtgaccagaaacgagaccggcccctaccagtgcgagatcagagacagatacggcggcatcagaagcgaccccgtgaccctgaacgtgctgtacggccccgacctgcccagaatctaccccagcttcacctactacagaagcggcgaggtgctgtacctgagctgcagcgccgacagcaacccccccgcccagtacagctggaccatcaacgagaagttccagctgcccggccagaagctgttcatcagacacatcaccaccaagcacagcggcctgtacgtgtgcagcgtgagaaacagcgccaccggcaaggagagcagcaagagcatgaccgtggaggtgagcgaggccctgtag

SEQ ID NO: 71514 - DNA, 606 bp, Artificial Sequence
  derived and/or modified sequence
atgggcatcctgctgggcctgctgctgctgggccacctgaccgtggacacctacggcagacccatcctggaggtgcccgagagcgtgaccggcccctggaagggcgacgtgaacctgccctgcacctacgaccccctgcagggctacacccaggtgctggtgaagtggctggtgcagagaggcagcgaccccgtgaccaccgtgaccaccggcagcggctacggcttcaccgtgccccagggcatgagaatcagcctgcagtgccaggccagaggcagcccccccatcagctacatctggtacaagcagcagaccaacaaccaggagcccatcaaggtggccaccctgagcaccctgctgttcaagcccgccgtgatcgccgacagcggcagctacttctgcaccgccaagggccaggtgggcagcgagcagcacagcgacatcgtgaagttcgtggtgaaggacagcagcaagctgctgaagaccaagaccgaggcccccaccaccatgacctaccccctgaaggccaccagcaccgtgaagcagagctgggactggaccaccgacatggacggctacctgggcgagaccagcgccggcccctag

SEQ ID NO: 71515 - DNA, 966 bp, Artificial Sequence
  derived and/or modified sequence
atgggcatcctgctgggcctgctgctgctgggccacctgaccgtggacacctacggcagacccatcctggaggtgcccgagagcgtgaccggcccctggaagggcgacgtgaacctgccctgcacctacgaccccctgcagggctacacccaggtgctggtgaagtggctggtgcagagaggcagcgaccccgtgaccatcttcctgagagacagcagcggcgaccacatccagcaggccaagtaccagggcagactgcacgtgagccacaaggtgcccggcgacgtgagcctgcagctgagcaccctggagatggacgacagaagccactacacctgcgaggtgacctggcagacccccgacggcaaccaggtggtgagagacaagatcaccgagctgagagtgcagaagctgagcgtgagcaagcccaccgtgaccaccggcagcggctacggcttcaccgtgccccagggcatgagaatcagcctgcagtgccaggccagaggcagcccccccatcagctacatctggtacaagcagcagaccaacaaccaggagcccatcaaggtggccaccctgagcaccctgctgttcaagcccgccgtgatcgccgacagcggcagctacttctgcaccgccaagggccaggtgggcagcgagcagcacagcgacatcgtgaagttcgtggtgaaggacagcagcaagctgctgaagaccaagaccgaggcccccaccaccatgacctaccccctgaaggccaccagcaccgtgaagcagagctgggactggaccaccgacatggacggctacctgggcgagaccagcgccggccccggcaagagcctgcccgtgttcgccatcatcctgatcatcagcctgtgctgcatggtggtgttcaccatggcctacatcatgctgtgcagaaagaccagccagcaggagcacgtgtacgaggccgccagatag

SEQ ID NO: 71516 - DNA, 606 bp, Artificial Sequence
  derived and/or modified sequence
atgggcatcctcctaggcctccttctcctggggcacttgaccgttgatacctacggcaggcctattctcgaggtaccagagtccgtgaccggaccttggaaaggggatgtaaatttgccgtgcacttacgacccattgcagggctacacccaagtcctggtcaagtggctggtgcagaggggttccgacccagttacgaccgttaccactggctctggctacgggtttactgttcctcaaggaatgaggatatccctccagtgccaggcccggggctcgcctcctatctcttatatttggtacaaacagcagaccaataaccaggagcccatcaaggttgcaactctgtctactttgctgtttaaacccgccgtcatagcggactccgggagctatttttgcaccgcgaaaggtcaggtcggctccgagcaacattccgacatcgtgaagtttgttgtgaaggactcttctaagctgctgaagacgaagactgaggcccccaccacaatgacttaccctctcaaggcaacatccactgtgaagcagagttgggattggactacagatatggatggttatctgggtgagacatccgcaggaccttag

SEQ ID NO: 71517 - DNA, 966 bp, Artificial Sequence
  derived and/or modified sequence
atgggtattctccttggactgctgctgcttggacacctgaccgtagacacgtatggacgcccgatcctggaggttccagaaagtgtaactggtccctggaagggcgatgtcaatctgccctgtacctacgatccacttcagggctacacccaggtcctcgtaaagtggcttgtgcaacgcgggagcgaccccgtgactatcttcttgcgggactcttcgggagatcatattcagcaggcaaaatatcaggggcgccttcacgttagccataaggtgcccggtgacgtgtcattacagctctctaccctcgagatggatgaccgatcccattacacatgtgaagttacatggcaaactcctgacgggaatcaggtcgtccgtgacaagattacagagttgcgggtgcaaaagctgagcgttagcaagcctacagtgaccacggggagcggctacggtttcaccgttccgcagggcatgagaatatctctccagtgccaggcaaggggctctcctccaatttcctacatctggtataaacaacagactaacaaccaggagccaatcaaggtagctaccctgtcgaccctactgtttaagccagccgttatcgccgacagcggatcttatttttgcaccgccaaaggtcaggtaggatctgagcaacatagcgatatcgttaaattcgtcgtcaaggattcctcaaaactgctgaagacaaaaacagaggcacctacaactatgacctatcctctgaaggctacatctaccgtaaagcagtcttgggactggacaacggacatggacggttatttgggcgagacatccgccgggccggggaaatccctccccgtgtttgcaatcatcctcatcattagcttgtgctgcatggtggtgtttacaatggcttacattatgctctgcaggaagacttcgcagcaggaacacgtgtacgaggcggccagatag

SEQ ID NO: 71518 - DNA, 606 bp, Artificial Sequence
  derived and/or modified sequence
atgggcatcctgctgggcctgctgctgctgggccacctgactgtggacacctacggccggcccatcctggaggtgcctgagagcgtgacaggcccctggaagggagatgtgaacctgccctgcacctatgaccccctgcagggctacacccaggtgctggtgaagtggctggtgcagaggggcagtgaccctgtgaccaccgtgaccaccggcagcggctacggcttcaccgtgccccagggcatgaggatcagcctgcagtgccaggcccggggcagcccccccatctcctacatctggtacaagcagcagaccaacaaccaggagcccatcaaggtggccaccctgagcaccctgctcttcaagccagctgtgattgctgacagcggcagctacttctgcacagccaagggccaggtgggcagcgagcagcacagcgacatcgtgaagtttgtggtgaaggacagcagcaagctgctgaagaccaagacagaggcccccaccaccatgacctaccccctgaaggccaccagcacagtgaagcagagctgggactggaccacagacatggatggctacctgggggagaccagcgctggcccctag

SEQ ID NO: 71519 - DNA, 966 bp, Artificial Sequence
  derived and/or modified sequence
atgggcatcctgctgggcctgctgctgctgggccacctgactgtggacacctacggccggcccatcctggaggtgcctgagagcgtgacaggcccctggaagggagatgtgaacctgccctgcacctatgaccccctgcagggctacacccaggtgctggtgaagtggctggtgcagaggggcagtgaccctgtgaccatcttcctgcgggacagcagcggggaccacatccagcaggccaagtaccagggccgcctgcacgtgagccacaaggtgcctggagatgtgtccctgcagctgagcaccctggagatggatgacaggagccactacacctgtgaggtgacctggcagaccccagatggcaaccaggtggtgcgggacaagatcacagagctgcgggtgcagaagctgtctgtgtccaagcccaccgtgaccactggaagtggctacggcttcaccgtgccccagggcatgaggatcagcctgcagtgccaggcccggggcagcccccccatctcctacatctggtacaagcagcagaccaacaaccaggagcccatcaaggtggccaccctgagcaccctgctcttcaagccagctgtgattgctgacagcggcagctacttctgcacagccaagggccaggtgggcagcgagcagcacagcgacatcgtgaagtttgtggtgaaggacagcagcaagctgctgaagaccaagacagaggcccccaccaccatgacctaccccctgaaggccaccagcacagtgaagcagagctgggactggaccacagacatggatggctacctgggggagaccagcgctggccctgggaagagcctgcctgtgtttgccatcatcctgatcatcagcctgtgctgcatggtggtgttcaccatggcctacatcatgctgtgcaggaagaccagccagcaggagcacgtgtatgaagctgccaggtag

SEQ ID NO: 71520 - DNA, 606 bp, Artificial Sequence
  derived and/or modified sequence
atgggcatcctgctgggcctgctgctgctgggccacctgaccgtggacacctatggccgtcccatactcgaagtgccagagtctgttacaggcccctggaagggagatgtgaatctgccgtgtacctacgaccctcttcaaggatatacacaggtactggtgaagtggcttgtccagaggggatcagatcccgtgacaactgtcactactggaagcggttacggattcaccgtccctcaggggatgcggatttctctgcaatgtcaggcaagagggtcccccccaatttcttacatttggtataaacagcaaaccaacaatcaggaacccattaaggtcgccactctctcaaccctgttattcaaacccgcagtgattgccgattctggcagctacttctgcaccgccaaggggcaggttggttctgagcaacattctgacatagttaagttcgtagtgaaggacagcagcaagcttctaaagacgaaaacagaagcgcccacaacaatgacgtaccccctgaaggcaacctccacggttaagcagagctgggactggacgacggatatggatggatacctgggagaaaccagcgccggaccatag

SEQ ID NO: 71521 - DNA, 966 bp, Artificial Sequence
  derived and/or modified sequence
atgggcatcctgctgggcctgctgctgctgggccacctgaccgtggacacttatggtcggccaattttagaagtgccagagtctgttaccggaccttggaagggcgatgtgaacctgccttgcacctatgatcccctccaggggtacacccaggtgctggtgaaatggctcgtgcagcggggcagtgatccggtaaccatttttctgagagattcttccggagaccatatccaacaggcaaagtaccaggggagactgcatgtgtcacataaggttcctggcgatgtatccctccaactgtcaacgctcgaaatggatgatcggtcacactatacttgcgaagttacctggcagactccagacggaaatcaagtcgtccgtgacaagattacggagctccgggtccagaagctgtcagtcagcaagccgacagtgacgacgggttctggttatggatttactgtgccacagggtatgagaataagtctgcagtgccaagcacggggctccccgcccattagttatatatggtacaagcagcaaactaataatcaagagcctattaaagtcgccactttgtcaactctactttttaaaccggccgtaatcgccgattctgggtcctacttctgcaccgccaagggccaggtggggagcgaacagcactctgacatcgtcaagtttgtggtaaaggatagctccaaactcttgaagacaaagactgaggccccaacgacaatgacctatcccctcaaagctacaagtaccgtgaaacagtcctgggattggaccactgacatggatggatacctgggtgagaccagcgccggccccggaaagagtcttcccgtgttcgccataattttgattatctccctgtgctgcatggttgtgtttaccatggcctacataatgctatgtcggaaaactagtcaacaagagcacgtctatgaagcggctagatag

SEQ ID NO: 71522 - DNA, 606 bp, Artificial Sequence
  derived and/or modified sequence
atgggaatcctactcggtcttcttctcttaggacacctgactgtcgacacgtatggacgaccgatcctggaagtgccagagagtgtgactggaccctggaagggggatgtgaacctcccctgtacctacgatcccctacagggttatacccaagtgttggtgaagtggctcgttcagcgtggctctgaccctgtgactactgtaaccaccggatccggatacgggtttacggtgcctcagggcatgagaattagcttgcagtgtcaagcccgtggcagcccaccaatatcttatatttggtataagcaacaaactaacaaccaagagcctatcaaggtcgccacattatccactttactcttcaaacctgctgttattgccgattctggaagttacttctgtactgctaagggtcaggtggggtcagagcagcactctgacatcgtcaaatttgttgtgaaggatagcagtaagttgctgaagacaaagaccgaggcgccaacaaccatgacttatcccctgaaggcaacctctactgtcaagcagtcttgggattggaccacagatatggacggttacttgggtgagacctccgcgggtccctag

SEQ ID NO: 71523 - DNA, 966 bp, Artificial Sequence
  derived and/or modified sequence
atggggatacttctgggcctcctgctgctgggtcacttgaccgttgacacttatggccgaccgatactggaagtgcctgagtctgtcacgggaccttggaagggcgatgtgaatctcccttgtacctacgatcccctccagggatatacacaagtcctggttaagtggctggtgcagcggggatccgatcccgtcaccattttcttgcgagatagtagtggggaccacattcagcaggccaaatatcaggggcgactgcacgtgtcccacaaggtaccgggtgacgtgagcttgcaattgagcacactcgagatggacgacagaagccactatacatgcgaggtgacttggcagactcccgatggcaaccaggtagtaagggataaaattactgaattaagggtgcagaagctgagtgtctcaaaacccaccgttactacagggtccggttacgggttcaccgtcccacagggcatgcgcattagtctgcaatgccaggccagaggcagcccaccaatctcctacatctggtataagcagcaaaccaataatcaggagccaatcaaagtagcaaccctgagcaccttactatttaagcctgcagtcatcgccgactctggtagttacttctgcacagctaaaggacaagttggtagtgagcagcattccgatatcgttaagttcgtcgtaaaagactcctccaagctgctgaagacaaaaaccgaagcccctacaacgatgacctacccgctgaaggctacatcaaccgtgaaacagagttgggactggaccaccgacatggatggctaccttggagaaactagcgccggacctggcaagtccctgcccgtctttgccatcatccttatcattagtctgtgctgcatggtggtcttcactatggcatacatcatgctctgtagaaaaacctcccaacaggagcatgtctatgaggcagctaggtag

SEQ ID NO: 71524 - DNA, 716 bp, Artificial Sequence
  derived and/or modified sequence
gatatagggaaggaagggaagtaagcagtcacagacgctggcggccaccagaagtttgagcctctttggtagcaggaggctggaagaaaggacagaagtagctctggctgtgatggggatcttactgggcctgctactcctggggcacctaacagtggacacttatggccgtcccatcctggaagtgccagagagtgtaacaggaccttggaaaggggatgtgaatcttccctgcacctatgaccccctgcaaggctacacccaagtcttggtgaagtggctggtacaacgtggctcagaccctgtcaccacagtgacaactggcagcggttatggcttcacggtgccccagggaatgaggattagccttcaatgccaggctcggggttctcctcccatcagttatatttggtataagcaacagactaataaccaggaacccatcaaagtagcaaccctaagtaccttactcttcaagcctgcggtgatagccgactcaggctcctatttctgcactgccaagggccaggttggctctgagcagcacagcgacattgtgaagtttgtggtcaaagactcctcaaagctactcaagaccaagactgaggcacctacaaccatgacataccccttgaaagcaacatctacagtgaagcagtcctgggactggaccactgacatggatggctaccttggagagaccagtgctgggccag

SEQ ID NO: 71525 - DNA, 2190 bp, Artificial Sequence
  derived and/or modified sequence
ggagtttgagtgagagatatagggaaggaagggaagtaagcagtcacagacgctggcggccaccagaagtttgagcctctttggtagcaggaggctggaagaaaggacagaagtagctctggctgtgatggggatcttactgggcctgctactcctggggcacctaacagtggacacttatggccgtcccatcctggaagtgccagagagtgtaacaggaccttggaaaggggatgtgaatcttccctgcacctatgaccccctgcaaggctacacccaagtcttggtgaagtggctggtacaacgtggctcagaccctgtcaccatctttctacgtgactcttctggagaccatatccagcaggcaaagtaccagggccgcctgcatgtgagccacaaggttccaggagatgtatccctccaattgagcaccctggagatggatgaccggagccactacacgtgtgaagtcacctggcagactcctgatggcaaccaagtcgtgagagataagattactgagctccgtgtccagaaactctctgtctccaagcccacagtgacaactggcagcggttatggcttcacggtgccccagggaatgaggattagccttcaatgccaggctcggggttctcctcccatcagttatatttggtataagcaacagactaataaccaggaacccatcaaagtagcaaccctaagtaccttactcttcaagcctgcggtgatagccgactcaggctcctatttctgcactgccaagggccaggttggctctgagcagcacagcgacattgtgaagtttgtggtcaaagactcctcaaagctactcaagaccaagactgaggcacctacaaccatgacataccccttgaaagcaacatctacagtgaagcagtcctgggactggaccactgacatggatggctaccttggagagaccagtgctgggccaggaaagagcctgcctgtctttgccatcatcctcatcatctccttgtgctgtatggtggtttttaccatggcctatatcatgctctgtcggaagacatcccaacaagagcatgtctacgaagcagccaggtaagaaagtctctcctcttccatttttgaccccgtccctgccctcaattttgattactggcaggaaatgtggaggaaggggggtgtggcacagacccaatcctaaggccggaggccttcagggtcaggacatagctgccttccctctctcaggcaccttctgaggttgttttggccctctgaacacaaaggataatttagatccatctgccttctgcttccagaatccctgggtggtaggatcctgataattaattggcaagaattgaggcagaagggtgggaaaccaggaccacagccccaagtcccttcttatgggtggtgggctcttgggccatagggcacatgccagagaggccaacgactctggagaaaccatgagggtggccatcttcgcaagtggctgctccagtgatgagccaacttcccagaatctgggcaacaactactctgatgagccctgcataggacaggagtaccagatcatcgcccagatcaatggcaactacgcccgcctgctggacacagttcctctggattatgagtttctggccactgagggcaaaagtgtctgttaaaaatgccccattaggccaggatctgctgacataattgcctagtcagtccttgccttctgcatggccttcttccctgctacctctcttcctggatagcccaaagtgtccgcctaccaacactggagccgctgggagtcactggctttgccctggaatttgccagatgcatctcaagtaagccagctgctggatttggctctgggcccttctagtatctctgccgggggcttctggtactcctctctaaataccagagggaagatgcccatagcactaggacttggtcatcatgcctacagacactattcaactttggcatcttgccaccagaagacccgagggaggctcagctctgccagctcagaggaccagctatatccaggatcatttctctttcttcagggccagacagcttttaattgaaattgttatttcacaggccagggttcagttctgctcctccactataagtctaatgttctgactctctcctggtgctcaataaatatctaatcataacagc

SEQ ID NO: 71526 - protein, 1099 aa, Artificial Sequence
  derived and/or modified sequence
MSLNNSSNVFLDSVPSNTNRFQVSVINENHESSAAADDNTDPPHYEETSFGDEAQKRLRISFRPGNQECYDNFLQSGETAKTDASFHAYDSHTNTYYLQTFGHNTMDAVPKIEYYRNTGSISGPKVNRPSLLEIHEQLAKNVAVTPSSADRVANGDGIPGDEQAENKEDDQAGVVKFGWVKGVLVRCMLNIWGVMLFIRLSWIVGEAGIGLGVIIIGLSVVVTTLTGISMSAICTNGVVRGGGAYYLISRSLGPEFGGSIGLIFAFANAVAVAMYVVGFAETVVDLLKESDSMMVDPTNDIRIIGSITVVILLGISVAGMEWEAKAQVILLVILLIAIANFFIGTVIPSNNEKKSRGFFNYQASIFAENFGPRFTKGEGFFSVFAIFFPAATGILAGANISGDLEDPQDAIPRGTMLAIFITTVAYLGVAICVGACVVRDATGNMNDTIISGMNCNGSAACGLGYDFSRCRHEPCQYGLMNNFQVMSMVSGFGPLITAGIFSATLSSALASLVSAPKVFQALCKDNIYKALQFFAKGYGKNNEPLRGYILTFLIAMAFILIAELNTIAPIISNFFLASYALINFSCFHASYAKSPGWRPAYGIYNMWVSLFGAVLCCAVMFVINWWAAVITYVIEFFLYVYVTCKKPDVNWGSSTQALSYVSALDNALELTTVEDHVKNFRPQCIVLTGGPMTRPALLDITHAFTKNSGLCICCEVFVGPRKLCVKEMNSGMAKKQAWLIKNKIKAFYAAVAADCFRDGVRSLLQASGLGRMKPNTLVIGYKKNWRKAPLTEIENYVGIIHDAFDFEIGVVIVRISQGFDISQVLQVQEELERLEQERLALEATIKDNECEEESGGIRGLFKKAGKLNITKTTPKKDGSINTSQSMHVGEFNQKLVEASTQFKKKQEKGTIDVWWLFDDGGLTLLIPYILTLRKKWKDCKLRIYVGGKINRIEEEKIVMASLLSKFRIKFADIHIIGDINIRPNKESWKVFEEMIEPYRLHESCKDLTTAEKLKRETPWKITDAELEAVKEKSYRQVRLNELLQEHSRAANLIVLSLPVARKGSISDLLYMAWLEILTKNLPPVLLVRGNHKNVLTFYS

SEQ ID NO: 71527 - DNA, 3300 bp, Artificial Sequence
  derived and/or modified sequence
atgagcctcaacaacagttccaacgtgttcctggatagcgtgccatctaacacaaatcggttccaagtatctgtgatcaatgagaaccatgaatcatccgctgcagctgacgataatactgacccaccacattatgaggagacatcctttggcgatgaagcacagaaaaggctcagaatttcttttagacctggcaatcaggaatgctatgataacttcctccagtcaggagaaaccgccaagactgacgcctcgttccacgcatatgactcccacacgaacacctattatctgcaaactttcggacataacacgatggacgctgtccctaaaatagagtactatcgaaacactggttccatttccgggcccaaagtgaaccggccgtctttgctcgagattcacgagcagttggcaaagaacgtggccgttactccatcgtcagcagatcgagtcgccaacggcgatggaataccaggggacgaacaggcagaaaacaaagaggatgatcaggcgggggttgtcaagttcggctgggtcaagggggtcttggttagatgcatgttaaacatatggggagtcatgctgtttattagactatcttggattgtgggtgaggctggcattggactgggggtcatcatcattggactctccgtggttgtcaccaccctgaccggcatctctatgagcgccatctgtaccaacggagtcgtgcgcgggggcggagcctactatttaatttccagatccctcggcccagagttcggtggctccatcggcctcatattcgcctttgcaaacgcagtggcggtggctatgtatgtagtgggcttcgctgaaaccgtagtggacctccttaaagaaagcgatagcatgatggtcgacccaacgaacgacatccgaattataggcagcattacagtggtgatactgctcgggatcagcgtagccggaatggagtgggaggccaaagctcaggttatcctgttagtaattctcttaatcgctatagccaacttctttataggaactgtgattcctagtaataacgaaaagaaatctagaggcttctttaactaccaggcctcaatcttcgcggagaattttggcccaagatttacaaagggggagggctttttctccgtgtttgccatcttcttccccgccgcgaccggcatcctcgcaggggcaaatatctccggggatcttgaagatcctcaggacgccattcctcgcggtacaatgctagcaatttttatcaccaccgtggcttatctcggtgtagcgatctgtgttggcgcttgcgtggtgagggacgcaacaggcaacatgaatgacacaataattagcggcatgaactgcaatggctccgcagcgtgcggactggggtatgacttttccaggtgccgacatgagccctgtcagtatggtctcatgaataattttcaagtgatgagcatggtcagtgggttcggtcccttgatcactgcaggcatcttttcagcaacgctatcaagcgccctcgcctcactcgtgagcgctccaaaggtgtttcaggcactgtgcaaggacaatatctataaagctctgcagtttttcgctaaggggtacggcaagaataatgaacctctgcgcggctacattctcacattcttgatcgctatggctttcattttgatcgccgaactaaacacaatcgctccaattatttccaatttctttcttgcctcctatgctcttatcaacttctcatgctttcatgccagctatgcaaaaagtccaggatggagacccgcatacggcatttataacatgtgggtgagtctgtttggagccgtactttgctgcgccgtcatgttcgtgattaattggtgggcagccgttattacctatgtgattgaattctttctctacgtgtatgtgacctgcaagaaacctgatgtgaattggggatcttcaactcaggcgctgtcttatgtgtcagcacttgacaatgccctcgaactcactaccgtggaagatcacgtgaaaaacttcaggcctcagtgcattgtactcaccgggggcccgatgacaaggcccgcacttcttgatattacgcacgccttcaccaagaattctggactctgcatctgctgcgaggtgtttgtgggacccagaaagttatgtgtgaaggagatgaattccggtatggcaaaaaagcaggcatggctgattaagaataagatcaaggcattttacgccgctgttgctgcggattgtttcagggacggcgtaagaagtcttcttcaagcttccggtctgggacgcatgaaaccaaatacattagttatagggtacaagaaaaattggcggaaggcacccctcacagagatcgagaattacgtgggaatcatacacgacgcattcgatttcgaaataggagtggttatcgtgaggataagccagggctttgatatttcacaggtcctgcaggtgcaggaagagctggaacgactggagcaagaaagactcgccctggaggccacaattaaagacaacgaatgcgaggaggagagtggtggtattagaggactgttcaagaaggccggcaagctgaatatcaccaagactaccccaaaaaaggacggaagtataaacacctcccagtcgatgcatgttggagagtttaaccagaagttggtggaagcgtcgacacagttcaaaaaaaaacaggagaagggcactattgacgtatggtggctgttcgatgacggtgggttaactctgctgatcccttatattctaaccctgagaaaaaagtggaaggactgtaaacttagaatctatgtggggggaaaaattaaccgcatcgaggaggaaaaaattgtaatggctagtttactctccaaattccggattaaatttgccgacattcacatcatcggcgacataaatattagacctaataaggaaagttggaaagtttttgaggagatgattgagccttataggctgcacgaaagctgtaaggacctgactacagctgaaaaactgaagcgcgaaactccatggaagataacagacgctgagctagaggcagttaaggagaagtcctacaggcaggtgcggctgaacgaactgttgcaggaacacagcagagcggccaacctcattgtgctttcattacctgttgcacgaaagggaagtatttccgacctcctatatatggcctggcttgaaatcctgacgaagaacctccctccggtccttctggtgaggggcaaccacaaaaatgtgttgactttttactcttag

SEQ ID NO: 71528 - DNA, 3300 bp, Artificial Sequence
  derived and/or modified sequence
atgagcctgaacaacagcagcaatgtgttcctggacagcgtgcccagcaacaccaaccgcttccaggtgtctgtcatcaatgaaaaccacgagagcagcgctgctgctgatgacaacacagaccccccccactatgaggagaccagctttggagatgaggcccagaagaggctgcgcatctccttccggcccggcaaccaggagtgctatgacaacttcctgcagagcggggagacagccaagacagatgccagcttccacgcctatgacagccacaccaacacctactacctgcagaccttcggccacaacaccatggatgctgtgcccaagattgagtactacagaaacacaggcagcatcagcggccccaaggtgaaccggcccagcctgctggagatccacgagcagctggccaagaatgtggccgtgacccccagcagcgctgacagagtggccaatggagatggcatccctggagatgagcaggccgagaacaaggaggatgaccaggccggcgtggtgaagtttggctgggtgaagggcgtgctggtgcgctgcatgctgaacatctggggcgtgatgctgttcatccggctgtcctggatcgtgggggaggccggcatcggcctgggcgtcatcatcatcggcctgtctgtggtggtgaccaccctgaccggcatctccatgtctgccatctgcaccaacggggtggtgcggggcggcggggcctactacctgatcagccgcagcctgggccctgagtttggaggcagcatcggcctcatctttgcctttgccaatgctgtggccgtggccatgtatgtggtgggctttgctgagaccgtggtggacctgctgaaggagagtgacagcatgatggtggaccccaccaatgacatccgcatcatcggcagcatcaccgtggtgatcctgctgggcatctctgtggccggcatggagtgggaggccaaggcccaggtgatcctgctggtgatcctgctgattgccatcgccaacttcttcatcggcaccgtcatccccagcaacaatgagaagaagagccggggcttcttcaactaccaggccagcatctttgctgagaactttggcccccgcttcaccaagggggagggcttcttctctgtgtttgccatcttcttccctgctgccaccggcatcctggccggggccaacatcagcggggacctggaggacccccaggatgccatcccccggggcaccatgctggccatcttcatcaccaccgtggcctacctgggcgtggccatctgtgtgggcgcctgtgtggtgagagatgccaccggcaacatgaatgacaccatcatcagcggcatgaactgcaatggcagcgctgcctgtggcctgggctatgacttcagccgctgcagacatgagccctgccagtatggcctgatgaacaacttccaggtgatgtccatggtgtctggcttcggccccctcatcacagctggcatcttcagcgccaccctgagcagcgccctggccagcctggtgtctgcccccaaggtgttccaggccctgtgcaaggacaacatctacaaggccctgcagttctttgccaagggctacggcaagaacaatgagcccctgcggggctacatcctgaccttcctgattgccatggccttcatcctgattgctgagctgaacaccatcgcccccatcatcagcaacttcttcctggccagctatgccctgatcaacttcagctgcttccacgccagctatgccaagagccctggctggaggcctgcctacggcatctacaacatgtgggtgtccctgtttggagctgtgctgtgctgtgctgtgatgtttgtgatcaactggtgggccgccgtcatcacctacgtgattgagttcttcctgtatgtgtatgtgacctgcaagaagccagatgtgaactggggcagcagcacccaggccctgtcctatgtgtctgccctggacaatgccctggagctgaccaccgtggaggaccacgtgaagaacttccggccccagtgcatcgtgctgaccggcggccccatgaccaggcctgccctgctggacatcacccacgccttcaccaagaacagcggcctgtgcatctgctgtgaggtgtttgtgggccccaggaagctgtgtgtgaaggagatgaacagcggcatggccaagaagcaggcctggctgatcaagaacaagatcaaggccttctatgctgctgtggccgctgactgcttcagagatggagtgcgcagcctgctgcaggccagcggcctgggccgcatgaagcccaacaccctggtgattggctacaagaagaactggaggaaggcccccctgacagaaattgagaactacgtgggcatcatccatgatgcctttgattttgaaattggagtggtgattgtgcgcatcagccagggctttgacatcagccaggtgctgcaggtgcaggaggagctggagcggctggagcaggagcggctggccctggaggccaccatcaaggacaatgaatgtgaggaggagagcggcggcatccggggcctcttcaagaaggccggcaagctgaacatcaccaagaccacccccaagaaggatggcagcatcaacaccagccagagcatgcacgtgggggagttcaaccagaagctggtggaggccagcacccagttcaagaagaagcaggagaagggcaccattgatgtgtggtggctgtttgatgatggcggcctgaccctgctgatcccctacatcctgaccctgaggaagaagtggaaggactgcaagctgcgcatctacgtgggcggcaagatcaaccgcatcgaggaggagaagatcgtgatggccagcctgctgagcaagttccgcatcaagtttgctgacatccacatcatcggggacatcaacatccggcccaacaaggagagctggaaggtgtttgaggagatgattgagccctaccgcctgcacgagagctgcaaggacctgaccacagctgagaagctgaagcgggagaccccctggaagatcacagatgctgagctggaggccgtgaaggagaagagctaccggcaggtgcggctgaatgagctgctgcaggagcacagcagagctgccaacctgattgtgctgagcctgcctgtggccaggaagggcagcatcagtgacctgctgtacatggcctggctggagatcctgaccaagaacctgccccctgtgctgctggtgcggggcaaccacaagaatgtgctgaccttctacagctag

SEQ ID NO: 71529 - DNA, 3300 bp, Artificial Sequence
  derived and/or modified sequence
atgagcctgaacaacagcagcaacgtgttcctggacagcgtgcccagcaacaccaataggttccaggtcagtgtaattaatgaaaatcatgagtcttcggccgccgctgacgacaatacagatcctccgcactacgaggaaaccagctttggagatgaggcccaaaagcggttgcgtattagctttaggcctggcaaccaggagtgctacgataattttctgcagtctggggagaccgcaaaaacagatgctagctttcatgcctacgactctcacacaaacacgtactacctgcagacttttggacataacaccatggacgcagtgccaaaaattgaatattatagaaacacaggctcaatctcaggtcctaaggtcaatagaccgtcccttctggaaattcacgagcaactggcaaagaacgtggcagtcactccctcttccgcagaccgtgtggccaacggggatggcattcccggagatgagcaggcagaaaacaaggaggatgatcaggctggggtcgtgaagttcggttgggtcaaaggtgtcctagttcgctgtatgctcaacatctggggggttatgctcttcattcggctttcgtggatcgtgggcgaggccggaataggtctgggggtgattataattggactgtccgtggtggtgaccacactcaccgggatcagtatgtctgccatctgcacaaacggagttgttagggggggtggtgcctattaccttatatcacgatctctaggccccgaattcggcggttccatagggttgattttcgcgttcgctaacgccgttgccgtagctatgtatgtggtcgggttcgctgaaactgtcgtcgatttgctgaaggaatcggattccatgatggtagatcccacaaacgacatcagaatcattggttcaatcacagtggtcatccttctcggaatctcagtggccggcatggagtgggaggccaaggcacaggttatcctgttagtgatcctcctaatcgctatcgctaacttctttattgggacggttataccaagcaacaatgagaagaagagcagaggtttcttcaactaccaagccagtattttcgccgaaaacttcggtcctcgctttaccaagggagaagggtttttttctgtttttgccatattctttccagctgcgacaggcatcctggctggcgctaatatcagtggcgaccttgaagatccccaagacgccattccaagaggtactatgctggctatcttcattaccaccgtggcctacctgggcgtagccatttgcgtgggtgcatgtgtggtgagagacgctactgggaatatgaatgacactattatcagcgggatgaattgtaatggatctgccgcctgtggcctagggtatgatttttcaagatgccggcatgagccttgtcaatatggtctgatgaacaactttcaggtcatgtcaatggtatccggcttcgggcctttgattactgccggtatcttcagcgctactctgtctagcgctctagcctccctcgtgagcgcacccaaggtatttcaggccctgtgtaaggataatatttataaagcccttcaattcttcgccaaagggtatgggaaaaacaatgaacctcttcgtggatacatacttaccttcctaatcgcgatggctttcatcctgatcgccgaattaaacactatcgctccaatcatttctaatttttttctggcctcctacgccctcattaatttttcctgtttccatgcctcttacgccaagtcacccggatggagaccagcttacggcatttataatatgtgggtcagtcttttcggcgcagttctttgttgtgccgtcatgtttgtgatcaactggtgggcagctgtgatcacttacgtcattgaattttttctgtatgtctatgtcacatgcaagaaacctgatgtgaattgggggagtagcacacaagccctaagttatgtgagcgctctcgacaatgccctcgagctgactacagtagaagaccacgtgaaaaatttccggccacagtgcatcgtgctcactggcggacctatgacgagaccggcactactggatattacccacgcatttacgaagaatagcgggctatgtatctgttgtgaagtctttgtcggcccgcgaaaattatgtgtgaaagagatgaattccggcatggcaaaaaagcaagcttggctcatcaaaaacaaaatcaaggctttctacgccgctgttgcagccgattgttttcgcgacggcgttcggtcactgctgcaggcaagcggattggggcgtatgaagcccaacacactggtcatcggatacaagaaaaattggaggaaggccccgctgactgagatagaaaattacgtggggatcatccacgatgcatttgactttgaaataggggtggtaatcgtcaggatatcccaagggtttgatatttcccaggttctgcaagtgcaggaagaattggagagactggaacaggaacgcctggcgctggaggcaaccattaaggataatgagtgcgaagaggagtctggcggaattcggggtcttttcaagaaagccggaaagctgaacataaccaaaacaaccccaaaaaaggatggatccatcaacacaagtcagtcgatgcacgtcggcgaattcaaccagaaactggttgaagcttccacacagttcaaaaagaagcaggaaaaaggcacaatcgatgtctggtggctatttgatgatggcggtctcacacttttgattccctacatcctgaccctgcggaagaagtggaaagattgcaagcttcggatttacgtcggcgggaagatcaaccggattgaagaggagaagatagtgatggcaagcctcttaagtaaattccgtattaagttcgcagacattcacattattggggatattaacattcgccccaacaaggaatcgtggaaagtcttcgaggagatgatagaaccgtatcgcctccacgagtcgtgtaaggatttgaccactgctgagaagctcaaaagggaaactccctggaaaattacagacgccgagctggaggctgtgaaggagaagtcctacaggcaggttagactgaatgagctgttgcaagaacactcccgcgcagctaatctcatcgtgctttctctacctgtggctcggaagggttccatctctgacctgctgtatatggcatggctcgagatactcactaaaaacttgcctccagtcctactagtgcgtggtaaccataagaacgttctgaccttttattcttag

SEQ ID NO: 71530 - DNA, 3300 bp, Artificial Sequence
  derived and/or modified sequence
atgagtcttaacaactcatcaaatgttttcctcgactctgtgccaagcaacacaaacaggtttcaggtctctgtgattaacgaaaaccacgaaagcagtgccgcagctgacgacaacaccgacccaccacactacgaagagaccagttttggtgacgaagcacagaagcgcctgcggatttcattccggcctggcaaccaggagtgttatgacaattttctgcaatcaggggaaacagccaaaaccgacgcctcattccatgcttatgatagtcacactaacacctattacctccagacctttggtcacaacacaatggatgccgtgcccaagatcgagtattacaggaatacaggcagcatctccggcccaaaggtgaacaggccgtctcttctggagatccacgaacagctggctaagaacgtggccgttacaccttccagcgccgatcgcgtcgcaaacggcgacggtatccccggtgacgaacaggccgagaataaggaggatgaccaggctggagttgtgaaattcggctgggtgaaaggcgtgctagtacggtgcatgcttaatatctggggggtgatgttatttatcagattatcatggatagtgggcgaggctggaattgggttgggtgtgatcatcatagggctctccgtcgtggtcactaccctgactggcatctccatgtcagctatttgtacaaacggggtcgtgaggggcggtggcgcttactacctgatctcaaggtctctcggtcctgagttcggcggttcgatcggcctaatctttgccttcgcaaatgcagtggccgtggctatgtacgtggttgggttcgctgaaaccgtggttgacctcctgaaagaaagcgacagtatgatggtagacccaacaaacgatattagaattatcggcagtataacggtggtaattctcctgggaatctccgtggcagggatggagtgggaagcaaaagcacaggtgatcttgctggtcattctgcttattgccatcgcgaatttttttattggcaccgttatcccatctaacaacgagaagaagtctagaggcttctttaactatcaagcttctatattcgccgagaactttggacccagatttaccaaaggcgaaggctttttcagtgtgtttgccattttctttcctgccgctaccgggatcttagctggggctaacatctcaggcgatcttgaggacccacaagacgccattcctcggggaactatgcttgccatcttcataacaacagtggcatacttgggggtggcgatctgtgtgggggcttgcgtggtacgcgacgcaacaggcaacatgaacgacaccattatctccggaatgaactgtaatggctccgctgcgtgcgggctcggctatgatttttccaggtgccgccacgagccctgtcagtacggcctcatgaacaactttcaagtcatgtcgatggtgtctgggttcgggcctctgatcactgctggaatatttagcgccactctctcaagcgcccttgcaagcctagtgagcgcaccgaaggtgttccaagccctctgtaaagacaacatctataaggcattgcaattcttcgcaaaaggctacgggaagaataacgagcccctgagagggtacatcctgacattccttattgctatggcatttattctgatcgccgaacttaatactatcgcccctataatttcaaatttctttttagcatcttacgctctcatcaacttttcctgttttcacgctagctatgcaaaatcacccggatggcgcccagcctacggaatctataacatgtgggtttccctgttcggcgctgtgctttgttgtgcagtgatgttcgtcataaattggtgggctgccgttattacatatgtcatcgaattctttttatacgtgtacgtgacatgcaagaaaccagacgttaactggggctccagcacccaggctctttcctacgtctccgcattagacaatgctctcgaattgaccacggtcgaagatcacgtgaagaatttccgccctcagtgcatcgtccttacgggtgggccaatgaccagaccggcactgctcgacattactcatgcctttactaagaactctggattgtgtatctgctgcgaggtgttcgttggtcctcggaaattgtgtgttaaagagatgaactctggtatggcaaagaagcaggcctggctgatcaaaaataaaattaaagcattctatgccgctgtggcagccgactgcttccgggacggcgtgaggtcacttttgcaggcgtctggcctcggcagaatgaagcccaatacgctcgtaatcggctataagaaaaattggcgtaaagccccactcaccgaaatcgaaaactatgtgggcattatccacgatgcatttgacttcgagataggtgtcgtgattgtgcgcatatcccaggggtttgatatctcacaggtgctgcaggtgcaggaggagctggagcgactcgagcaggaaaggcttgcattggaagcaacaattaaagacaacgagtgtgaggaggagagtggagggatacgaggcctattcaagaaggctggcaagctgaatattaccaaaacaaccccaaaaaaggatggatccattaacacctctcaaagcatgcacgtcggcgaatttaaccaaaagcttgttgaagccagcacccagtttaagaaaaaacaggagaagggcaccattgatgtgtggtggttatttgatgatggtggcctgaccctgctgattccatacatcctgactctgcggaaaaagtggaaagactgcaagctaagaatttatgtcggaggaaaaatcaacagaatagaagaggaaaagatcgtgatggcctcactcctctctaagtttaggattaagtttgcggatatccacataatcggagacatcaatattcgccctaataaggagagctggaaggtgtttgaagagatgatcgaaccctataggctgcacgaaagttgcaaagatcttaccacggcggagaaactgaagagggaaaccccatggaagatcaccgatgccgagctggaggccgtgaaagagaagtcgtacaggcaggtccgtctgaacgaactgctgcaggagcacagtcgggcagcgaacctgatcgtgctgtctctccccgtggcacgaaagggcagcatatccgacctcttgtatatggcctggctggagatcttaacaaagaatctacctccagttctgctagtgaggggtaatcataaaaacgtgctgaccttctattcgtag

SEQ ID NO: 71531 - DNA, 3297 bp, Artificial Sequence
  derived and/or modified sequence
atgtcactgaacaactcctctaacgttttcctcgatagcgtaccgtccaacacaaacaggttccaggttagtgtcatcaacgagaatcatgagtctagcgccgcagctgatgacaacacagaccctccacattatgaggagactagtttcggtgatgaggcacagaaacgactgagaatctctttcagacctggtaaccaggaatgttacgacaattttctgcaatcaggagaaacagccaaaaccgacgcttctttccacgcctacgacagtcacaccaacacatattatctgcagaccttcgggcacaatacaatggacgccgtgcccaagatcgaatattacagaaacaccggttccattagcggacccaaagtgaaccgtcccagcctgctggagatccatgaacaactggcaaagaacgtggccgtgacccccagcagcgcggaccgtgtggcgaacggtgatggcatacccggagatgagcaggctgagaacaaggaggacgatcaggccggcgtggtcaaattcggctgggtgaaaggagtcctggtccgctgtatgctgaatatttggggagtgatgcttttcatccgcctgtcctggattgtgggagaggcgggcatcgggctcggtgtgatcattatcggcctgagcgtagtggtcaccaccctcactggcattagcatgtctgctatttgcaccaacggcgtggtgcggggcgggggagcctactaccttatcagtaggtccctcggccctgaatttggcggatccatcggcctcattttcgcgttcgccaacgctgtggcagtggctatgtacgttgtcggatttgcagagacagtggtcgatctcttaaaggagtcagatagcatgatggtcgatcccactaacgatatcagaattataggcagtattacagtcgttattctgttaggaattagcgtggcgggcatggagtgggaggcgaaagctcaggtgattttgctggttatcctattaatagccattgccaacttcttcatcggaactgtgatcccctcaaacaacgaaaaaaagtctagagggtttttcaattaccaggcatccatttttgccgaaaatttcggtccaagatttacaaagggagagggcttcttttcagtgtttgctatcttctttcctgctgcaacgggcatcttagctggcgctaacatttccggcgatctggaggacccacaggatgcaataccgcggggcactatgctggccatcttcatcactacagtggcttacctgggcgtcgcaatttgcgttggcgcctgtgtggttcgggatgcaactggcaacatgaacgacacaataatcagtggaatgaactgcaacggcagtgcggcctgtggccttggatacgacttctctagatgccggcatgaaccttgtcagtacggcctgatgaacaactttcaagttatgagtatggtttcaggattcgggcctctgatcactgctggtatcttctcagccacactctcaagcgctctggcttccctggtgtctgcacctaaggtgttccaggccctttgtaaggacaacatctataaggctctgcaatttttcgccaaaggttacggcaaaaataatgaaccgctgcgcggctacatactaacctttctcatcgctatggctttcatcctgatcgccgagctcaatacaatcgctcctatcatctctaactttttcctcgctagctacgctcttattaacttcagctgcttccatgcgtcttatgctaagtcacctgggtggcgccctgcatacggcatctacaacatgtgggtctctctcttcggggctgtactttgctgcgctgtcatgttcgttattaactggtgggcagcagtcatcacatacgtgatagagttcttcctctacgtttatgtgacctgcaagaagcccgacgttaactggggatctagtacacaggccctcagctacgtgtccgctctggataacgcgctggaactaaccaccgtcgaggaccatgttaagaattttcgaccacagtgcattgtattgaccggcggcccaatgactaggcccgcgttgctcgacataacccacgcattcaccaaaaacagcgggctttgcatctgttgcgaggtgttcgtgggacctaggaaactttgcgtgaaggaaatgaattccggaatggccaaaaagcaagcctggctgattaagaataagatcaaggcattctacgcggccgtggccgcggactgttttagagatggcgtgcggtcactgcttcaggcttctggcctgggcaggatgaaaccaaatacactcgtcataggctataaaaaaaactggcgtaaggcaccactcaccgagatcgagaactatgtgggcatcatccacgacgcgttcgattttgaaataggcgtggtgatcgttcgcatcagccaaggattcgacatttcacaggtgttgcaagttcaggaggaactggagcggctcgagcaagaaaggcttgcccttgaagctactatcaaagacaacgaatgtgaagaagagagtggtggcattcgtggacttttcaaaaaggcaggcaaactgaacataaccaaaactactcctaaaaaagacggctccatcaatacatctcagtctatgcatgtgggagagtttaatcagaaactcgtcgaggcaagtacacagttcaaaaagaagcaggagaaaggaaccatcgacgtttggtggctctttgacgatggcggactgacccttcttatcccctacattctgactctgcgaaagaagtggaaagactgcaaacttcgtatctatgtgggcggtaagataaacaggattgaggaagagaagatcgtcatggcgagcctgttaagcaagtttcgcatcaaattcgccgatatccatatcataggtgacattaatattcgccccaataaagaatcctggaaggtcttcgaggaaatgatcgaaccttaccgtctgcatgagagctgtaaggatctgactacagcggaaaaactgaagcgcgagaccccctggaagataaccgatgcagagttggaagccgtgaaggaaaagagttacagacaggtgcgcctcaatgagctgctccaagagcatagtagggccgcaaacctaatcgtgctctcactccctgtcgctcgtaaaggcagtatcagcgatctgctttatatggcatggctggaaatcctgactaaaaacctgccaccagtgcttttggtgaggggcaatcacaaaaatgtgctcacattttacagc

SEQ ID NO: 71532 - DNA, 3297 bp, Artificial Sequence
  derived and/or modified sequence
atgtctctgaacaacagtagcaacgtgtttctggatagtgtcccttccaatacaaacagatttcaagtcagcgtcattaatgagaaccacgagagtagcgctgcagctgacgataacaccgatccaccgcactacgaagaaaccagttttggggatgaagcacagaagaggctgagaatcagctttaggccaggaaaccaagaatgctatgataactttctccaaagtggagagacggccaagactgatgctagctttcacgcctacgattcacacacaaacacttactatcttcagacctttggccataacaccatggatgctgttcccaagattgagtattacaggaatactggtagcatcagcggtccgaaggttaataggccgtctctgctggagattcacgagcaactcgccaaaaacgtcgctgtgacaccttcatcagcggaccgggtagctaacggcgacggaatcccaggcgacgagcaagcggaaaacaaagaagatgaccaggctggcgtcgtgaagttcgggtgggtgaagggagtgcttgtgaggtgcatgcttaacatctggggcgtcatgctgttcatcagactgagctggattgtgggtgaagcggggatcgggctgggggtaatcatcatcggactgagtgtggtcgttacaaccctgaccggcataagtatgagcgccatatgcacaaacggcgttgtccgaggaggaggagcctactaccttataagtcggagcctcggacccgagttcggaggatccatcggcctcatttttgcttttgcgaacgctgtcgccgttgcaatgtacgtcgtgggattcgctgaaactgtggttgaccttctgaaggaaagcgactcaatgatggtggaccctactaacgacataagaataatcggcagcatcacagttgtgatcctcctgggaatctcggtggccgggatggaatgggaggccaaggcccaggtcatcctgttggtaatcttattaatcgcgatcgctaacttctttatagggaccgtaattccaagcaacaacgagaagaagagccgcggtttttttaattaccaggctagcatctttgcagagaacttcggacccagatttaccaaaggcgagggtttcttctcagtctttgcaattttttttccggctgcaactggcattctcgcgggtgctaacatcagcggggacctggaagatcctcaagacgccatcccaaggggcaccatgctggcaatctttatcacaaccgtcgcctacctcggagtggctatctgcgtgggtgcttgcgtggtgcgagatgccactggaaacatgaacgataccattataagtggcatgaactgcaacgggtctgccgcttgtggactgggatacgattttagtagatgcaggcacgagccttgtcagtacggacttatgaacaactttcaggttatgtctatggtttccggcttcggtcctctcataaccgccggtatattctctgctacattgagcagtgcacttgcatccctggtgagcgctcctaaagtgtttcaggccttgtgcaaagacaacatctacaaggctctgcagttctttgcgaagggctacggcaaaaacaacgagccactgaggggatacatcctgacctttctgatcgccatggctttcattctgatcgcggagttgaatacaatcgctccaatcattagtaatttctttctggccagctacgcattaatcaacttcagctgcttccatgcgtcttacgcaaaatcccctggatggagacctgcctatggaatctacaacatgtgggtttcactgttcggcgcagtattgtgctgtgccgtaatgtttgtcattaattggtgggcggcagttataacatacgtgatcgagtttttcctgtacgtatatgtcacttgtaagaagccagatgtgaactggggcagtagcacgcaggcgctgagctatgtgtcagcccttgacaacgcattggaattgaccacagtggaggaccacgtgaagaattttcgcccccagtgcattgtcctcaccggcggccctatgaccagacctgctctgctcgatatcacacacgccttcaccaaaaattccgggctgtgcatctgttgtgaagtcttcgttggccctagaaaactgtgcgtaaaggaaatgaacagcggcatggcgaagaaacaggcttggctcattaagaacaaaatcaaggctttctacgccgccgtggctgcagattgctttcgcgatggtgtcagaagcctgctccaggcttctggtctgggaagaatgaagcctaacacactggtgattggttacaagaagaactggaggaaagcacctctgacagaaatcgaaaattacgtcggcattatccacgacgcgttcgacttcgaaatcggcgtcgtcatcgtgagaatttctcaggggtttgacatttcccaggtgttgcaagtccaagaggagcttgagagattggagcaggaacgcttggctctggaagccaccattaaggataacgaatgcgaggaggagagcggtggtatccgaggcctatttaagaaagctggaaagctcaacataaccaaaaccacaccgaagaaagacggatcaattaacaccagccaatctatgcacgttggggagtttaaccaaaaactggtggaggcttccactcaatttaagaagaagcaggaaaaaggcacaattgacgtatggtggctgtttgacgatggcggcctgaccctcttaataccctacatcctgaccctgagaaaaaagtggaaggactgcaagctccgcatttacgtgggcggcaagatcaacaggattgaagaagaaaagatagtcatggcttcattgctgagcaaattcagaattaagttcgctgacatacacatcatcggagatatcaacatcagacctaacaaggaaagttggaaggtgttcgaagaaatgattgagccttacagactgcacgagtcctgtaaggatctcactactgccgagaagctcaagagggagaccccctggaaaatcacagatgccgaactggaggctgtaaaggaaaagagctacagacaggtgaggcttaacgaactgctccaggagcactcacgcgctgctaacctgattgtgttgagcctcccagtagcacgtaagggctctatctccgatctcctctatatggcctggttggaaatactgactaaaaatctgccccctgtcctcctcgtccgcggaaaccacaaaaacgttttgaccttttacagc

SEQ ID NO: 71533 - DNA, 3297 bp, Artificial Sequence
  derived and/or modified sequence
atgtcacttaacaactcctcaaatgtgttcctggatagcgtcccatccaacaccaatcgttttcaggtttcggtgattaacgaaaaccacgaatcgtcggcggcagccgatgataataccgaccctccacactacgaagaaacttccttcggcgacgaagcacagaaacggctgaggatctcatttaggcccggtaaccaagaatgttacgataacttccttcaaagcggcgaaaccgcgaaaactgatgcatcgtttcatgcatacgactcccatactaacacttactacctgcaaacttttggccataacactatggatgcagtccctaagattgagtactatcgtaacaccggttcgatctcgggtcccaaggttaacaggccttcgctgctggagatccatgaacagctcgcaaagaacgtcgctgtcacgccctcctcggcagatcgcgtcgcaaatggggatgggattccgggtgatgaacaggcagaaaacaaggaggatgaccaagcaggtgtcgtgaagtttggttgggtgaagggcgtcctggtgaggtgcatgctcaacatatggggtgtcatgctctttatcagattgagctggattgtgggcgaagccgggattggtttgggcgtgatcatcattggcctttcggtggtggtgactactctgactggaatcagcatgtcggccatctgcacgaacggggtcgtgcgcggaggaggtgcttactaccttatctcgcggagcctcgggcctgaattcgggggttctattggtctgatcttcgcatttgcaaacgcagtggcagtcgcaatgtacgtggtgggatttgcagaaaccgtcgtggaccttcttaaggagtctgattccatgatggtcgatccgacgaacgacatccggattatcggatccattactgtggtgattcttctcggtatctccgtcgcaggtatggagtgggaagcgaaggcgcaagtcattcttctggtcattctgctgatcgcaatcgccaatttctttataggaaccgtgatcccttcgaacaatgagaaaaagtctaggggcttctttaactaccaggcgtcaattttcgccgaaaacttcggtcccagattcaccaaaggagaaggtttcttctcagttttcgctatctttttccctgcggctactggaatacttgccggcgccaacatttcgggagatctggaggatccacaggatgcgataccacgcggtactatgctggcaattttcatcactaccgtggcgtacctcggtgtggcaatttgtgtcggagcatgtgtggtgcgggatgcaactggtaacatgaatgataccatcataagcggaatgaactgtaatggtagcgctgcatgtggccttggatacgacttttcgcgatgcagacacgaaccttgtcagtacggtcttatgaacaattttcaagtcatgtcgatggtgtccggatttggtccgctgattaccgccgggattttctccgccaccctgtcatccgcgctcgcatcgctggtgtcagctcccaaggtgtttcaggcattgtgcaaggataacatttacaaggccctgcagttctttgcgaaaggatacgggaagaacaatgagccactccggggttacatacttacgtttttgatcgctatggcattcatcctgatcgcagaattgaacaccatcgcaccgattatctcgaacttttttctggcatcctatgcattgatcaatttctcctgttttcatgcaagctacgcaaagtcgccaggatggcggcctgcatatgggatttacaacatgtgggtgtcgctctttggggcagtgctctgttgcgcagtgatgtttgttatcaattggtgggcagcagtgattacctacgtgatagaattctttctttacgtctacgtcacctgtaaaaagcctgacgtgaattggggtagctccactcaggcgctttcgtacgtgtcggccctggacaacgcgctcgaactcaccactgtagaggaccatgtcaagaactttcggcctcaatgtatagtgctcactggaggacctatgaccaggccggcactgctggatattacccacgcctttacgaagaactccggtctgtgcatttgctgtgaggtgtttgtgggacctcgaaagctctgcgtgaaagaaatgaactcagggatggcaaagaagcaggcatggcttatcaagaataagattaaggcattttacgctgccgtcgcggctgattgtttcagagatggggtgcgatccctgctccaggctagcgggctcggcagaatgaaacccaacaccttggtgataggatacaagaagaattggcggaaggcaccactgacggagattgagaattacgtgggcatcatccacgacgcattcgacttcgagattggcgtcgtcatcgtccgtattagccaaggtttcgatatatcgcaggtgcttcaggtgcaagaagaacttgaacgactggagcaggaaagactcgcactcgaggccactatcaaagataatgaatgtgaagaggagtcgggcggaatccgaggactcttcaagaaggcaggaaagctcaacatcactaagactaccccgaaaaaagacggaagcataaacacgtcacaaagcatgcatgtcggagagttcaaccaaaaacttgtcgaagcatcaacgcaattcaagaagaaacaagagaaaggaaccattgatgtgtggtggctgtttgatgatggtggactgactcttctgattccgtacatacttactcttcggaagaagtggaaggattgtaagctgagaatttacgtgggcggaaagattaatcggatcgaagaagagaagatcgtcatggcgagcctgctgtcaaagttcagaatcaaattcgccgatatccatatcatcggagacataaacatcagaccgaacaaagaatcctggaaggtctttgaggaaatgatagaaccttaccgcctgcatgagtcgtgtaaagatcttactactgccgagaagctcaagcgtgaaactccctggaagattaccgacgcagaacttgaagcggtcaaggaaaagagctaccggcaggtgcggctcaatgagctgctgcaagagcactccagagcagctaacctcattgtcctgtcccttcctgtggcacggaagggttccatctcggacctgctgtatatggcctggcttgagatacttactaagaaccttccaccagtcctgctcgtgcgaggtaaccacaaaaacgtgctgaccttctactcc

SEQ ID NO: 71534 - DNA, 3297 bp, Artificial Sequence
  derived and/or modified sequence
atgtctctgaacaactcgtcgaacgtgttcctggattcagtccctagcaacacgaacaggttccaggtgtcggtgatcaacgaaaatcatgaatcctcggccgccgcggacgacaacactgatccaccacattacgaagaaacctcgttcggagatgaagctcagaaacggctccggatcagcttccgtccggggaatcaggagtgttatgacaactttctgcagtccggggaaaccgccaaaactgacgcctccttccatgcgtacgacagccacactaatacctactacctgcagactttcggacacaacactatggacgctgtgcccaagatcgagtactaccgcaatacgggatcaatttccggaccaaaagtgaatagaccttctctcctggagatccacgaacagttggccaagaacgtggccgtgaccccgtcgtcggcggatcgtgtcgctaatggcgatggtattcctggagatgagcaagccgaaaacaaagaggacgatcaggccggagtggtcaaattcggatgggtgaagggagtgcttgtcagatgtatgctcaatatctggggcgtcatgctgtttatcaggctgtcctggatcgtgggtgaagcaggcatcggactcggagtcatcatcattgggctttccgtggtagtgaccaccctgactggtatctcaatgtccgctatctgtactaatggcgttgtgcggggagggggagcctactacctcatcagccgcagcctgggccctgaattcggaggctcgatcggcctcatcttcgcatttgccaacgccgtcgcggttgcaatgtacgttgtgggattcgccgaaaccgtcgtcgatctgttgaaggagagtgactccatgatggtggacccgaccaacgatatcaggattatcggctcgataactgtcgtgattttgctgggcatctcggtcgccggaatggaatgggaagcgaaagcacaggtgatcctgctcgtgattctcttgatcgccatcgcgaatttctttattggaaccgtaatcccatcgaacaatgaaaagaagtccaggggttttttcaactaccaggccagcatcttcgccgagaatttcggcccgagattcactaaaggcgaagggttcttttcggtctttgcaatcttctttcccgcggctaccggcatcctcgctggagcgaacatctcaggagatcttgaggacccgcaggacgccatccctcggggaactatgctcgcaattttcatcaccactgtggcttacctgggtgtcgccatctgtgtgggagcatgcgtggtcagagacgcaaccggaaacatgaacgacaccattatctcaggcatgaactgcaacggcagcgcagcctgcggattgggttacgatttctcccggtgccgccacgaaccttgtcagtatggattgatgaacaatttccaagtgatgagcatggtcagtggattcggaccacttatcactgctggaatcttttcagctactctgtcctccgcacttgcgtcattggtgtccgccccaaaggtgttccaggcgctctgcaaggacaacatctacaaggcactccagttcttcgctaagggatacgggaaaaacaacgaacctctgcgcggttatatccttaccttcctcatcgccatggctttcatcctgatcgccgagctgaacaccatcgcgccgatcatcagtaacttcttcctggcttcctacgcgcttatcaacttctcgtgcttccacgcttcctacgcaaagtcgccgggctggcggccggcatacggaatttacaatatgtgggtgtccctgtttggggccgttttgtgctgcgccgtcatgtttgttatcaactggtgggccgccgtgatcacgtacgtcatcgaattcttcctctacgtgtacgtgacgtgcaagaaaccggacgtcaactggggcagctctactcaggcgctgtcctacgtgagcgctctggacaacgcactggaactgacgaccgtggaggaccacgttaagaattttcgcccgcagtgcattgtgctgaccggaggaccaatgactaggcctgcgctgcttgacatcacccacgcatttaccaagaactccggactgtgcatctgctgcgaagtgttcgtggggcccagaaaactgtgtgtgaaggaaatgaatagtggcatggccaagaaacaagcgtggctgatcaagaacaagatcaaggccttctacgcagccgtcgctgcggattgtttccgggatggagtacggtcactcctgcaagccagcggcctcggcaggatgaagccaaacactctcgtgattgggtacaagaagaattggcgcaaggcccctctgaccgagatcgagaattatgtcggaatcatccacgatgcatttgacttcgagatcggagtggtgattgtgcgcatcagccaaggatttgatatctcacaggtcctgcaggtacaggaagaattggaaagactggagcaagaaaggctggcgctggaagccactatcaaggacaacgagtgcgaagaagagtcaggaggtattcgcgggctcttcaagaaagcgggaaagctcaacatcaccaaaacgactcccaagaaggacggatcgatcaacacttcccaatctatgcacgtcggtgagttcaaccaaaaacttgttgaagcctcaacccaattcaagaagaagcaggaaaaggggaccatcgacgtttggtggttgttcgacgacggtggcctgaccttgcttatcccgtacatactgactctgcggaagaaatggaaggattgcaaactgcgcatttacgtgggaggcaagatcaatagaattgaggaggagaagatcgtgatggcctccctgctttcgaagttccgcatcaagtttgccgacattcacattatcggggatatcaatattcggcccaataaagaatcctggaaagtgttcgaggagatgatcgagccctaccggctgcatgaatcgtgcaaggacctcaccactgccgaaaagctcaagcgcgaaactccgtggaagatcaccgatgcagagctggaggcagtgaaagagaagagctacagacaagtccggctcaacgagctcctccaagaacatagcagggccgcgaaccttattgtgctctcgttgcccgtggctcgcaagggttcgataagcgacctgctgtacatggcttggctggagatccttaccaaaaatcttccgcccgttctgctcgtgcgcggaaatcataagaatgtgctgactttctacagc

SEQ ID NO: 71535 - DNA, 3297 bp, Artificial Sequence
  derived and/or modified sequence
atgtcacttaataactcctcaaatgtgttcctggacagtgtcccatcaaacacaaaccgctttcaagtgtcagttataaatgaaaaccacgagagcagtgccgctgctgacgataacactgatcccccgcattacgaagaaacctcctttggagatgaagcacagaagcgacttcgaatttcttttcgtcctggaaatcaggaatgttatgacaacttcctgcaatcgggcgagactgccaaaactgacgcttcatttcatgcgtatgactcacacaccaatacttactatctgcaaactttcggtcacaacactatggatgctgttccgaaaattgaatactaccgcaataccggctctatatctggtccaaaagtaaataggccatcccttttggagatacacgaacaacttgcgaagaatgtcgccgtgacaccatcttcagctgaccgcgtcgccaatggagacggaatcccaggagacgaacaggccgagaataaagaagacgatcaggcaggtgttgtgaagtttggatgggttaaaggagttttagtccgctgtatgctgaacatttggggagttatgctttttattcggttgtcgtggattgttggagaagccggaatcggtctgggcgtcataattattggactttccgttgttgttacgacacttactggaattagcatgtcagcaatttgtaccaatggggttgtgagaggcgggggcgcatactaccttatttcgaggtcattgggacccgagtttggaggttcaattggactcattttcgctttcgctaacgccgttgctgtggcaatgtatgttgttgggtttgcagaaacagttgttgatttactgaaagagtctgattcaatgatggttgatccaacaaatgatatcagaataattggttccattactgtcgttattttgctgggaatttctgttgccggaatggaatgggaagcaaaggcacaggttatccttctagtcatactccttatcgccatcgccaatttctttattggaacggtgataccatcaaacaatgaaaaaaaatcacgaggattttttaattaccaagcttctattttcgccgaaaactttggaccccgatttacaaaaggagaaggttttttctcggtctttgcgattttcttcccagctgccactggaatcctcgcaggagctaacatctctggggacctggaagaccctcaagatgcaattccccgaggtacaatgctcgcgatcttcattacaacagtagcctatcttggagtcgcaatctgtgtaggtgcatgtgttgtgagagatgccacaggtaacatgaatgacactataatatcgggcatgaactgtaatggaagtgcggcatgcggactcggttatgatttttcgcgatgccgacatgaaccgtgccagtacggattgatgaataactttcaggttatgtcaatggtgtcgggcttcggaccgttaattaccgccggaatcttttctgcaacccttagcagtgcattggcaagtctggttagtgcgcctaaagtgttccaagccctatgtaaggataatatatataaagcacttcagttcttcgctaagggttatggcaaaaacaatgagccattgcgtgggtacatcctaacattcttgattgctatggccttcattctcatagccgaacttaacaccatcgcaccaatcatatctaacttcttcctcgcaagttatgcactcattaatttctcatgctttcatgcgtcttatgcgaaaagtccaggatggagacctgcatacggtatttacaatatgtgggtttcacttttcggagcagtcttgtgctgtgcagttatgttcgtgattaattggtgggcagctgttatcacatatgttattgagtttttcctttatgtttacgttacatgtaaaaagccagacgttaattggggatcctcaacccaagctttgtcctatgtgtctgctctggataatgccctcgaacttactactgtagaagaccacgtcaagaacttccggccacaatgcattgtgttgacaggaggaccgatgaccagacctgctctgcttgatataactcacgcttttacgaaaaattctggactgtgcatttgttgtgaagttttcgtaggaccccgaaagttgtgtgtcaaggaaatgaatagtggcatggccaaaaaacaggcgtggctgatcaagaataagataaaggccttctacgcggctgtggctgcagattgtttcagggacggggttagatcgctactgcaagcatctgggttgggtagaatgaaacctaacacgttggtgattggatacaaaaaaaattggcggaaagctccactgactgagatcgaaaattacgttggaattatccacgatgcctttgattttgagattggcgtagtgatcgtgcgaatcagtcaaggatttgatatatcacaagtgcttcaggtgcaggaagaactcgagaggctcgagcaagaaagacttgccctagaagccaccattaaagataacgaatgcgaggaagaaagtggaggaattcgtggactattcaaaaaagccggaaagcttaatattactaagactaccccaaagaaagatgggtcaattaacacttcgcaatcaatgcatgttggagaattcaatcaaaaattagttgaggcatcgacacaatttaaaaaaaaacaagaaaaaggtaccattgatgtttggtggttgtttgatgatggagggctcactcttttgatcccttacattttgacccttaggaagaaatggaaagattgcaagctgaggatttacgttggtggaaaaatcaaccgaattgaagaggaaaagattgtcatggcatcacttctttccaagttccggataaaatttgctgatattcatattataggagatattaacatcagaccaaataaagagtcttggaaagtttttgaagagatgattgagccatatagactgcacgaatcatgtaaagatctgacgacagcggaaaagctcaagagagagacaccctggaagatcaccgatgcagaacttgaggccgttaaagaaaaatcttatcggcaagtacgtctaaatgaactgttgcaagagcacagcagagcagcaaatcttatcgtactatcgctcccagttgctcgtaaaggctctatatctgatttgttgtatatggcatggctggaaattctaacaaaaaatcttcccccggtcttgttagtgaggggaaaccataaaaacgttctcactttttattct

SEQ ID NO: 71536 - DNA, 3297 bp, Artificial Sequence
  derived and/or modified sequence
atgagtttgaacaacagctccaatgtcttcctggattctgttccaagtaatacgaataggttccaggtgtccgtcatcaatgagaaccacgaatcgagcgccgctgccgacgataatactgaccctcctcattacgaagagacatcttttggtgacgaagctcagaaacgtttgcgtatctcatttagacccggtaaccaagaatgttatgataatttcctgcaatccggcgagaccgccaagactgacgccagctttcatgcctacgactctcacacaaatacatattatcttcagacattcggtcacaatacaatggacgctgttcctaaaattgaatactatcgtaacaccgggtccatctcagggccaaaagtaaaccgacctagcctgcttgaaattcacgagcagctcgccaagaacgtggctgtcacaccatcttcagccgaccgcgtcgctaatggagacggcataccaggggacgaacaagctgaaaacaaagaggacgatcaagcgggtgtagttaaatttggctgggttaaaggcgtgcttgtgagatgtatgttgaatatttggggcgttatgctgtttattagattgtcatggattgtgggggaggcagggatcggccttggcgtcatcattattggactgtccgtggtcgtaactaccttgactggcatctcgatgagtgctatctgcacaaatggggtcgtaagaggcgggggggcctactacctgatcagccgctctttaggaccggagttcggaggcagtattggccttatctttgccttcgctaatgcggtggccgtcgccatgtatgtggtgggctttgccgaaacggtcgtcgacctgttgaaagaatcagattcaatgatggtggatcctactaacgatatccggatcatcggttccatcactgtggtaatcctgttagggatttctgtagctgggatggagtgggaggcaaaagctcaggtgatcctactggtaatcctgctcatcgccatagcaaatttcttcatcggaacagtcattccctcaaacaacgagaagaagagtagaggatttttcaactaccaggcctccatcttcgccgagaacttcggaccaaggttcactaagggcgagggattcttctctgtgttcgccatattcttccccgcagcaaccgggattttagctggagccaacatttctggtgacctagaggatcctcaagatgccatccctcgtgggaccatgctggcaatctttatcacaacagtggcctatctgggcgtggcaatatgcgtgggggcgtgtgtggtgcgcgatgctacgggcaatatgaatgataccatcatttccggtatgaattgtaatggttcagccgcttgtgggttagggtacgatttctcaagatgtcggcacgagccgtgccagtacggccttatgaacaacttccaggttatgtccatggtgtccggcttcggtccgttgattaccgccggcatctttagcgctacactgtcaagcgcactggcctcactggtctccgcccctaaagtatttcaggcattgtgcaaggataatatttataaggcgctgcaattcttcgccaaagggtacggtaaaaataacgaacccctgcgcgggtacatcctcaccttcctgatcgctatggcattcatccttatcgctgagctgaacacaattgctcccataatctctaatttcttccttgcgtcatacgctcttataaactttagctgttttcatgcctcgtacgcaaagagtcccggatggaggcccgcctacggaatttataatatgtgggtctccctgttcggagctgtactgtgctgcgccgtgatgtttgtcataaactggtgggccgccgttattacgtacgtgatagaattctttctgtatgtctacgtgacatgtaagaaacccgacgtgaactggggcagcagcacccaagcgctgtcatacgtgtctgccttagataatgccctggagcttaccacggtcgaggatcatgtaaaaaacttccggccccagtgcattgtgttgacaggaggaccaatgactaggcccgctctcctggacattacacacgcatttaccaaaaattctggactgtgcatctgctgcgaagtcttcgttggacctcggaagctttgcgtgaaagagatgaacagtggaatggcaaagaagcaggcctggctcatcaagaacaaaatcaaggctttttacgctgccgttgcagcggattgctttcgggacggggtgagatccctgctccaggcctctgggctgggtcggatgaaacccaacacgcttgttataggttacaaaaaaaactggagaaaagcccctttgaccgaaattgagaactatgtcggaataatccacgacgcttttgactttgagataggcgttgtgattgtaaggatatcccaaggatttgacatctcacaagttctacaggtgcaagaagagcttgagcgactggagcaggagcgccttgccctcgaagcgacaatcaaggataatgaatgcgaagaggagtccggggggatacgtgggctgttcaaaaaagcaggaaagctgaacataacgaagaccacacccaagaaagatgggtctatcaatactagccagtcgatgcacgtcggggaatttaatcagaagctcgtggaggcttctacccagtttaaaaagaaacaagagaagggaaccatcgacgtatggtggttgtttgacgacggcggcctaacgctgttgatcccgtatatccttacactacggaagaagtggaaagactgtaagttgcgaatatacgtcggtggtaaaattaatcggatcgaggaagagaaaattgtaatggctagccttctatcaaaatttagaattaagtttgccgacatccacattatcggagatattaatatccggcccaataaggagtcttggaaggtcttcgaggaaatgatagagccttaccgactacacgaatcatgtaaagatcttaccaccgctgagaaattgaaacgggagaccccatggaaaataacagatgccgaattggaagccgtcaaggagaaaagctataggcaggttcgtctcaatgagctgctgcaggagcatagccgggcggctaatctcatagttctgtcgctgcccgtggcgcggaaagggtctattagtgacctgctgtacatggcttggcttgagatcctgacgaagaatctccctccggtgctgctggtgaggggaaatcataagaatgtcctgaccttttattcc

SEQ ID NO: 71537 - DNA, 3297 bp, Artificial Sequence
  derived and/or modified sequence
atgtccttgaacaactcttctaatgtattcctggatagtgttccttctaacaccaaccgcttccaagtgtcagtcatcaatgagaaccacgagagttctgccgctgctgacgataacacagaccctccacattacgaagagaccagtttcggagacgaagcccagaagaggctgaggatctcattcaggcccggtaaccaggaatgttacgacaactttcttcagagtggcgagactgccaagactgatgcctcttttcacgcgtatgattcccatacaaatacttattatctgcagacgtttggacataatacaatggacgcagtccccaagattgagtactacagaaatactggtagtattagtggcccgaaggttaacagaccctccttgctcgagatacatgaacagctcgccaagaacgtcgccgtcacaccttcctctgcagacagagttgccaacggagatggcattccaggagatgagcaggcagagaataaagaggacgaccaggcaggtgtggtcaagttcggctgggtgaaaggtgtgctcgtgcgctgtatgctcaatatctggggagtcatgctctttatcaggctctcctggatagtcggcgaagctggaatcggcctcggtgtcattatcataggcctgtcagttgtagtgacaaccctgacaggaatctcaatgagtgcaatttgcacgaatggagtggtgaggggcggaggagcctactaccttatctccagatccctcggtcccgagttcggcggctcaattggtctgatctttgctttcgccaacgctgtggcagtggccatgtatgtggttggcttcgcggaaacggtagttgacctgttgaaagagtctgattcaatgatggtggacccaaccaacgatatcagaatcatcggctcaatcacagtggtaattctgctgggaatatctgtcgccggcatggagtgggaagctaaggcccaggttatcctgctggtcattctcttgatcgcaattgctaacttttttattggtaccgtgatcccctctaacaacgaaaagaaatcccgcggttttttcaactatcaagcaagtatttttgccgaaaatttcggccctcgcttcactaaaggcgaaggattcttttcagtgtttgccattttttttccagccgccactggaatcctggcaggtgctaacattagtggtgacctcgaggacccccaggatgcgattccgagaggcacaatgctcgccatctttattacaaccgtagcttatctgggcgttgccatttgcgttggcgcctgtgtcgtgagagacgctactggaaatatgaatgacacaatcatctccggtatgaactgtaacggctccgctgcttgcggacttggatatgatttctccagatgtcgccacgagccctgccaatatggcctcatgaataacttccaggtaatgtcaatggtctcaggattcggaccattgattactgcaggaattttctccgctacattgagtagtgccctggcatctttggtgtccgccccgaaagtctttcaagccctttgcaaggataatatctacaaagctctgcagtttttcgctaaaggctacggaaaaaataatgagcctctgaggggatatatcctgaccttcttgatcgctatggctttcattctgattgcggagctgaacaccatcgcgccaattatttctaacttttttttggcttcctatgctcttatcaactttagctgctttcacgcatcctacgcgaaatcacccggttggaggcctgcatacggtatctacaacatgtgggtctctctgtttggcgctgttctttgctgcgctgttatgtttgtcatcaattggtgggccgccgtgatcacctacgtgattgaattctttttgtatgtgtacgtgacctgtaaaaagcctgatgtaaactggggcagctcaacacaggcactctcttatgtgtctgctcttgacaatgcactcgagcttactacggtggaagaccacgttaagaacttcagacctcagtgcatcgtgcttacaggaggtcctatgactaggcccgctttgctggatatcacgcacgccttcactaagaatagcggactttgtatctgctgtgaggtgttcgttggtccgaggaagttgtgcgtcaaagagatgaatagcggtatggcgaaaaagcaggcatggctcataaagaataagatcaaggcattctacgctgctgtggcagctgactgcttcagggatggcgttagatctctgctgcaagcatctggtcttggcaggatgaaaccgaacacactggttatcggatacaagaagaactggcgcaaggcaccgctgacagaaattgaaaattatgtgggcattatccacgatgctttcgatttcgagattggagtggtgatcgttaggatatcacagggttttgacatatcacaagtgttgcaggtccaggaggagttggagaggcttgagcaggagaggctggcactggaggccacaattaaggataatgagtgtgaagaggagtctggaggtattcgcggcttgttcaagaaagcgggcaagctgaacattactaagacgacacctaagaaagacggctccataaacacatcccagtcaatgcacgtcggtgagttcaaccagaagttggtggaagcttctacccagttcaagaaaaaacaggagaagggcaccatcgacgtctggtggctgttcgatgatggcggactgacactcttgatcccctacatcctgacattgagaaaaaaatggaaagattgtaaactccgcatctacgtaggaggcaagatcaatagaatcgaggaggagaaaatagttatggcgtctcttttgtccaagttcagaatcaaatttgctgacattcacatcattggcgatatcaacattagacctaataaggaatcatggaaggtatttgaagaaatgatcgagccttaccgcctccatgagagctgtaaagatctcaccacggcagagaaacttaagcgcgagaccccttggaagatcactgacgccgaattggaagccgtcaaggaaaagtcttacagacaggtaaggctcaacgaacttcttcaggagcactctagagctgccaatctcatagtgctgtcattgccggtggccaggaaaggttctatctctgatctgctctacatggcatggctggagatcctgaccaaaaacctcccaccagtgctgttggtgaggggaaaccataagaatgtactgaccttctattcc

SEQ ID NO: 71538 - DNA, 3297 bp, Artificial Sequence
  derived and/or modified sequence
atgagcctgaacaactcgtctaacgtgtttctggattctgtgccaagtaacacgaatcggtttcaggtttcagtcatcaacgagaaccacgagagtagcgcggcagccgacgataacactgatcccccccattacgaggaaactagctttggcgacgaagctcagaagcgtcttcgaattagctttcggcccgggaaccaagaatgttacgacaatttccttcagtcaggagagactgctaagactgatgcctcctttcatgcctatgacagccacaccaacacctattacttacagacattcggacataataccatggatgccgttcctaagatagagtattacagaaatactgggtcgatctcaggccccaaagtcaatagaccatcattgctagagatccatgaacagctcgcaaagaatgtggccgtgacaccctcaagtgccgaccgagtcgcaaatggtgacggcattccgggagatgaacaagccgagaataaagaggatgaccaggctggcgtggtcaaatttgggtgggttaagggagtgcttgtgcgatgcatgttgaacatttggggagtaatgctctttatcaggttgtcctggattgtcggcgaggctggaattgggcttggagtcattattataggtctttcagtcgtggtgaccacccttacaggaatcagcatgagcgctatctgcaccaacggcgtggtgagaggcggaggagcctattaccttatctctagatcactggggcctgagttcggaggctctatcggtctcatttttgcttttgcgaatgccgtagcagtcgctatgtacgtggtgggattcgctgaaacagtcgttgacttgcttaaggaaagtgacagcatgatggtggatcctacaaacgacataaggataatcgggtcaatcactgtggtgatactgctgggaattagcgttgctggcatggagtgggaagccaaggctcaagtgattctactcgtaatcctactgattgccattgccaacttctttatcggtactgttatcccttctaacaatgaaaagaagtccagagggttctttaactatcaggcgagcatttttgctgaaaattttgggccacggtttactaaaggtgaagggttcttttcggtgtttgccatcttcttccccgcggcgacggggattctcgccggagctaacatcagcggggatctggaagacccccaagatgcgatccctcgcggaacaatgctggccatattcataaccaccgtggcatatttaggggttgcaatttgtgtgggggcttgtgtggtcagagacgcgacggggaatatgaacgacaccatcatatctggcatgaattgcaacgggtccgcagcctgtgggctgggatacgatttctcccgttgtaggcacgaaccttgccagtacggcctgatgaataactttcaggtgatgtctatggtgtcagggtttggccctttgattacagcgggcatcttcagcgcaacactctcttcagccctggctagcctcgtttccgcccccaaagttttccaggccctgtgtaaggataacatctacaaagcactgcagttttttgcgaaaggctatgggaaaaataatgaaccattgagggggtatatcctgacttttctaattgccatggcatttatcttaattgctgaattgaataccattgcccccatcatatctaacttcttcctcgcctcatacgctctaatcaatttctcctgttttcatgcttcttacgcaaagagtccggggtggcggcctgcctatggaatctataacatgtgggtgagtctttttggcgctgtgctttgctgtgccgtcatgtttgttataaactggtgggccgcagtgatcacatatgtgattgaattcttcctgtatgtctacgtgacttgcaagaaaccggacgtgaactggggcagctcgacgcaggccctgtcctacgtatccgccctggataacgctctggagctgaccaccgtcgaggatcacgtgaagaatttcagaccccagtgtattgtgctgacaggcggaccgatgaccagacctgctctactggatataacgcacgccttcaccaaaaattcaggactttgcatctgttgcgaggtgttcgttggaccccgcaaattatgtgtgaaagaaatgaacagcggcatggccaagaaacaagcctggcttatcaagaataaaatcaaagccttctatgcagctgtagccgcggattgcttccgcgacggagtgcggtctttgctccaggcctccgggttaggtaggatgaagcctaatactctagtgataggctacaaaaaaaactggaggaaggccccgttgaccgaaatcgaaaattacgtcgggatcatccatgatgcgttcgatttcgaaatcggcgtggtgatagtgagaatttctcagggattcgacattagccaggtgctccaggtgcaggaagagctggagcgcctcgagcaggagcggctcgctctcgaggccaccataaaggataacgagtgtgaggaggagagcgggggtatcagaggactgttcaagaaggctgggaaactgaacatcacaaagaccaccccaaagaaagatggttcaatcaacacgtctcagtctatgcatgtgggagagttcaaccagaaattggtggaggcctctacgcagttcaagaaaaaacaggagaagggcaccatcgacgtctggtggctgtttgacgatggaggcctgactctccttatcccatacattctcaccctacggaaaaaatggaaagattgcaaacttagaatctatgttggcggcaaaatcaatcggatcgaggaggagaagatcgtaatggcatcactgcttagtaagttcagaatcaagttcgccgatattcatattatcggggatatcaacatccggcccaacaaggagagttggaaagtattcgaggaaatgatagagccatataggctccacgagagttgtaaggacctcactaccgccgaaaagctgaaaagagagaccccgtggaagatcaccgatgcagagctagaggcagtgaaggagaagtcctaccgacaggttcgacttaacgagctgctgcaagagcattcaagggcagcaaacttgatcgttttatcacttcccgtggcccgaaaaggatcgataagcgacttgctgtacatggcgtggctggaaattctgacaaaaaacctcccgccagttttgctcgtgaggggaaatcataagaacgttctgaccttttacagc

SEQ ID NO: 71539 - DNA, 3297 bp, Artificial Sequence
  derived and/or modified sequence
atgagtcttaacaattcatctaacgtttttttagatagtgtaccttcaaatactaatagatttcaagtttcagtgattaacgaaaatcatgaaagttctgctgctgccgatgataatacagatcctccacattatgaagaaacttcttttggagacgaagcacaaaagcgtttaagaataagttttcgaccaggaaatcaagaatgttatgataattttttacaatctggagaaactgcaaaaactgatgcatcttttcatgcttatgattctcatacaaatacatattatcttcagacatttggacataatactatggatgctgttccaaaaattgaatattataggaacactggaagtatttcaggaccaaaagttaatagaccatcacttttagaaattcacgaacaattagctaaaaatgttgctgttacaccttcttcagccgatagggtcgctaatggagacggaattccaggtgatgaacaagcagaaaataaagaagatgatcaagctggtgtcgttaaatttggatgggttaaaggagttttagttagatgtatgcttaatatatggggagttatgttatttatacgattaagttggatcgtaggagaagcaggaattggacttggagttataataattgggctatcagttgttgttactactttaactggaatttcaatgtcagcaatttgcacaaatggagttgtacgtggtggtggagcatattatcttatttctagatcattaggaccagaatttggaggatccattggacttatctttgcatttgcaaatgcagttgccgttgctatgtatgtggtcggttttgcagaaactgttgttgatttgcttaaggaatctgacagtatgatggttgatccaaccaacgatatcagaataattggatctattacagtagttatattattaggtatttcagttgctggtatggaatgggaagcaaaagcacaggtaatattattagttatacttctcattgcaattgctaatttctttattggtactgtgattccaagtaataatgaaaaaaagtctagaggattctttaactatcaagcatctatttttgcagaaaatttcggaccaagattcactaagggagaaggatttttttcagtatttgctattttctttccagctgctactggaattcttgcaggagcaaatatatctggagatttagaagatccacaagatgcaattccacgtggtactatgctcgcaatttttataacaactgtggcttatcttggagtagctatttgtgtaggagcatgtgttgtaagagatgctactggaaatatgaatgatactattatttctggaatgaattgtaatggttctgctgcttgcggtttaggttatgattttagtagatgtagacatgaaccatgtcaatatggacttatgaataactttcaagtgatgtctatggtttcaggatttggaccacttatcactgcagggatttttagtgcaacattatcatcagctttagcatcattagtaagcgcaccaaaagtttttcaagcactttgtaaagataatatttataaggctttgcaatttttcgctaaagggtatggtaaaaataacgaacctttacgaggatatatattaaccttcttaatagcaatggcatttatattaatcgctgaactcaacacaattgctccaataatttctaatttttttttggcttcatatgcattaatcaatttctcatgttttcatgcttcttatgctaaatctccaggatggagaccagcttatggaatttataacatgtgggtatccttatttggtgctgttttgtgttgtgcagttatgtttgttattaattggtgggcagcagtcataacttatgttattgagttttttttatatgtttatgttacttgtaaaaagccagatgttaattggggaagttcaacacaagcactttcctatgtttcagctcttgataatgctcttgaattaacaacagttgaagatcatgttaagaactttagaccacaatgtattgtactcactggaggacctatgacaagaccagctttactagatattacacatgcattcacaaaaaattcaggactttgcatttgttgtgaagtttttgttggacctagaaagctttgtgttaaagaaatgaacagtggaatggctaaaaagcaagcttggttgattaagaataaaattaaagctttctatgctgctgtcgcagctgattgtttcagagatggagttagatccttattacaagcaagtggattaggacgtatgaagccaaatacacttgttattggatataaaaaaaattggagaaaagctccacttacagaaatagaaaattatgtaggtattatccatgatgcttttgatttcgaaattggagtagtaattgttagaattagtcaaggttttgatatttcacaagttttgcaagttcaagaagaacttgaaagattagaacaagagagattagctttagaagcaacaattaaggataatgaatgtgaagaagaaagtggtggaattagaggtcttttcaaaaaagctggtaaattaaatattacaaaaacaacaccaaagaaagatggatctataaatacatcacaatctatgcatgttggagaatttaatcaaaaacttgttgaggcttcaacacaattcaaaaaaaaacaagaaaaaggaactattgatgtttggtggttatttgatgatggaggtttaacattattaatcccatatatattaactcttagaaaaaagtggaaagattgtaaacttagaatttatgttggaggaaaaattaaccgaattgaagaagaaaagattgttatggcaagtttattatccaaattcagaattaaattcgctgatattcatattattggggacatcaatattagacctaataaggaatcttggaaagtttttgaagaaatgatagaaccatatagacttcatgagtcttgtaaagatttaactacagctgaaaagttaaaaagagaaactccttggaagattactgatgctgaattagaggctgttaaagaaaaaagttatagacaagttagattaaacgaattattacaagaacatagtagagctgctaatcttattgtactttcattgccagttgcaagaaaaggaagtatttcagatcttctttatatggcatggcttgagattttaacaaaaaacttacctccagtattattagttagaggtaatcataaaaatgttttaacattttattca

SEQ ID NO: 71540 - DNA, 3297 bp, Artificial Sequence
  derived and/or modified sequence
atgtcacttaacaattcatcaaacgtgtttctggatagcgtgccatcgaacacgaaccgcttccaagtctcagtgattaatgaaaaccatgaatcatccgcagcagcggatgataacactgatcccccgcactacgaagagacttcgtttggtgacgaagcccaaaaaagacttaggatctcctttagaccggggaatcaagaatgctacgataactttttgcagtccggcgagactgcaaagaccgatgctagctttcacgcgtacgattcacatactaacacttactaccttcaaacctttgggcataataccatggacgccgtgcctaaaatcgagtactatcgaaatactggttcgatttcagggcctaaggttaatagaccctccctgctcgagattcatgagcaacttgcaaagaatgtcgcagtcaccccttcgtcagccgatagagtggccaacggggatggtattcccggagatgaacaagcagagaacaaagaagatgatcaggccggggtcgtcaagttcggatgggtgaaaggtgtcttggtccgatgtatgttgaacatttggggagttatgctctttatacgtctctcgtggattgtcggagaggcaggcataggtcttggagtgatcattatcggactgagcgtcgtcgtgactaccctgaccggaatttcgatgtcggcaatttgcaccaatggcgtggtgagaggtgggggagcttactaccttatttctcgttcgcttggtcctgagtttggggggagcattggactgatttttgcgtttgccaatgcggtggccgtcgcgatgtacgttgtcggttttgcagaaaccgtcgtggacctgctcaaggagtcagattcaatgatggtggatcccaccaacgatattcggattatcggatcgattaccgtcgtgattcttctgggtatctcagtcgcagggatggaatgggaggcaaaagctcaagtgatccttcttgtcatcctgttgatagcgatcgcaaacttctttatcggaaccgtcattccgtcgaataatgagaagaaatcgagggggttctttaactaccaagccagcatttttgcagagaactttggtcctcggttcactaaaggcgaagggtttttctccgtgtttgcaatcttcttccctgccgccactggtattctggcaggtgccaacatttcaggtgacctggaagatcctcaggatgcaatacctagaggaaccatgctcgctatattcattaccactgtggcatacctgggagtggcaatttgtgtgggcgcatgtgtggtgcgagatgcgaccggaaacatgaacgataccataatctcaggcatgaactgtaacggatcggcagcctgtggactgggatatgatttctccaggtgtcgtcatgagccttgtcagtacggactgatgaataactttcaagtgatgtccatggtgagcggttttggcccgctgataaccgcaggaattttctcagcaactctcagctccgcacttgcctcactcgtgtcggcaccaaaggtgttccaagccttgtgcaaggataacatttacaaagcgctgcagttttttgcaaagggatacgggaagaacaacgagcctctgcgggggtacatcctgacttttctgattgcaatggcattcatcctgatcgcagaacttaacactatagcgcccatcataagtaatttcttcctggcaagctacgcactgattaacttctcgtgttttcatgcctcgtatgctaagtcacctggctggcgtccggcatacggcatttacaatatgtgggtgtccctttttggagcagtgctgtgctgcgccgtcatgtttgtcattaactggtgggcagctgtgattacttacgtgattgaattctttctgtacgtgtacgtgacttgcaagaagcctgatgtgaactggggctcctcgactcaggcactttcatacgtctcagcgctcgacaacgcacttgaactgactacggtggaagatcacgtgaagaacttcagaccacaatgtattgtgctcaccggggggccaatgactcggcctgcgctcctcgatatcacgcacgcgttcaccaaaaacagcggactgtgtatttgttgtgaagtgttcgtcggtcctaggaagctgtgtgtgaaggaaatgaacagcggcatggcaaagaagcaagcatggctgatcaagaacaagatcaaggcattctacgctgcggtggcagcagattgttttcgcgatggtgtcagatccctccttcaagctagcggcctgggccgaatgaagccaaacaccctcgtgattggttacaaaaagaactggcgaaaggcaccgcttaccgagattgagaactacgtggggatcattcacgatgcatttgacttcgaaataggggtggtgattgtgagaatctcccagggttttgacatttcgcaagtgctccaagtgcaggaagaacttgaacgcctggagcaagaacggctcgcactcgaggcaaccattaaggacaatgagtgtgaggaagaatccggtgggatacgggggctcttcaaaaaggcaggaaaactcaacattactaagaccactcccaaaaaggatggatcgatcaacacttcccagtcgatgcacgtcggggaattcaatcagaagctggtggaagcgtccacccagttcaagaaaaagcaggaaaaaggaaccattgatgtgtggtggctgtttgatgacggtggactgactctgcttattccatacattctgactctgaggaaaaagtggaaggattgtaaacttaggatctacgtgggaggcaagatcaaccggattgaagaagagaagatcgtgatggcgtccctcctgtcgaagtttagaataaagtttgcagatattcatatcatcggggacattaacatcagacccaacaaggaaagctggaaggttttcgaagaaatgatcgaaccataccgactgcatgagtcctgcaaggatctcactacggcagaaaaacttaaacgggaaaccccatggaagatcaccgatgcggaacttgaggcggtcaaggagaaatcctaccgtcaggtgagattgaacgaactgctgcaggaacatagcagagcagcaaacttgattgtgctctccctgcctgtggcaagaaagggtagcatctcggatctcctctatatggcatggcttgaaatcctgaccaagaatcttccgccagttcttctggtccggggaaaccacaagaatgttctgaccttctactcc

SEQ ID NO: 71541 - DNA, 3297 bp, Artificial Sequence
  derived and/or modified sequence
atgtccctgaacaattcctctaatgttttcttggattccgtcccatcaaatacaaaccggtttcaagtttccgttattaatgaaaatcacgagtcatccgctgccgccgacgataataccgatcccccacattatgaagagaccagttttggagacgaagcccaaaagcgactgcgaatcagcttccgcccaggcaaccaggagtgttatgacaactttttacaatcaggggagacagctaagacagacgcatctttccacgcttacgactcccataccaacacctattatcttcagacatttggtcacaacactatggacgccgtgcccaaaatcgaatattatcgcaacacaggatccattagcgggccgaaggtgaacaggccatcacttcttgagattcatgagcagctggccaaaaacgttgcagtgaccccctctagcgcggaccgcgtggcgaatggcgacggtattccaggtgatgagcaagccgagaacaaggaggatgaccaggcgggcgtggttaagttcggatgggtgaagggggtgttggtgcgatgtatgcttaatatctggggagtcatgttgttcatccgcttaagttggatcgtgggcgaggccggtattgggctcggggtgataattatcggtctgagcgtggtggtgactaccctcaccggcatctccatgagcgccatctgtacaaatggagttgtgcggggcggaggagcatactacttgatctcaaggagccttggtcccgagttcggaggtagcatcgggcttatctttgccttcgccaatgcggtggccgtggccatgtatgtggtcggctttgctgaaacagtcgtggacctgctcaaagaatccgacagtatgatggtcgatcccactaacgacattaggatcattggctcgataacagtggtcatcttgcttggcatcagcgtggcgggaatggaatgggaggctaaagcccaggtgatcttgctggtcatcttgcttatcgccatcgcgaacttttttatcggaacggtcatcccctcaaacaatgagaaaaagtcccggggattcttcaactatcaggcctccatttttgctgaaaacttcggacctcggttcaccaaaggcgaaggtttcttctcagtgtttgctatttttttccctgccgctaccgggattctcgccggagcgaacatctccggggatctggaagatccccaggatgcgatcccgcgaggaactatgcttgcaattttcattacaacagttgcctacctcggagttgctatttgcgtaggggcctgtgttgtaagggacgccacggggaacatgaatgacacaatcatctctggtatgaactgcaatggatcggcagcctgcgggctcggatacgatttctcacgatgtcgccacgaaccatgccagtacggactcatgaataacttccaagtaatgtcaatggtctcagggttcggtcccctcatcactgccggtattttttccgccacattgtcctcagccctcgcgagtttggtatcagcccctaaagtgtttcaggctctgtgcaaagataatatatataaggcccttcaattcttcgccaaggggtacgggaagaacaatgaacctctaaggggatatatattaaccttcctcatagctatggctttcatcctgatcgcagagcttaatacaatcgcccctatcattagcaacttttttctcgcatcttatgctctaattaatttttcctgtttccatgccagctatgccaaaagcccaggatggcggccagcctatggaatttacaacatgtgggttagcctattcggcgctgtgctttgctgtgcagtgatgtttgtcattaactggtgggcagccgttataacgtatgttattgagttcttcctgtatgtttacgtcacatgcaagaagcctgatgtcaactggggcagcagcacccaagcactctcttatgtatctgccctggacaatgccctggagctcactacagtcgaggaccacgtgaagaacttcagaccacaatgtattgtcctgaccgggggtcccatgacacgacctgcccttttggacatcacccatgccttcactaagaactctggactgtgcatatgctgtgaggtctttgtgggccctcggaaactgtgcgttaaagaaatgaattccgggatggcaaaaaaacaggcttggcttataaagaataagatcaaggctttctacgccgccgttgctgcggattgcttccgggatggcgtcagatcactcctacaagccagtggcctcggtcgaatgaaacctaatactttggtgattggctataaaaagaactggagaaaagctcctttaacggagatcgagaactacgtcggcattatccacgacgctttcgacttcgaaataggtgtagtgattgtccgcatttcccagggattcgacatatcccaggtcctgcaggttcaggaggaactggagagattagaacaggaaagattggccctggaggccaccattaaagacaacgaatgtgaggaggagtcgggggggattcgagggttgttcaagaaggctggaaagctaaacatcacaaaaaccacccccaaaaaagacgggtccattaatacatctcaaagcatgcacgttggagagtttaaccagaagctggtggaggcctccactcaattcaaaaaaaaacaggaaaaaggtacgatcgatgtgtggtggctctttgatgatgggggtttgacgcttcttatcccttacatcttgactttacgtaagaaatggaaggattgcaaactccgtatatacgtgggagggaaaattaatagaatcgaagaggagaaaatcgtgatggcttcactactgtcaaagttccgcataaaattcgctgacatacatataataggcgacatcaatattcggcccaataaggaatcctggaaggtttttgaggagatgatagaaccctacaggcttcatgaatcttgtaaggatctcaccacagcagagaaactcaagagagagaccccatggaagattacagacgcagaattggaggccgtcaaggaaaaaagttatcggcaggtgcggcttaatgagttactgcaggaacacagccgagcagccaacctaatagtgttgagtctacctgtggcgaggaagggaagcatatccgacttgctctacatggcttggttggagatcctaaccaagaaccttccccctgtgctgctggtgagagggaaccataaaaacgtcttaaccttttacagt

SEQ ID NO: 71542 - DNA, 3297 bp, Artificial Sequence
  derived and/or modified sequence
atgtcattgaacaactccagcaatgttttcctggactctgtgcccagtaacacaaataggttccaagtctcggtgataaacgagaatcacgagtcttccgcagccgcagacgataataccgatcccccccactacgaggaaactagctttggcgatgaagctcagaaacggctgagaatttctttccgacctggtaaccaagagtgctacgacaattttctgcagtcaggagagaccgccaagacagatgcctcgtttcacgcatatgatagtcacacaaacacatactatctccagactttcggccacaacactatggacgctgtgccgaagatcgagtattaccgaaatacagggtccattagtggccctaaggtgaacaggccctccttgttggaaattcatgaacagctcgccaagaacgtggcagtcacaccaagctctgcagaccgagtagccaacggagacggcattccgggcgatgagcaagccgagaataaagaggacgatcaggcaggtgtggtcaagttcgggtgggtcaagggcgtgctggtacggtgcatgctgaacatctggggtgttatgctgttcatacgattgtcctggatcgtaggggaagccgggatcggcttaggagtgataatcataggcctgtccgtcgtcgttactacgctgaccgggattagcatgagtgcgatttgtacaaatggggtcgttcgcggtggcggcgcgtactacctgatcagtcgcagcttaggccctgaattcggcgggagcataggcctaatatttgctttcgccaacgctgtggctgtggcgatgtatgtggttgggttcgccgaaacagtggttgatctgttgaaagaatcagatagcatgatggtggaccccaccaatgacattagaataataggcagcatcaccgtggtaattcttttgggtatctctgtcgccggcatggagtgggaagccaaggcccaagtaattctgctggtgattctgctgatcgccatcgcgaatttctttatcggtacggtgattccctcaaacaacgagaagaagagtagggggttttttaactatcaggcttcaatatttgccgaaaattttgggcccaggtttaccaagggagaggggtttttttcagtcttcgcgattttcttccccgccgccactggcatactggccggcgctaatatcagtggcgacctggaggatccacaggatgctatcccaagggggactatgttggcaatttttatcaccactgtggcctacttgggggtggccatctgtgttggagcttgtgtggtacgcgacgctaccgggaacatgaatgacactattatttcaggcatgaattgcaatggttcggctgcctgtggccttggctacgacttctctcggtgtagacatgagccgtgccagtacggcctgatgaataattttcaggtcatgagcatggtcagtggattcgggcctttgataacagcgggaatatttagcgccaccctgagctcagcgctcgctagcctggtctcggccccaaaggtgtttcaggctctgtgcaaagacaacatttacaaggctctccaattctttgccaagggatacggaaagaacaacgaacctttgaggggatatatcttgacgttcctgattgccatggccttcatattgatcgccgagctgaatactattgctccaataatcagcaattttttcctagccagttatgcccttataaatttcagctgctttcatgcctcatacgcaaagagtccgggctggaggccagcttacggaatttataatatgtgggtatcgttattcggagccgtattgtgctgcgccgtaatgtttgtgatcaattggtgggcggccgtgatcacttacgtgattgagttttttctttacgtatacgtgacttgtaaaaagcctgatgtgaattggggtagctctacacaggcactctcctacgtaagtgcccttgataacgctctcgagcttaccaccgtggaagatcacgtgaagaattttcggccacagtgcatcgttttaaccggtgggcccatgactcgacctgctcttttggatattacccatgcgtttactaaaaattctggcctctgcatttgttgtgaggtcttcgttggacctaggaagctatgcgtgaaagagatgaattccgggatggccaagaagcaggcatggctgattaagaacaaaattaaagccttctacgcagccgtagcggctgattgtttccgcgacggagtgcgtagtttgttgcaggcgtccgggcttggtcgtatgaaaccaaacaccctggttataggatacaagaaaaattggcggaaggcccccctcactgagattgaaaactacgtcgggatcatccacgacgcttttgactttgagatcggggtggtcattgtgaggatttcacagggattcgacatcagccaggtcctccaagtgcaagaagagctggaaagattagaacaggagaggctcgctctcgaagccaccatcaaggacaacgagtgcgaggaggaatctggaggaatccggggtcttttcaagaaggcgggaaagctcaatatcactaagacaacccctaaaaaggacggaagtatcaatacatctcagagcatgcacgttggggagtttaatcaaaagcttgtggaggcttctacacagtttaaaaaaaaacaggagaaggggaccatcgatgtgtggtggctctttgacgacggagggctgaccctgttgattccatacatcctgacattacggaagaagtggaaggactgtaagctgcggatttacgtcggcggcaaaatcaatagaatagaggaagaaaagattgtgatggcctcactgctcagtaaattcaggattaaatttgccgacatacacattatcggagatataaatatccggcctaataaagagtcgtggaaagtgttcgaggagatgatcgaaccctaccggttacacgaatcctgtaaggacctgacaacagccgaaaagctgaagcgggagaccccctggaagataactgatgcagagcttgaagccgtcaaggaaaagtcctaccgtcaggttcgtctcaatgagttgctgcaagagcattcccgggcggctaatcttattgttctgagtctgccagttgcgaggaagggttcaatctcggacctgctgtacatggcttggttagagatcttgaccaagaacctgccccctgtgttgcttgttcgaggtaatcataagaatgtcttgactttttattcc

SEQ ID NO: 71543 - DNA, 3297 bp, Artificial Sequence
  derived and/or modified sequence
atgtcactcaacaacagctcaaatgttttccttgactcggtcccttccaacacgaaccgcttccaagtgtctgtgatcaacgaaaaccacgagtccagtgcggcagccgacgacaacaccgacccgccacattacgaggagacttcgtttggggacgaagcgcaaaagcggctcagaatctccttcagaccaggcaatcaggaatgttatgataacttcctgcaatcaggggaaaccgccaaaaccgacgcctcgtttcatgcctacgactcacacacgaacacctactaccttcaaacgttcggacataataccatggacgcggtacctaagatcgaatactaccgcaacactgggagcatctcgggcccgaaggtgaatcggcctagcctccttgagatccacgaacagctcgcaaaaaacgttgccgtgactccgagttccgcggatcgcgttgcaaacggtgacggaatcccgggcgatgagcaagcggagaataaggaagatgatcaggctggagtggtgaagttcggatgggtgaaaggagtgttggtgcgttgcatgttgaacatctggggtgtgatgctgttcatccggctcagctggatcgtgggagaggccggcataggcctcggtgtgatcatcattgggctgagcgtggtcgtgaccaccctgaccgggatctccatgtccgcgatttgtaccaacggtgtcgtgcgagggggcggggcttactacctgatctcacggagcctgggaccggagttcggtggctcgatcggactgatcttcgcatttgctaacgcagtggccgtcgctatgtacgtggtcggattcgcagaaaccgtggtcgatctgctcaaagaatctgattctatgatggtggacccgactaacgatatccggatcatcggatcgattaccgtggtgatccttctcgggatatccgtggcgggcatggagtgggaggcgaaggcacaggtgatcctgctggtgattctcctcatcgccatcgctaactttttcatcgggacggtgattccaagtaacaatgagaaaaagagcagaggatttttcaattaccaagccagcatcttcgccgagaatttcgggccaagattcactaagggagaaggtttcttttcggtgttcgcgattttcttccctgccgccaccggcatcctcgcgggtgccaatatctcgggagatctcgaggacccacaagacgctatccccaggggtactatgctcgctattttcatcaccaccgtggcctaccttggagtggcgatctgcgtgggcgcgtgcgtggtccgcgatgccaccggaaacatgaacgacaccatcatctcaggaatgaactgcaacggatcggcggcctgcggacttggatacgatttctcacgctgccgtcatgagccttgccagtacggccttatgaataactttcaagtcatgtccatggtgtcaggattcggacctctgatcactgctggcatcttctcagccacgctgtcctccgcactggcctcgctcgtcagtgctccgaaagtgttccaggcgctgtgcaaagacaacatttacaaagccctgcagttcttcgcaaagggatacggaaagaacaacgaaccactgagaggctacatcctgaccttcttgatcgccatggcgttcatcctgatcgcagaactgaatactatcgcccccatcatatcaaatttctttctggcctcgtacgcgttgatcaatttcagctgcttccacgcaagttacgccaagagcccaggatggcgccccgcctacggaatttacaacatgtgggtgtcgctgttcggggccgtcctgtgttgtgccgtcatgttcgttatcaactggtgggcggccgtcatcacctacgtgatcgaattctttctctatgtctatgtgacctgcaagaagccggacgtgaattggggttcgagcactcaggccctgagctacgtctctgcactggataacgctctcgaattgaccactgtcgaggaccacgtgaagaacttcagaccccagtgcatcgtgctcaccggagggccgatgaccagaccggcgctcctcgatatcactcacgctttcactaagaactcaggactgtgtatctgttgcgaggttttcgtcggaccgcgcaagctctgcgtgaaggaaatgaattcaggaatggccaaaaagcaggcttggctgatcaaaaacaagattaaggctttttacgctgcagtggccgccgactgcttccgcgacggagtccgctcactcctgcaagcctccggcctcggaaggatgaagccaaacactctggtgataggatacaaaaagaactggcgcaaggccccgcttacggaaattgaaaactatgtaggaattatccacgatgcgtttgacttcgagatcggtgtggtcatcgtgcggatctcacagggcttcgatatctcgcaagtgttgcaggtgcaggaggaattggagcgcctcgaacaggagcggctcgcactggaagccactatcaaggacaatgaatgcgaagaagaatccggtggaattcggggactgtttaagaaggctggaaaactgaatatcactaaaactactccgaaaaaggatggaagcatcaacacttcgcagtccatgcatgttggtgaattcaatcagaagctggttgaagcgtcgacccaattcaaaaagaaacaggagaagggcaccatcgacgtgtggtggctgtttgacgacgggggcctgactttgctcatcccatatatccttactttgcggaagaagtggaaggactgtaaactgcgcatctacgtgggagggaagatcaatagaattgaggaggaaaagatcgtcatggcaagcctgttgtcgaagtttaggatcaaatttgcggatatccacatcatcggggacatcaacattcgaccgaataaggaatcgtggaaggtgttcgaagaaatgatcgagccctaccggctgcacgagtcctgcaaggatttgaccaccgcggagaagctgaagcgagaaaccccttggaagataacggacgccgaactcgaggctgtgaaagaaaagtcctaccgacaggtccgcctgaacgagctgttgcaggaacattccagggcagcgaatcttattgtcctctcgctgccggtggcaagaaaaggcagcatcagcgacctcctctacatggcctggctcgagatactgactaagaacctgccgccggtgctgctggtgaggggcaatcacaaaaacgtgctcactttttactca

SEQ ID NO: 71544 - DNA, 3297 bp, Artificial Sequence
  derived and/or modified sequence
atgagcctgaataatagtagtaatgtctttcttgattctgtgccctccaacaccaatcgatttcaggttagcgtgatcaatgagaaccacgagagttccgccgctgccgacgataacaccgaccctccacactatgaagagaccagctttggcgacgaagcgcagaaaagactgcgcattagcttcagaccaggcaatcaggagtgttacgataactttctgcaatcaggagagaccgccaagacagatgcttcctttcatgcatacgacagtcatacaaatacctattatttgcagacctttggtcacaatactatggacgcggtaccaaaaatcgagtattaccgaaacaccggctctatatcaggtccaaaggtcaatcgcccctccttgctggagatacacgagcagttggctaagaatgttgccgtaacaccctctagtgccgacagggtcgcaaatggggacgggattcctggcgacgaacaggccgagaataaggaggatgaccaggccggggtagtgaaattcggttgggtaaagggagtgcttgttcgatgtatgctcaacatatggggagtgatgctcttcattcggctaagttggattgtgggtgaagcgggtattggtctcggggtgattatcatcggactgtctgtggtggtcacaactctcactggtatttctatgagtgcaatctgcacaaatggggtggtgagaggaggtggagcgtactacctgatttctcgctctctcggccccgagttcggaggctcgatcggacttatcttcgcttttgcgaacgcggtggctgtggctatgtacgtcgttggatttgccgaaaccgttgtggaccttctcaaagaatccgactcaatgatggttgatcctaccaacgatattcgtataattggctcaatcactgtggtgattttactcggtatctcggtcgcagggatggaatgggaggctaaggcccaggttatcttgcttgtaattctgctgattgccattgctaatttctttattggcacagttatcccttctaataacgaaaaaaagagccgcggattcttcaattatcaggcaagcattttcgcagagaacttcggccctaggttcactaagggggaaggctttttcagcgtcttcgcaatcttttttcccgcagccaccggcatactggctggggcaaatattagtggtgaccttgaggacccgcaagacgctattcccaggggcacaatgctcgctatcttcattaccactgtcgcctacctgggagtggccatctgtgtaggagcatgtgtggttcgcgatgcgacaggcaatatgaatgacacaataatctctggcatgaactgtaatgggtcggccgcttgcggccttggatacgacttctcccggtgccgccatgagccttgtcagtacggactgatgaataactttcaagtcatgagtatggtctctggattcggcccacttattactgcgggcatcttctcggccactctgagtagcgcactggcaagcctggtctctgcacccaaagtgttccaggcactttgcaaggacaatatatataaagccctgcaatttttcgctaaaggttatggaaagaacaatgaaccgctccgggggtatattctcacattccttatagccatggccttcattttgattgccgagctgaacactatcgctcccataatttcaaacttcttcttggcatcttacgccctgataaatttcagctgctttcatgctagctatgctaagtctcccggatggaggcccgcctacggcatatataacatgtgggtgtcactgttcggggccgtactatgctgcgcagtgatgttcgtaataaactggtgggctgctgtgatcacctatgttatcgagttttttctctatgtctacgttacctgtaaaaagcccgatgtcaattggggcagctctacccaggcactgagttatgtgtcagcacttgacaatgcgcttgaattgactacagttgaggatcacgtgaagaactttcgtccacagtgcattgttctgactggaggacctatgacccgacccgcccttctggacatcacccacgccttcactaaaaactcaggactgtgtatctgctgtgaagtatttgtcgggccgcggaaattgtgcgtgaaagagatgaactcaggtatggctaaaaagcaggcttggctgattaagaataaaatcaaggctttctacgcggctgtcgcggcagattgttttcgcgacggtgtgaggagcctgctacaggcatcgggcctcggaaggatgaagcctaacactttggtcataggctacaagaagaactggagaaaagcacccctgaccgagatagagaattacgtgggcatcattcacgacgcgttcgacttcgagatcggagtggtcatcgtgaggatcagccagggcttcgacatttcacaggtgcttcaggtacaagaagaactggagcgcttggaacaggaaagattggcactcgaggccacaatcaaggacaatgagtgcgaggaagagtccggtggtatccgtgggctttttaagaaggccggaaagctcaatatcaccaagacaacacccaaaaaggatggctctatcaatacttcccagtccatgcacgtcggcgaattcaaccagaaactcgtggaagcctcaacacagtttaagaagaagcaagagaagggcaccatcgatgtttggtggctctttgatgacggcggtctgactctcctgataccatacattctgacattacgaaaaaaatggaaggactgcaaactgcggatttatgtgggcgggaagatcaataggattgaggaagagaagattgtgatggcaagcctgttgtctaaatttagaatcaaatttgctgatatccacatcatcggtgatattaacatccggcccaataaggaatcttggaaggtgttcgaagaaatgattgagccgtaccggcttcacgagagctgtaaggatctgaccaccgcggaaaagctgaagcgagagaccccgtggaagatcactgacgctgaactcgaagccgtcaaggagaaaagctatagacaggtcagactgaatgaactgctgcaggagcacagtcgggccgccaatctgattgttttgagtctgcctgtcgctcgcaaggggagtataagtgacctgctttacatggcctggctggagatcttgaccaaaaatctgcctcctgtgctgctcgttagagggaatcataaaaacgtattgaccttctacagc

SEQ ID NO: 71545 - DNA, 3297 bp, Artificial Sequence
  derived and/or modified sequence
atgtccttgaacaattcatctaacgtctttctggacagcgtgccatccaacacaaacaggtttcaggttagtgtaattaacgagaaccacgaaagtagtgccgcggccgacgacaatacagatcccccccattatgaagaaactagttttggggacgaggcccagaagcgactgcggatctccttccggccaggtaaccaggagtgttatgataactttttgcagtctggcgagaccgctaaaactgacgcttccttccatgcatatgactcacacaccaatacgtactatctgcagacctttgggcacaatactatggacgcggtaccaaaaatcgaatactacagaaataccggatctatcagcggccctaaagttaaccggccttcgctgttggagatccatgaacagttagccaaaaacgtagccgtgactccatcttcggccgatagagtggctaatggagacggcatccctggggacgagcaggcagagaacaaggaggatgaccaggccggagtcgtcaaattcggatgggtgaagggagtcctggtgcggtgtatgcttaacatctggggtgtgatgctttttattcgcctttcatggatcgtgggcgaggccggcatcggtctgggcgtaattatcattggactgtcagtcgtcgtgaccacccttacaggtataagtatgagcgcgatctgtaccaacggggtggtgaggggaggcggggcttactatctgatatcccgctccctgggccctgaattcggcggcagtatcggcttaatctttgcctttgcaaacgctgtggcggtggcaatgtatgtggtgggtttcgcggaaacagtagtggacctgctaaaagaatctgactccatgatggttgatccaaccaatgacattagaattatcggctctatcactgtggtcatacttctcggaattagcgtggcgggtatggaatgggaagcgaaagctcaagttatacttctggtgattctcttgatagccatcgccaattttttcatcggcaccgtgattcctagtaataacgagaaaaagtctcgtggattttttaactatcaagccagcatttttgctgagaatttcggtcccagattcactaaaggcgaagggttctttagcgtgtttgctatctttttccctgcagcgactggcatcctggcaggggcgaatatatctggagatctggaagacccccaggatgccatacccagaggaaccatgctggcaatattcatcacaaccgtggcctacttgggagtggccatttgtgtcggagcatgcgtagtcagagatgcgaccggaaatatgaacgacactattataagtggaatgaattgcaacggcagcgcggcttgtggactgggctacgactttagtcggtgtaggcacgagccctgccagtacggcctgatgaataatttccaggttatgtctatggttagcggatttggaccgctgataactgccggtatattctccgcaacactctcgtcagctctggcgagccttgtctccgcccctaaagtgtttcaagcgctgtgtaaagataacatctacaaagctctccagttctttgcgaaggggtatggaaagaacaacgaacccttgcgggggtatattctgacctttctaatcgccatggcgtttatcctgatcgcagagctgaatacaatcgcccccatcatttctaacttttttctcgcaagctatgcactcattaatttcagctgcttccatgcctcctatgcaaaatctcctggctggcgcccagcctacggcatttacaatatgtgggtgagcttgtttggtgcagtactatgttgtgcggtcatgttcgtcattaattggtgggccgctgtaattacttacgtaatcgaattctttctctatgtctatgttacgtgcaaaaagccagacgttaattggggctcctcaacccaggccttaagttacgtgagcgcactagataacgcgctggagttgacgacagtcgaagatcacgtaaaaaactttagaccgcaatgtatcgttctgaccggagggcctatgacacgccctgccctactggacataactcacgccttcaccaagaacagcggcctgtgtatatgctgcgaggtgttcgtcggcccaagaaagctctgtgtcaaagaaatgaacagcggcatggctaagaagcaggcgtggctcatcaagaacaagatcaaagccttttacgctgctgtggcggctgattgttttagggacggagttaggagcctcctgcaggcatcgggactgggtcgaatgaagccaaacacactggtaattggctataaaaagaactggaggaaggctccattgacagaaatcgaaaattacgttgggataatccatgatgcttttgactttgagatcggggtggtgatagtaaggatatcccagggtttcgacatctcacaggttctacaggttcaggaagaactggaacggctggagcaggaacggctggccctcgaagccaccattaaagacaatgagtgcgaggaggaatctgggggcataagggggctgttcaaaaaggcaggtaaactgaatatcacgaaaaccacccctaagaaagacggctccatcaacacctcccagagcatgcatgtgggcgagttcaaccagaagctggtcgaggcatccacccagttcaagaaaaaacaggagaaagggaccattgatgtctggtggctctttgatgatggcgggctgaccttgctcattccctacatcctgactctacggaaaaaatggaaagactgcaagctgcgcatttacgtgggaggtaaaatcaatcgcatcgaagaagagaagatagtcatggcctcactattgagcaagtttaggattaaattcgccgatattcatattattggtgacattaacattcggccaaacaaggaaagctggaaagtgttcgaggagatgatagaaccttatcggcttcatgaatcttgcaaagatcttactaccgctgagaaactgaaacgggagacaccatggaaaattaccgacgccgagctcgaggctgttaaggagaagtcctatcggcaggtgcggttgaacgaactgctccaggagcatagtcgtgctgccaatttgatcgtgctgagcctgcccgtcgccaggaaggggagtatctctgacctcctgtacatggcatggctagaaatcctgacaaagaatctcccgcctgtcctccttgtgagggggaaccacaagaatgtcctgactttctactca

SEQ ID NO: 71546 - DNA, 3297 bp, Artificial Sequence
  derived and/or modified sequence
atgtctctgaataacagctccaacgtgttcttggactccgtgccttcaaacacaaacagattccaggtgtccgtgatcaatgagaaccacgaatcttccgctgccgctgacgataacactgatcccccacattacgaggagacctcctttggagatgaagctcagaaaaggttgcgtatttcctttagacccggcaatcaggagtgttatgataacttccttcagtccggcgagactgctaagactgatgcctccttccatgcttatgattctcacactaacacctattatctccagacctttggacacaataccatggatgcagtgccaaagattgaatactacagaaacaccggctccatttccggcccaaaagtcaaccgtccaagtctcctcgagatccacgagcagctcgccaagaacgtggccgtgactcctagctctgctgaccgtgtggcaaacggcgatggcatccctggcgacgaacaggctgagaacaaggaggacgaccaagctggagtggtgaaattcggatgggtcaagggagtcctggttcgctgtatgcttaatatttggggcgtgatgctcttcattaggctgagctggattgttggtgaggctggaatcggactgggcgtgatcatcattggtttgtctgtggtggtcaccaccctgacaggaatcagtatgtcagcaatctgcactaatggcgtcgtgaggggaggcggtgcctactacctgattagccgcagcctgggccctgaattcggaggttcaattggcttgattttcgctttcgccaatgcagttgctgtcgccatgtacgtcgtcggcttcgccgagactgttgtagacttgttgaaggaaagtgactcaatgatggtcgaccctaccaatgatattagaataataggatccattacagtagtgatcttgctcggtatcagcgtggccggaatggagtgggaagctaaggcccaggttatccttctggtcattctcctcatcgccatcgccaactttttcatcggaacagtcatccctagcaacaatgagaagaagagcaggggttttttcaactaccaggcttccattttcgctgaaaattttggtcctcgcttcactaaaggtgagggtttcttctctgtcttcgccatattctttcccgctgccaccggtattcttgcaggtgccaatatctccggagacctcgaggatccccaggacgctatcccccgcggtactatgctggccatattcatcactactgtggcctatctgggcgtggccatctgtgtaggtgcctgtgtcgtgagagatgccacaggaaatatgaacgacactattatcagcggcatgaattgtaacggatccgctgcatgtggccttggttacgatttctccaggtgccgccacgagccttgccaatacggcttgatgaacaactttcaggtgatgtccatggtatctggatttggacctctcattaccgccggaattttctcagccactcttagcagtgccctggctagcctggtaagtgctccaaaggtgtttcaggctctgtgcaaggacaacatctataaggcactgcaattctttgcaaagggctatggcaagaataatgagccactcagaggctacatcctgactttcctgatcgctatggcctttatcctgattgctgagctgaacaccatcgccccaataatcagcaacttctttcttgctagctacgctcttatcaatttcagctgtttccacgcatcatatgccaagtcccctggttggcgccctgcttacggtatttacaacatgtgggttagcctcttcggcgctgtgctctgttgcgccgttatgtttgtcattaattggtgggccgcagttatcacatacgtaattgagttcttcctgtatgtttatgtcacctgtaagaagccagatgtgaactggggttcaagcacccaggcattgtcctatgttagcgcactggataatgctctggaactgaccaccgtcgaggaccacgtaaagaacttcaggccccagtgtatcgttctgaccggaggcccaatgactcgtcctgctctgcttgacatcacccacgcatttactaagaacagcggactgtgtatctgctgtgaggtgtttgttggaccacgtaagctctgtgtgaaggagatgaatagtggaatggccaaaaaacaggcttggctgatcaagaataagataaaggccttctacgctgctgtggctgctgactgcttccgcgatggagtgaggtctcttctgcaggccagtggcttgggtcgtatgaaacctaataccctggtcattggatataagaagaactggaggaaggctccattgacagagatcgaaaactatgtgggaatcattcacgacgccttcgatttcgagatcggagtcgtcattgtacgtattagccagggatttgatatttcccaggtcctgcaggtgcaggaggagctggagagacttgagcaggaaaggctcgctcttgaggccaccatcaaagacaatgaatgcgaggaggaatctggcggtattcgcggactcttcaagaaggccggtaagcttaacatcacaaaaaccacaccaaagaaggatggcagtatcaacacttcacaatccatgcatgtgggtgaatttaaccaaaaactcgtggaagcctctactcaatttaagaagaagcaggagaagggaactattgatgtgtggtggctgttcgacgatggtggtctgacattgctcatcccatacatccttaccctccgtaagaagtggaaagactgcaaattgagaatttacgtgggcggtaaaataaaccgcatcgaagaggaaaagattgttatggcttccctgctgtcaaagttcagaatcaagtttgcagacatacatataatcggtgatatcaatatacgtcctaataaggaaagttggaaggtcttcgaagaaatgatagagccttacaggttgcacgagtcatgcaaggacctcaccacagctgagaagctcaagagagagaccccctggaaaattaccgacgccgagttggaggctgtaaaagaaaagtcttaccgccaagtaaggttgaacgagcttctccaagagcattcaagggcagctaacttgattgtgctcagccttccagttgcccgtaagggcagcatctccgacctgctgtacatggcatggttggagatcttgaccaagaacttgccacccgtgttgctggttcgcggcaaccacaaaaatgtgctgactttttacagc

SEQ ID NO: 71547 - DNA, 3297 bp, Artificial Sequence
  derived and/or modified sequence
atgagcttaaacaattcctccaatgtgtttctggacagcgtaccttctaataccaatcgtttccaagtaagcgtgataaacgaaaaccacgagtccagtgctgccgccgatgacaatacggacccacctcactacgaggaaacatctttcggcgatgaagctcagaaacgtctgcgcatctccttccggccgggaaaccaggaatgttacgacaacttcctgcagagtggagaaaccgccaagacagacgctagctttcatgcttatgattcacacaccaacacgtactatctgcagaccttcgggcacaatactatggacgcagtgcccaaaatcgagtactacagaaataccgggtcaattagtgggcctaaggttaaccgacccagccttcttgagatccacgagcagctagctaagaatgtggctgtgactccctctagcgcagatagagtggccaatggtgatggtatcccgggagacgagcaggcggaaaataaagaggacgaccaggcgggcgtggtcaaattcggctgggtgaagggcgtcttggtgaggtgtatgctcaatatctggggtgtgatgctctttattaggttgtcatggattgtcggcgaggccgggatcgggctgggggtgataataatcggattatccgttgtagtgactacgctgacgggaatcagcatgtctgctatatgcaccaatggggtggtgcgcggagggggagcttattatttaatatcccgcagcctggggcccgagttcgggggtagtatcggactgattttcgcattcgccaatgcagtagctgtggccatgtatgtggtgggattcgccgaaactgtagtggatctgttgaaggagtctgacagcatgatggtggaccccaccaatgatatccgaattatcggctccatcactgtcgttatactgctgggcatctccgtggccgggatggaatgggaagccaaggcccaggtaattttacttgttatcctactcattgcgattgctaatttcttcattggtactgttattcctagcaataacgaaaagaagtcccgcgggtttttcaattatcaagctagcatctttgctgaaaacttcggaccacggttcacaaaaggggagggcttttttagcgttttcgccatttttttcccggctgccacgggcattctagcaggagctaacatatctggggacctggaagatccgcaggatgcgattccaaggggcacaatgctggcaatctttattaccacagttgcatacttgggcgtagccatctgcgtgggggcgtgcgtggtgagggacgcaacaggaaacatgaatgacaccatcatttccggaatgaactgcaacgggtctgcagcatgcggactcggttacgatttctcacggtgccgccatgaaccttgtcagtacggtctgatgaacaattttcaggtaatgtccatggtgagcggctttggcccactgattacggcgggcatattttctgctaccctctcctccgccctcgcttcactggttagtgcacctaaggtcttccaggctctgtgcaaggacaacatttataaggcattgcaattcttcgccaaggggtacggaaagaataacgaaccgcttaggggctatattctaacctttctgatcgccatggcttttattttgatcgccgagctgaatactatcgctccgatcatctctaacttcttcctcgcatcctacgcattaataaacttcagctgctttcacgccagttacgccaagtcccccggttggcgtcccgcctatggcatatacaatatgtgggtgtccctgttcggcgccgttctgtgttgcgccgtaatgtttgtgataaattggtgggccgccgtgatcacgtacgtgatcgaattttttttgtacgtgtacgtgacttgtaagaaaccggacgttaattgggggagtagcacccaggccctgagttacgttagtgctctggacaacgctctcgagctaactaccgtggaagaccatgtcaagaatttccgtccccagtgcatcgttttgacaggtggaccaatgacgaggccagccctgcttgacatcactcatgctttcaccaagaactccggcctgtgtatttgctgtgaggtgttcgtgggcccaaggaagctgtgtgtgaaggaaatgaatagtgggatggcaaagaaacaagcgtggctaatcaaaaacaagatcaaggcattctatgccgcagttgctgctgattgcttccgagatggggtgcgaagcctccttcaagcaagtggccttggccggatgaaaccaaatactctggtgatcggatataagaagaattggaggaaagccccactgacggagattgaaaattacgtaggcattatacacgatgccttcgactttgaaattggggtagtgatagtccgtatctcccaggggtttgatatctcacaagttctacaggtgcaggaggaattagagcgactggaacaagagcgactggcactagaggccacgatcaaggataacgagtgcgaagaggagtccggtggtatacgaggcctattcaagaaagccggaaaactcaatattaccaagactactccaaaaaaggacgggtccatcaacacttcacagtccatgcacgttggggaattcaatcagaagcttgtcgaagcatctactcaatttaagaagaagcaggaaaaaggtaccattgacgtgtggtggctgttcgatgatggagggctgactctgctaataccgtatatactcaccctgaggaagaaatggaaagattgcaaactgagaatctacgtcgggggcaagattaaccggatagaggaagaaaagattgtgatggcgagcctgttgtcaaagttcaggataaaatttgcagatattcatataatcggagacatcaacatcaggccaaataaagaaagctggaaggtgttcgaggaaatgatagagccctaccgactgcatgaatcctgcaaagatcttacgaccgcagagaaactaaaaagagagaccccgtggaaaataacagacgccgagttggaagccgttaaagagaaatcttatcgccaggtgcgcctcaatgagcttctacaggagcatagtagagctgctaatctcatagtgctatccctccctgtggcaaggaaaggttctatatccgatctgctgtatatggcttggctggaaatcctcactaagaacttgccacctgtcttgttagttaggggcaaccataagaatgtactcaccttctacagt

SEQ ID NO: 71548 - DNA, 3297 bp, Artificial Sequence
  derived and/or modified sequence
atgtccctgaacaattcaagcaacgtgtttctggacagcgtccctagcaacaccaatcgtttccaggtgtcagtgattaatgagaaccatgaatcatcagcagctgcagacgataacaccgatcctcctcattacgaggaaacttccttcggagatgaggcccagaaacgccttaggatatccttcaggccaggaaaccaagagtgctacgacaactttcttcaatccggtgagactgccaaaaccgacgcatcgttccacgcgtacgattcgcacactaatacgtactacctgcagacgtttgggcataacaccatggacgcagtgccaaagattgaatactaccgtaacaccggatccatttccggcccaaaggtcaacagaccttcacttctggaaatccacgaacagcttgcaaagaatgtcgcagtgactccatcatccgcggaccgggtcgcaaatggcgacggaattcccggtgatgagcaggcagagaacaaggaagatgaccaagcaggggtggtgaagtttggatgggtgaagggtgtgcttgtgaggtgtatgcttaacatttggggtgtgatgctgtttatacgcctgtcgtggattgtgggagaagctggtattggtcttggagtcattatcattggactgtccgttgttgtgaccaccctcactggtatttcgatgtcggcaatttgtactaacggggtcgtccggggtggaggggcctactacttgattagcaggtccctcggtcccgagtttggcggatcgatcggactcatttttgcattcgcgaacgctgtcgcagtggcaatgtacgtggtgggtttcgcagaaacggtcgtggacctccttaaggaatcggactcgatgatggtggatcctactaacgatattcgcataattggttcgattactgtggtgattctccttggtatttccgtggcaggaatggaatgggaagcaaaagcccaagtgattctcctggtgattctgttgatcgcgatagctaactttttcataggaactgttattccaagcaacaacgagaaaaagtcaagggggtttttcaactaccaggcatcgatctttgcagaaaactttggccccagattcaccaaaggtgaaggatttttcagcgtctttgccatcttcttccctgcagccactggcattctcgcaggagcgaacatctccggcgatcttgaagatcctcaagacgcaattcctcgcggcaccatgcttgcaattttcattactaccgtcgcatacctgggagtggcgatttgtgtgggagcctgcgtggtgagagatgcaactggaaacatgaacgacactatcatatcaggcatgaactgtaatggatccgccgcgtgcggactgggttacgatttctcccggtgtcgccacgagccatgtcagtacggtttgatgaataactttcaagtgatgtccatggtgagcggttttggccctcttattaccgcagggatcttttcagcaactctgagctcggccctggcatccctggtgagcgcccctaaggtattccaggccctgtgcaaggataacatctacaaggccctccagttttttgcaaaaggatacggaaagaataacgaaccactccgtggctacatcctgacgttcctgatcgcaatggcctttattcttatagccgaactgaacacgattgcgccaatcatctccaacttttttcttgcatcgtacgcattgatcaacttttcgtgctttcatgcctcctacgctaagagcccagggtggcgcccagcctacggcatatacaacatgtgggtgtcccttttcggggcagtcctttgttgtgccgtgatgttcgtgattaactggtgggcagcagtgattacttacgtaattgaattctttctgtacgtgtacgtcacttgcaaaaagcctgacgtgaattggggatcgtccactcaggcactcagctacgtgtctgcacttgataacgcacttgaactcaccaccgttgaagatcatgtcaagaacttccgacctcagtgtatcgtgctgactggcggacctatgacccgcccagcgctgcttgatattacccatgcttttaccaagaacagcggtttgtgtatatgctgtgaagtgtttgtgggtcctagaaagctgtgcgtgaaggaaatgaattcgggaatggcgaagaagcaggcctggctcatcaagaataagatcaaggcattttacgcagccgtggccgcagattgtttccgagatggagtgaggagcctcctgcaagcatcaggtctgggccgcatgaaacccaatactcttgtcattggctacaagaaaaactggcgaaaggcgccgcttactgagattgaaaactatgtgggtatcatacatgacgcatttgatttcgaaataggcgtggttattgtgcgcattagccagggctttgacatctcgcaggtgctgcaagtccaggaagagctggaacggcttgaacaagagcgtctggccctcgaggcaacgatcaaagacaacgaatgtgaggaagagtcgggcggcattagaggtctgttcaagaaggcaggaaagctgaacatcaccaaaactaccccgaaaaaagatggaagcattaacacctcgcagtcaatgcatgtgggagagttcaaccagaagctggtcgaggcatccacccagttcaagaagaagcaagagaaagggacgatcgatgtgtggtggctcttcgatgacggtggacttaccctgcttataccctacatactgactctccggaagaaatggaaggactgcaagctccgtatctacgtggggggaaagattaacaggattgaagaagaaaagattgtgatggcctcgcttctctcaaaattcaggatcaaatttgcagacatccatatcatcggcgacattaacattcgacccaacaaggaatcctggaaggtgttcgaagaaatgatagaaccatacagactgcatgaatcgtgtaaggatctgaccacggcggaaaagctgaagagagaaactccgtggaaaatcaccgatgctgagctcgaggcagtcaaagaaaagtcctaccggcaggtgcgcctgaacgaactccttcaggaacattccagagcggcaaacctgattgtcctgtcgctgcctgtggcacgaaaggggagcatttccgaccttctctacatggcatggttggagatccttaccaagaacttgcctccagtgcttcttgtccgtggcaaccataagaatgtgctgacgttctactca

SEQ ID NO: 71549 - DNA, 3297 bp, Artificial Sequence
  derived and/or modified sequence
atgagcttgaacaattctagcaacgtgttcctcgattctgtaccctctaacacgaatagatttcaggtcagtgtgataaacgagaaccacgaaagcagtgcggcagcagatgacaataccgatccaccccactatgaggagaccagctttggtgatgaagcccagaaacgcttgcgcatttcttttcgtccgggcaatcaggaatgctatgataacttcctccaaagtggagagaccgctaaaactgacgctagcttccacgcctacgacagccatactaacacctactacctgcagacgtttggccataacacaatggatgccgtgcccaagatcgagtattatcgaaataccggatccatctctgggcccaaagttaaccggccctcacttcttgaaatacacgagcagctggctaagaacgtcgccgtgacaccctccagtgcagatcgcgtagccaacggagacggaattcctggagatgaacaggccgagaacaaggaggatgatcaggcaggtgtggtgaaatttggatgggtcaaaggggtgctggtccgctgtatgctaaatatctggggtgtgatgcttttcatcagattgagctggattgtcggggaggccgggattggcctcggagttattatcattgggctgtcggtggtggtgacaacgctgacgggcatctcaatgtctgcgatttgcactaacggtgtggtccgaggcggcggagcttattatctgataagtaggagccttggacccgagttcggtggctcaatcgggttgatctttgcattcgcaaacgccgtggctgtggccatgtatgtcgtcggcttcgccgagacggtggtagacctgctgaaagagtcggactccatgatggtggatcctactaacgatattaggataatcggatctatcacagtggtcatactgctcggaatatccgtggccggtatggaatgggaagcaaaagctcaggtcatcctgcttgtgattctcttgattgcgatcgccaatttctttatcggcaccgtaatcccatctaataacgaaaagaaatcgcgcggttttttcaattaccaggcgagtatatttgccgaaaactttgggccgcgtttcacgaaaggagaggggttcttttctgtgttcgcaatctttttccctgctgcgactggcatcctcgccggggcaaacatatccggggatttagaagatcctcaggacgccatacctagagggactatgctggccattttcatcacaactgttgcctacttgggagtcgccatctgtgtcggcgcttgcgttgtcagagatgccacggggaatatgaacgacacaatcatatccgggatgaactgtaatggtagtgctgcctgcggattggggtacgacttcagcagatgccgccatgagccgtgccagtatgggctgatgaacaactttcaagtaatgagtatggtgtctggatttggacccctaatcacggctggcatttttagcgccactctgagttcggccctggcctcattagtgagcgctcctaaagttttccaggccctctgtaaggataatatctacaaagcattgcagtttttcgcaaaggggtatggtaaaaataatgagcccctccgaggatatatcctgacgtttctgatcgccatggccttcattttaatagctgagctgaatactattgcgccgattatcagtaacttcttcctggcatcctacgccctcatcaacttcagctgcttccacgcttcatatgctaagtcccctggctggaggcccgcatacgggatttacaatatgtgggtatccctattcggggcagtgctctgttgtgcagtgatgtttgtcataaattggtgggccgcggtgatcacatacgtaatagaattttttttatacgtttacgtaacatgcaagaaacccgacgtgaattggggctctagtacccaggctctgagttacgtgtcggccctggataacgcgctcgaacttacaacggtcgaggaccacgtgaagaattttaggcctcagtgtattgtgctcacaggtggcccgatgacccgcccagccctgcttgacatcacacatgcgtttacaaagaattccggtctgtgcatctgttgtgaggtttttgtgggtcccagaaaattgtgcgtgaaggagatgaattccggaatggctaaaaagcaggcttggcttatcaagaacaaaatcaaagcattttatgcagccgtggcagccgactgctttagggatggggtcaggagcctattgcaggctagtggattgggcagaatgaagcccaatactctcgtcataggctacaaaaagaattggcgaaaggcaccactcaccgagattgaaaactacgtgggcataatacatgacgcgttcgacttcgagatcggagttgtgattgttaggatcagccagggtttcgacatcagccaggtactgcaggtccaggaggaacttgaacggttagaacaggagagattagcgctggaggctaccattaaggataacgagtgtgaagaagagtccggaggtatacgcgggcttttcaaaaaagcaggcaagctaaacattaccaagaccacccctaagaaagacggaagcattaatacatcccagtctatgcacgttggcgagttcaaccagaaattagtggaagcctctacacagttcaagaaaaagcaggaaaaggggactatcgatgtctggtggctgtttgatgacggcggacttactctgctgattccttatatactgacgctgcggaaaaagtggaaggactgcaaattgaggatttacgtaggtggaaagatcaacagaatagaggaagaaaagatcgtaatggcctcattgctgtctaagtttaggataaagttcgctgacatccatattataggagacattaacattcgcccgaataaggaaagttggaaagtttttgaagaaatgattgagccctacaggctacatgagtcttgcaaggacctcacaacagcagagaagctgaagagggaaactccatggaaaatcaccgacgccgaactggaggcggtgaaagagaagagttaccgccaggtgcgcctaaacgaactgctgcaggaacattcccgtgccgctaacctgatcgtcctcagtctgccagtggcacggaaagggtcaattagtgacctgttatacatggcgtggctcgagattctgaccaaaaatctgcctccagtgttgctagtgaggggcaatcataaaaacgtcctcacattttattcg

SEQ ID NO: 71550 - DNA, 3297 bp, Artificial Sequence
  derived and/or modified sequence
atgtccttgaacaacagctcaaatgtcttcctcgactctgttccaagcaatactaacaggtttcaggttagcgtaatcaacgagaatcatgaatctagcgcggctgccgatgataacacggatcctccacattacgaggaaacaagtttcggcgacgaagcccaaaagcgattacgtatctcattcaggcccgggaaccaggagtgctatgataatttcctgcagagcggtgaaactgccaagaccgatgcctccttccatgcctatgattcccacaccaatacctactatttgcagacgttcggccataatacaatggatgctgtcccgaagatcgaatattatagaaacactgggtcaatcagcggtccaaaagttaaccgaccttctttactcgagatccacgaacaactagcaaagaacgtcgctgtaaccccttcttcagccgaccgcgtcgctaatggcgatggaattccaggggatgagcaagccgagaacaaggaagacgatcaggccggggtcgtgaaattcgggtgggtgaagggagtgttagtacgatgcatgttgaatatatggggagtcatgctcttcatcaggctgagctggatcgtaggtgaagctggcattggtcttggcgtgatcattattgggctctccgtagtcgttaccaccctcacagggatcagcatgagtgctatctgcacaaatggcgtagtgcgcggagggggtgcttattatttaatctctcgtagcctgggacctgaatttgggggctccatcggactaattttcgcatttgccaacgctgtagcagtggccatgtacgtggtcggattcgctgaaaccgtggttgacttgctgaaagagtcagattccatgatggtcgatccaactaatgacattagaataataggtagtatcaccgttgtgattctgcttggcatctcagtagcaggcatggagtgggaggccaaggcacaggtcattttgctggtgatcctactcatcgccatcgctaacttcttcataggaactgtgattcctagcaacaacgagaaaaaatctcgcgggttctttaactaccaagcgtctatctttgccgagaacttcggccccaggttcacaaaaggggagggcttttttagcgtctttgccatatttttccccgctgctactgggatcctcgctggtgccaatatatcaggggatttggaggatccgcaggacgccatacctagagggactatgttggccatattcattaccacagttgcttatttaggcgtcgccatctgtgtcggggcttgcgtagtgcgtgacgctaccgggaatatgaacgacactatcatctcaggtatgaattgtaatggttccgccgcttgtggtctcggatacgatttcagcaggtgccggcatgaaccgtgccaatacggcctgatgaataactttcaggtgatgtccatggtgtccggattcggtccattaataaccgctggtattttctcagccactcttagttcagccttagcaagcttagtaagtgccccaaaggtcttccaggcactttgtaaggataatatttataaggcactccagtttttcgccaagggctacgggaagaacaacgaaccgctgcgggggtatatcctgacgttcctcatcgccatggccttcatccttattgcagagctgaacaccattgccccgataatttctaacttcttcctggcctcctacgcgttgatcaacttttcatgtttccacgccagttatgccaaatcccctggttggagaccagcttacggcatttacaatatgtgggtctcactgtttggagcagttctgtgctgtgcggtcatgttcgtgataaattggtgggcagctgtgatcacttatgtcatcgaatttttcctgtacgtgtacgtgacatgcaagaaacccgacgtgaattggggctcctctactcaggctctctcctatgtcagtgcccttgataacgcccttgagttaactactgtggaggatcatgtgaagaatttccggccacagtgtatcgtactaacgggtggaccaatgacccggcccgccctcctcgacattactcacgctttcaccaagaacagcggtctgtgtatctgctgtgaggtgttcgtggggcctcgcaagctgtgcgtgaaggagatgaacagcggtatggctaaaaagcaagcttggcttatcaaaaacaagatcaaagccttctatgccgccgtggccgccgactgttttagagatggtgtccggtctctccttcaggcgagtgggctgggtcggatgaaacccaacactttggtgatcggttataagaagaattggcggaaggctcctctaactgaaatcgagaactatgtcggcataattcacgatgccttcgattttgagatcggggtcgtcatcgtgaggatcagtcagggctttgacatatcacaagtactgcaggtccaagaggagctggagcggcttgaacaggagcgtctcgccctcgaggccaccatcaaagacaacgagtgcgaagaagagagcggaggcatacggggactgttcaagaaggccggcaagttaaacatcaccaagacaacgcctaaaaaggacggctcgattaacacctcccagagtatgcatgttggcgaatttaaccagaagttagtggaggcaagtacccaatttaagaagaagcaggagaaaggcactattgacgtgtggtggctgtttgacgatgggggactcaccctgctgattccttatattttaacccttcgcaagaagtggaaggattgcaagctgcggatatacgtgggaggaaagattaataggattgaggaggaaaaaatagtgatggctagtctgttgagtaaatttcgaatcaagttcgctgatatccacatcattggtgatataaacatccggcccaacaaagaaagctggaaggtctttgaagagatgattgaaccgtatcggctgcacgagtcgtgcaaggacttgaccacagccgagaaactgaagagggaaaccccttggaagattaccgatgccgagctcgaggcagtaaaggagaaatcatatcggcaagtccgattgaatgagctcctccaggaacacagtagggccgccaatttaatcgtgttatctcttcccgtcgcgcgaaaaggtagcatttcagatttgctgtacatggcttggctggagatactgacgaagaacttgccacctgtgttgcttgtgcgtggcaaccataagaacgttcttacattttacagc

SEQ ID NO: 71551 - DNA, 3297 bp, Artificial Sequence
  derived and/or modified sequence
atgtcacttaacaacagctcgaatgtgtttctggacagcgtgccttccaacaccaatagattccaagtgtcggtcatcaacgaaaaccatgaatccagcgcagccgcagacgataatactgatcctccccattatgaggaaacctcctttggagatgaagcacagaaacgtctgcgcatatccttcagaccaggtaaccaagaatgttacgataactttctgcagtcaggggaaactgcgaaaaccgacgcctcattccatgcatacgattcccataccaacacctactacctgcaaacctttggtcataatacgatggatgccgtgcctaagatcgagtactaccgcaataccggctccatttccggaccaaaggtgaacaggcctagccttctggaaattcatgagcaacttgcaaagaatgtcgcggtgactccatcgtctgcagatcgcgtggcgaatggtgatggaatcccaggtgatgaacaagccgagaataaagaagatgatcaggcaggagtggtgaagtttggttgggtgaagggcgtgctcgtcaggtgtatgctgaacatctggggtgtgatgctgtttattcgcctctcatggattgtgggagaagccggcatcggcttgggagtcattatcatcggactgtccgtcgtggtcactaccctcactggaatatcgatgtccgccatttgtactaacggtgtggtgaggggtggaggtgcatactatcttatctccagaagcctgggtccagaatttggcggctcgattggcctcatttttgcatttgcgaacgcagtggcagtggcaatgtacgtggtgggattcgccgagactgtcgtcgatttgcttaaggaatcggattccatgatggtggatcccactaacgacatacggattattgggtcgatcactgtggtgatcctgttgggtatcagcgtggcaggaatggagtgggaggccaaggcacaggtcatcctgcttgtcattctgcttattgctattgccaatttctttatcgggactgtcataccttcgaacaatgaaaagaaatcgagaggattctttaactaccaggcatccatctttgcagaaaacttcggaccgcgtttcaccaagggcgagggctttttctccgtctttgcgattttcttcccagcagctaccgggatcctcgccggcgcgaacatttcgggagatctggaggatccccaggatgcaattcctcgcggaactatgctcgccatattcatcacgaccgtcgcataccttggcgtcgcaatctgtgtgggggcttgcgtcgtgcgcgacgcaaccggcaacatgaacgatactatcatttcaggtatgaactgtaacggttccgcggcgtgtggtctggggtacgattttagcaggtgtagacatgagccgtgtcagtacggtctgatgaacaatttccaagtgatgtcgatggtgtcaggatttggccctctgattaccgccggaatcttcagtgcaactctctcgagcgcactggcaagcctggtgtcagcacccaaagtgtttcaggcactttgtaaggataacatttacaaagccctgcagttttttgcaaagggatacgggaaaaacaacgaacctcttcgaggttacatcctgacctttcttatcgctatggcattcattcttatcgccgaacttaacacgattgccccgattatctcgaacttcttccttgcgtcttacgctttgattaacttcagctgcttccatgctagctacgccaaatccccgggatggcgacctgcctacggtatttacaatatgtgggtcagcctcttcggcgcagtcttgtgttgcgcggtgatgtttgtcattaactggtgggcagcagtgatcacttacgtcattgagtttttcctttacgtctacgtcacttgtaaaaagcctgacgtgaattggggatcatcgacccaagctctgagttacgtctcagcactggacaatgccctggagctgactactgtggaagatcacgtgaagaactttcgcccacagtgcatcgtcctgactggtggaccaatgaccaggcctgcacttcttgacatcacgcatgccttcactaaaaacagcggactctgtatttgctgcgaggtgtttgtcggtccacggaaactgtgtgtgaaggagatgaactcaggaatggccaagaaacaggcttggcttatcaagaacaagataaaagcgttctatgcagcagtggctgcagattgttttcgcgatggagtccggagcctgctgcaagcatccggtttggggagaatgaaacccaatacccttgttattggctacaagaagaattggaggaaggccccacttaccgaaatagaaaactacgtgggaatcatacacgatgcatttgactttgagattggcgtcgtgattgtgagaatcagccaaggttttgacatctcccaggtgcttcaagtgcaggaagagctggaaaggctggaacaagaaaggctggcgcttgaagctaccatcaaagacaatgagtgtgaggaggaatcgggagggattcggggactgttcaaaaaggcaggaaagctgaacatcaccaagactacgccaaaaaaggacgggtccatcaatacgtcccaaagtatgcacgtgggggaattcaaccaaaagctcgtggaagcatctactcagttcaagaagaaacaagagaaaggtactattgacgtgtggtggctctttgacgatggcggtcttactcttcttattccttacattcttactctccggaagaagtggaaagattgtaagctgaggatttacgtcggtggtaaaatcaaccgaattgaggaagaaaagattgtgatggcctcgttgctttcgaagtttagaataaagttcgcagatattcatatcattggtgatatcaatatccggcctaacaaggagtcgtggaaggtctttgaagagatgattgagccttacaggttgcacgaatcgtgcaaagatctgaccaccgccgagaagctgaagcgtgagactccttggaagattaccgatgcagaacttgaggcagtgaaggaaaagtcgtacagacaagtgagacttaacgagctgcttcaagagcactcgcgggctgccaatcttatcgtgcttagcctccctgtggccaggaagggatcgattagcgatctgctgtacatggcgtggctggagattctcaccaagaatctgccccctgtgctgctcgtccgggggaaccacaagaatgtgctgaccttttactcc

SEQ ID NO: 71552 - DNA, 3297 bp, Artificial Sequence
  derived and/or modified sequence
atgagcctcaacaattcaagcaacgttttcctggattcggttccctcgaacactaaccgtttccaagtgtccgtgatcaatgagaaccacgagagcagcgctgccgccgacgacaacactgaccctccacattacgaggagactagcttcggcgacgaagcccaaaagcggctccggatctcgtttcggccaggaaaccaagaatgctacgacaactttctgcaatctggagagactgcaaagaccgacgcctcttttcacgcctacgattcgcataccaacacctactaccttcagacctttggacataatactatggacgctgtgccgaagattgaatactaccgcaacaccggatccatcagcggaccaaaggtgaatcgaccgtcactgctggagatccacgagcagctggctaaaaacgtggctgtgactccctcttcagccgatcgcgtggctaatggagatggcattccgggcgacgaacaggcggaaaacaaggaggacgatcaggccggggtggtgaagttcggatgggtcaagggagtgctggtgcgctgcatgttgaacatctggggcgtcatgctgttcatcaggctgagctggatcgtgggagaggctggaatcggactgggagtcatcatcatcggactgtcggtcgtggtcaccacgttgacgggcatctcgatgtccgccatctgcactaatggtgtggtgagagggggcggagcctactacctgatctcccggagcctgggacctgaatttggagggtcgattggtctgatctttgccttcgccaatgcggtcgcggtggccatgtacgtggtgggatttgccgagactgtggttgaccttctgaaggagagcgactccatgatggttgacccgactaacgacattagaattatcggatcgataaccgtcgtcatcctgcttggaatctcggtggctggtatggagtgggaggccaaggcccaggtgattctcctcgtcatccttctgattgcaatcgccaacttcttcatcggtaccgtgatcccttccaacaacgaaaagaaatcacgaggattctttaactatcaggcatcaatcttcgcggaaaacttcggcccaagatttaccaaaggagaagggttcttctctgtctttgcaatctttttccctgcggctactggcatcctggcgggcgcaaacatctccggggaccttgaggacccccaagacgcaatcccccggggaactatgctggcgattttcatcactacggtggcgtacctgggcgttgccatttgtgtcggagcgtgtgtcgtgcgcgatgcgaccggaaacatgaatgacaccatcatctccggtatgaattgcaacggctcggctgcgtgcggactgggatacgatttttcgagatgtcgccatgaaccttgtcagtacggccttatgaacaacttccaagtgatgtcaatggtgtccggcttcggaccgctcatcaccgccggaatcttcagcgcgactctgtcgtcagccttggccagcctcgtgtccgcgccaaaagtgtttcaggccttgtgtaaagataacatctacaaggcgttgcaattcttcgccaagggatacgggaaaaacaatgagccactccgtggctacatcctgaccttcctcattgctatggcgtttatcttgatcgctgaactcaacaccatcgccccgataatcagcaactttttcctcgcgagctacgctctgatcaatttctcctgcttccacgcttcgtacgccaagagcccaggttggcgtccggcctacgggatttacaatatgtgggtgtctctgttcggggcggtcttgtgctgcgcggtgatgttcgtgattaactggtgggcagctgtcatcacctacgttatcgaattcttcctgtatgtctatgtcacttgcaagaaaccggatgtcaactggggatcgagcacgcaagcattgtcctacgtgtccgcacttgacaatgctctggaactcactaccgtggaagatcatgtgaagaactttcgcccgcagtgcatagtgctgactggggggcccatgacccggccggccctgctcgatattactcatgccttcaccaagaactcgggcctgtgtatctgttgcgaagtgttcgtgggaccaaggaagctctgcgtgaaagagatgaattcggggatggcaaagaaacaagcatggctcatcaagaataagatcaaggcattttacgcagcagtggccgcagattgcttccgggacggagtgcgctccctgctgcaggccagcggactgggacgcatgaagcccaacacgctggtgatcggttacaaaaagaactggagaaaggcaccgctgacggagatcgagaactacgtgggaatcatacacgacgccttcgacttcgaaatcggagtggtgatcgtcaggataagccagggtttcgacatatctcaggtgctgcaggtccaggaagagcttgaacggcttgagcaggaacggcttgccttggaggcgaccatcaaggacaatgagtgcgaagaagaatcaggtggtattagaggcctgttcaagaaggcaggtaagctgaatatcaccaagaccacgcctaagaaagacggctcaattaacaccagccagtccatgcacgtgggcgagttcaatcagaagctggtcgaggcgtcgacccaattcaaaaagaaacaggaaaagggaacgatcgatgtctggtggcttttcgatgatggcggactcactcttttgatcccatacatcctgactctccggaaaaagtggaaagactgcaagctgcggatttatgttggcgggaagatcaaccggatcgaagaggaaaagatcgtgatggcgtcgctcctctcgaaattccggatcaaattcgccgacatccacatcatcggggacatcaatatcagacctaacaaggaatcgtggaaggtctttgaagaaatgattgaaccataccgcctgcatgaatcatgcaaagacctgaccaccgcggaaaaactcaaacgagaaactccgtggaaaatcactgatgccgaactcgaagcagtgaaggagaaatcctaccgccaagtgcgcctgaatgagctgcttcaggagcactcccgggccgcaaatctgatcgtgctcagcctgccagtcgcgcgcaagggatccatctcggatctgctgtatatggcctggcttgaaatcctcaccaagaatctgccgccggtgcttctcgtgaggggtaaccataagaatgtcctgactttctactcc

SEQ ID NO: 71553 - DNA, 3297 bp, Artificial Sequence
  derived and/or modified sequence
atgtccctgaataactcctcaaacgtctttcttgacagcgtgccatccaacacgaaccggttccaagtgtccgtgattaacgaaaaccatgagtcgtcggcggcagccgatgataataccgacccgcctcattacgaggaaacctcttttggcgatgaagctcaaaagagactccgaattagcttccggcctggaaaccaagagtgctacgataacttcctgcaaagcggagaaactgccaagacggatgcatcatttcatgcatatgactcacatacgaatacctactacctccaaacctttggacacaataccatggacgcggtgcctaagattgaatactaccgcaataccgggtcaatctccggtcccaaggtcaacagaccatccctgctggaaatccacgagcagcttgcaaagaacgtcgccgtcaccccgtcctccgcagatcgggttgcaaacggagacggaattcctggcgatgaacaagccgagaacaaggaagatgaccaagcaggagttgtgaagtttggatgggtgaagggagtgcttgtgcgatgtatgctgaatatctggggagtcatgcttttcatacgcctctcgtggattgtgggggaagcagggattggactgggtgtgatcattatcggactgtcggtggtggtgaccactcttactggaatctccatgtcagcaatttgtaccaatggagtcgtgaggggtggtggggcgtactacctgatttcgcggtcgctggggcctgaattcggggggtcaattggactcattttcgccttcgccaacgctgtggccgtcgcaatgtacgtggtcggatttgcagaaacggtggtggacctgctcaaggagtcggattcgatgatggtcgaccccaccaacgatattcgcatcatcggttcgattacggtggtgatcctgcttggaatttcagtcgcaggaatggagtgggaagccaaggcacaggtcatccttctcgtcatcctgctgatcgcaatagcaaatttcttcattggtaccgtgatcccgtcgaataacgaaaagaagtcacgtgggtttttcaattaccaagcaagcatctttgcagaaaactttggacctcgctttaccaaaggagaaggatttttctccgtgtttgcaatctttttcccagcggcgaccggcatccttgctggtgcgaatatctccggtgacctggaggacccccaagatgcaatcccacgcggtaccatgctggcaatattcattactaccgtcgcatacctcggcgtggcaatctgtgtgggtgcctgtgtggtgagagatgccactggcaacatgaatgataccattatctcgggtatgaactgtaatgggtcagccgcctgcggtctgggatacgatttttcgaggtgccgacacgaaccatgtcagtatggactgatgaataactttcaggtcatgtcgatggtgtccggcttcggtccactgattaccgcaggcatcttttccgcaaccctctcctccgcacttgcatcgcttgtatctgcgcctaaggtctttcaagccctttgtaaggacaatatctataaggcactccagttttttgcaaagggatacggcaagaacaacgagcctctgcgcggatacatcctgacctttcttatcgccatggcatttatccttatcgcagagcttaataccattgcacctatcatttcaaatttctttttggcaagctacgcgctcataaactttagctgttttcatgcctcctacgcaaaaagccctggttggcgtcccgcatatggtatctacaacatgtgggtgtcgcttttcggagccgtcctgtgttgtgcagtcatgttcgtcataaactggtgggccgcggtgataacctatgtgattgaattctttctgtacgtctacgtgacttgtaaaaagcctgatgtcaactggggctcgagcacccaggccctctcctacgtgtctgcactggataacgcgctcgagctcactactgtggaagatcatgtcaagaattttcgacctcaatgtatagtgctcaccggtggaccgatgactcgcccagcactgcttgacattacgcacgccttcactaagaattcgggactctgtatatgttgtgaggtgttcgtgggtccccggaaactttgtgtgaaggaaatgaacagcggtatggccaagaaacaggcatggctgatcaagaacaaaatcaaggcattctacgcagcagtggcagcagattgtttcagggacggggtgcgtagccttctgcaagcatcggggctggggcgtatgaagcctaataccctcgttattggatacaagaaaaactggcgaaaggcccctctgaccgagattgaaaactacgtgggtatcattcacgatgcatttgattttgaaattggagtggtcattgttcggataagccagggatttgatatatcgcaggtgctgcaagtacaggaggaacttgagagattggaacaagaaagactcgctctggaagctacgattaaagataacgaatgtgaagaggagagcggtggaattcgaggactgtttaagaaagcaggaaagctcaacataaccaagactaccccgaaaaaggacggttcaattaacacttcacagtcgatgcatgtcggcgagtttaaccagaagctcgtcgaggcttcaacgcagttcaagaagaaacaagagaaaggcactatagatgtgtggtggctcttcgacgacggtggactgactctcttgattccatacatactgacgcttcgaaagaagtggaaggattgtaagttgcgtatttacgtgggaggtaagattaaccggattgaagaagagaaaattgtgatggcttccctgctgtccaagtttcgcattaagttcgcagatattcacattattggagatatcaacataaggccgaataaggaaagctggaaagtgtttgaggaaatgatcgaaccctaccggctccacgaaagctgcaaggatcttaccaccgcagaaaagctcaaacgtgaaaccccttggaagattaccgatgcagaactggaggcggtgaaggaaaagtcgtaccggcaagtgagactgaatgaacttcttcaggagcattcgagggcagcgaaccttattgtgctttcgctgccagtggcaaggaagggtagcatttcggacctgctgtacatggcatggttggaaattctcaccaagaatcttccaccagtcctgttggtgcgcgggaatcataagaatgttcttaccttttactcg

SEQ ID NO: 71554 - DNA, 3297 bp, Artificial Sequence
  derived and/or modified sequence
atgtcccttaataattccagcaacgtgttcctagactcagtccccagcaatacaaatagatttcaagtgagtgtgattaatgaaaatcatgagtccagtgccgctgcggatgacaataccgatcccccccactacgaagaaacatcctttggggatgaagctcagaagcgactgcgtatcagttttcggcccggtaatcaggagtgttacgacaacttcctccagtcaggtgagacagccaagacggatgcatcatttcacgcttacgacagccatacaaatacatattatctccaaactttcggccacaacactatggatgctgtgcctaagattgagtactacaggaatactggaagcatttccggacccaaggtcaatcgaccatctttgttggagattcatgagcagctggcgaagaacgtagcggtgacacctagttccgcagaccgagtcgcgaacggagatggaatccctggcgacgagcaggctgagaacaaggaagacgatcaggccggtgttgtgaagtttggatgggtaaagggcgtgctcgtccgctgtatgctgaatatttggggcgtcatgctgtttatccgcctatcctggatcgtgggtgaggcgggaattggccttggagtgatcattattggactgtctgtagttgtgacaactttaacaggtataagtatgtccgctatatgtacaaacggtgtcgtaaggggaggtggtgcttactatctgatctcacgatctctcggacccgagttcgggggtagcatcggcctaatttttgcttttgctaacgcagttgcagtggccatgtatgtggtgggattcgcggagacggtggtggacttactcaaggagagtgacagtatgatggtggatcctaccaacgacattcggattattggctccattactgtggtgatcctgttggggatatcagttgcaggaatggagtgggaagccaaggctcaggtaattcttctcgttattctgttgattgccatagccaattttttcatcggcaccgtcatcccatcgaacaacgagaagaagtctcgaggatttttcaattatcaagcctctatttttgccgagaatttcggaccccggtttacaaaaggggaaggatttttttctgtgttcgctatcttttttcccgcagcaactggtatcttagcaggagctaatatatctggagatttggaggaccctcaggatgcaatcccacgtggcacaatgctcgctatcttcatcacaaccgtggcttaccttggcgttgccatctgtgtgggcgcctgcgtggtgagagacgcaactggaaatatgaacgacacaataatttcgggtatgaattgcaatgggtccgctgcctgtggtttgggttacgacttttcacgctgccggcacgaaccgtgtcagtacggccttatgaacaacttccaggtgatgtctatggtctcaggcttcggcccactgatcacggctggaatcttttcagcaaccctgtcctccgctctcgcaagtttggtttccgctccgaaggtgttccaggcgctttgtaaagataatatctataaagctctacagttcttcgctaagggatacgggaaaaataatgagccattacgcgggtatatcctcacctttctgatagcaatggcatttattctcatagccgagctgaatacgatagccccaataatcagtaacttttttctggcaagctacgcactcattaattttagctgtttccacgcctcctacgcgaaaagccctgggtggcgcccggcctacggaatttacaatatgtgggtgtctctgttcggggccgtgctgtgctgcgcggtcatgttcgtcattaactggtgggcagctgtcataacctatgtaatcgaattctttctgtacgtttacgtaacatgtaagaaaccagatgtgaactggggatcctccacacaggctttgagttacgtttctgctctggataatgccctggagcttactactgtcgaagaccacgttaagaatttcaggccccagtgcattgtcctgaccggaggacccatgacccggcctgccctactagacatcacacatgcctttaccaaaaattcaggcctatgcatatgttgcgaagtgttcgtggggcctagaaaactctgcgttaaagagatgaattccggcatggctaagaaacaggcctggctcatcaagaacaagatcaaagcgttctacgcggctgtagccgcggactgttttcgggatggagtgcgatccctcctccaagctagtggactggggaggatgaaacctaacactttggtgattggctataaaaagaattggagaaaggctcccctgacagagatcgaaaattacgtcgggattattcatgatgcatttgactttgagataggagttgtgatcgtgcgaatatcccagggcttcgacatctctcaagtgctccaggtgcaggaggagctcgaacggcttgagcaggaaagattggccctggaggctactatcaaggacaacgagtgcgaggaggagagtggcgggataagaggtctgtttaagaaagcaggtaagcttaacatcaccaagacaactcctaaaaaggatgggtcaatcaatactagtcagtctatgcatgtgggggaatttaaccaaaagctggtggaagctagtactcagttcaagaagaagcaggagaaggggacaattgacgtatggtggctcttcgatgacggagggctgactctcctgatcccgtacatactcactttgcgcaagaaatggaaggactgtaaattgcgtatctacgttggcggaaaaatcaaccgcattgaggaagagaaaatcgttatggctagcttactgagcaaattccggattaagttcgctgacatccacatcatcggtgatataaatatcagacccaacaaagagtcctggaaggtgtttgaagaaatgattgagccttaccggctgcatgaatcttgtaaggatctgacgacagctgagaaactgaagagagagactccttggaaaataacggacgctgagctggaggccgtgaaggagaaaagctaccgccaggtccggctcaatgaactcctacaggagcactcgcgggccgctaacctgatcgtgctctctttacctgttgcgcggaagggcagtatctctgacctcctctacatggcctggttggagattctgaccaaaaaccttcctcctgtgctattggtcagggggaaccacaaaaatgtcctcaccttctattct

SEQ ID NO: 71555 - DNA, 3297 bp, Artificial Sequence
  derived and/or modified sequence
atgagtctgaataacagctctaacgtgtttctggacagcgtgccaagtaacacaaatcgtttccaggtcagcgtgatcaatgaaaatcatgagagttcagccgctgctgacgacaacactgaccctccccactacgaggaaacatctttcggagacgaagctcagaagcggttgcgtatttcatttcgtcctggcaatcaagagtgttacgacaacttcttacagtccggagaaacagcaaagaccgatgcatctttccacgcctacgacagccacaccaacacctactatcttcagacatttgggcataacaccatggacgctgtgcctaaaatcgagtactacagaaacaccgggagcatttctggacccaaggtgaacaggcccagtctgttagagattcatgagcagttggcaaaaaatgtagctgtgactccatcaagcgccgaccgcgtcgccaatggcgatggaatacccggtgacgagcaagcagaaaacaaggaagacgaccaagctggggtggtcaagtttggctgggtaaaaggtgtgctagtccggtgtatgctgaatatatggggcgtcatgctgtttatccggttatcttggatagttggtgaagctggaatcggcctaggcgtgatcattattggtctgagcgtggtggtgactacattaactggaatctctatgagcgctatctgtaccaacggggtggtgcgtggcggtggagcctactacctgatatccagatcattggggcctgagtttggcggcagtatcggacttatattcgcattcgcaaacgcagttgcagtggccatgtatgttgtgggctttgctgaaaccgttgtggatctgttgaaagagtctgactcaatgatggttgacccaaccaatgatatccgtataatcggaagcatcactgtcgttatactgctaggcatttcagttgctgggatggagtgggaggctaaggcccaggttatcctcttagtaatactgctgatcgctattgccaacttcttcatcggcactgtgattcctagtaacaacgaaaaaaagagtagaggttttttcaactatcaggcttccatatttgctgaaaatttcgggccacggttcaccaagggcgaaggtttcttctcagttttcgctatattcttccctgccgctaccggcatcctggcaggagccaacatatctggagatctagaggatccccaggacgcaattcctcgcggtacaatgctggccatattcataactacagtcgcctatctgggcgttgcaatttgcgtgggcgcttgcgtcgtgagagatgccactggcaacatgaatgacaccataatttctggcatgaactgcaatgggagcgctgcctgcggactgggctacgatttcagccgctgtaggcatgaaccgtgccaatacggtctgatgaacaatttccaggttatgtccatggtttctggctttggccccctgataacagccggcatattctcagcaaccttatcttctgctctggcttctctggtatcagccccaaaagtgttccaggctctctgtaaagacaatatatacaaggccttacagtttttcgctaagggctatggcaagaataatgaacctttacgtggatacatcctgaccttccttatagccatggcttttatactcatagccgagctaaacaccatcgccccgataattagtaatttctttctagcctcttatgctctgatcaacttttcctgctttcatgcctcctacgcaaaatccccagggtggagacccgcttatggcatctacaatatgtgggtgtccctgttcggagctgtgttatgctgtgccgttatgtttgtgattaattggtgggccgccgtcatcacttatgtgattgaatttttcctgtatgtgtacgtgacttgcaaaaagcccgacgttaattgggggagctccactcaagccctatcttatgtgagcgccctcgataatgctctggaactgacaactgtggaggatcatgtgaaaaactttaggccacagtgcatagtcctcacaggcggcccaatgacacggccagctctgcttgatataacccacgcttttaccaagaacagtggactgtgcatatgttgcgaagtgttcgtgggaccccgcaaactatgtgtgaaggaaatgaactccggcatggccaaaaagcaagcatggttaatcaaaaataaaatcaaggccttttacgcagccgtagctgctgactgctttcgggacggcgttcggagtctgctacaggcctctggactgggtcgcatgaaacctaacactctggtgattggttataagaagaactggcggaaggctcctttaactgagatcgagaactatgttggtattatacatgacgcattcgattttgagataggtgtggttatcgtacggatttcacagggttttgacatctcccaggtgctgcaggtgcaggaagaattggagaggctggagcaggagcgactggccctggaggcaacaatcaaggacaatgagtgtgaagaagagtccggcggaatccgcggtctttttaagaaagccggaaagctgaatataaccaaaaccactccaaagaaggacggctcaataaacacctcacagagcatgcatgttggcgaattcaatcagaagttggtagaggcttcaacccaattcaagaagaagcaggaaaagggtactatagacgtttggtggctcttcgacgacggcggtttaaccctgttaatcccatacatattaactctgcgcaagaaatggaaggattgtaaattgcgaatctacgttggtggcaagatcaaccgaatcgaggaggagaaaatcgtcatggcttcattactgagtaagtttcggatcaaatttgccgatattcacatcataggagacatcaatatcaggcctaacaaagaatcctggaaagtgtttgaagagatgattgagccatacaggctccacgagtcttgcaaagacctgacaaccgcagaaaaactgaagcgggaaaccccttggaagataaccgatgccgagttagaggctgttaaagaaaaaagctatcgacaagtccggttaaacgagctgctccaggaacattccagggccgctaacttaatcgtgctcagcctcccagtcgccagaaagggctcaatcagtgacctgctctacatggcctggctggagattctaaccaaaaacttacccccagtgctgctggtccggggtaaccacaagaacgttctgacattctattct

SEQ ID NO: 71556 - DNA, 3297 bp, Artificial Sequence
  derived and/or modified sequence
atgtcgctgaacaattcttcgaacgtgttcctggacagcgtcccatcgaataccaataggttccaagtgtcggtaatcaacgaaaaccatgagtcaagcgccgccgctgacgacaataccgatccaccgcattacgaagaaacctctttcggggacgaggcccagaaacggctgagaatctcgtttcggccaggaaaccaggaatgctacgacaatttcttgcagtctggagaaacggccaagaccgacgctagcttccatgcttacgattcgcacactaacacctactatctccagacgtttggacataacaccatggacgccgtgccaaaaatcgagtactaccgcaacactggctcaattagcggaccgaaggtgaacaggccgtcgctgctggaaatccacgagcaactggcgaagaacgtggcggtcacgccctcctcagccgaccgggtggccaacggggatggtatccctggagacgaacaagctgaaaacaaagaggatgatcaggcaggggtggtgaagttcggatgggtgaaaggagttctcgtcaggtgtatgctgaacatctggggcgtgatgctcttcatccggctgtcgtggatcgtgggagaggccggaatcgggctcggggtgatcattatcgggctcagcgtggtggtcactacgttgacgggcatctcgatgtctgcgatctgcacgaacggagtggtgcgcggagggggtgcgtattacctgattagcaggtccctgggcccggaatttggagggtcgatcgggctcatctttgccttcgcgaatgcggtcgccgtcgcaatgtacgtggtggggttcgcagagactgtggtggacctgctgaaggagtccgactcgatgatggtcgatccgactaatgacatccgcatcatcggatcaatcactgtggtgatcttgctgggcatctcggtcgccggaatggaatgggaggcaaaggcccaggtcatcctgctcgtgatcctgttgatcgctatcgcaaatttcttcattggaaccgtcatcccctccaacaacgaaaagaagtcaagaggcttctttaactaccaggcgtccatcttcgccgagaatttcggaccaagattcacgaagggcgaagggttcttttcagtgtttgccatctttttcccagccgccactggtatcctcgctggtgcgaacatttctggcgacctcgaggatccgcaagatgccatcccgaggggaactatgctggcgatattcattactaccgttgcgtacctgggcgtggccatctgcgtgggggcctgtgtcgttcgcgatgcaacgggcaacatgaatgataccatcatttcgggaatgaattgcaacggatcggcagcttgcggactgggatacgacttctcccggtgtcggcacgagccttgccagtacggcctcatgaacaatttccaggtgatgtcgatggtgtccggatttgggccgctgatcactgcaggaatcttctcagcaaccctcagctcagcactggcctctctcgtgtcagcgccgaaagtctttcaggcactgtgtaaggacaacatctacaaagccttgcagttcttcgccaagggatacggaaagaataatgaaccacttcgcggatacatccttaccttcctgatcgccatggctttcatcctgatcgcagaactcaacactattgcaccgatcatctcgaatttctttctcgcatcatatgctcttatcaacttctcgtgctttcatgcctcctacgcaaaatcgccgggatggcggccggcctacggcatctacaacatgtgggtttcattgttcggcgctgtgctttgttgtgcggtgatgttcgtcatcaactggtgggcagctgtgatcacctatgtcatcgagttctttctgtatgtgtacgtcacttgcaagaaaccagacgtgaattggggaagctcgacccaggctctttcgtacgtctcggcgctggacaatgcgctggaactcaccaccgtcgaggaccacgtgaagaacttccggccacaatgcatcgtcctcactggcggccccatgacccgtccggctctgctggatattacccatgccttcaccaagaactcaggcctttgtatttgttgcgaagtctttgtgggaccccggaagttgtgcgtgaaggaaatgaattccggtatggctaagaaacaggcatggctgattaagaacaagattaaagcgttttacgccgcggtggcggccgactgctttcgcgatggagtgcgcagcctgctccaagcatcggggcttggtagaatgaagccaaacacccttgtcattggatacaagaagaattggagaaaggcccctctgactgaaatcgaaaactacgtgggaattatccatgacgcgttcgacttcgaaatcggggtggtgattgtgcgcatctctcagggattcgacatctcgcaggtgctgcaagtccaggaggaactggaacggctggaacaggagcgcctggctcttgaggcgactattaaggataatgagtgcgaggaggagtcgggagggatccgcgggctgttcaagaaggcaggcaagctgaatatcactaagaccacgccaaagaaggatggaagcatcaacactagccagtccatgcacgtgggagaattcaaccagaagctcgtcgaagcctccactcaattcaaaaagaagcaggaaaagggaaccatcgatgtgtggtggctgttcgacgatggagggttgactctcttgatcccatacatcctgactctgcggaagaagtggaaggattgcaaactgagaatctacgtcggaggaaagatcaacagaattgaagaggaaaagatcgtcatggcatccctgctctcgaagtttaggattaagtttgcagacatccacatcatcggagatatcaacatccgcccaaacaaggagtcgtggaaagtgtttgaagagatgatcgagccttaccggcttcacgagtcctgcaaggatctgaccactgcagaaaagctgaagcgcgagactccgtggaagatcactgacgctgaactggaagcagttaaggagaaatcataccgccaggtccgcctgaatgaactgctgcaggagcacagccgcgccgcaaacctgattgtgctcagtctgccagtggctcggaaagggagcatttcagatcttctttacatggcctggctcgaaattctgaccaaaaacctgccgcccgtgctgctcgtgcgcgggaatcataagaacgtgctgactttctactcg

SEQ ID NO: 71557 - DNA, 3297 bp, Artificial Sequence
  derived and/or modified sequence
atgagcctgaacaacagtagtaacgtctttctggattccgtaccttccaacaccaacaggttccaggtgagcgtgatcaacgaaaatcatgaatctagcgctgccgctgacgacaatactgatcccccacattacgaagaaacatcattcggcgacgaagcccagaaacgcctgcgaatttcgttcagacccggtaatcaggagtgttatgataatttcctccagagcggagagaccgcaaagacagatgccagttttcacgcctacgacagccatacgaacacgtattatctccaaacctttgggcataatacaatggatgccgtccccaagatcgagtactaccgaaatacaggcagcatatccggacctaaagtgaaccggccgagcttgcttgagattcacgaacagctcgctaagaacgtcgctgtgacaccaagctctgctgatcgtgtagctaacggggatgggatcccaggcgacgagcaggctgagaataaagaggacgatcaggcgggtgttgttaaattcggctgggtgaaaggggttctagtgaggtgtatgttaaacatctggggcgtcatgctcttcataaggcttagctggatcgtgggagaagctggaatcggcctcggcgtgatcatcattggacttagcgtcgtggtgacaaccttgacagggatctctatgtcagcaatttgcacaaacggtgttgtgaggggaggtggtgcatattacctgatctcaagaagtttgggcccagagtttggaggctccatagggctgatctttgcatttgccaatgcagtggcggtcgctatgtacgtggtgggcttcgcagagaccgttgtcgacctgctaaaggaatctgactctatgatggtggatcccactaatgacatcaggattattggaagtatcactgtggtcatactgttggggatttcagtagcgggtatggagtgggaggcgaaagcccaggttattctgctggttattttgctgatagccattgcaaattttttcatcggtacggtgattccgagcaacaatgaaaaaaaatccaggggcttttttaattatcaggcatctatctttgccgagaatttcgggcccaggtttacgaaaggggaagggttcttctcagtgtttgctatctttttccccgccgccaccggcatcctggcgggggctaatatttctggcgatttggaagatccacaagacgcaattccaagaggtactatgctcgccattttcattaccaccgtcgcctaccttggcgtcgcaatttgcgtgggtgcttgcgtcgtcagagacgcgacagggaacatgaatgacacaattatttctggtatgaattgcaacggaagtgcagcgtgtggactcggctatgacttcagccgatgcagacacgagccatgccagtatggcctgatgaataacttccaggtgatgtctatggtgtcagggtttggacccctgatcaccgccggaattttctctgccacacttagctcagccctggccagcctggtcagcgcccccaaggtattccaagctctctgcaaggataatatttacaaggcattgcagttcttcgccaagggctatggtaagaataacgaacccctgaggggctatatattaacatttctcatagcaatggcatttatcctcatcgccgagctcaacactatagccccaatcatcagtaacttctttctggctagttatgccctcatcaacttttcgtgttttcatgcctcatatgcaaagtcccctgggtggaggccagcctacggcatctataacatgtgggtgtcgctgttcggggctgtactctgctgcgcggtgatgtttgtcatcaattggtgggcggcagtcattacgtacgtcatcgagttctttctttacgtgtatgtgacatgcaagaagccagacgtaaactggggtagtagcacccaggcgctctcatatgtgtccgccctcgataatgctctcgaacttacaaccgtagaagatcatgtaaaaaacttcaggccccaatgcatagttttaaccggcggtcccatgacaaggcccgctctgcttgatatcacacacgcatttactaaaaactccggactatgcatatgctgcgaagtattcgttgggccacgaaagctttgtgtgaaagaaatgaactctggtatggccaagaaacaggcttggctgattaaaaacaaaatcaaagctttctacgccgccgtggcagctgattgctttcgggacggcgtgcgatcccttctgcaggctagcgggctgggcaggatgaagcccaacacccttgtgatcggttacaagaaaaactggcgcaaggccccattaacagaaatagagaactacgtgggcataattcatgatgcattcgacttcgagataggggtggtcattgtgcggatcagccagggttttgatattagtcaagttctgcaagtgcaggaggaactcgaacgcctggagcaagagcgacttgcattggaggccaccattaaggataatgaatgcgaggaagaaagcggcgggatccgcggtttgttcaagaaagcaggcaagcttaacattactaaaacaaccccaaagaaagacggatcaataaatacaagccaatcaatgcatgtgggcgagttcaatcagaagctggttgaagcttcaactcagtttaaaaaaaaacaggaaaagggaaccattgatgtatggtggctattcgatgatggtgggctgaccctcctgatcccttacatcctaacgttacgaaagaagtggaaagattgcaagctaaggatctatgtaggaggtaaaataaatagaatcgaggaagaaaaaatcgtgatggcttcccttctgagtaagttcagaattaaattcgcggacattcatattattggggatattaacatacgaccaaacaaagaaagttggaaggtgtttgaagagatgatcgagccctatagactccacgagagttgcaaggatttgaccaccgcagaaaaactgaagcgcgagaccccgtggaaaattacggatgccgagttggaggccgttaaagagaaaagctatcgccaggtgaggctgaatgagttactgcaggaacatagccgggcagcgaacctcatcgtcttgagtctacctgtggctcgtaaaggcagtatcagcgacctgctttacatggcttggctggagattctgactaaaaacctgcccccagttctactggttaggggcaatcataaaaatgtgctgaccttctactca

SEQ ID NO: 71558 - DNA, 3297 bp, Artificial Sequence
  derived and/or modified sequence
atgtccctgaataactcatccaatgtgttcctggacagcgtcccttcaaacactaacaggtttcaagtctctgtcatcaacgaaaaccacgaatcatcagcggcagcagacgataacactgacccacctcattacgaggaaacctcattcggtgatgaagcgcagaagagactgcggatcagcttccgcccaggaaaccaagagtgttacgacaactttctgcagtccggtgaaaccgcaaagactgacgcatccttccatgcatacgattcacacactaacacgtactacctccagacttttggacacaacactatggatgccgtgcccaaaattgaatactatcgtaacaccggctccatctcgggcccaaaggtcaaccgcccctccctcctcgagatccacgaacagttggcgaagaacgtggcagtgactcctagctctgcagatcgtgtggccaacggagatggcatcccaggggatgagcaggcagaaaacaaggaggacgaccaggcaggtgtggtcaagtttggctgggttaagggagtcctggtgcgctgcatgctgaacatctggggtgtgatgctctttatccgcttgtcctggattgtgggtgaagccggtatcgggctgggagtcattatcattggtctttcggtggtggtgactactctcactggtatttcgatgtcggcaatatgtaccaacggagtggtgaggggaggtggtgcatactaccttatttccagatctctggggcctgagtttgggggttccattggcctgatttttgcatttgccaatgccgtggcggtcgccatgtacgtggtgggatttgctgagacggtggttgatctgcttaaggaaagcgattcgatgatggtggatccaactaatgacatccggattattggttccattactgtggtgatacttcttggtatttcagtggcgggtatggaatgggaggcaaaggcacaagttatactgctcgtgatcctgcttatcgcaattgcaaacttctttatcggcaccgtgattccatcgaataatgagaagaagagccgtggttttttcaactaccaggcctcgatatttgcagagaatttcggacccagatttaccaagggagagggcttcttttcagtgttcgccattttctttccggccgccactggaattttggcaggagcaaacatcagcggtgaccttgaagatcctcaagatgcgatccccagaggaaccatgcttgcaatattcatcaccaccgtggcttaccttggagttgctatttgtgtcggcgcatgtgttgtgagagatgcaaccgggaacatgaacgataccattatctccggtatgaattgtaatggatcggcggcgtgcggactcggctacgattttagccggtgtcggcatgagccgtgccaatacggcctcatgaataactttcaagtcatgtcgatggtgtccggatttggaccgcttatcacggccgggatattcagcgccaccctgagctccgcccttgcgtcgctcgtgtcagcaccgaaggtgttccaggcactgtgcaaggataacatttacaaggcacttcagttttttgcgaagggttacggtaagaacaacgaaccacttcgcggatatatccttacctttctgattgcaatggcctttatcctgatcgccgaacttaatactattgcccctattatctcgaatttcttcctggcatcatacgcactcatcaatttcagctgctttcacgcctcatacgcaaagtcaccgggctggcgccctgcatacggaatttacaacatgtgggtgtcactttttggggcagtgttgtgttgtgcagtgatgtttgtgatcaactggtgggcagcagtgataacctacgtcatcgaattctttctgtacgtgtacgtgacttgcaaaaaaccagacgtcaactgggggtcatccacccaagccctgtcatacgtgtcggcactggataatgctcttgagctgacgactgtcgaagatcatgtgaaaaacttcaggccgcagtgcattgtgctcaccggcgggcctatgaccagacccgccctccttgatatcacccatgcctttaccaagaattcagggctgtgtatatgttgtgaagtttttgtgggaccccgaaagctgtgcgtgaaggagatgaattcgggaatggcaaagaaacaagcatggctgatcaagaataagattaaggccttttacgcagccgtggccgcagactgcttcagggatggcgtccggtccctgctgcaagcctctggactgggtcggatgaagccaaataccttggtgatagggtacaagaagaactggcggaaagcacctctgaccgaaattgaaaactacgtgggaatcattcacgatgcatttgattttgagatcggagttgtgatcgtccgcatctcgcaaggctttgacatcagccaggtgctgcaagttcaagaggaactcgaaagactggagcaggaacgactcgcacttgaggctactatcaaggacaacgagtgtgaagaagaatctggaggtattaggggactgttcaagaaagcaggtaaacttaacataactaagaccactccgaaaaaagatggcagcattaacacctcgcagagcatgcatgtcggagaattcaaccaaaaactggtggaggcatcgactcaattcaagaaaaagcaagaaaagggaaccattgacgtgtggtggctgtttgatgacgggggacttactcttctcattccttacattctcacccttagaaagaagtggaaggattgtaagctcagaatctatgtcggtggcaaaatcaatagaattgaagaggagaagatcgtcatggcctcgcttttgtccaagtttagaattaagtttgctgatattcacattataggggacataaacatccggccaaacaaggagtcgtggaaagtgttcgaagaaatgattgagccataccggctgcatgaatcgtgtaaggatctgactactgccgagaagctcaaaagagaaactccgtggaaaatcacggatgcggaattggaagcagtcaaggaaaagtcctaccggcaggtccgtctgaacgaactcctccaagaacattcccgtgcagccaacctgattgtgctgagcttgccggtcgctagaaagggatcgatctctgaccttctgtacatggcatggctggagattcttacgaagaatttgccccctgtgttgcttgtcaggggcaaccacaaaaatgtcctgaccttctattcg

SEQ ID NO: 71559 - DNA, 3297 bp, Artificial Sequence
  derived and/or modified sequence
atgtccctcaataactcgtcgaacgtgttcctcgactccgtcccgagcaacaccaatcggttccaggtcagcgtgatcaatgagaatcacgaaagctccgcggcggctgatgacaatactgatccacctcactatgaggaaacttcctttggggacgaagcccagaagaggctgcggatctccttccgcccaggtaaccaggagtgttacgacaacttcctccaatccggggaaactgccaagacggacgcatctttccacgcatacgactcccatactaacacttactaccttcagactttcggacacaacaccatggacgcagtgcccaaaatcgaatactacagaaacaccggatccatcagcggtccgaaggtcaaccgcccttcccttctcgaaatccatgagcaactggcgaaaaatgtggcggtgaccccatcctcggccgatcgcgttgcgaatggagacggaatcccaggggacgaacaggcagagaacaaagaagatgaccaggcgggcgtggtgaaattcggatgggtgaagggagtgcttgtcagatgcatgttgaacatttggggcgtgatgctcttcatccggctctcgtggatcgtgggtgaagctggtatcggactgggggtgatcatcatcgggctcagcgtggttgtgactacgttgaccgggatttcgatgtcagccatctgtactaatggcgttgtgcggggaggcggagcttactacctgatctctcgctccctcggacctgagttcggcggatcaattggcctgatctttgccttcgcaaacgccgtcgccgtcgccatgtacgtcgttggattcgcagagactgtggtggatctgctgaaggagtccgacagcatgatggtggatcccaccaacgacatccgcattatcgggagcatcactgtcgtaatcttgctggggatctcagttgcgggcatggaatgggaagcgaaagcgcaggtgattctcctcgtgatcctgctgatcgcgatcgccaatttctttatcggaactgtgatcccatcgaataacgaaaagaagagccggggattcttcaattatcaggcctctatcttcgcagaaaacttcggccctagattcaccaagggagaaggctttttctccgtgtttgcaatcttttttccggcggccactggcattcttgcgggcgcgaacatcagcggagatttggaggatccgcaagacgcgatcccgagaggcactatgctggcaatcttcatcactaccgtggcctacctcggagtggctatctgcgttggagcctgcgtggtcagagacgcgaccggaaatatgaatgacactatcatttctggaatgaattgcaatggttccgccgcatgtgggctcggatacgacttctcgagatgtcgccatgaaccatgtcaatacggcctcatgaacaacttccaggtgatgtcaatggtgagcgggtttggacccctgatcaccgccggcatctttagcgccactctgagcagcgccctggcatcgctggtgtctgccccgaaggtgttccaggcactttgcaaggacaacatctacaaggcgcttcagttctttgcgaaaggctacggaaagaataatgagcctctccgcggatatatcctgacctttctcatcgccatggctttcattctgatcgcagaactcaatactatcgcacccatcatttccaacttcttcctcgctagctatgctcttatcaactttagctgcttccatgcctcgtacgccaagagcccgggctggcggcctgcctacggaatctacaacatgtgggtgtcgctgttcggtgctgtgctctgctgcgcggtgatgttcgtgataaactggtgggctgcggtgattacctacgtgattgagttttttctgtacgtgtacgtcacttgtaagaagcccgacgtgaactggggatcctcaacccaggcactgtcgtacgtgagcgcactggataacgcgctggagttgactaccgtggaagatcatgttaagaacttccgcccgcagtgtattgtgctcaccggaggccccatgactcgcccggccctgctggacattactcacgctttcactaagaattcgggtctttgcatctgctgtgaagtgttcgtgggaccgcgcaagctgtgcgtgaaggaaatgaactcaggaatggcaaaaaagcaagcatggctgatcaagaataagatcaaggccttctacgctgcggtcgccgccgattgctttcgcgacggcgtccggagcctgctgcaggcgtccggcctgggaaggatgaagcctaacaccctggtcatcggatacaagaagaattggaggaaagctccgcttaccgagatcgaaaactacgtcggcataattcatgatgcatttgactttgaaatcggagtcgtgatcgttcgcatttcacagggtttcgatatctcgcaggtgctgcaagtgcaagaggagctggagcgactggagcaggaaagactggccctggaagccaccattaaggataatgagtgcgaagaggagtctggaggaatccggggactctttaagaaggccggcaaacttaacatcaccaagactactcctaagaaagacggatccatcaatactagccagtccatgcacgtgggcgagtttaaccagaaactggtggaagccagcacccagttcaaaaagaagcaagagaaggggactatcgatgtttggtggctctttgacgacggggggctgactctgcttatcccgtacattctgaccctgcggaaaaagtggaaggattgtaaactgcgtatttacgtcggtgggaagatcaatcggatcgaagaagaaaagattgtcatggcctccctgctgtccaagttccggatcaagttcgctgatatccatatcattggggacatcaacattcgccctaataaggaatcatggaaagtgtttgaggaaatgatcgaaccttaccgcctccacgaaagctgtaaggacctgacgacggcggagaagctcaagcgggagactccttggaagatcaccgacgcggaattggaagccgttaaggagaaatcctaccgccaggtgaggctgaatgaactgttgcaggaacactcacgcgctgcgaacctgatcgtgttgagcctgccggtcgcacgtaaaggaagcatctcggacctgctgtacatggcctggctggagatactcacgaaaaacctgcctccggtcttgctggtgagaggaaaccacaaaaatgtgttgaccttctactcg

SEQ ID NO: 71560 - DNA, 3297 bp, Artificial Sequence
  derived and/or modified sequence
atgtcattgaacaattcctccaatgtgttcttggattccgtgcctagtaacactaatcgctttcaagtcagcgttattaacgagaaccatgagtcatccgctgctgctgacgataatacagatccacctcattatgaggagacatcatttggagatgaggcccagaaacgcttgcgaattagcttccggccgggcaaccaggaatgctatgacaacttcctgcagtctggagaaacggccaagaccgatgcttcattccacgcttacgatagccataccaatacatattacctacagacattcgggcataacacaatggatgccgttccaaagatcgaatactaccggaatactggctccataagcggccccaaggtgaatcgaccttctctgctggagattcatgaacaactcgctaaaaatgtcgccgtgaccccttccagtgcagacagggtggctaacggtgacggcattcccggagatgagcaggccgagaataaggaggatgaccaggcaggagtagtcaagtttggatgggtgaaaggagtcctggttaggtgtatgctcaatatctggggtgtgatgctatttataagactctcatggatcgtaggagaggccgggatcggcctcggcgtgattatcatcggcctgtctgtggtagttaccaccctgaccggcatttcaatgagcgcaatctgtacaaatggggttgtgaggggcggcggtgcctactatcttatcagcaggagcctaggtccagagtttggtgggtcaattggattgattttcgcctttgctaacgcagtggcggtggccatgtacgtggtaggtttcgccgagacagtcgtcgatctgctgaaggaaagtgactctatgatggtggatccgaccaatgatataagaataatcggcagtattactgtggttattcttcttggaatctcagtggcaggaatggaatgggaagccaaggcacaagtaatcctgttggtgatactgctgatcgcaatcgcaaattttttcatcgggaccgtgattccgagtaacaacgagaagaaatcaaggggattctttaactaccaagcatctattttcgcggagaattttgggcctcggttcaccaaaggggaggggttcttctctgtttttgctattttttttcctgccgcgactggaatcttagcaggtgccaatattagtggcgatctggaagatcctcaggacgccatcccccgggggaccatgctcgccatctttatcacaacagttgcctacctgggcgtggctatatgtgtgggcgcatgtgttgtgagggacgccaccgggaacatgaacgatacaatcatctcaggtatgaactgtaatggaagcgctgcatgcggcctgggttacgacttctctcgctgccgccacgaaccctgccagtacggactcatgaacaactttcaggtgatgtcaatggtcagcggctttgggccactaatcacagccggcatcttcagcgctactctgtcctccgccctggcgtccttggtgtctgccccaaaggtgttccaggcactgtgtaaagacaacatctacaaagccttgcagtttttcgccaaaggctacggcaaaaataacgagcctctacgtggatacatcctcacctttctgatagcaatggccttcatccttattgccgagctcaatacaattgccccgatcatttccaatttctttctagcatcttatgccttaatcaacttctcctgttttcacgccagctacgcaaagtcccctggctggcggcccgcctacggcatctataatatgtgggtctccttattcggcgccgtactgtgttgtgccgtaatgtttgtcataaactggtgggctgctgtgatcacatatgtgatagagttttttctgtatgtgtatgttacttgtaagaagcctgacgtgaactggggctccagtacacaggccctaagttacgtgtcagccttagataatgccttggaactcacaaccgtggaagatcatgtgaaaaacttcaggccccagtgcatagtgctcaccggtggacccatgacgagaccagctctcctcgatattactcatgcatttaccaagaattccgggctgtgtatttgctgcgaagtttttgttggtccccgcaagctctgcgtgaaagaaatgaattccgggatggctaaaaagcaagcctggctcatcaagaacaaaataaaggctttttatgccgccgtcgccgccgattgcttccgggacggagtcaggagcctgctccaggcttcgggcctagggcggatgaagcccaacactctcgtgatcggatataaaaagaattggaggaaagctcctttaaccgaaattgaaaactatgtgggaatcatccatgatgcgttcgatttcgaaatcggagtggtaattgtgagaattagtcagggctttgatatttcccaggtgttacaggtccaggaagagctggagaggctcgagcaggaaagattggccttggaagcgacaataaaggacaacgagtgtgaagaggagagtggggggataagaggcctgtttaagaaggcagggaaactgaatattactaagactactccgaaaaaggacgggagcatcaacacctcacagtcgatgcacgtgggcgagtttaaccagaaactggtggaggccagcacgcagtttaagaaaaagcaggaaaaggggacaattgacgtatggtggcttttcgacgacggtgggcttaccctgctgatcccctatatactgacgctacgaaagaaatggaaggactgcaagctgcgcatttatgttggcggaaagattaaccgtattgaagaagagaaaatagtgatggcatcactgctatccaagtttcggattaagtttgccgatatccacatcattggcgacatcaacatacgacctaacaaggagagctggaaggtgttcgaagagatgatcgaaccttacaggctgcacgaatcatgcaaggacctgaccactgccgagaagctgaagagagaaacaccctggaagatcaccgatgccgaactggaggctgtcaaagaaaaatcatatcggcaggtgcggctgaacgagctgttacaggaacattccagggccgcaaacctgattgtgctcagcttgcccgtagcaagaaagggtagcatctccgaccttctgtacatggcatggttggagatcctcacgaagaatctgcctcctgtgctgctagtgaggggcaaccataagaacgtgctgaccttctattcg

SEQ ID NO: 71561 - DNA, 3297 bp, Artificial Sequence
  derived and/or modified sequence
atgtctcttaacaacagctcgaatgtctttctggactcagtaccgagcaatactaaccgttttcaggtgtctgttatcaatgaaaaccatgaatctagcgcagccgctgatgacaacacagatcctcctcactatgaagaaacctctttcggagacgaggctcaaaaaaggctgcgtatatcctttaggccaggaaaccaagagtgctatgataatttcttgcagtctggagaaacggctaaaacagatgcctccttccacgcatatgatagtcacacaaacacatattacctccaaaccttcggacacaacactatggatgctgtccccaaaatcgagtactataggaacacaggttccattagtggccctaaagttaaccgacctagccttttagagattcacgaacagttagccaaaaacgttgcggtgactccttctagcgcggaccgggtggcaaacggcgatggcattccaggtgatgaacaagccgagaacaaggaagacgatcaggctggagttgttaaatttggatgggttaagggtgtactggtgcgctgcatgttgaacatttggggagttatgttgttcattaggttatcttggatagtcggcgaggctgggatcggcctgggcgtaatcattattggactatcagtggttgttaccacccttaccggaatctctatgtcagctatttgcactaatggagtggtaaggggtggaggtgcttattacttaatatccagatccttgggtcctgaattcggggggtcaattggtttaatcttcgcattcgctaatgctgttgcagtggctatgtacgtagtaggatttgctgagactgttgttgatctgctaaaagaatccgacagcatgatggtagatccgaccaatgatataagaattatcggatcaataacagttgtcatactcctcggaatttctgttgccggtatggagtgggaggcaaaggcccaggttattttgctagttatcttgcttattgcaattgctaatttctttatcgggacagtgattccgtcgaataacgagaaaaaatccaggggtttcttcaactaccaggcttctatttttgctgagaattttggtccaaggtttaccaaaggagaaggttttttcagcgtctttgctattttttttcccgctgccacaggtatattagccggcgccaacatatccggagatcttgaagaccctcaggatgccattccccgtggtactatgcttgccatttttataacaactgtcgcatacttgggagtggcgatctgcgtaggtgcttgcgttgtaagggatgctaccggaaacatgaacgatacaattatttcggggatgaattgcaacggaagtgctgcttgcggactagggtacgacttctctcgttgtagacatgagccctgccagtacggtcttatgaataacttccaagtgatgtctatggtttcaggcttcggaccacttatcacagctggaatctttagtgccactctttcgtctgctctcgcttcactcgtttctgcaccgaaggtgttccaggctctgtgtaaagacaacatatataaggctttgcagttctttgcaaaaggttacgggaagaacaatgagcctttaagagggtatattcttactttcttaattgcaatggcatttatattaattgcagagcttaacactatcgctcccattataagcaattttttccttgcgagttatgccctgattaacttctcctgctttcatgcttcatatgctaaatcaccaggttggaggcctgcctacggcatctataacatgtgggttagtttgtttggtgctgttttgtgttgcgccgtcatgttcgttataaattggtgggctgctgtcataacctatgttatcgaattttttttgtacgtatatgtaacgtgtaagaaaccagatgtaaattggggctcaagtacacaagccttatcctatgtgtccgccttggataacgctcttgagttgactaccgttgaggatcatgttaagaactttagaccccagtgcatcgtgttgaccggaggacctatgacgaggccagctctgctggatatcactcacgcatttacaaaaaattccggattgtgcatttgttgtgaggttttcgttgggcctaggaaattgtgcgtgaaggaaatgaactccgggatggcaaagaaacaagcttggttgatcaagaataagattaaagctttttacgctgctgtagccgctgactgttttcgggatggggttcgttcattactccaggcttctggtttaggtcgaatgaaacctaacacccttgtaataggatacaaaaagaactggaggaaagcccctcttacagagatcgaaaactacgtaggtatcatccacgatgcttttgactttgagatcggtgtcgttatagttagaatcagtcagggatttgatattagccaggtgttacaagttcaggaggaactagaaagattagaacaggaaagacttgcccttgaggcaactattaaggataatgaatgtgaggaagaaagcggaggaatccgtggtttattcaagaaagctggaaagcttaatataactaagaccacaccaaagaaggacggttctataaacaccagtcagtctatgcatgtaggagagttcaatcagaagttggtggaggcttctactcaattcaaaaagaagcaggagaaaggtactattgatgtttggtggctatttgatgatgggggtttgacgcttttgattccatacattttaactttgagaaaaaaatggaaggattgcaaacttaggatttatgtaggcggtaagattaatagaattgaagaagaaaagattgtaatggcttctttattgtccaaattcagaataaaattcgccgatatacacatcattggtgacataaacatcaggcccaataaagagtcatggaaggtttttgaagagatgatcgaaccatacagactccacgagagttgcaaggatcttacaactgctgagaagcttaagagggaaacaccttggaagataaccgatgctgaacttgaggcggtaaaggagaagtcttatcggcaagtgagattgaacgaacttcttcaagaacactctagagctgccaatctgatcgtgctctccctaccggtggctaggaaaggtagtattagcgatttactttatatggcgtggcttgagattctcacaaaaaacttgccacctgtacttcttgtccgaggaaaccataaaaatgtgctgaccttttattcg

SEQ ID NO: 71562 - DNA, 3297 bp, Artificial Sequence
  derived and/or modified sequence
atgtctctgaacaactctagcaacgtttttttagatagtgtccctagcaacacgaatcgatttcaagtgtctgtcatcaacgagaatcacgagagttccgcagcagcagacgacaacacggatcctccacactatgaggagacttctttcggggatgaggcccagaagagactacgcatttcctttagacccggcaatcaggagtgttacgataatttcttgcagtctggcgaaaccgcgaagactgacgcctcctttcatgcatacgatagccacaccaatacgtactatctgcagacattcggccataacacaatggacgcagtcccgaaaattgaatattacagaaacactggaagcatcagcggtccgaaggttaataggccttcgcttctggagatccatgaacagctagcgaaaaacgtcgccgtcacaccctcatcagctgatagggtggccaatggagatggtatccccggtgacgagcaagctgagaataaagaagacgatcaggctggagtggttaagtttggctgggtgaagggagtgttagtccgctgcatgctcaatatttggggcgtcatgctgtttatccgactgtcgtggattgtgggggaggccggtataggcctgggcgtgataattatcggcctgtcagtggtggtgactacccttacggggatttcgatgtcagccatctgcacaaatggggtcgtgcgcggagggggcgcttattatcttatctccaggagcctgggtccggagtttgggggaagcatcgggctgatttttgcttttgccaacgcagtggctgtggccatgtacgtggtggggtttgccgaaactgtggtggacttgctgaaagaaagtgacagcatgatggtcgaccccactaatgacatcagaatcattggatcaatcaccgtggttatcttacttggaatctcagttgcagggatggaatgggaagcaaaggctcaagtcatactgctcgtgatcctattaatagcaatcgcgaactttttcatcggaacagtaataccaagtaacaacgagaagaagtctaggggcttctttaattatcaagccagcatctttgcagagaactttggcccacgttttacgaagggcgaggggtttttttcagtgttcgccattttttttcctgccgcgacaggaatactggcgggggcgaatatttccggggaccttgaggacccacaggatgcgattccacggggcacaatgctggccattttcatcactactgtggcttacctgggggtcgccatttgcgtaggtgcctgtgtggtgcgggacgccacgggaaacatgaacgataccataattagcggcatgaactgtaatggaagtgcagcttgtgggctgggatatgacttcagccggtgtagacatgaaccttgtcagtacggcctgatgaacaattttcaggtcatgtctatggtgagcggtttcggtcctttgatcaccgccgggatcttttctgcgaccctgtcatctgctctcgcaagcttagtatctgctccgaaggtttttcaagccctgtgcaaggataatatctacaaagcgttgcagtttttcgccaagggctatggaaagaacaacgaacccctccggggttatatcctcaccttcctgattgccatggcatttattctgatagccgaactaaacacgatcgccccaataatttctaactttttcttggcctcttatgcattgatcaacttctcatgtttccatgccagttacgcgaaatctcctggttggaggcccgcgtatgggatatacaacatgtgggtcagtctgtttggagccgtgctatgctgcgccgtgatgttcgtcattaattggtgggccgccgtgatcacatatgttatagaattcttcttgtacgtgtacgtgacttgtaaaaagccggacgtgaattggggaagctcaacccaggcgctgagttacgtgtctgctttagacaacgccctcgagcttacgaccgttgaagaccacgtgaagaacttcagaccacagtgcatcgttctgactggtggcccgatgacccggcccgccttgcttgacatcacacatgcattcactaagaattccggactgtgtatctgttgcgaggtatttgtggggccccggaaactttgcgtaaaagagatgaatagtggaatggccaaaaagcaggcctggctgatcaaaaataagattaaagccttctatgcagctgttgccgcagattgctttcgagacggcgttagatcgctgctgcaggcaagtggcttggggcgaatgaaaccgaacaccctggttattggctacaagaagaactggaggaaggcccctctgactgagattgaaaactatgtgggaatcatccatgatgcatttgatttcgaaattggggtggtgattgtacggatctcgcaaggattcgacattagccaagtgttacaggtgcaggaggaactcgagagactcgagcaggagagactggccctggaggcaactattaaggataacgaatgcgaggaggagagcggcggtatccgtggattgttcaaaaaggcaggaaaattgaacatcacaaaaacaacccccaagaaagatggaagcatcaatacctcccagtccatgcacgtgggagagttcaaccagaaactggttgaagcgtctactcagtttaagaagaagcaggaaaaagggaccatcgacgtttggtggctgtttgatgacgggggtctgaccctgctgataccttacatcctgacactgcgtaaaaagtggaaagattgcaaacttaggatatacgttggcggcaaaataaatcgtatcgaagaggaaaagattgtcatggccagtttgctttcaaagtttcgcattaagtttgcggacattcacataataggtgacattaatatcaggcctaacaaagaatcctggaaggtcttcgaggagatgatcgagccttatcggttgcatgagtcttgtaaggatcttactaccgcagaaaagcttaaacgtgaaacaccatggaagattaccgatgcagaactcgaagccgttaaggaaaaatcctaccggcaggtgcgcctcaatgaattgcttcaagagcacagcagagcggccaatctcatcgtgctcagtctgcctgtagcacgtaagggatctatttctgacctactgtatatggcttggctggagattctgactaagaacctccctcctgtcctgctagtgagaggcaaccataaaaacgtactcacattttactca

SEQ ID NO: 71563 - DNA, 3297 bp, Artificial Sequence
  derived and/or modified sequence
atgtctctaaacaatagttcgaatgttttcctcgactcggtcccatctaacacaaaccggtttcaggtgtctgttattaacgagaatcacgagagctccgccgcagcggatgataatactgaccccccacactacgaagaaacctcgttcggtgacgaggcgcaaaaacggttgcgcatttcttttcgcccgggcaaccaagaatgttacgataacttcttacagagcggagaaacagccaagacagacgcgagcttccacgcttacgattctcatactaatacctattatcttcagaccttcggccataacactatggatgccgtacccaaaatcgaatactatcgtaataccggttcaatctccggacccaaggtgaaccggccttcgcttctggagattcacgaacaacttgctaaaaatgttgccgttaccccatcatccgctgatcgggtcgcaaatggcgacggcatcccaggcgacgagcaggcagaaaataaggaggatgaccaggccggcgtcgttaaatttggttgggtgaagggagttctggtcagatgcatgcttaacatctggggcgtcatgctgttcataaggttgagctggattgtgggggaggctggtataggtttgggcgtgattattatcgggctgagtgtagttgtgactaccttaaccggtatcagcatgtcagcgatttgtacaaacggggtggttaggggaggcggtgcgtactacctgatctcacgctcgctcggccctgagtttggaggcagcattgggctgatctttgcattcgcaaatgccgtagccgtagctatgtacgtcgtaggttttgcagaaaccgttgtggatcttctgaaggaatctgactcaatgatggtggatcctacgaacgacattcgtattatcggatcaatcactgttgtgattctcctcgggatctctgttgcgggtatggagtgggaagcaaaagctcaagtgatactgttggtgattttgctcattgccattgctaatttcttcattggcacggttattccttcgaataacgaaaaaaagtcgcggggtttcttcaactaccaggcatcaatttttgctgagaactttgggccccgcttcaccaagggcgaaggcttcttcagtgtgtttgcaattttcttccctgcagcgacgggaatcctcgctggcgctaacatctctggtgatctagaggacccccaggatgccattccgcgtggaaccatgcttgctatcttcatcaccaccgtggcctatttgggcgttgccatctgtgtgggcgcctgtgtcgtccgagacgctacggggaacatgaacgatacaataatctctggtatgaactgtaatggttccgccgcctgtgggttaggttatgatttctctcgttgtcggcacgagccctgccagtacggtttgatgaacaatttccaggtaatgagcatggtctcgggctttggtcctttgattacagccggaatcttctcggcgaccctaagctcggcacttgcatctctggtctctgctcctaaggtgtttcaggcactttgcaaagataacatttacaaggcgttgcagtttttcgcgaagggatatggaaaaaataatgaaccattgcgtgggtacatactcacctttctgatcgcaatggcatttatccttattgcggagcttaacactatcgcacctatcatttcgaacttctttttggcttcatacgcactgattaacttcagctgtttccatgcatcttacgccaaatctcctgggtggcgaccagcttatggaatctataacatgtgggtgtcattgttcggtgctgttttatgttgcgccgtcatgttcgttattaactggtgggccgcggtcataacctacgtaatcgagttcttcctctatgtctacgttacatgtaagaagccggacgtcaattggggttcgtcgactcaggcacttagctatgttagcgctttggataatgctttagaactcaccaccgttgaagaccacgtcaagaactttcgtccacaatgcattgtgctaaccggaggaccaatgaccaggccggcgctgctggatatcacgcatgcctttaccaagaatagcggactgtgtatctgttgtgaagtctttgtcggccccaggaaattgtgtgttaaagaaatgaattctgggatggcgaaaaagcaggcttggctcattaagaataagatcaaggccttttacgcagccgttgccgccgattgcttcagggacggagtacggtccttattgcaagcttctgggctgggtcggatgaaacccaacacgttggtcattggatataaaaaaaactggcgaaaggcaccccttactgaaattgaaaattatgttggaataattcatgatgcgtttgacttcgagatcggcgttgtcatcgtgcgtatcagtcaaggattcgatatctcccaagtcttgcaagtgcaggaggaactggagcgtctcgaacaggaaagacttgcgctagaagcgaccataaaggataatgaatgcgaagaggagtccgggggtattcgtgggttgttcaaaaaggctggcaagctaaacatcacgaagacaacccccaagaaagatggatctattaacaccagccagtcaatgcacgtgggggagtttaaccagaagctcgtcgaggccagcacccaattcaagaagaaacaggagaagggtacaattgatgtctggtggctgttcgacgacggcgggctgacgttgctcatcccctacattcttactttgcggaagaaatggaaggattgcaaacttcgcatatatgtaggtggcaagataaaccgcatagaagaagagaaaattgtgatggcctccttgctctctaaattccgcattaagttcgcggatattcatatcattggtgatataaacatccggccgaacaaagagtcttggaaagtgtttgaagagatgattgagccatatagacttcacgagtcctgtaaggatttaacgactgcggagaagctcaaacgtgagaccccttggaagatcactgatgctgagctcgaggccgttaaggaaaagtcgtaccgccaagtccggcttaacgagttgctacaggagcattccagggcagcaaatctcatcgtattgagtcttccagtcgctcggaagggttctatctctgatttgttgtatatggcatggctcgagatacttacgaagaatctacctccggtgcttctggtccgaggcaaccataagaatgtactcacgttctactcc

SEQ ID NO: 71564 - DNA, 3297 bp, Artificial Sequence
  derived and/or modified sequence
atgtctctgaataattcatccaatgtgtttctggactccgtgccctcgaatacaaacagatttcaagtgtcggttattaatgaaaatcacgaaagctcagcggcagctgacgacaataccgacccgccccattacgaggagactagcttcggcgatgaagcacaaaagcgtctgcgaatctcattccgacccggcaaccaggaatgttacgataactttttacagtcaggagaaactgcaaagaccgatgctagtttccacgcgtatgattctcacactaacacatactatcttcagacattcgggcacaacaccatggatgcggtcccaaaaatcgaatactatcgcaacaccggcagcattagcgggcctaaggttaaccggccgagcctcttggagatccacgagcaactggctaagaatgtcgccgttacgcccagcagcgccgaccgagtggctaacggagatgggattcccggggacgagcaggctgagaacaaagaggacgatcaggctggtgtggttaagttcggctgggttaagggagtactggtccgatgcatgctcaatatttggggagtgatgctgtttatcagattgagttggatcgtgggagaagccggcatcggcctgggagtcatcatcataggactgtcagtggtggtaaccaccctgaccggcatctctatgtccgcaatatgcacaaacggggtggtgaggggcgggggggcttactacctgatatcccgaagtctcggccctgagttcggggggagcattggtctgatatttgcgtttgccaacgccgtggccgttgcaatgtatgttgttggcttcgccgagacagtcgtggacctactgaaggagtccgattctatgatggtcgaccctactaatgatatccgcatcattgggagcatcaccgttgtcattttgcttggcatttctgtggccgggatggagtgggaagctaaagcccaagtcatcttactagtgatcctcttaattgccatcgctaactttttcatcgggactgtgattcctagcaacaacgaaaaaaagtctcggggctttttcaactaccaggcctccatctttgccgagaattttggccctaggttcactaagggcgaaggcttctttagcgtgtttgcaatcttctttccggctgctactgggatccttgctggagccaatatatccggcgatttagaggatccccaagacgcaatcccgcgcggaaccatgctggccatcttcattacaacagtggcatatctgggagttgccatctgtgtcggcgcctgcgtcgttagagatgcaactggcaatatgaatgataccatcatctcagggatgaactgtaatggatcagctgcctgtggtctgggctacgacttcagcaggtgtcggcatgagccgtgccagtatggactcatgaataatttccaagtgatgtccatggtgtctgggttcgggcctttgattacggccggaattttctctgccactctcagctccgcgttggcctccctggtgtctgcccctaaggtatttcaagctctctgtaaggacaatatctacaaggcactgcagttcttcgctaagggctacggcaagaacaatgaacctctgcgcggctatattctgacattcctgatagctatggcatttatacttatagccgaactgaatacgatagccccaattatcagtaatttcttcctggcaagttacgccctcattaatttctcctgttttcacgccagctacgctaaaagtcccgggtggcgcccagcgtatggcatatacaacatgtgggtgtcactctttggcgccgtgttgtgctgcgccgtgatgttcgtgattaactggtgggctgcagttattacgtatgtgatcgaattcttcctgtatgtatatgtaacctgcaagaagcctgatgtcaattggggcagtagcacccaggctctttcttacgtttcggccctagataatgccttggagttgacgacagtagaggatcatgtgaaaaacttccggccacaatgcatcgtactcacagggggacctatgactaggcccgctctgctggatattacacatgcttttactaaaaattcaggcctctgtatttgttgcgaagtctttgtgggcccccgcaagctttgcgttaaagaaatgaactctgggatggctaaaaagcaggcatggctgataaaaaacaaaatcaaagccttttacgctgctgtcgccgccgactgttttcgcgatggcgtgcgcagcctgctgcaggctagcggattaggacggatgaaacctaatacgctggtgatcggctacaagaaaaactggcggaaagctcccctcaccgaaatcgagaattacgtgggtatcatccatgacgcttttgattttgagatcggagtcgttatagtgagaatttcacagggcttcgacataagccaggttctccaggttcaggaggagctcgagcggctcgaacaagaacgcttggcacttgaggcgaccatcaaagacaacgaatgcgaagaggagagcgggggtataagggggctcttcaaaaaggccgggaaactaaacatcactaaaactacccccaaaaaggacgggtccattaacaccagtcagtcaatgcatgtcggagagttcaatcaaaagcttgttgaagctagcacccagtttaagaaaaaacaggaaaagggaacaattgacgtctggtggctgttcgatgatgggggcctgacactcttaatcccttacattctcactctgagaaagaaatggaaggactgtaagctgcggatatatgtcggggggaaaattaatagaatagaagaagaaaagattgtgatggccagcctgctcagtaagttccggattaagttcgcagatattcacattatcggggacatcaacatcagaccaaacaaagaatcgtggaaggttttcgaagagatgatcgagccatacaggctgcacgaatcctgcaaggaccttaccaccgctgagaagttaaagagagagacaccatggaagatcactgatgcagaacttgaagcagtaaaggaaaagtcataccgccaggtcagacttaatgagctgctccaagaacacagtcgggcggctaacctgattgtgctgtctctgcctgtggctcgaaaaggctccatcagtgacctgctatacatggcatggttggaaatcctgaccaagaatctgccccctgtgctgctggtgcgcggcaatcacaagaacgtgctgactttttacagt

SEQ ID NO: 71565 - DNA, 3297 bp, Artificial Sequence
  derived and/or modified sequence
atgtcgctcaacaactcgtccaatgtctttctcgatagcgtgccaagcaataccaatcggtttcaggtgtcagtgatcaacgagaaccacgaatcgtccgctgctgccgacgacaataccgatccgccacactacgaagaaacttcgtttggagacgaagcacagaagaggctccgcatttcatttaggccgggcaaccaagagtgttacgataactttctgcaatccggggagactgccaagaccgatgcctccttccatgcgtacgactcccatactaacacgtactacctgcagaccttcggacacaacacgatggatgcagtcccaaagattgaatactatcggaacactggttccatttccggacccaaagtgaaccgaccgtcgcttctcgagatccatgaacagctggcgaaaaacgtcgcggtgaccccatcttcagccgatcgggtggcgaacggagacggaatccctggcgatgaacaggctgaaaacaaggaagatgaccaagccggtgtcgtgaaattcggctgggtgaaaggagttctggtcagatgcatgctcaacatttggggagtgatgctgtttatccggctgtcatggatcgtgggcgaagcaggaattggactgggcgtgatcatcatcgggctcagcgtggtggtcactaccctcactggcatcagcatgtcagccatttgcactaacggcgtcgtgcggggcggaggagcttactaccttatttcaagaagcctcgggccagaatttggcgggtccatcggactcattttcgcctttgccaacgcggttgcggtggctatgtacgtggtcgggtttgctgaaacggtggtggacttgctcaaagaatcggactcaatgatggtggatccgaccaatgacatccgtattatcggatcgatcaccgtcgtcattctgctcggaatctccgtggcaggcatggagtgggaggccaaagctcaagtgatcctgctcgtgatcctgcttattgcgattgccaactttttcattggaactgtgatcccttcgaacaacgaaaagaaaagtagaggattcttcaattaccaggcatccatctttgcagagaatttcgggccgcgcttcaccaagggagagggattcttctcggtctttgccatcttcttcccggcggccaccggcatcctggctggagcaaacatctccggggacctggaggaccctcaggatgctatccctaggggtacgatgttggcaatcttcatcaccactgtggcctaccttggcgtggcgatctgcgtgggcgcgtgtgtggtccgggacgcgactggcaacatgaacgatactatcatttcagggatgaattgcaacgggagcgccgcgtgcggattgggatacgactttagccggtgtcggcatgaaccctgccagtacggtttgatgaacaatttccaggtgatgtcaatggtgagcggattcggaccgctgataaccgcgggaattttctcagcaaccctgtcgtcggcgctcgccagcttggtcagtgccccaaaggtgttccaagccctgtgcaaggacaacatctacaaggcactgcaattcttcgcaaagggttacggaaagaacaacgaaccgctgcgcggctacatcctgaccttcctgatagcaatggcattcatcttgattgccgaactcaacactatcgcccctattatcagcaacttctttctcgcctcctacgctctcattaacttctcctgtttccacgcctcatacgcgaagagtccgggttggcggcccgcgtatggtatttacaatatgtgggtgtcactcttcggagccgtgctgtgctgtgcggtgatgttcgtaatcaattggtgggccgcagtcattacctacgtcattgaattcttcttgtacgtgtatgtgacctgcaagaagccggatgtgaattggggcagcagcacccaagctctgtcgtacgtgagcgccctggacaatgctttggagctgactaccgtggaagatcatgtgaagaactttcgcccgcagtgcatcgtgctcactggcggaccgatgacgcggccggctctgctggacatcactcacgcgttcactaagaattccgggctgtgcatatgttgcgaggtgttcgtgggcccaaggaagttgtgcgttaaggagatgaatagtggtatggcgaagaagcaggcctggcttatcaagaacaaaatcaaggcgttctacgcggccgtcgccgccgactgcttccgcgatggcgtccgcagcttgctccaagcatccggcctcggcagaatgaagccgaacaccctggtgattggatacaaaaagaactggcgaaaagcccccctgacggagatcgagaattacgtcggtattatccacgatgctttcgactttgaaatcggtgttgtcatcgtaagaatctcccaaggattcgacatctctcaagtcctgcaggtgcaggaggaactggagcgcctggaacaggaacgcttggcgctggaggcaactatcaaagacaatgaatgcgaggaagagtccggaggaatccggggactcttcaagaaggctggaaagctgaacatcactaagactactccgaagaaagatggatctatcaacaccagccaatcaatgcacgtgggtgaattcaatcagaaacttgtcgaagcgagtacccaattcaaaaagaagcaggagaagggaactatcgacgtctggtggctgtttgacgatggcggtcttactctcctcatcccatacatcctcactctccggaaaaagtggaaggattgtaaacttcggatctatgtggggggaaagatcaatagaatcgaagaagaaaagatcgtgatggcctcgctgctgtccaagttccgaattaagttcgcagacatccacatcatcggagatatcaacatccggcctaacaaggaatcatggaaggtttttgaggagatgatcgagccgtataggctgcacgagagctgcaaggatcttactaccgcggaaaagctgaaacgagagactccttggaaaatcactgatgccgagctcgaggcagtgaaagagaaatcatacaggcaggtgcggctcaacgagctgctccaggaacacagcagagcggccaatctgatcgtcctctcactgcctgttgctcgcaaagggtcaatctccgaccttctgtacatggcttggttggagatcctgaccaagaatcttcccccagtgttgctggtgcgcggaaaccacaagaatgtgctgactttttacagc

SEQ ID NO: 71566 - DNA, 3297 bp, Artificial Sequence
  derived and/or modified sequence
atgtccctcaacaactcctccaacgtgtttctggactccgtgccgagcaatactaaccgcttccaagtgtctgtgatcaacgaaaaccacgagtcgtcagccgcagccgatgacaacactgaccctccgcactatgaggagacttccttcggtgatgaagcccagaaaaggctgcggatctcgtttcgaccaggtaaccaagagtgctatgacaattttctgcaatccggagagactgccaagaccgacgcttcattccacgcctacgactctcacaccaacacctactacttgcaaacttttggacacaacactatggatgcggtgcccaagatcgaatactacagaaacactggatccatatctggaccgaaggtgaatcgacccagcctcctggagattcacgaacaactggcgaagaacgtcgcggtgaccccgtcgagcgccgatcgggtggctaatggagacggaattccgggcgatgagcaggctgagaacaaagaggacgatcaagcaggggttgtgaagtttggttgggtcaagggcgtgctggtaagatgtatgctgaatatctggggagtgatgctgtttatccgtctgtcgtggatcgtgggcgaagctggaatcgggctcggggtcatcatcatcgggctttcggtagtggtcactactctgactggaatctctatgtctgcaatttgcactaacggagtcgtgagaggcggaggagcttactacctcatctcccgctcgctcggaccagaatttggtggctcgatcggcctcatcttcgccttcgccaacgcggtggctgtggccatgtacgtggtcggatttgccgaaacggtggtggatcttctcaaggaatcggattcaatgatggtggaccctaccaacgacatcagaattatcggctcaatcaccgttgtaatcctcctgggcatctcagtcgccggaatggaatgggaggcaaaagcacaggtcatcctgctcgtcatccttctgatcgccatcgcaaactttttcatcggcaccgttatcccatcgaacaatgaaaagaagtcccgcggattcttcaactaccaggcatcgatcttcgcggagaatttcggcccaaggttcactaagggagaaggattcttttccgtctttgccatcttcttccctgcagccactggaatccttgccggcgcgaacatcagcggcgacctggaggacccacaggatgccatcccacgcgggaccatgcttgcaattttcattaccactgtggcatacctgggtgtggcgatctgtgtcggcgcttgcgtcgtgcgggacgcaaccggaaacatgaacgatactatcatctcgggaatgaattgtaacggaagcgccgcgtgcggcctcggctacgacttctctcgctgtcggcacgaaccttgccagtacggcttgatgaataacttccaggttatgtcgatggtgtccggattcggacccctgatcaccgcgggaatcttctcggcgaccttgtcgtccgcactggcctcgctggtgagtgccccgaaagtgtttcaagccctgtgtaaagacaatatctacaaggccctgcaattcttcgccaaggggtacggaaagaacaacgagccactgagagggtacatcttgaccttcctcatcgccatggccttcatattgatcgctgagctcaacaccattgcaccaatcatctccaacttcttcctggcctcatatgccctcatcaacttcagttgcttccatgcgtcatacgcgaagtcgccgggttggcggccggcctacggtatctacaacatgtgggtgtcgcttttcggtgcggtcctgtgctgcgccgtgatgttcgtcataaactggtgggcggcggtgatcacttacgtgatcgagttctttctctacgtttacgtgacctgtaaaaagccggacgttaactgggggagctcaacccaggccctgagctacgtgtccgcgctggataatgcactcgagttgacgactgtcgaagatcacgtgaagaatttccggccgcagtgcatcgtgcttaccggaggcccgatgaccagaccagctttgctggacattacccacgcgttcacgaagaatagcggactgtgcatctgctgtgaagtgttcgttggtccgcgaaagctgtgcgttaaggagatgaacagtggcatggccaaaaaacaggcctggctcattaagaataagataaaggctttctatgcagccgtcgctgctgactgcttccgcgatggagtccggtcactcttgcaagctagcggactcggaaggatgaagccaaatacgctggtgattgggtacaagaaaaactggcggaaagcacctctgacggagattgagaactacgtggggattattcatgatgcgttcgactttgagataggcgtggtcatcgtgcggatctcacagggattcgacatcagccaggtcctgcaggtgcaagaggagctcgaacgcctcgagcaggagcggctggcccttgaagctacgattaaggataacgaatgcgaagaagaaagcggagggatcaggggcctgttcaagaaagccggcaaattgaatatcaccaaaactaccccgaagaaagacggatcaatcaatacttcacagtccatgcatgtgggtgaattcaatcaaaagctggtcgaagccagcacccagtttaagaagaaacaggaaaaggggacgatcgacgtgtggtggctctttgacgatggagggctgaccctcctcatcccttacatcctcacccttcgcaagaaatggaaagactgcaaattgcggatctacgttggaggaaaaatcaatcgcatcgaagaggaaaagattgtcatggcctccctgctcagcaagttccggattaagttcgcagatattcatatcatcggagacatcaacatcaggcctaacaaagaatcctggaaggtgtttgaggaaatgatcgagccgtaccgcctccatgaaagttgcaaggacctgaccaccgcggaaaagttgaagagagaaactccctggaagatcactgacgcagaactggaagccgtgaaggagaagagctacagacaggtgcgcctgaatgagttgctccaggaacattcacgcgcggctaacctgatcgtgctctccctgcctgtggcgagaaaaggatcaatctcggatcttctttacatggcgtggctggaaatactgaccaagaatctgccgccggtcctgctggtgaggggcaatcacaagaatgtgctcactttctactcc

SEQ ID NO: 71567 - DNA, 3297 bp, Artificial Sequence
  derived and/or modified sequence
atgtctctgaataattctagtaacgtgttcttagattctgtccctagcaacacaaaccggtttcaggtttcagtgataaacgagaaccacgagtcgagtgctgcagccgacgataacaccgacccgccacattatgaagaaacatcattcggcgacgaagcacagaaaagactgaggatttcctttagacctggcaaccaagaatgctatgataatttcctacagtccggcgaaactgcaaagaccgacgcgagctttcacgcctacgattcgcacactaacacctactacctgcagaccttcggccacaacacgatggacgccgtgccaaaaatcgaatattatcgtaatacaggatctatttcgggccccaaggtgaaccgcccctcattacttgagatccacgagcagctggctaaaaatgtggcagtgaccccctctagcgccgaccgcgttgctaacggggacggtatacctggggacgagcaagcggaaaacaaagaggacgaccaggccggagtggttaaatttggttgggtaaaaggggttctggtgcggtgtatgctgaatatatggggagtgatgctctttatacgcctcagctggatcgttggagaggcaggcattggcctgggagtcatcatcatcggattatcagtggtcgtaacgacccttacaggcatttccatgtccgccatctgtaccaacggggttgtgaggggcgggggtgcttactatttgatttctcgctcgctgggccctgagttcgggggcagtattggtctaatctttgcctttgccaacgcagttgccgtggcgatgtatgttgtcggttttgcggaaactgtggtcgaccttttaaaagaaagcgactccatgatggttgatccgactaacgatatccggattatagggagcataacggttgttattctgctggggatctccgttgccggcatggaatgggaagcaaaggcccaggtcattttgctggtcattctattaattgctattgctaactttttcattggtaccgtgatacccagcaacaatgaaaaaaagagccgggggttttttaattatcaggcttcaatcttcgccgagaattttggcccacgcttcactaaaggcgaaggttttttttctgtgttcgccatattcttccctgcagcaaccggcattctagccggtgccaacatctcaggagatctggaggatcctcaggacgcaataccccgaggcacaatgctggccatctttataacgacagtcgcgtatttaggcgtggctatctgtgtcggtgcttgcgtggtccgagacgccacaggcaacatgaacgacactatcatcagtggcatgaattgcaatggctcggccgcttgtgggttggggtacgacttttccaggtgtcgccatgaaccatgccagtatggcctgatgaacaatttccaggttatgtctatggtttccggtttcggacctcttatcacggccggaattttctcggccacgctgagcagcgccctcgcttctctggtctctgccccgaaggtcttccaggcactttgcaaggataacatttacaaggccctgcagttttttgccaagggctatggtaagaacaatgaaccgctgaggggatatatcctcacattcctgatcgcgatggccttcattctcatagccgagctcaatacaatagctcctataatcagcaacttctttctcgcgtcttatgccttaatcaatttctcctgttttcatgcgtcttacgccaaatcccccgggtggcgccctgcatacggcatatacaacatgtgggtgagtttgttcggggcggtgttatgctgtgcagtaatgtttgtgataaattggtgggcagccgtaattacctatgtgatcgaattctttctgtacgtgtatgtcacttgcaagaagccagacgtcaactggggatcatcaactcaggctctgtcttatgtctcagccctagataatgccttggagctgactacagtggaggatcatgtgaaaaacttcaggcctcaatgcatagttcttacaggaggaccaatgaccagacctgctctgctggatattacacatgcattcacgaaaaattcggggctttgtatatgctgcgaagtgtttgtaggtccccggaaactctgtgtgaaggagatgaattctgggatggccaaaaagcaggcctggttgattaaaaacaaaatcaaggctttttacgccgcggtggcggctgattgcttcagggatggtgttagaagccttcttcaggcatccggtctgggaagaatgaagccgaacaccctggtgattggatataagaagaattggaggaaagctcccctgaccgagatcgaaaattacgtcggaatcatacacgatgcatttgacttcgagatcggcgtggtgatcgtccgcatatcgcagggcttcgacatctcccaggtcttgcaagtacaggaggagctggaacggcttgagcaggaacggctcgcattggaggccactatcaaggacaatgagtgtgaagaagagtcaggggggatacgagggctttttaaaaaggcaggcaagctgaacattacgaagacaaccccaaagaaggatgggagcatcaatacgtctcagtcgatgcacgtcggtgagtttaaccagaagttggtggaggcatccacccagtttaaaaagaaacaggaaaagggtactattgacgtgtggtggctgtttgacgatggcggattgacgctgctcatcccttacatactgactcttcgcaaaaagtggaaggactgcaaacttcggatctatgtcgggggaaagatcaatcgaatcgaagaagaaaagatcgtgatggcttctcttctttcgaagttccggatcaaatttgctgatatccacatcattggtgacatcaatattaggcccaataaggaatcctggaaggtttttgaggagatgatcgagccatatagactgcatgagagttgtaaggatctgacaactgccgagaaactcaaaagggaaaccccttggaaaataactgatgcggaactcgaagcagtaaaggaaaaaagctaccggcaggtcagactcaacgagctgttacaggagcatagcagagctgcgaatctgatcgttctctccctgccagtagctcgtaaagggagcattagcgacctgctgtacatggcctggcttgagattctgaccaagaacttgccaccggtgctgctcgtgaggggcaaccacaagaacgtgctaactttttactcc

SEQ ID NO: 71568 - DNA, 3297 bp, Artificial Sequence
  derived and/or modified sequence
atgtcccttaacaactcctccaacgtctttcttgactcggttccttcgaataccaacaggtttcaggtgtccgtcataaacgaaaatcacgagtcctccgcagcagcagacgacaacaccgacccccctcattacgaagagacttcgtttggtgacgaagctcaaaagaggctcagaatctcatttagaccagggaatcaagaatgttacgacaattttctgcagtcaggtgaaactgcaaagactgatgcctcattccatgcatacgactcacatacgaatacttactatctccaaaccttcggtcacaataccatggatgcagtgccgaaaattgaatactaccggaacaccggaagtattagtggacctaaagtgaacaggccatccctgctggaaatacacgagcaactcgccaaaaatgtggccgtgaccccctcctcagcagatcgtgtcgccaatggggatggcattcccggagatgaacaagcggagaacaaggaagatgatcaagcaggagtggtgaagttcggatgggtcaaaggtgtgctggtcaggtgtatgctgaatatctggggcgtcatgctgttcattaggctttcctggattgtgggagaagccgggattggacttggagtgatcattatcgggctgtcggtggtcgtcacgactctgaccggcatatcgatgtcagccatttgtactaacggagtggtgagaggcggaggtgcgtactacctcatttcacgctcactcgggccagagttcggaggctccatcgggctcatttttgcatttgccaatgcggtcgcagtggccatgtacgtcgtcggttttgcagagactgtggtggatctgcttaaagagtcggacagcatgatggtggatccaaccaacgacatccggataattggatccatcacggtcgtgattcttctcggcatttcagtggcaggtatggagtgggaagccaaggcgcaagtcattcttttggtgattctgcttattgcaatcgcaaactttttcattgggaccgtgatcccttccaacaacgagaagaagagccggggatttttcaactaccaggcatccatattcgccgagaactttgggccgagatttaccaaaggagaaggtttcttttccgtctttgccatcttttttccagcagcaactggaattcttgcaggagccaatatcagcggggacctggaagatccacaggacgccatcccgcgtggtaccatgcttgccatattcattacgactgtggcgtacctgggggttgcaatctgtgtgggtgcatgtgtggtgcgcgatgcaaccggaaatatgaatgataccatcatctcgggtatgaactgtaatgggagcgcagcatgtggcctgggatacgattttagccgatgccggcatgaaccctgtcagtatgggctcatgaacaattttcaggttatgtcgatggtgtcgggtttcggcccactgatcaccgcaggaatcttctccgccaccctttcgtccgctcttgcatcgctcgtgtcagctcctaaagtgtttcaagctctctgcaaggacaacatctacaaggcgctgcagttctttgctaaggggtacggcaagaacaacgaaccactcagggggtacattctgacttttctgattgcaatggctttcattttgattgcagaactgaacaccattgctcctatcatctctaactttttcctggcaagctacgcactcattaacttctcgtgttttcacgcatcctacgcaaaatcgccgggatggaggcctgcgtacggtatctacaacatgtgggtcagcttgttcggggcagtcctttgttgtgcggtcatgtttgtcattaactggtgggccgcagtgattacttacgtcattgaattcttcctttatgtgtacgtgacttgcaaaaagcctgacgtaaattggggatcgtcaactcaagctctcagctacgtgagcgcacttgacaacgcccttgaactgacgaccgtcgaagatcacgtcaaaaacttcagaccccaatgtattgtgcttaccgggggaccgatgactcgacccgccttgttggacatcactcacgcatttaccaagaattcagggctttgcatttgttgcgaagttttcgtcggaccgaggaagctgtgtgtgaaggaaatgaactcgggaatggcgaagaagcaagcgtggttgattaagaacaagattaaggccttttacgctgcggtggcagccgactgtttccgcgatggagtccgttctctgctgcaggcttcaggtttgggacgcatgaaacctaataccctcgtcattggttacaaaaagaactggcgaaaggcacctttgactgagattgagaattacgtcggtataatccacgatgcatttgactttgagattggggtcgtcatcgtgcgaatatcccagggatttgacattagccaggtgcttcaagtccaggaggagttggaaagactggagcaggagaggcttgcacttgaagcaacgattaaggacaacgaatgcgaagaagagtcgggcggcatccggggtcttttcaagaaggcaggaaaacttaacattaccaaaaccactccaaaaaaggatggtagcatcaacaccagccagtccatgcacgtgggagagtttaatcagaagctggtcgaagcatcaactcagtttaagaagaagcaagagaaggggaccattgatgtctggtggctctttgatgatggaggattgacccttctgatcccatacatcctcactctgcgcaagaagtggaaggattgcaaattgagaatttacgtgggtggaaagattaaccgcatcgaagaagaaaagatagtgatggcaagcctcctctcaaagtttagaatcaaatttgcggacattcacattatcggagatatcaacattcgcccaaataaggaatcatggaaggtgtttgaagagatgattgaaccgtacaggcttcatgagtcctgcaaggatcttactactgcagaaaaacttaaacgtgaaaccccgtggaagattactgatgccgaacttgaggcagtcaaagagaagtcctaccgacaggtcagactgaatgaactgcttcaagaacactcgcgcgcggcgaacttgattgtgctgtctctgccagtcgcacgaaaagggtccatcagcgatcttctgtacatggcatggcttgaaatcctgaccaaaaatctccctcccgtgttgctcgtcagaggtaatcataagaacgtcctcaccttttacagc

SEQ ID NO: 71569 - DNA, 3297 bp, Artificial Sequence
  derived and/or modified sequence
atgagtctgaataattcgagcaacgttttcttggattctgtgccgtctaacactaaccgtttccaggtgagcgtcattaacgaaaatcacgagagcagcgcggctgctgacgataatacagatccgccgcattatgaagaaacgtctttcggcgacgaagcacagaagcgcttgcgcatctcttttcggccggggaatcaagaatgctatgataattttctgcaatccggtgagaccgcaaaaacagatgctagcttccatgcttatgatagccacaccaatacttactatcttcaaacgtttggtcataacacgatggacgcggttcctaagattgagtattatcgaaacacgggaagcattagtgggccaaaggtgaaccgtcctagcctcctagagatccacgagcagctggcaaagaacgtcgcggtcaccccatcctccgccgaccgtgtcgctaatggcgatggcattccaggcgatgagcaagccgagaacaaggaggatgaccaagccggagtggttaaattcggctgggtaaagggggtcctagttcgttgtatgctgaacatttggggggtgatgttattcattcgtctgtcctggatagtcggcgaggcgggcattgggcttggcgtgatcattattggcttgagcgtagttgtgaccaccctgaccggcatcagcatgagcgctatttgtactaacggtgttgtgcgtggtgggggtgcctattacctgatctcccgttccctgggtcctgagttcggcggcagcataggcctgattttcgcgtttgccaacgctgtggcggtcgcaatgtatgttgtcggttttgcggagaccgtagtggatctgcttaaggaatctgactccatgatggtcgacccgaccaatgacatccgtattattggtagcattaccgttgttattctgttaggcattagcgtcgcggggatggaatgggaggcgaaggcacaggtcattctgttggtcatcctgctgatcgctatcgccaatttctttattggtacggttatcccgtcaaacaatgagaagaaaagcaggggcttttttaactaccaagcaagcatatttgcggagaactttggaccccgttttactaagggagagggctttttcagcgtgtttgccattttcttccccgcggctaccggtatcttggcgggcgccaatatatccggcgatctggaagacccacaggacgcaatcccccgaggaaccatgctggcgatctttataacgaccgttgcttacctaggtgttgcgatttgtgtgggtgcctgtgtggtgcgcgatgctacggggaatatgaacgataccatcatttccggcatgaactgtaacggctcggcagcgtgcggcctaggttacgacttcagccgctgtcgtcacgaaccatgtcagtacggtttgatgaacaacttccaggtgatgagcatggtgagtggtttcggcccactcataacggcaggcattttctccgctactctgagcagcgccctggcgtcactggttagcgcaccaaaggtgttccaggcactgtgcaaagataacatctacaaggccctgcagttcttcgccaaaggttacggcaagaacaatgagccactgcgcggttatatactaactttcctgattgccatggcattcatcttaattgcggaactcaataccattgccccaatcataagcaatttctttctggcgagctacgctctgattaatttctcctgtttccacgcatcttacgcgaagtcccccggctggcgcccagcgtacggtatttataatatgtgggtttccctgttcggtgcggtgctgtgttgtgctgtgatgtttgttataaactggtgggcggcagtcattacctacgtcatcgagttttttttatacgtctacgttacctgcaagaagcctgacgttaattgggggagctctacgcaagcgctgtcgtatgtgagcgccttggacaatgcattggaactgacgaccgtcgaggatcacgtgaagaatttccgtcctcaatgcattgtgttaactggtggtccaatgacccgacctgctctgctggacatcacccatgcctttactaagaattctggtctgtgtatttgctgcgaggttttcgttggtccccgcaaactgtgtgtgaaggagatgaacagcggtatggccaagaaacaggcttggctgattaaaaataaaattaaagccttttacgcagcggtggcggcggactgctttagagatggcgtgcgcagcttgctgcaagcctctggcttgggacgaatgaagcctaacactctggttattggctacaaaaaaaattggcgcaaggctcccctgaccgagattgaaaactatgtcggaatcattcatgatgcgttcgatttcgaaataggagtcgtgatcgtccgtatctcccaaggttttgacatttcccaagtgctgcaagtgcaggaggagttggagagattggagcaggagcgcttggcgctggaggcgactatcaaagataatgaatgcgaggaagaatccggtggaatccgcggtctgttcaagaaggcggggaagctgaatatcaccaaaaccacacctaaaaaagatggaagcatcaacacctctcagtccatgcacgttggtgagtttaaccagaagttggtggaggcgtcaacgcagtttaagaagaaacaggagaaaggtaccattgacgtctggtggttgtttgatgatggcggcttgactttactgatcccgtacatcctgactttgaggaagaagtggaaggattgtaagctgaggatctatgtcgggggcaaaataaaccgcatagaagaagagaagatcgtgatggccagcctgctgtctaagttccgtattaaatttgccgatatccatataatcggcgacatcaacatcagaccgaacaaggagtcctggaaagtattcgaggagatgattgaaccataccgcctgcacgaatcctgtaaggatctgacaaccgcagaaaagctgaaacgagaaaccccttggaagatcactgatgcggagctggaggcagttaaagagaagagctatcgccaggttaggttaaatgagctgctgcaggagcattctcgcgccgccaacttgattgtcctgagcctgcctgttgcgcggaaggggagcatctccgatctgctgtacatggcttggctggaaattttgacgaagaacttgccaccggttctgctggttagaggcaaccacaagaacgtcctgaccttctatagc

SEQ ID NO: 71570 - DNA, 3297 bp, Artificial Sequence
  derived and/or modified sequence
atgagtctcaacaacagctcaaacgtgtttctggactccgttccaagcaataccaatcgattccaagtgagcgtgataaacgagaatcatgaatcatcagccgccgcagacgataacacagaccctccgcactacgaggaaacgagctttggcgacgaagcccagaaacggctccggatcagcttcagaccaggaaaccaggaatgttatgacaatttcttacagagtggagagacagctaagacggatgccagcttccatgcttatgatagtcatacgaacacctactacctccaaacttttggacacaatacaatggacgctgtccctaaaattgaatattaccgcaatacaggctccatctcaggcccaaaagttaatcggccaagccttctcgaaatccatgaacagctcgccaagaacgtcgccgtaacaccatcaagtgcagacagggtcgccaatggcgatggtattcccggagatgaacaggcagaaaataaggaagatgatcaggctggagtggtgaaattcggttgggtaaaaggcgtactcgtgcggtgcatgctcaatatatggggcgtcatgctgtttatccggctatcatggattgtgggtgaggcagggattggcctgggcgtgataatcatagggctgtccgtggtggtgacaaccctgacaggcatatccatgtccgcgatatgcacaaatggagtcgtgcggggcggaggagcatactacctgatttcccggtcgctcggacccgaatttggcggaagcatcggtctcatatttgcctttgccaacgctgtagccgttgccatgtacgtggtgggcttcgcagagactgttgtggatctgttgaaagaatctgatagtatgatggtggaccccacaaatgacatccggattatcggttcaatcactgtggtcatcttactgggcatttcagtggcaggaatggagtgggaagccaaggcccaggtgattctgctcgtgattctcctgatcgccattgcaaatttttttattgggacggtgatccccagcaacaatgagaaaaagtctcgcggtttttttaactaccaggctagcatcttcgctgaaaactttggtccacgcttcaccaaaggagagggttttttctccgtgttcgccatcttcttccccgccgctaccgggattctcgccggagcgaacatttccggcgatttggaggacccacaagacgcaatcccacgagggactatgctggccatatttatcacaaccgtcgcttacttgggggtggccatctgtgttggagcctgcgtagtgcgcgacgcaactggcaacatgaacgacacaatcatcagtggaatgaattgcaatggtagtgccgcttgtggactgggctacgacttttctcgctgccggcatgaaccttgccagtatggcttaatgaataacttccaggttatgagtatggtgtccggttttggcccactcattactgcaggcatcttttctgcgaccctcagctcagcactggcaagccttgtgtccgcccccaaggtgtttcaggccctgtgcaaggataatatttataaagcattgcagttcttcgccaagggctatgggaagaataatgaacctctcagaggctatattctaacgtttctgatcgctatggcatttattctgattgcagagctgaataccattgcccccatcatcagtaactttttccttgcctcttacgcgttgataaatttctcttgctttcacgcgagttacgccaaatcccccgggtggagacctgcctatggtatttataatatgtgggtttcgctgttcggggctgtactgtgctgtgctgtgatgtttgtgatcaattggtgggcagcagttattacttacgtcatagagttctttctttacgtatacgttacctgcaaaaagcctgacgtgaattgggggagctccacacaggccctgtcctacgtcagcgcacttgataacgcgctggaactgaccaccgtggaagaccatgtaaaaaactttcggcctcaatgtattgtacttaccggggggcctatgactcggcctgctcttcttgacattacccacgcttttacaaaaaactcaggactatgcatctgttgcgaggtatttgttggcccccgtaagctctgcgtgaaggaaatgaactctgggatggctaaaaagcaggcctggctgatcaaaaataaaatcaaggcattctatgctgctgtggctgcagactgcttccgggatggtgtgcgttcactcctgcaagcatctggcctaggcagaatgaagccaaataccctggtcattggctataagaaaaactggcgaaaggcgccactgactgagattgaaaattatgtgggaattatccacgacgcatttgacttcgaaattggcgtcgtgatcgttcgaatctctcagggatttgacatctctcaggtgctgcaggttcaggaggagttggagcgcctcgagcaggagaggctcgctctcgaagcaaccatcaaggacaatgagtgcgaggaggaaagcggagggatccgggggcttttcaagaaagccgggaaattaaatataaccaagaccacaccaaaaaaggacggttccataaatacctctcagagcatgcacgttggagaatttaaccagaaactggtggaagccagcacgcaatttaaaaaaaagcaggagaaaggtaccattgacgtctggtggctgttcgatgatgggggtcttactctgttgattccctatatcctgaccctccgcaaaaagtggaaggactgcaaattacggatatacgtaggggggaagatcaacagaattgaggaggagaagatcgtgatggcttctttgctgagcaaattccgcatcaagtttgcggacatacatatcatcggtgatattaacattcggcccaacaaggagagttggaaagtcttcgaggagatgatagaaccatataggctgcatgaatcttgtaaggatcttaccacagctgagaagctgaaaagagaaactccatggaaaattacagatgccgagctcgaggccgttaaggaaaaatcttaccgacaggtcaggctgaacgaactgctgcaggaacactctcgcgccgccaacttgattgtcctatctttacccgtcgcacggaaggggtcgatttctgatctcctttacatggcatggcttgaaattcttactaaaaacctgccaccggtgctactggttagagggaatcataaaaacgttcttaccttctactca

SEQ ID NO: 71571 - DNA, 3297 bp, Artificial Sequence
  derived and/or modified sequence
atgagtttgaacaactcatcaaatgtctttttggattccgtaccctccaacacaaatagattccaggtgtcagtgataaacgaaaaccatgagtcaagcgccgccgcagatgataacaccgatccaccccattatgaagaaacctctttcggggatgaggcccagaagaggcttagaatctctttccgccctggtaaccaggagtgttacgacaattttcttcagtccggagaaacagctaaaacggacgcttcatttcatgcctacgatagtcataccaacacttattacctgcaaactttcgggcacaatactatggatgcagtgcccaagattgaatattataggaacactgggagcatcagtggacccaaggtcaacaggccatccctgctcgaaatccatgagcagttggccaaaaacgtagctgtgacaccctccagcgccgatagggttgccaacggcgatgggatcccaggagacgagcaggccgaaaacaaggaggatgatcaggcaggtgttgtgaagttcgggtgggtgaaaggggtgctggtccgctgtatgctgaacatttggggggtgatgctcttcataagactgagttggattgtgggtgaggctggtatcggactgggagtgattattatcgggctgagtgtggtagtgactacccttaccgggataagtatgtccgcgatatgcacaaacggagttgtgagaggagggggcgcttactatttgatcagcagatccctcgggccagaattcggcggctccatcgggctgattttcgcgttcgccaatgccgtggccgtagccatgtacgttgtgggtttcgcagagactgtggtagacctgctcaaagagtccgactctatgatggttgacccgacgaatgatatccgcatcatcggcagtattacagtggtcatcctgctggggatctccgtggccggaatggagtgggaggcaaaggcgcaagtgattcttctggtgattctgcttattgcaattgcaaactttttcattggtactgtcatcccctctaacaacgagaagaagagccgcggtttcttcaattaccaggcttcaattttcgcagaaaacttcggccctaggttcaccaagggcgaggggttcttcagcgtgtttgctattttctttccagctgctaccggaattctggcgggcgccaatatctctggcgatttggaagaccctcaggacgccattcctaggggtactatgctggctatcttcattaccactgtggcttatctcggggtagccatctgtgttggggcgtgcgtcgtgcgcgacgccactggcaatatgaatgacactatcatctccggcatgaattgtaatgggtcagccgcgtgcgggcttgggtatgacttcagtagatgcaggcacgagccttgccaatacggactgatgaacaacttccaggtgatgtcaatggtctccggcttcggcccactcataacggctggcatattcagcgcaacgctgagcagcgctcttgcttccctcgtgtcagctcccaaagtgttccaagccttgtgcaaagataatatttataaagcgctgcaattttttgcaaagggatatgggaaaaacaatgaaccccttagggggtacatattgacattcctgatcgcaatggcctttatcctcattgcggaactcaacaccatcgccccgattatctccaatttcttcctcgcctcctacgccctgatcaatttcagctgctttcatgccagctacgctaaatcccctggctggagacccgcctatggcatctataatatgtgggtgtcacttttcggcgcagtcctgtgctgcgccgtcatgttcgtgatcaattggtgggccgccgtgattacatatgtgatagagttttttctctacgtctatgtgacctgcaaaaagccagatgttaactggggatcaagtacccaagccctttcatacgtgagtgccctcgataatgccctcgaactgactaccgtggaggatcatgtcaagaacttccgcccccagtgtatcgtcctcacaggaggcccaatgaccagacctgcactcttggatattacacatgcttttaccaaaaactccggactctgtatatgttgcgaggtgtttgttggaccccgaaaactgtgtgtgaaggagatgaatagcgggatggctaagaagcaagcgtggctcatcaagaacaagatcaaggctttctacgcagcagtggctgcagactgttttcgagacggtgtgcggtccctcctgcaagcttctgggctgggccgcatgaagccaaacacactggtgattgggtacaagaagaactggaggaaggcaccactgacagagattgagaactatgttgggattatccacgacgcgttcgatttcgagattggcgtagtgatagtccggatcagtcagggttttgatatttcccaagtgctgcaagtccaggaggagttggagcggttggaacaagagcgacttgccctggaagccacgattaaagacaatgagtgtgaggaggaatcaggggggattcgaggactgtttaaaaaagccggaaaattgaacatcacaaaaaccacacccaaaaaagacggatccatcaacacttctcagtcaatgcatgtgggggagttcaaccagaagctggttgaggcctcaactcagttcaagaagaaacaggagaaaggcactattgacgtttggtggctgttcgacgatggagggcttacccttctcatcccttatatcctgaccctgaggaagaagtggaaggattgcaaactccggatatatgtgggagggaagatcaaccgaattgaggaggagaagatagtgatggcaagcctcctctccaaatttcgaataaagtttgcagacatccatattatcggtgacataaacatccgcccaaacaaagagagctggaaggtgtttgaggagatgatcgagccctaccggctccacgagtcatgtaaagacctgactactgccgaaaagctcaagagggaaaccccctggaagataaccgatgctgagcttgaggctgtgaaggagaaaagttaccggcaagtccgcctgaacgaacttctgcaggagcacagtagagcagccaatctcatcgtgctctccctgcctgtggccagaaagggctccatctctgatctcctgtacatggcgtggctggagatattgaccaaaaatcttccacctgtgctgttggtgagaggaaaccacaagaacgtccttactttctatagt

SEQ ID NO: 71572 - DNA, 3297 bp, Artificial Sequence
  derived and/or modified sequence
atgagcttgaacaacagcagtaatgtgttcctcgactcagttccatccaacacaaaccgttttcaggtatcagtgatcaacgaaaaccatgagtcttccgccgccgctgatgataataccgaccctccccattatgaagaaacctccttcggggacgaagcccaaaaacggctcagaatttcttttcggcctggcaaccaggaatgttacgataacttcctccagtctggtgagacagccaaaacggatgcgagtttccacgcctatgacagccataccaacacatattatttgcagacattcggtcacaataccatggatgccgtacctaagatcgaatattatcggaataccggtagcatttcgggcccaaaggtgaataggccatcactgttggaaatccacgaacagctggccaagaacgtggccgttactccctccagtgctgaccgcgtggcaaacggagacgggatacccggggatgaacaggccgaaaacaaagaggatgatcaggcaggtgtagttaagtttggctgggttaagggagttttagtgcgatgtatgctcaacatctggggggtcatgctgtttataaggttgtcatggattgtaggagaggccggcattggccttggggtgattattatcggcctttcagtggtcgtgaccactctgaccggtatctccatgtctgcaatctgcactaatggtgtggtgagaggtggcggagcatattatctgatcagtaggagcctcggacccgaattcggaggctccatcggcttgatcttcgcatttgccaatgcggtcgccgtggccatgtatgtggttgggttcgctgagaccgtggtggatctgcttaaggaaagtgatagtatgatggttgatcccacaaacgatatccgcatcatagggtccattactgtagtgatcctgttgggaatctccgtcgccggcatggaatgggaggccaaggcccaagttatcctgctcgtgatcctgctgatcgccattgctaacttcttcatcggaaccgtgatacccagtaacaatgaaaaaaagagtcggggtttttttaattatcaggcttctatatttgcagagaattttggccctcggttcacgaagggcgagggctttttcagcgtgtttgccatttttttcccagctgcaaccgggatccttgcaggagctaacatttctggcgatttggaggaccctcaagatgcgataccacggggtactatgttggccatcttcattactacagtggcctacttaggagtggccatttgcgtgggtgcttgtgtggtgcgggacgctacggggaatatgaatgatacaattatttcagggatgaattgcaacggttccgcagcctgtgggctcgggtacgatttttctaggtgtcgacacgagccctgtcaatacggactgatgaataactttcaggttatgtccatggtgtcgggattcgggccccttatcaccgccggaatattctccgccaccctatcgagtgccctagcgtccttggtttcagcacctaaggtattccaagccctgtgtaaggataacatctataaagctttgcagtttttcgccaagggttacgggaagaataatgagccccttcggggttacattctaacattcttgatcgccatggccttcatactcattgcggaacttaacacaattgctccaattatatctaacttctttctggcctcatatgccctaatcaacttttcttgtttccatgcatcatacgctaagagcccaggctggcgcccggcctacgggatctataatatgtgggtgtctctgtttggagccgtcttatgctgtgcagtaatgttcgtcataaattggtgggctgcagtgataacctacgtgattgagttcttcctatatgtctatgttacttgcaaaaagcccgacgtaaactggggtagttccacccaggctctatcatacgtgtcagcactcgataatgccttggagctgacaacggtggaagaccacgtgaagaattttagacctcagtgcatagtccttactggaggtcccatgaccaggcccgccctgctggacattactcatgcattcaccaaaaacagtggtctctgcatctgttgcgaagtcttcgttggacccaggaagttgtgcgtaaaagaaatgaattctggtatggccaagaaacaggcctggctgattaagaacaaaatcaaagctttctacgcggcagttgcagccgactgttttcgcgacggggttcgctccctgctccaggcttcaggcctgggtcggatgaagcccaatacactcgtgattggatacaaaaagaactggaggaaagccccccttaccgagattgagaactacgtgggtatcatccacgatgctttcgatttcgaaattggagtcgtcatagtccgtatctctcagggcttcgacatctcacaggtgctccaggttcaggaagagttggaaagactagagcaagagagactggcgttggaagctacaatcaaagataatgaatgcgaggaggagtcagggggtattagagggctgttcaagaaggccgggaaattaaacattaccaagacaactcccaaaaaagatggaagtattaacacgtcccagtcaatgcacgtgggggagtttaatcaaaagttggtggaagcctctacccagtttaagaagaagcaggagaaggggacgatcgacgtgtggtggctgtttgacgacggagggctcacgttgctgatcccttacatattgacacttaggaagaaatggaaagattgcaaactgcgaatttacgtcggcggcaagattaataggattgaagaagaaaagatcgtaatggcatctttgcttagcaaatttcgaattaaattcgcagatatccatatcatcggcgacataaatatcaggccaaacaaggagagctggaaggtatttgaagagatgatcgagccctatagactccacgagagctgcaaagatctgacaaccgcagaaaaactaaagcgcgagacaccatggaaaatcaccgacgccgaactggaggctgtgaaagaaaaatcctaccgccaggtgaggctgaacgaactgctgcaggaacactcccgcgctgctaacctgattgtgctgtcccttccagtcgcgagaaaaggatctatatctgacctgctttacatggcgtggctggaaatcttaactaaaaatttaccacccgtactactcgtgcgaggcaatcacaagaacgtactgacgttctactct

SEQ ID NO: 71573 - DNA, 3297 bp, Artificial Sequence
  derived and/or modified sequence
atgtccctgaataactcctcaaacgtgtttcttgatagcgtgccttcgaacactaaccgttttcaagtctccgtcataaacgagaaccacgaatcatctgctgcagcggatgataatactgatcctcctcactacgaagagactagctttggtgatgaagctcagaagagactgcgcatctcctttcgtccaggtaaccaggaatgttatgataactttctgcaatcgggcgagactgccaaaaccgacgccagctttcatgcgtacgattcccacaccaacacctactaccttcagacctttgggcataataccatggacgctgtcccgaaaattgagtactaccggaataccggcagcatttcgggaccaaaggtgaatcggccaagcctccttgagatccatgagcaactcgcaaagaacgtggctgtgacccctagctccgcggaccgcgtggctaatggagacggcatccctggagacgaacaagcagaaaacaaggaggacgatcaagccggtgtggtcaagttcggatgggtcaagggcgtcctggtgcgctgtatgctgaacatatggggagtgatgctgttcattcgcctttcgtggattgtcggtgaagccggtattggtctgggtgtgatcattattgggcttagcgtggtcgtcaccaccctcaccggaatttcgatgtcagcgatttgtaccaatggtgtggtcaggggtggtggagcgtactaccttatctcccggagccttgggcctgagtttgggggttcgattggcctgattttcgccttcgctaacgctgtggcggtggcaatgtacgtcgtgggatttgccgaaactgtggtggatcttctgaaggaatcggattccatgatggtggatccaaccaacgatatacgaatcattggatccattactgtcgtgattctcctcggaatatccgtggccggtatggagtgggaagcaaaagcacaggtcatactgctcgtgatactcctcatcgcaatcgcaaacttctttattggcactgtgattccaagcaacaacgagaagaaatctcgcggatttttcaattaccaggcctcgatatttgccgagaactttggacccagatttacgaagggtgaaggcttcttcagcgtgtttgcaatctttttcccagcagcaaccggtatactggcaggagcgaacattagcggcgacctcgaggatccgcaggatgcgattccccgcggcaccatgctggccatattcataaccactgttgcataccttggtgtggcaatatgtgtgggagcatgcgtggttagagatgcaactggaaacatgaatgatactatcatttcaggcatgaattgcaatgggtcggctgcgtgtggccttgggtacgacttttcgagatgtagacatgagccctgtcagtacgggcttatgaacaactttcaggtgatgtcgatggtttcaggttttggaccgctcattacggcaggaattttctcggctactctgtcgtccgcattggcatcgctcgtctcagctcctaaggtgtttcaagccttgtgtaaagacaacatttacaaagccttgcagttttttgccaagggctacggaaaaaacaacgaacccctgagaggctatatccttacctttctgatcgcaatggcattcattctcatagcagaattgaatactatagccccaattatctcgaatttctttctggcatcatacgcattgattaacttttcgtgttttcatgcatcctacgcaaagtcgccaggatggcgaccagcatacggaatctacaatatgtgggtgtcgctgtttggtgcggtcctttgctgcgcagtcatgtttgtcatcaattggtgggcagcagtcattacttacgttatcgagttctttctgtacgtgtatgttacttgtaagaagcctgatgtgaattggggatcttcgactcaggcactgagctacgtctcagcccttgacaacgctctcgaacttactactgtggaggatcatgtcaagaattttcgcccccaatgtattgtcctgacggggggcccgatgacccgcccagctcttttggatataacccacgcatttactaaaaactcaggactgtgtatttgctgcgaggtgtttgtggggcctcgcaagctgtgcgtcaaggagatgaattcgggtatggctaagaagcaagcatggcttatcaagaacaagattaaggcattctacgcagcagtggcagcagattgctttcgagacggtgtacgatcacttcttcaagcatcaggtcttggcaggatgaagcctaatactctggtgattggatacaaaaagaactggcggaaggcccctctcactgaaatcgagaattacgtggggataatacacgatgcctttgatttcgaaattggagtcgtgatagtgcgcatttcccaaggattcgatatttcgcaagtgcttcaagtgcaggaggaactcgaaagacttgaacaagaaaggctcgcactcgaagctaccatcaaggacaacgaatgtgaggaagagtcaggtggaattcgcggcctgtttaagaaggcaggcaaacttaacataaccaagaccacgcctaagaaggatggctccattaacactagccaaagcatgcacgtcggtgaattcaatcaaaagctggtggaagcgtccacgcaattcaaaaagaaacaagagaagggtaccatcgatgtgtggtggcttttcgacgatggtggtctgactctgcttattccttacattctgacccttaggaaaaagtggaaggactgtaagctgcgcatttatgtgggcggtaagattaacagaatagaagaagaaaagatagtgatggcgagcttgctttccaagtttagaataaagttcgcagatattcatatcattggggatatcaatatccggcctaacaaagagagctggaaggtgtttgaagaaatgattgagccgtatcgactgcatgaatcctgcaaggatttgaccaccgcagaaaagctcaagagagaaactccttggaagataactgatgcagaactggaggcagtgaaggaaaaatcctaccggcaggtcaggcttaatgaacttttgcaagagcattcaagagcggctaaccttattgtcctttcgcttcctgtggctcgcaaaggatccatatcggacctcctgtacatggcatggctggaaatactgaccaaaaatctgcctccggtgctgcttgtgagaggcaaccacaagaacgtcctcactttctactcc

SEQ ID NO: 71574 - DNA, 3297 bp, Artificial Sequence
  derived and/or modified sequence
atgagcctcaacaattcctccaatgtgttcctggactccgtgccgagcaacactaataggttccaggtgtcggtgatcaatgaaaatcatgagagcagcgccgcggcagacgacaatacggatccaccacattacgaggaaacttcattcggcgatgaggcgcagaagagattgcgcatctcctttcggcctggaaaccaggaatgctacgataacttcctgcaatcgggtgaaactgccaaaaccgatgcctcgttccacgcgtacgactcccacaccaacacttactatctgcagacttttggacacaataccatggacgcggtgccaaagattgaatactacagaaacaccggctctatttcaggcccgaaggtgaatagaccgtccctcctcgaaatccatgagcagctggccaagaatgtcgcggtgaccccgtcgtcggccgatcgggtcgccaacggggacggaatcccgggagatgaacaggccgagaacaaagaggatgaccaggccggagtcgtgaagttcggttgggtgaaaggagtgctggtgcgatgcatgctcaatatctggggagtcatgctgttcatcagactgtcgtggattgtgggagaagcgggaattggcctgggtgttatcatcatcggcctgagcgttgtggtcaccacccttactgggatctccatgtccgcaatctgcacgaatggagtggtcagaggaggtggagcctactacttgatttcgcgctcactggggcccgaattcggagggtctatcggactgatcttcgcctttgccaatgcggtcgccgtcgcgatgtacgtggtgggttttgctgaaactgttgtcgatttgctcaaagagtcagattccatgatggtggaccccactaatgatatccggatcatcggaagcatcaccgtggtgatcctgctcggcatctcagtcgccggaatggaatgggaggccaaggcccaggtgatcctcttggtgatccttctcattgcgatcgccaacttctttattggcaccgtgatcccatctaacaatgagaagaaatcgcgcggattcttcaactaccaggcatcaatcttcgcagaaaacttcggaccacgcttcaccaagggagaaggattcttcagcgtgtttgcaatctttttccccgcggccaccggtatcctcgcaggtgccaacatctcaggggacctggaggatccccaagatgccattcctcgagggactatgctggcgatcttcatcactactgtggcctacctgggagtcgccatctgcgtcggagcttgcgtggtcagggacgctacgggaaatatgaatgacactatcatctccggcatgaactgcaacggctccgccgcatgcggactgggatacgacttttcaaggtgtcggcacgagccatgtcagtatggactgatgaacaattttcaggtcatgagcatggtgtccggattcgggcctctgatcaccgcaggaatcttctcggccaccctgtcgagcgccctggcctcactcgtctcagcgccaaaagtgtttcaagcgctgtgcaaagacaacatctacaaagccctgcagttcttcgccaagggctatggaaagaataacgaaccactccgcggatacatcctcacttttcttatcgccatggcttttatcctgatagcagaacttaacactatcgcgccaatcatctcgaatttcttcctggcctcatacgcgctgatcaatttctcgtgcttccacgcatcttacgccaagagccctggctggaggccggcgtacgggatctacaatatgtgggtttcccttttcggcgccgtcctgtgctgcgccgtgatgttcgtgatcaactggtgggccgccgtgatcacctacgtgatcgaattcttcttgtacgtttacgtgacttgtaagaaaccggacgtcaactggggctcgagcacccaagccttgtcctacgtgagcgctcttgataacgcccttgagcttaccaccgtcgaagatcacgtgaagaactttcgacctcagtgcatcgtgctgaccgggggaccgatgactcgcccagctctgctcgacatcacccacgcattcaccaagaattccggattgtgtatctgctgtgaggtgttcgtgggaccgagaaagctgtgcgtgaaagaaatgaatagcggaatggccaaaaagcaggcgtggctcattaagaacaaaatcaaggcgttttacgcagccgtggctgcggactgcttccgcgatggagtccggtcgctgctccaggccagcgggctggggaggatgaaaccgaacacccttgtgatcggatataagaagaactggcgcaaggccccgctgaccgagatcgaaaactatgtcggaatcatccacgacgccttcgacttcgaaattggggttgtcatcgtgcgtatctctcaaggcttcgacatctcccaggttctgcaagtgcaagaagagctggagagactcgaacaggaacggctcgcccttgaggcaacgatcaaggacaatgaatgtgaagaagagtcgggtggaatcagagggctcttcaaaaaggccggcaagttgaacatcactaagactacgcccaagaaggacggatcgatcaacacgagtcagagcatgcacgtgggagaattcaaccaaaaactggtggaagcgtcaacccaattcaaaaagaagcaggagaaggggaccatcgacgtgtggtggctgttcgatgacggtggcctcactcttctcatcccgtacatcctgactcttcgcaagaaatggaaggactgtaagctgcggatctacgtgggcggcaaaatcaacagaattgaggaagagaagatcgtgatggctagcttgctctcaaagtttcgcatcaaattcgcggacatccacatcattggtgatatcaacatccgcccaaacaaggagtcgtggaaggtgttcgaggagatgattgaaccttaccgcctccacgaaagctgcaaggacctgacgactgccgagaagctgaagcgggaaacgccgtggaagatcactgacgctgagctcgaagccgtcaaagaaaaatcctacagacaggtccgcctgaacgaattgcttcaagaacactcccgggcagcaaacctcatcgtgctgtccctcccagtggctagaaaggggtcgatcagcgacctgctgtatatggcctggctcgaaatcctcaccaagaacctccctcctgtgctcctggtgcggggaaaccacaaaaacgtcctcactttctacagc

SEQ ID NO: 71575 - DNA, 3297 bp, Artificial Sequence
  derived and/or modified sequence
atgtctctgaacaattccagcaacgtcttccttgactccgtgcctagcaacacaaaccgcttccaagtgtccgtcatcaatgagaatcatgaatcctccgccgctgccgatgacaacactgaccccccgcactacgaggagactagcttcggcgacgaggcccaaaagcgtttgcggattagcttccgacctggcaatcaagagtgttatgataactttcttcaatccggcgagacggctaagaccgatgccagcttccatgcctacgattctcacactaatacctattacctgcagacattcggccacaacacgatggatgctgtgccgaagatcgagtactaccgcaacacgggttccatctctggccccaaggttaatcgcccttcccttcttgagatccacgagcagcttgccaagaacgttgcggtaactccttcgtccgccgaccgcgtggctaacggggacggcatccctggggacgagcaggcggagaataaggaggacgatcaggccggcgtcgtaaagttcggctgggttaagggcgttctggtgaggtgtatgctgaacatctggggcgttatgttgttcatacgcctgtcctggatcgtgggggaggccggcatcggtctgggcgtcattatcatcggtctgtccgtcgtcgtcacaacccttaccggcatctccatgtccgcgatctgcacgaacggggtggtgcgcggtggaggtgcctactaccttatcagccgttccctcggcccggaattcggaggctctatcggcctgattttcgcctttgcgaacgcggtggccgtcgctatgtatgtggtcggtttcgcagaaaccgtggttgacctgctcaaggaatcggactcgatgatggtcgaccctaccaatgacatccggattattggctcgatcacggtcgttattctccttggtatctcagtggccggaatggaatgggaagccaaagcccaggtcatccttctcgtcatcttgctgatcgcgattgccaactttttcatcggtactgtcattccttccaacaacgagaaaaagagcagaggattctttaactaccaggcttcgatcttcgccgagaacttcggacccagattcacgaagggtgagggatttttcagcgtgttcgcgatcttcttccccgcggcgacgggaatcttggcgggtgcgaacattagcggggacttagaagatccccaagacgcgatcccccgaggaaccatgctcgctatcttcatcaccaccgtcgcttacctcggcgttgccatttgtgtcggggcctgtgttgtgcgtgatgccacaggcaatatgaacgacacgatcattagcggcatgaactgcaacgggtccgctgcttgcggactgggttacgatttctcccgttgccggcacgagccgtgccagtacggtctaatgaacaatttccaggtgatgagcatggttagtggcttcggtcctcttatcacagccggaatcttcagcgcgaccctgagctccgctctggcctcactcgtgtccgcccccaaggtgttccaggctctgtgtaaggacaacatctataaggcccttcagttctttgctaagggatacggcaagaacaatgagcctctgcgtgggtacatcctcaccttcctcatcgcgatggctttcattctgatcgccgagttgaatacaattgctcccattatttcgaactttttcttggcatcttacgccctaatcaactttagctgttttcatgcctcctacgccaagtcccccggctggcgtcccgcttacggaatctacaacatgtgggtgtctctcttcggcgccgtgctctgttgtgctgtgatgttcgtaatcaactggtgggctgccgtcatcacgtacgtcatcgagttcttcctgtacgtctacgtcacctgcaagaagcccgacgtgaactggggtagctccactcaagccctgagctatgtctccgcgctagacaacgcgttggagttgaccaccgttgaagaccatgtcaaaaacttccgcccacagtgtatcgtgctgaccggcggacctatgacgcgcccagctctgctggacattacgcatgccttcaccaaaaactccggcctgtgcatatgctgcgaagtcttcgtcggaccacgcaagctctgcgttaaggagatgaacagcggaatggctaagaagcaagcatggttgatcaagaacaaaatcaaggctttttacgccgctgtcgctgcggattgcttccgagacggcgtgagaagcctgctccaggcttccggcctgggtcggatgaaaccaaataccctcgtcatcgggtataagaagaactggcgcaaggctccactcacggagatcgaaaactatgttggtatcatccacgacgcgttcgactttgagattggtgtcgtcatcgttcgtatcagtcaaggtttcgatatctctcaggtgctgcaagtccaggaagagctggagcgccttgagcaggagaggctcgcactcgaagcaactattaaggataatgagtgtgaggaagagtcgggcggcatccgcggtttatttaagaaggccggaaagttaaatatcacaaagacgaccccgaagaaggacggctcaatcaacacctctcaatctatgcacgtcggagagttcaaccaaaagctggtcgaagcgtcaacacaattcaagaagaagcaggagaagggtaccattgacgtgtggtggctcttcgatgatggaggtctcacccttctgatcccgtacatactcaccctgcgcaagaagtggaaggattgtaagctacgtatctacgttggcggcaagattaaccgaattgaggaggagaagatcgtgatggcgtctctgctgtccaagttccggatcaagttcgccgacatccacatcatcggcgatatcaacattaggcccaataaggagagctggaaggtcttcgaggaaatgattgagccataccgcttgcacgagtcctgcaaggatttgaccactgcagagaaactcaagcgcgagaccccctggaagattaccgacgcggagctggaggccgtaaaagaaaagtcgtaccgccaggtccgtctgaacgaacttttgcaggagcatagtcgcgcagcgaacctcatcgtgcttagcctgccagttgctaggaagggaagcatctccgacctcctctatatggcttggctggagatcctcacgaagaatctcccgcctgtactgcttgtgaggggtaaccacaaaaacgtactcaccttctatagc

SEQ ID NO: 71576 - DNA, 3297 bp, Artificial Sequence
  derived and/or modified sequence
atgagccttaataattcctcgaacgttttccttgatagtgtgccgtctaacacaaatcgtttccaggttagcgttattaacgaaaatcatgagtcatctgcagccgcagatgacaatacagacccgccgcattatgaagaaacttcgtttggtgatgaagctcaaaagagattgagaatttcttttcggcctggtaatcaggaatgttatgataacttcttgcagagtggagaaacggccaaaacagatgcttcttttcatgcttacgactcacatacgaatacctattatttgcagacgtttgggcataacacaatggacgctgtcccgaaaattgagtattaccggaatactgggagcatcagtggaccaaaagttaaccggccttctctgctcgaaattcatgaacagcttgctaaaaacgtcgctgttacaccttcatccgctgaccgggtggctaacggagacggaataccgggcgatgagcaagccgaaaacaaagaagatgaccaggccggcgtggttaaatttggatgggtcaaaggtgtcctagttcgctgcatgctaaatatttggggagtcatgttgtttatccggcttagttggatcgttggcgaagccggcattggcctgggagtcattattatcggtctttcagttgtagttaccacgcttaccggcatttctatgtcagccatttgtacgaatggggtcgttcgtggaggcggtgcgtactatctgatttcacgctcattgggaccggaatttggtggtagtataggccttatctttgcatttgcgaatgctgtcgctgttgcgatgtatgtagtggggtttgcagaaacagtcgttgaccttttgaaagaatctgattctatgatggtggatccaacgaatgatataagaatcataggcagcatcacggtcgtgatcctgcttggtataagcgttgctggtatggaatgggaggccaaggcgcaggtcatcctgcttgtgatactgctcatcgctattgccaacttttttattggaacagtcatcccgtctaacaatgaaaaaaagtctcgtggattttttaattatcaagcttcgatctttgcagaaaactttggtccacgctttacaaaaggtgaaggcttcttcagtgtcttcgcgattttttttccagctgcaacgggcatattagctggcgcgaacatctccggagatcttgaagatccgcaggatgctataccacgcggcacaatgttggcgattttcatcaccacagtggcgtatctcggggtagccatctgcgtaggcgcatgcgttgttagggatgccaccggcaacatgaacgataccattatatcgggcatgaactgtaacggctccgccgcttgcggattagggtatgatttttcgcgatgcaggcatgaaccgtgccaatatggtcttatgaataacttccaagtgatgtcaatggtatcaggtttcggcccactgattacggcaggcatcttttctgccacactttcctcggccttagcatccttagtgtctgcacctaaagtctttcaagctctgtgtaaagataatatttataaagccctgcagtttttcgctaaaggctatggaaagaacaacgaaccactcaggggctatattcttacatttctcattgctatggcatttatccttatcgctgaattaaataccatcgctccgatcatctcaaattttttcctggcttcttacgccttaatcaattttagttgctttcatgcctcctatgcaaaatcaccgggatggcgtccagcatacggaatctataatatgtgggtatcattatttggagcggtattatgttgtgctgtcatgtttgttatcaattggtgggcggcggtcattacatatgtcatcgaattctttttatacgtttacgtgacgtgcaaaaaaccggacgtgaattggggttctagtacacaagctcttagttatgtctctgctcttgataatgcgttagaacttacaaccgtcgaagatcatgttaaaaattttcgcccacagtgtatagtgctgacggggggtccgatgactcgtccagctctgctggacatcacacatgcgttcacgaaaaatagcggactgtgtatctgctgcgaagttttcgtaggtcctcgtaaactttgcgtgaaggagatgaattccggaatggccaaaaagcaggcctggttgatcaaaaataaaattaaagcattttatgcggctgttgctgctgactgttttcgggacggtgtaaggtctctgctgcaagcgtcagggctggggcgcatgaaacccaatacgttggtgatcggatacaaaaaaaattggcgcaaagcgccacttacagaaatcgaaaattacgtcggtattatacacgacgccttcgactttgaaattggtgtagtgatagtacgaataagccaaggattcgacatctcacaagttttacaggtacaggaagaactcgagcgtttagaacaagagaggcttgccttagaagcaaccattaaagataatgaatgcgaggaagaaagtggaggaattagaggcctgtttaaaaaagcgggcaaactaaatatcactaagaccacgccgaagaaggatggcagtataaatacctcccaatcaatgcatgtaggagaatttaaccagaaattggtagaagcttcaacgcaatttaagaaaaaacaggagaaaggaacgatcgacgtctggtggttgttcgatgacggcgggctgactctgctgattccctacattttgacacttagaaaaaagtggaaagactgtaagttacgcatatatgttggtgggaaaatcaaccgtatagaggaagagaaaatcgtcatggcttctttattatcgaagtttcgtatcaagtttgcagatatccacataatcggggatattaatattcggcctaataaggaatcatggaaagtcttcgaagaaatgatcgagccgtaccgattacacgaatcatgtaaggatcttacaactgcagaaaaactgaaaagagagacgccgtggaaaatcacagacgcggaattagaggcagtgaaagaaaaatcctatagacaagttcgtttaaacgaattactgcaggaacatagccgggcggcaaatctgatcgtcttatcactccctgtcgctcgtaaaggctccataagcgatttactttatatggcttggctggaaatcttaacaaaaaacttaccacctgtactcctcgtaagaggcaatcacaaaaatgtattaacgttctattct

SEQ ID NO: 71577 - DNA, 3297 bp, Artificial Sequence
  derived and/or modified sequence
atgtcgttgaacaactcatccaatgtctttctggactccgtgccgtcgaacacgaatcggtttcaagtgtcggtaatcaacgaaaaccatgagtcctcagccgcagcagatgataatactgacccgcctcactacgaggaaacttcattcggagatgaagcccaaaagcggttgaggatttcattcaggcccggaaaccaggagtgctacgacaattttctgcaatccggagagacggccaagaccgatgcctcgttccatgcttacgattcccatactaacacgtactatctgcaaacctttgggcacaacaccatggatgcggtcccaaagatcgaatactatcgcaacactggcagcatttcgggaccgaaggtcaatcgcccatccctgcttgagatccacgaacagctggcgaagaacgtggccgtgacgccgtcatcagccgaccgagtggccaatggagacgggatcccaggcgacgaacaggcggagaataaagaagatgatcaagccggcgttgtcaagttcggctgggtcaagggagtgttggtgcggtgcatgctgaacatatggggcgtgatgctcttcatccgcctgtcctggatcgtgggagaggcagggatcggactcggcgtgatcatcatcggactgtccgtcgtggtcaccactctgactggaatttcgatgagcgcgatctgcaccaatggggtggtgaggggaggaggagcatactacttgatctcccgttctcttggcccagaatttggaggatccattggactgatcttcgcatttgcgaacgctgtcgcggtggcaatgtatgtggtgggcttcgcagagactgtggtggatctgcttaaggaatcagacagcatgatggtggatcccaccaacgatattcggatcatcggcagcatcactgtcgtcatcctgctgggcatttccgttgctggcatggaatgggaggccaaggcccaggtgatcctcctggtgatccttctgattgcgatcgccaacttcttcatcggaactgtgatcccatcgaacaatgagaagaaatcgcgcggatttttcaactaccaagcctcgatctttgccgagaacttcggcccgagattcactaagggtgagggattcttttctgtgttcgcgattttctttcctgctgcaactggaatcctggcgggagccaacatctcgggtgatctggaagatccgcaggacgctatccctcgcggtactatgctcgcgatcttcatcaccacggttgcttacctgggagtggcgatctgcgtgggtgcttgcgtcgtgcgcgacgccactggaaatatgaacgatactattatcagcggaatgaactgcaacggatcagccgcctgcggcctcggttacgatttctcacgctgtagacacgaaccgtgtcagtacggcctgatgaacaatttccaagtcatgagcatggtcagtggatttggaccgctcatcactgccggaatcttttcagccactctctcgtcggccttggcgagcctcgtgtccgctcctaaagtgtttcaagcgctctgcaaagacaatatctataaggcgttgcagttcttcgcgaagggctatggaaaaaacaatgagccgcttcggggctacatcctgacttttttgattgctatggcattcatcttgatcgcagagcttaataccattgccccgatcatctccaacttttttctggcctcctacgcgctgatcaatttctcgtgcttccacgcttcctacgctaagtcaccgggatggcgccctgcctacggcatctacaatatgtgggtgtccttgtttggcgctgtgttgtgttgcgccgtgatgtttgtcatcaactggtgggcagcagtgatcacctacgtgatcgaattcttcctttacgtctacgtcacttgtaagaaaccagacgtcaactgggggtcgtccactcaggccctgtcctacgtgagcgccctcgacaacgccctggaactgaccaccgtcgaagatcatgtgaagaacttccggccgcagtgcatcgtgctcactggaggacccatgacgcgccctgcgctgctcgacatcactcacgccttcactaaaaactccggtttgtgcatctgctgcgaggtgttcgtcggcccgcggaagctgtgcgtgaaggagatgaactcaggcatggctaagaaacaggcctggctgatcaaaaacaagattaaggctttttacgcagccgtcgccgccgactgttttcgcgacggtgttcgctcactgctgcaggcgtccggactcggacgcatgaagccgaacacgctcgtgatcggctacaagaagaactggagaaaggccccgctgaccgaaatcgaaaactacgtgggtatcatccatgatgccttcgacttcgaaattggagtcgtcatcgtccggatctcgcaaggttttgatatctcccaggtgcttcaagtccaggaggagctggaacgcctggagcaggagaggctggccctggaagcaaccatcaaggataatgagtgtgaagaggaatcgggtggtatccgcggcctctttaagaaggccgggaagctcaacatcactaaaaccactccaaagaaggacggtagtatcaacacctcgcaaagcatgcacgtcggtgaattcaaccagaaactggtggaggcttcgacgcagtttaagaaaaagcaagagaagggcactatcgatgtgtggtggctgtttgatgatggtgggctgaccctgctcattccatacattctgactctgcggaagaagtggaaagactgcaagctgaggatctacgtcggagggaaaatcaaccgcatcgaagaggagaaaattgttatggcctcgctgctgtcgaaatttcgcatcaagttcgctgacatccatatcatcggagacatcaatatccggccgaataaagagtcctggaaggtgttcgaggagatgatcgaaccgtacagactgcacgagtcctgcaaagacctcactactgcagaaaagctgaaaagagaaactccgtggaagatcaccgacgcagaactggaggccgttaaggagaagagctaccggcaagtgcgcctgaacgaacttctgcaggagcacagcagggccgcaaacctcatcgtgttgtcgctgcccgtcgcacggaaaggttctatcagcgacctgctctacatggcgtggctcgagatcttgacgaaaaatctgccacccgtccttctggtccggggaaaccataagaacgtgctcactttttactcg

SEQ ID NO: 71578 - DNA, 3297 bp, Artificial Sequence
  derived and/or modified sequence
atgtccctcaataactcgtcaaacgtgtttctggacagcgtcccgtcgaacactaatcgttttcaagtctcggtgatcaatgaaaaccatgaaagctccgccgcggcagatgacaacaccgatcctccgcattacgaagaaacctcattcggagatgaagcccagaagcgcctgaggattagttttcggcccggaaatcaagagtgttacgataactttcttcaatcgggtgaaaccgccaaaacggatgccagcttccatgcatacgattcccataccaacacctactacctgcagactttcggacacaatactatggacgcagtgcccaaaatcgaatactaccgaaacacgggttccatttccggtcctaaggtgaaccgaccttcacttctcgaaattcatgaacaacttgccaagaacgtggcggtgaccccatcatctgcagacagagtggcaaatggggatgggattcccggtgatgaacaagcagagaacaaagaagatgaccaggcaggggtggtcaagtttggatgggtgaagggtgtgctcgtccggtgcatgcttaacatttggggtgtgatgctcttcattagactgtcctggattgttggtgaggcaggaattggtttgggggtcatcattattggactcagcgtggtagtcactactttgactggaatatctatgtccgcaatttgcactaatggagttgtgcgaggcggtggggcatattaccttataagccgctcgcttggtcctgagtttggtggttcaattggtctgattttcgcattcgcaaatgcggtggcagtggcaatgtacgtggttggattcgcagaaaccgtcgtggatctgctgaaggaaagcgactctatgatggtggacccgactaacgatataagaattatcggatcgataaccgttgtgatcctcctgggcatttcagtggcggggatggaatgggaagcgaaagcacaagttatcttgctggtgatcctccttattgcaatagcaaatttctttattggaactgtgattccatccaacaacgagaagaagtcaagagggttcttcaattaccaggcatcgatttttgcagagaattttggacctaggtttactaaaggcgaaggctttttctcagtgttcgccatctttttcccagcagcaaccggaatactggcaggagccaacatttcgggtgacctcgaagatccacaggatgcaattccacgcgggaccatgctcgcgatctttatcaccaccgtcgcttaccttggagtcgctatctgtgtcggcgcatgcgtcgtgagggatgctaccggtaacatgaatgatactatcatttcaggtatgaactgtaacggatcggccgcatgtgggttggggtatgatttttcacggtgtcggcatgaaccctgtcaatacgggctgatgaacaattttcaagttatgtccatggtatccggatttggacctctgattactgctggaattttctccgcgactctctcatctgcactggcctcactggtgtcagcaccgaaggtgtttcaagccctctgtaaagacaacatctataaggcactgcagttttttgcaaagggttacgggaaaaacaatgagccgcttaggggttacatccttacttttctcattgcgatggcctttatactgattgcagaacttaacactatcgctccaatcattagcaatttcttcctggcatcctacgcccttatcaatttctcgtgctttcatgcatcctacgcaaaatcccccgggtggcgccccgcgtacggaatctacaacatgtgggtgtccttgtttggtgcagtgctgtgttgtgcagtcatgtttgtgatcaactggtgggccgcagtgatcacctacgtgatcgagttttttctgtacgtgtatgtgacttgcaagaagcccgatgtcaattggggaagctccactcaggccttgagctacgtgtccgcactggataatgcgctcgaactgaccaccgtggaggatcatgtcaaaaactttcggccccagtgcattgtcttgaccggtggaccaatgaccagacccgcattgctggatataacccatgcgtttaccaagaactcgggactctgtatctgttgcgaagtgttcgtcggcccacggaaactttgtgtgaaagagatgaactccggcatggctaagaagcaagcgtggctgattaagaacaaaatcaaagcattctacgcggcagtggccgccgattgttttcgagacggcgtccgctcactgctccaggcatccggactgggacgtatgaaacctaacacccttgtgataggttacaaaaagaattggcggaaggcaccccttaccgagatagagaattacgtgggtatcattcacgatgcatttgattttgaaataggggtggtcatagtgcgaatatcccaaggttttgacattagccaggtccttcaagtgcaggaggaacttgagcgcctcgagcaagaacgactcgcccttgaggcaacgattaaagacaacgaatgcgaggaagagtcaggaggaatccgcggtcttttcaagaaagccgggaaattgaatatcactaagactaccccaaagaaggatggttcgattaacacctcccagtctatgcatgtcggtgaattcaatcagaagctggtggaagcatcaacccagttcaaaaagaaacaagaaaagggaacgattgatgtgtggtggcttttcgatgatggagggcttactcttctgattccatacattcttactcttcggaagaagtggaaagactgtaaacttcggatctacgtgggtggaaagatcaatagaatagaagaagagaaaattgtcatggcatctcttctttcaaagttccggattaagtttgctgacatccacattatcggcgacattaacattcggcctaacaaagaatcctggaaagtctttgaagaaatgattgagccatacagactgcacgagtcgtgtaaagatcttaccaccgcagagaaattgaagcgagaaacgccttggaaaatcacggatgccgaactggaagccgtgaaggagaagtcttataggcaggtgagactgaacgaactgcttcaggaacacagccgggcagcaaacctgattgtcctctcgctccctgtggcaagaaagggatccatttcggatctcctttacatggcatggctggagatccttacgaagaacctcccaccagtgcttctggtgagaggtaaccacaagaacgtgctgacgttctattcg

SEQ ID NO: 71579 - DNA, 3297 bp, Artificial Sequence
  derived and/or modified sequence
atgtctctgaacaactctagcaatgtgttcctggattcggtaccaagtaacaccaaccggtttcaagtgtccgtcataaatgagaaccatgagagctctgccgcagctgatgacaacacagatccaccccattatgaagaaacttcattcggggatgaagcacagaagcggcttcgcatctcttttagaccagggaaccaggagtgctatgacaacttcctgcagtcgggtgagaccgcaaagactgacgcctccttccacgcttacgatagccacactaatacctattacttgcagaccttcggccacaacacaatggatgcagtgccaaagatcgagtactacagaaatactggctcaatttccgggcccaaagtcaaccgaccatctctgttggagattcatgagcagctcgcaaagaatgtcgccgtcacaccctccagtgcagaccgagtggcaaacggcgatggaattcccggtgatgaacaggccgagaacaaagaggacgatcaggcaggagtcgttaaatttggatgggtgaaaggagtgctggtgagatgtatgcttaatatttggggcgttatgctatttattcgtctgtcctggattgtgggggaagccgggattggactgggtgtgataatcattgggctttcggtggttgtgacgacacttacggggattagtatgtcggcaatatgcacaaacggcgtggtccgcggcggaggagcgtattacctgattagtaggagtctaggccctgaattcggcggtagcataggactgatctttgcctttgcaaatgccgtggctgtcgcgatgtacgtcgtgggattcgcagaaacagtggtagacctactaaaagaatccgattcaatgatggtcgatcccacaaacgatatccgtattatcggctcaatcactgtggtcatactcctgggcatttcagtcgccggtatggagtgggaagcgaaagcacaagtcattctgttggtgatccttttgatcgctatagcaaatttcttcatcggcactgtgatcccatccaacaacgagaagaagagccgaggcttcttcaactatcaggcgtccatcttcgccgaaaacttcggccctcgatttaccaaaggcgaagggtttttctccgtctttgctatctttttccctgccgcaactggaatcctggcaggtgctaacatctccggggatctggaggatccccaggacgctattcccagagggactatgctggctatctttatcaccaccgtcgcatatctgggcgtggccatctgcgttggtgcctgtgtcgtaagggatgcaacaggcaacatgaacgatacgatcattagcggcatgaactgtaacggcagcgctgcatgtgggttgggatatgacttttccaggtgtaggcatgagccttgtcagtacggcctcatgaacaatttccaagtcatgagcatggtgtccggattcggccctttgattacggcggggattttcagcgcgacgctgagctccgcactcgcatcgttggtgagcgcccccaaggtatttcaggccctatgcaaagacaacatctacaaggccttgcaattcttcgccaaggggtacggaaaaaacaacgagcctctacgcggctacattcttacttttctaattgccatggcttttatcctgatcgctgagctgaatacaattgctcctatcatcagcaacttcttcctggcttcatacgcactcattaattttagttgtttccacgctagctatgctaaatctcccggatggcgccctgcatacggcatctacaacatgtgggtgtcacttttcggggcagtcctatgttgtgccgtgatgttcgtgattaactggtgggcagcggttatcacatacgtgatcgagtttttcctgtatgtttacgtcacctgcaagaagcccgacgtgaactggggaagctctacccaggctctgtcatatgtgtccgccttggacaatgcactagagctcaccaccgtggaggatcatgtgaaaaatttccggcctcagtgtatagtgcttacgggaggacccatgactaggccagcccttttggatataacacacgcctttaccaagaattctggcctttgcatttgttgcgaggtgttcgtcgggccacgcaaactgtgcgtcaaggagatgaattctgggatggcgaaaaaacaggcctggttgatcaagaataagattaaggccttttatgccgctgtcgctgccgactgttttcgcgacggcgtacgatctcttctgcaagcgagcggcctgggcaggatgaagccaaatacccttgttataggttataaaaaaaactggagaaaggcaccgctaactgagatagaaaattatgttggaattattcatgatgcattcgacttcgaaattggcgtggttatcgtgcgtatttcacagggcttcgatatttcgcaggtactgcaggtgcaggaggagctggaaaggctggagcaagagagattggccctggaagcgacgatcaaggataatgagtgcgaggaagagtctgggggcatcagggggctctttaagaaggctggaaaattgaacattacaaagacgactccaaaaaaagatggctcaattaacacctctcagagtatgcacgtcggtgagtttaatcaaaagctggtcgaggcctccactcagttcaagaaaaaacaggaaaaggggactatcgatgtttggtggctgttcgatgatggtgggctcaccttactgatcccctacatactgactctccgcaagaaatggaaagattgtaagttgaggatatatgtcgggggaaagataaaccggattgaggaagaaaaaatcgtgatggctagtttgctgtctaagttcaggataaagttcgctgatatccatatcatcggagacatcaatatacgacccaacaaagaaagctggaaagttttcgaggagatgatcgagccgtatagactccacgagtcctgtaaagatttgactactgcggaaaagctgaagcgtgagactccctggaaaattaccgacgctgaattagaagctgtaaaggaaaagtcctaccgacaagtccgtctgaacgagctgctgcaagagcactctagagcggcaaatcttattgtgctgagtttgcccgtggccagaaaggggtctatatcagatctgctgtatatggcttggctggaaatcttaacgaaaaatctgcctcccgttctattggtgagaggtaaccacaaaaacgtactcacattctactca

SEQ ID NO: 71580 - DNA, 3297 bp, Artificial Sequence
  derived and/or modified sequence
atgtcattgaacaattcgagcaacgtgtttcttgacagcgttccatctaataccaatcggttccaagtatctgtaatcaacgagaatcatgagagttctgccgccgctgatgacaatactgatccacctcactatgaagaaacttccttcggggatgaagcccaaaagaggcttagaatcagtttccggccgggcaaccaggagtgctacgataattttctgcagtccggagaaaccgcgaaaactgacgccagttttcatgcctacgattcacatacaaacacctattacctccaaaccttcggacacaacactatggatgccgtgcccaaaattgagtactatcggaacactggaagtatatccggccctaaagtgaatagacccagcctgttggagatacatgagcagctggcaaaaaatgtagcagtgacacctagctcggccgaccgggtcgccaatggggacggaatacccggagatgaacaggctgagaataaggaggacgaccaggctggagtggttaaatttggctgggtgaagggggtcctggtgagatgtatgttgaatatctggggcgtcatgttgttcatccgcctgtcttggatagtgggtgaggccggcattggactaggtgtcatcataatcgggttgtccgtcgtcgtgacaaccctgacggggattagcatgagcgccatttgcacaaacggagttgttcggggcggcggcgcttactacctgatctcaagatctctgggacccgagttcggagggtccataggtctgatcttcgcatttgccaacgcggtcgcagtggccatgtatgtcgttggctttgccgagacagtagtggacctgctgaaggagagtgactcaatgatggttgaccctacaaacgatatccgcatcatcggaagcatcacagtcgtgatcttgctcggcatctcagtagctggcatggaatgggaggccaaagcccaggtgatactcttagtgatcttattgattgctatcgcaaattttttcatcggaaccgtaatcccttccaacaacgaaaagaagtcacgcggtttcttcaattaccaggcttcaatatttgccgaaaactttggcccccggttcaccaagggggagggatttttctctgtgttcgccatcttcttccccgcggccactgggattctggctggagcaaatatcagcggagacctagaggaccctcaggatgccattcctcggggaacgatgctggcaatattcatcacaacggtggcatacctcggggtggctatctgtgtaggagcatgtgtggtacgggacgcaacaggaaacatgaacgatactatcatcagcgggatgaattgtaacggtagtgcggcatgtggactgggatacgacttctcgcgatgcaggcacgagccatgtcaatatggattaatgaacaatttccaggtcatgagcatggtcagcgggttcgggccattgatcaccgctggcatctttagcgcaacactgagttccgccttagcttccctagtgagtgctcccaaggtattccaagccttgtgcaaggacaacatatataaggctcttcagttcttcgctaagggatacggaaagaataatgaaccactgaggggctatatactgacttttcttatcgcaatggccttcatcctcattgccgagttgaataccattgcgcctatcatatcgaacttctttttggcttcttatgctctgattaattttagttgtttccacgcctcctatgcaaagtcccctggctggcggcctgcatacgggatttataacatgtgggtgtccctctttggcgccgtcctttgttgtgctgtgatgttcgtcattaattggtgggcagcggtcatcacctatgtgatcgagttttttctgtacgtttacgtcacatgtaagaagcccgatgtcaattggggttcatctactcaagcactcagctatgtgtcagccctggacaatgcactggaattgacgacagtggaagaccacgtgaagaacttccgcccacagtgtattgtcctgacgggcggaccaatgacgcggcctgctctcctggacatcacacacgcctttaccaagaatagcgggctgtgtatttgctgtgaggttttcgtagggcctcgcaagttatgcgttaaggaaatgaactctgggatggcaaaaaaacaggcatggttgattaagaacaaaataaaggccttctatgcagccgtcgcagctgactgcttccgagatggggttcgttcgctgctccaggctagcgggctcggcagaatgaagcccaatactttggtcattggatacaaaaagaattggcgcaaggctcccctgactgagatcgaaaactacgtgggaatcatccatgacgcatttgacttcgagataggggtcgtcatagttagaataagtcagggcttcgacatcagtcaggtcctccaggtgcaggaagaactcgagaggctggagcaagagaggcttgccctggaagctactatcaaagataatgaatgcgaagaagagagcggggggatccgtggactgtttaagaaggcgggaaaactcaacataacaaaaacaactcccaaaaaagacggttcaattaacacttcgcaaagtatgcacgttggggagtttaatcagaaactggtggaggcctccactcagttcaagaagaaacaggagaagggcaccattgacgtctggtggttgtttgatgatgggggtttaacattgttaattccctatatcctcacactgagaaaaaagtggaaggattgtaaacttcggatttacgttggcggcaagattaaccggattgaggaggaaaagatagtaatggcctcattgctttccaaatttaggatcaagtttgccgatattcacataattggcgatataaacataagaccgaataaggaaagttggaaagttttcgaggaaatgatcgaaccgtacagattgcacgaaagctgcaaggatttaacaacggctgagaagctgaagagagagactccctggaagattaccgacgctgagttggaggccgtcaaagaaaagagttacagacaggtccggctcaatgagctgttacaagagcacagtcgcgccgctaatctcattgtacttagcttacccgtcgctcggaaaggctccatttccgacctgctctacatggcctggcttgagatacttacgaaaaacctgccacctgttcttctggtgcggggtaatcacaagaacgtgctaaccttttactct

SEQ ID NO: 71581 - DNA, 3297 bp, Artificial Sequence
  derived and/or modified sequence
atgtcgctcaacaattcctccaacgtctttttggattccgtcccgtcaaataccaaccgcttccaggtgtcggtgatcaacgaaaaccatgaatcctcggcagctgcggatgacaacactgacccaccccattatgaggagacttcgtttggcgatgaagctcagaagcgcctccggatcagcttcaggccgggaaaccaggaatgttacgacaactttttgcagtcgggagagactgcgaaaactgacgcatcgttccatgcctacgactcgcacactaacacctactatttgcagaccttcggacacaacacgatggacgccgttccgaagatcgagtactaccggaataccggctcaatatcaggtcctaaagttaatcggccaagcctccttgagatccatgagcagctcgcaaaaaatgtggccgtgactccgagctctgcagacagagtcgccaatggagacggcatcccgggagatgaacaggccgagaataaggaggacgatcaggcaggagtggtgaagttcggatgggtcaagggggtgctggtgcgttgtatgctgaatatctggggagtgatgctcttcatcaggctgtcatggatcgtgggagaagccgggattggactgggcgtgattatcattgggctcagcgtggtcgtgactaccctgactggaatctcgatgtcggccatctgtaccaacggagtcgttcgcggaggaggagcctactacctgatctcacgctcgctggggccggaattcggcgggtctatcggactcatatttgcgttcgcgaatgcggtcgccgtggcgatgtacgtggtcggatttgcagaaaccgtggtggatctgctgaaggaaagcgatagcatgatggtcgaccccaccaacgatattagaatcattggatcaatcaccgtggtgatcctgcttgggatcagtgtggcgggtatggagtgggaagcgaaggcccaggtgattttgctggtgattctgcttatcgcgatcgccaattttttcatcggtactgtgatcccatcaaacaacgaaaagaagtcaagaggattctttaattaccaagcgtccatctttgccgaaaatttcggtcctcgcttcaccaagggagaaggtttcttctccgtgttcgcaatcttcttcccggcggccacgggaatcctggctggagcaaacatctcaggtgatctggaggacccgcaagacgctatcccgcggggtaccatgctcgcgatcttcatcaccactgtcgcctacctgggcgtggcgatttgcgtcggagcctgcgtcgtgcgggacgccaccggtaacatgaatgacaccatcatctcaggcatgaattgcaacggaagcgccgcctgcggcctcggatacgatttctcgcgctgtcgccacgagccctgccaatacgggctgatgaacaactttcaagtcatgtcgatggtgtccggctttgggccactgatcacggccggcattttctctgctaccttgtcaagcgccctcgcttccctggtgtccgccccaaaggtattccaagcactttgtaaggacaatatctacaaggctctgcaattcttcgctaagggatatggaaagaacaacgagccacttcgcggatacatcctcacttttctgatcgcaatggccttcatcctgatcgcggaactgaataccatcgcgccgatcatctccaactttttcctcgccagctacgccctgatcaatttctcatgtttccacgcaagctacgctaagtcccctggatggcgccccgcgtacggcatctacaacatgtgggtgtccctgttcggagctgtgctgtgctgcgccgtgatgttcgtcatcaattggtgggccgccgtcattacctacgtgatcgagttttttctctacgtctacgtgacctgtaagaaacctgatgtcaactggggcagcagcacccaggcgcttagctacgtgtcggcactggataacgctctggaacttacgaccgtggaggaccacgtcaaaaatttccgcccgcagtgcatcgtccttactgggggcccgatgacccggccggctctgctcgatatcacccacgctttcaccaaaaactcggggctgtgcatctgctgcgaagtgttcgtcggaccacggaaactctgcgtcaaagaaatgaactccggtatggcaaaaaagcaggcatggctgatcaagaacaagatcaaggcgttctacgccgcagtcgccgcggattgcttccgcgatggagtgcggagcctgttgcaagcctccgggctcggtaggatgaaaccaaacactctcgtgatcggatacaagaaaaattggaggaaggcgccgcttacggaaattgagaattatgtgggcatcattcacgatgcatttgacttcgagattggggtggttattgtgcgcatctcgcagggctttgacatctcgcaagtgttgcaagtccaagaggaattggagagacttgaacaagaaagactggctctggaagctactatcaaggacaacgaatgcgaagaggaatcaggaggtatcagggggctgttcaagaaggccggcaagctcaacatcactaagactaccccgaagaaggatggatcgataaacacgagccagtccatgcacgtgggagagttcaaccagaaactcgtggaagcgtcgacccagtttaagaagaagcaggagaagggaaccatcgacgtctggtggctgttcgacgacggcggactcactctcctcatcccgtacattctcaccttgagaaaaaagtggaaggactgcaaattgcgaatttacgtaggaggcaaaattaatcgaatcgaagaagagaagatcgtcatggccagcctgctctccaagttccggatcaaattcgccgacatccacatcatcggcgacatcaacatccggcctaacaaagagtcgtggaaggtgttcgaagaaatgatcgagccatacagactgcatgagagctgcaaggaccttactacggctgagaagctgaagcgggaaactccctggaaaattactgatgcggagctcgaggccgtgaaagaaaagtcataccgccaggtgagactgaacgaactgctccaggaacactcccgggccgcaaacctgatcgtgctgtccctgcctgtggcccgcaaaggatcgatttccgacctgctgtacatggcatggctcgagatcctgactaagaatctgccacctgttctgctggtgagaggcaaccataagaacgtgctgactttctactcc

SEQ ID NO: 71582 - DNA, 3297 bp, Artificial Sequence
  derived and/or modified sequence
atgtccctgaacaattcatctaatgttttcctcgactcagttccttctaatacaaataggttccaggtgtctgtcataaacgagaatcatgaaagctccgcagccgcagatgataatacggacccaccccattacgaagaaacctcctttggagacgaagctcagaagcgattgcgtatatcctttagacccggtaaccaggaatgttacgataatttccttcagagcggggagacagcgaaaaccgacgccagcttccatgcatacgattcacataccaatacttactacttacaaacctttggtcacaataccatggatgctgttcccaagattgaatactaccgaaatactggctcaattagcggtcccaaagtaaataggcccagtcttctggaaattcatgagcagctcgccaagaatgtcgccgtcactcccagctccgcagacagggtggctaacggcgacggcattcctggggacgaacaggccgaaaacaaagaggacgaccaggctggagtagtcaagttcgggtgggtaaaaggagtcctagtacgctgcatgctgaatatctggggagtgatgctgtttatcaggttgagctggatcgtgggggaggcaggaatagggctgggcgtaatcattattggtttgtcagtggttgtaactaccctaactggtatctcaatgagcgctatctgcaccaacggagtggtcagaggcggcggcgcctactaccttatctcccggagtctagggccggaattcggcggctctattgggttgatctttgcatttgccaacgcagtggccgtggctatgtacgtagtggggtttgctgagacagttgttgacttactaaaagagagcgattccatgatggtagaccccacgaatgacatccgcatcattggctccatcaccgttgtgatactactgggcatatcagtggctggcatggagtgggaggccaaggctcaggtgattctcctggtcatcctgctgatcgcaatagcgaatttctttatcggaactgtaatcccaagcaacaacgaaaaaaagtcccgcgggttcttcaactatcaggccagcatctttgctgagaatttcggaccccggtttaccaagggggaaggttttttctccgtgtttgctatcttcttcccagcagctaccggtattctggccggcgcaaatatttccggggacctggaggacccccaagatgctatcccccgaggaacgatgttggcaattttcattacaacagtggcctatttgggcgtggcgatttgcgtaggcgcatgcgtcgttcgggacgcaaccgggaacatgaacgacaccattatctcagggatgaactgtaatggatccgcggcctgcggcttggggtatgacttctctagatgtaggcacgagccttgtcagtacggtctgatgaataacttccaggttatgagtatggtgagcggtttcggacctttaatcacagcaggaatattctctgcgaccctgtcgtcagcgctggctagcctggtcagtgcaccaaaggtgttccaagccctatgcaaagataatatttataaggcactgcagtttttcgctaaaggctatggaaagaataatgagcctctacgaggctatattctgacttttctgatagccatggcatttattctcatcgcggagctgaacacaatcgctccaatcatctccaattttttcctggctagctatgccttgattaatttcagttgttttcacgcgtcatacgctaaatcaccggggtggcggcctgcttatggtatttacaacatgtgggtttccctctttggagcggtgctgtgctgcgcggttatgtttgtcatcaactggtgggctgctgtcatcacatacgtgatcgaattctttctatatgtgtacgtgacatgtaagaaacctgatgttaattgggggtccagtacacaagcattgagttatgtcagcgccttagacaatgctctagagctgactaccgtcgaggaccacgtgaaaaacttccgtccgcaatgcatagtattgactggaggccccatgactcgccccgccttgttagacattacacacgcgttcactaagaattcagggctgtgcatctgctgcgaagtattcgttggcccaaggaagttgtgtgtcaaggagatgaattcggggatggctaagaagcaggcatggctaattaagaataagatcaaggcattctatgcggccgtggcagcagactgctttagggatggagttaggtcgttacttcaagcttctggattggggcggatgaaacccaatacactggtgattgggtacaaaaagaactggcgtaaggcgcccctgactgaaattgaaaactacgtcggcattatccatgacgcttttgattttgagatcggggtggtgattgtcaggattagtcaagggttcgatatctctcaagttctccaggttcaggaggaactcgagcgtctggagcaagaacggctggctctagaggctacgataaaggacaatgaatgtgaggaggaaagtggtgggatccgtggtctcttcaagaaagccggcaaactgaatatcacaaaaacaacccccaagaaggatgggtcaataaatacgagccaaagcatgcacgtgggagagtttaatcagaagctagtcgaggcgagtacacagttcaagaagaaacaggagaaaggaaccattgatgtatggtggctgtttgacgacggaggcttgactttgctgattccatatattcttaccctgaggaaaaagtggaaggattgtaaacttaggatttacgttgggggaaagatcaatcggatcgaggaagagaagatcgtgatggcctccctgctttcaaaattcaggatcaaattcgccgacatccacataatcggcgacatcaacattaggccaaataaggaatcttggaaggtttttgaagaaatgattgaaccatacagacttcacgagtcctgcaaggacttgacgactgcggaaaagcttaaaagggagacaccatggaaaattacagatgctgagctggaggccgtgaaagaaaagagctacagacaagtgaggttgaatgaattactgcaggagcactcacgcgctgccaacttgatcgtcctgtctctccctgttgcacgcaagggctcgatttcagatcttctgtatatggcttggctagaaattttgactaaaaatttacctcccgtgctgttagtcaggggcaaccataaaaacgtcctgacgttttattct

SEQ ID NO: 71583 - DNA, 3297 bp, Artificial Sequence
  derived and/or modified sequence
atgtccctgaataattccagcaacgtctttctggactccgtgccttctaatacaaatcggtttcaagtcagcgtgataaatgaaaaccatgaatcctctgctgccgcagatgacaatactgacccccctcactatgaggagaccagttttggagacgaagcccaaaagagactacggatatccttccgccccgggaaccaagagtgttatgataattttctacagtccggcgagacagcaaagactgacgcctcctttcacgcttatgacagccacacgaatacatattatcttcagacctttggacacaacacaatggatgccgtgcctaagatcgagtattacagaaacaccggcagtatctccggcccaaaggtgaacagaccaagcctcctcgagatccacgagcagctagccaaaaatgtcgccgtgaccccctcaagcgcagatagggtggcaaatggagacggcatcccgggagatgaacaagccgaaaataaggaagacgaccaggcgggagttgtgaagttcgggtgggtgaagggagtcctggtgagatgcatgttgaatatctggggagttatgctgttcatccgactgtcttggatcgtgggagaggctgggatcggtctcggggtgattataatcggactctctgtagttgttactacactcacaggcatctcaatgagtgccatttgcacaaatggtgtggtccgcggaggtggcgcctactatctgatcagcagatcactaggaccagaatttggcggatccattggcctgatctttgctttcgccaatgcagtggctgttgccatgtacgtggtgggatttgcagaaacagtggtggatcttctgaaagaaagtgacagcatgatggttgatccgactaatgatattaggattataggctctataaccgtggtaatcctgctgggaatatcagttgccggaatggaatgggaggccaaagcccaggtgatattactagtgatactcctgatagcgattgccaacttcttcataggaaccgtcatcccatcgaataatgagaaaaagtcccgcggcttcttcaactaccaggctagtatattcgctgaaaatttcggaccacgcttcactaagggcgagggattcttcagcgtttttgctattttctttcccgcagccacggggatcctggctggtgccaatatcagcggcgacttggaagacccacaggatgcaatcccccgagggaccatgctggcaatttttataaccactgtggcctacttaggggtggccatctgcgtcggagcttgcgtcgtgcgcgacgctacaggtaatatgaacgacacaattatctctgggatgaactgcaatggtagcgctgcatgtgggttaggctacgacttttcacgttgtcggcatgagccatgtcagtatggcttgatgaataactttcaagtcatgtccatggtgtccgggttcggccctctcatcaccgcaggtatcttttctgccacgctgtctagcgctctagcctctctggtatctgctcctaaagtgtttcaggctttgtgtaaggataatatctataaggcgctccagttctttgccaagggttatggcaaaaacaacgagcccctacgtggctatatattgaccttcctgatcgccatggcctttatcctcatcgccgagctgaataccatcgcccctattatttccaacttcttcctcgcaagttatgccctgatcaacttcagctgtttccacgcgtcctacgcgaaaagccccggatggcgcccggcctacgggatctacaatatgtgggtctctttgtttggggcagtgctgtgctgcgccgtcatgtttgtaatcaactggtgggccgccgtgatcacgtacgtgatagagttctttctgtatgtctacgtcacttgcaaaaagccggatgtgaactggggtagctcaacacaagcactcagctacgtgagtgctctcgacaatgctctggagcttacaactgtcgaggaccatgtgaagaattttcggcctcagtgcatcgttctgacaggcgggcctatgacaaggcctgcattattggatattacacacgcattcaccaaaaactctggcctgtgcatttgttgtgaggtattcgtgggacctaggaagctgtgtgttaaagagatgaatagtggcatggctaagaaacaagcctggttgattaagaacaaaattaaggcgttttacgccgccgtggcagctgactgctttcgcgatggcgtccggtccctcctgcaggcctcaggactcgggcgaatgaaacctaatactcttgtgataggctacaaaaagaactggcggaaagctcctctgactgagattgaaaactacgtcggcatcatacacgatgcttttgactttgagattggggtcgttattgtccgtatctcgcaggggttcgatatcagccaggtcctacaggtccaggaagagctggaacggttagagcaggaaaggctggctctcgaggcaacaattaaggataacgaatgtgaggaagaatctggtggcatacgtggactctttaagaaagccggaaagttgaatatcaccaaaactacccctaagaaggatggcagcattaacacttcgcagagcatgcatgtgggggagttcaatcagaaattagtcgaggcctccacccaatttaagaagaaacaggagaaagggacaattgacgtatggtggctgtttgatgatggggggctgacactgctgataccttacatattgacactgcgcaagaaatggaaggactgtaaactgagaatatatgtgggtgggaagatcaataggattgaggaggagaaaatcgtaatggcctctctcctgtcaaagttcagaataaaattcgccgatatacatatcattggggacatcaatattaggccaaacaaggaatcatggaaggtttttgaggaaatgatagagccctacaggctgcacgagtcttgcaaggaccttaccacagcagaaaagttgaaacgggagacaccgtggaagatcacggatgctgagctcgaagcagtgaaggaaaagtcataccgccaggtcagactgaacgaactgctgcaggaacactccagggcagccaatttgatagttctttccctgcctgtcgccagaaaagggagcatttctgatctgttatacatggcttggctggagatcctcaccaaaaacctccctcccgtgctgctggtgcgagggaatcacaagaatgttcttacattctattct

SEQ ID NO: 71584 - DNA, 3297 bp, Artificial Sequence
  derived and/or modified sequence
atgtctcttaacaattcatcgaacgtgtttctggattcagtcccttcaaacacgaatcgattccaggtgtccgtcattaacgaaaaccatgaatcgtccgcagccgcagacgataataccgatcctcctcattacgaagaaacctcgttcggtgatgaggcccagaagcggctcagaatatcttttcgcccaggaaatcaagaatgttacgataacttccttcagagcggagaaacggccaagaccgatgcctcattccatgcatacgatagccacactaacacttactacttgcaaacctttggtcacaacaccatggatgcagtgcctaagattgagtattaccgcaacacgggatcaatctcaggtccaaaggtgaacagaccctccctccttgaaattcacgagcaacttgcgaagaatgtcgccgtgactccaagctcagcagaccgtgtggcaaacggcgatgggattccaggagatgagcaggccgagaataaggaagatgatcaagcaggtgttgtcaaatttggatgggtgaagggggtcctggtgcggtgcatgctgaacatttggggtgtgatgctgtttatacggttgagctggattgtgggtgaagcgggaattgggctgggagtcatcattattggcctttccgtagtggtcactactctgactggcatatcgatgtcggcgatttgtactaacggggtggtgcgaggtggtggagcgtactaccttatttcgcgttccctcgggcctgaatttggaggttcgattggattgatctttgcatttgcaaacgccgtggcggtcgcgatgtacgtagtgggtttcgcagaaaccgtggtggatcttctgaaggaatcggattcgatgatggtggatccaaccaacgatataaggatcattggctcgatcaccgtggtgatattgctcggaatttcggtggccgggatggaatgggaggcgaaagcccaagtgattctgcttgtcatactcctgattgcaatagcaaacttctttatagggaccgtgatccccagcaataacgaaaagaagagccgaggctttttcaactaccaagcatccatttttgctgaaaactttggaccgcggtttaccaaaggagaggggtttttctccgtgtttgcaattttcttccctgccgcaactggaatccttgcaggtgcaaacatttcgggcgaccttgaggacccgcaggatgcaatcccacgcggaactatgctggccatctttatcaccaccgtggcctacctgggagtggcaatatgtgtcggcgcatgtgtggtgagagacgccaccggcaacatgaacgataccattatctcaggaatgaattgtaacggctcggcggcttgcggcctgggctacgatttttccaggtgtagacacgagccctgccaatacggacttatgaacaacttccaggtcatgagcatggtgtcgggcttcgggcccctcattaccgcaggtattttctcggctaccctctccagcgcacttgcatcgcttgtctcagctcctaaggtgtttcaggcgttgtgtaaggataacatatacaaagccctgcaattcttcgctaaggggtacggcaaaaacaatgaaccacttagaggatacatcctcacgtttcttattgcgatggcattcattctgattgcagaactcaacaccatcgcacctatcatttccaacttcttcctggcctcatacgcattgattaacttttcctgcttccatgcttcctacgcaaaatctccaggatggcgtcctgcatacggaatttacaacatgtgggtcagtttgtttggagcggtgctttgctgtgcagtgatgtttgtgatcaactggtgggcggcagtgattacctacgtcatagaattcttcctttacgtgtatgtgacctgcaagaaacccgatgttaactggggatcctccactcaagcactttcatacgtctcagctcttgacaacgcactcgagctgaccacggtggaggatcatgtgaaaaacttcagaccccagtgcattgtgcttaccggcggaccaatgacgcgacccgcactcctcgatattactcatgcattcactaagaattcaggactgtgcatatgctgtgaagtgttcgtgggccctaggaagctctgtgtcaaggagatgaactcaggaatggccaagaaacaggcctggctgatcaaaaacaaaatcaaggccttctacgccgccgtcgcggcagattgttttcgtgatggtgtgaggtcgctgcttcaggcctccggtctgggacggatgaaaccaaatactcttgtgattggatacaaaaagaattggcggaaagctccacttaccgaaatcgaaaactacgtggggatcattcatgacgcatttgactttgaaatcggagtcgtcatcgttagaatttcccaaggatttgatatatcgcaagtgctgcaagtccaggaagaacttgaacggcttgagcaggaacgcctggcactggaagctaccataaaagacaatgaatgcgaggaagagtcgggtgggatcaggggcttgttcaagaaggcaggtaaattgaacattaccaagactacccccaagaaggatggctccataaacacgagccaatccatgcatgtcggtgaattcaatcaaaagctcgtggaggcttccacccaattcaagaagaaacaggagaagggaaccatcgacgtgtggtggcttttcgatgatggaggactcactcttcttataccttacatactgactctccgcaagaagtggaaggactgtaagctgaggatctacgtcgggggtaaaatcaatagaatcgaagaagaaaagattgtgatggcctccctccttagcaagttcaggatcaaatttgcagacattcatatcatcggtgacattaacattcgacctaataaggaatcgtggaaggtctttgaagaaatgattgagccttaccgtctgcacgaatcgtgtaaggatctgactaccgccgagaaattgaagagagagactccttggaagattacggacgctgaacttgaggcagtcaaggaaaagagctataggcaggtccgccttaatgaactcctccaagaacattcacgtgcagcaaaccttattgtcctctcgctgccagtcgccagaaaagggtcaattagcgatcttctttacatggcatggctcgagatcctgactaagaatcttcctcctgtgctcctggtgcggggtaaccataagaatgtgcttaccttttactca

SEQ ID NO: 71585 - DNA, 3297 bp, Artificial Sequence
  derived and/or modified sequence
atgtctctcaacaactccagcaacgtgttcctggactcggtcccgtcgaacactaataggttccaagtttcggtcatcaatgagaaccacgagtccagcgccgcggccgacgacaacacggatcctccccactatgaagaaacttcattcggagacgaagcccaaaagagactcaggatctccttccgaccgggcaaccaggaatgttatgataacttcctccaatcgggcgaaactgccaagactgatgcttcgttccacgcctacgattcgcataccaacacctactacctgcagacctttggacacaatactatggacgcggtgccaaagatcgagtactaccgcaacactgggtcaatcagcgggccaaaggtgaaccgcccgtcgctcttggaaatacacgagcagctggcgaagaacgtggcggtgactccgagcagcgccgacagggtggccaacggagatggaatcccgggagatgagcaggccgaaaataaggaagacgaccaggctggcgttgtgaagttcggatgggtcaagggagtgcttgtccggtgcatgctgaatatctggggagtgatgctttttatccgactctcgtggatcgtgggagaggctggtattggactgggagtcatcatcatcggcctctctgttgtggtgaccactctgactggaatcagcatgtctgccatctgcactaacggggtggtgcggggtggtggagcatattacctgatcagccgctccttgggacctgaattcggagggtccattggactgatcttcgccttcgctaacgctgtggcagtcgcgatgtacgtggtgggtttcgccgaaaccgtggtggacctcctgaaggagtccgactccatgatggtggatccaaccaacgacatccggatcatcggatccattaccgtggtgatcctgctggggatctcggttgcgggtatggagtgggaggccaaggcacaagtgattcttctggtcattctcctgatagctatcgcgaactttttcattggaaccgtgattccaagcaataatgaaaagaagtcacggggcttcttcaactaccaggctagcatcttcgcagagaacttcggacctagattcactaagggagagggattcttcagcgttttcgctatcttcttccccgcagctactggcatcctcgcgggagccaacatcagcggagatctcgaggatccccaggacgctattccccgcggaaccatgctggccatctttattacgaccgtggcgtacctgggcgtggcgatctgcgtcggggcttgcgtggtcagagacgccactggaaatatgaacgataccatcatctcagggatgaactgtaacggctcggccgcctgcggactgggatacgatttttcacgctgcagacacgaaccgtgccagtacgggcttatgaacaatttccaggtgatgtcgatggtgtcgggattcggaccgctgatcactgctggcatcttcagcgccaccctctcctcggcgctggcctcgttggtgagcgccccgaaagtgttccaagcactgtgcaaggataacatctacaaggcgcttcaatttttcgcaaagggatacggcaagaacaatgaaccgctgcgcggctacattctgacgtttttgatcgccatggcgttcatcctcatcgccgagctgaataccatcgccccaatcatctctaactttttcctggcatcgtacgccctgatcaatttctcatgtttccacgccagctacgcaaagtcaccaggatggaggccggcttacggtatttacaacatgtgggtgtcactgtttggagcagtgctgtgctgcgccgtgatgtttgtgattaactggtgggcagcggtgatcacctatgtgatcgaattcttcctgtacgtctacgtgacttgcaaaaagccagatgtgaactggggttcatccactcaggcattgtcatacgtctcggcactggacaatgccctcgaactcactaccgtcgaggatcacgtgaagaatttcaggcctcaatgtatcgtgctgactggaggacctatgaccagaccggccttgttggacattacccatgcgttcactaagaatagcgggctctgcatctgttgtgaggtgttcgtgggacctcgaaagctgtgcgtgaaggagatgaactccggaatggctaagaagcaggcctggcttatcaaaaacaaaatcaaagcattctacgccgccgtggccgcggactgctttagagacggggtgcgctccctgctgcaagcgtcagggctgggtcggatgaaaccaaatacgctggtcatcggctacaaaaagaactggcgtaaggccccgcttactgaaatcgagaattacgtgggaatcatccatgatgccttcgacttcgaaatcggagtggtgatagtcaggatttcccaaggattcgacatttcccaggtgctgcaagtgcaggaagagctggaaagactcgaacaggaacggctggcgctggaagcaactatcaaggataatgaatgcgaagaagaaagcggaggaattcgcggcctgtttaagaaggcaggaaagctgaatatcacgaagaccactcctaagaaagacggctcaatcaatacctcccagtccatgcacgtcggagagtttaaccagaagctggtcgaagccagcacgcaattcaagaaaaagcaagaaaaaggtaccattgacgtctggtggctgtttgatgatggaggcttgaccttgttgatcccttacatcttgaccctgcggaagaagtggaaggactgcaagctccgaatctacgtgggaggaaagatcaaccggatcgaggaggaaaagatcgtcatggcgtccctgctgtccaagttcaggatcaaattcgcagacatccacatcattggcgatatcaatatccgcccgaataaggagtcctggaaagtgtttgaagaaatgatcgagccttatcggctccacgagagctgcaaggatttgaccactgcagaaaaactgaaacgcgagactccatggaagatcactgatgccgagctggaggcggtgaaggaaaaatcctacaggcaggtccgcctgaacgaactgctgcaggaacacagcagggccgccaacctcatcgtgctctcactgccagtcgcccgcaagggtagcatctcggaccttctgtacatggcctggctggaaattcttaccaaaaacctgccaccggtcctcctggtgcggggcaaccacaagaatgtccttactttctactca

SEQ ID NO: 71586 - DNA, 3297 bp, Artificial Sequence
  derived and/or modified sequence
atgtccttaaataactcctccaacgtctttttggattctgtaccttcgaacaccaatcgtttccaggtatctgtgatcaatgagaatcacgagtcttctgcggccgccgacgacaacacggacccaccgcactacgaagagaccagctttggggacgaagcccagaagcgactccggatcagttttaggccgggcaaccaggaatgctatgataacttccttcagagcggagagaccgcgaaaacggatgcatcttttcatgcctatgattcacacacaaatacgtattatcttcagactttcgggcacaataccatggacgccgtgcctaaaatcgaatattacagaaataccggaagcatctcaggccccaaggttaatcggcccagcctactggagattcatgaacagctggcaaagaacgtggcagtcactcctagtagcgctgatcgagtcgccaatggggacgggattccaggggatgagcaggcagagaataaggaagatgaccaagcaggggtggtcaagttcggatgggtcaagggtgtgctagtgagatgtatgctcaacatctggggcgtgatgttgttcatcagactctcatggatcgtaggagaagcagggattggattgggcgtcattattatcggtctttccgtcgtagttaccacccttacggggattagcatgtcagcaatttgtaccaacggcgtggtccggggaggaggcgcctactacctgattagccggagtctgggccctgagtttggggggtccattggactcattttcgcttttgctaatgcggtggccgtcgctatgtatgtcgtgggcttcgcggagacagtggtggatctcttgaaagaaagtgattccatgatggtcgaccccactaatgacatcaggatcatcggttccattactgttgtgatcttgctcggaatttccgttgccggcatggagtgggaagctaaggctcaagtgattttgttagtgattttactgatagcgatcgctaactttttcattgggactgtgatcccttccaataacgaaaagaagtcacggggctttttcaattaccaggcctcaatattcgcagagaacttcgggccacgcttcactaagggagagggctttttctccgtgtttgcaatctttttcccggccgcgactggcattttggctggcgctaacatctctggagatttagaggacccccaagacgcgattccccggggcacaatgttggccatcttcatcactacagtggcttatctcggggtggctatctgtgttggagcttgcgtagtgcgagatgcaaccgggaacatgaacgacacgataatttctgggatgaattgtaacgggtccgccgcatgtggactaggatacgactttagcagatgtcggcacgagccatgccaatatgggctgatgaacaattttcaggtgatgtccatggtctccggcttcggaccgctgattactgcaggcatctttagtgccaccttgtcaagtgcacttgcttctctcgttagtgcccctaaggtgttccaggccctgtgcaaggataacatatacaaggctctacaattttttgcgaaggggtacggaaagaacaatgaaccattgcgaggatatatcctaaccttccttattgctatggcctttatcctaatcgccgagctgaacactatcgctccaattatctccaacttcttcctcgcgtcgtacgcccttatcaatttcagttgctttcatgccagctacgcaaagtcccccgggtggcgtcctgcctacggcatctacaacatgtgggttagtctgtttggcgctgtgctgtgctgcgctgtgatgtttgtgataaactggtgggccgcagtaatcacttatgtgatcgaatttttcctatatgtgtatgtgacctgtaagaagccagacgttaattggggtagttccacccaggcacttagctatgtgtccgcactcgacaacgcgttggaactgaccacggtggaggaccatgtcaagaacttcaggcctcagtgcattgtgctgacaggaggacctatgacccgccctgctctcctcgacattacccacgctttcaccaagaattccggcctatgtatctgttgtgaggtgtttgtgggaccgcggaagctgtgcgttaaggaaatgaattccggcatggctaagaagcaggcttggcttatcaagaacaaaatcaaggccttttacgccgcagtggctgctgattgctttcgggacggcgttcgttcactgctgcaggcctccggcttgggccgcatgaaaccaaacacactggtcataggatataagaagaactggaggaaggctccactgaccgagatcgaaaattacgtcggcataatccatgacgcttttgactttgagatcggagtggtcatcgtcagaatatcacaggggttcgacatcagtcaggtactgcaggttcaagaagaattggaacggctggaacaggaaagacttgcactggaagcgactattaaggataacgaatgcgaggaagagtccggagggatcagaggcctgtttaagaaggccggaaaattaaacattacaaagactacccctaaaaaagacggatcaatcaacacaagtcagtctatgcatgtgggggagttcaaccagaagctcgtagaagcttccacccagttcaagaaaaaacaggaaaagggtacaatcgatgtatggtggttgtttgatgacggcggtctcacgctgctgatcccatacatcctgaccctccgcaagaaatggaaagattgtaaactacgcatctacgtaggcgggaagatcaatcggattgaagaggaaaagatagtgatggctagtctgctcagcaagttccggatcaaatttgcagacatccatatcatcggcgacataaatattagaccaaataaggagagctggaaggtgttcgaggaaatgattgagccctacagactgcacgagagctgcaaagacctgaccacagcggagaagttgaaaagggagacaccgtggaagatcacggacgctgagctcgaggccgtgaaagagaagtcctatagacaagttagattaaacgagctgctacaggagcattcccgggctgccaatttaatcgtgctctctcttcctgtcgctcggaaagggagtatttctgacctgctatatatggcatggctggagatcctcacaaaaaacctgccccccgtcctgctggtaaggggcaaccacaaaaatgtgctgactttttatagt

SEQ ID NO: 71587 - DNA, 3297 bp, Artificial Sequence
  derived and/or modified sequence
atgagccttaacaattcttccaacgtctttctcgacagcgtgccaagtaatactaaccgattccaggtctcagtgattaatgagaatcacgagtcttctgcagcagccgacgataatactgaccccccccactacgaggagacaagttttggtgacgaagcgcagaaaaggctgcgtatcagctttcggcctggaaaccaagagtgttacgataactttttacaaagcggcgagacagccaaaactgacgccagttttcatgcgtatgacagccataccaacacctactatctacaaacctttggccacaacaccatggatgccgtgcccaaaatcgaatattacaggaatacagggtctatctctgggcctaaagttaacaggccatctcttctagagattcatgagcagctggcgaagaacgtggctgtgactcctagctctgccgaccgggtagcaaacggcgacgggataccaggggacgaacaggccgaaaataaagaagatgatcaggccggggttgtcaagtttggctgggtcaaaggcgtgctggtcaggtgcatgttaaacatctggggtgtcatgctgttcatccgcctgagctggatcgtgggtgaagctggaatcggcctgggggtgatcattatcggactttccgtggtggtcacaaccctcacgggcatatctatgtcagcaatctgtaccaacggagtcgtccggggaggcggagcctactatcttattagcagatccttgggccccgaatttggaggctctataggtttgatatttgcgttcgcaaatgcagtcgcagtggccatgtatgtcgtgggcttcgccgagacagtcgttgacctcctgaaagagtcagactccatgatggtggaccccaccaatgatatcagaattattggatcaatcaccgtggtgatacttctgggaatttctgtggctggcatggagtgggaagccaaagcccaagtcattctgcttgttatcctcctgatcgccatcgctaatttctttattggcacagtcattccctctaacaatgagaaaaagtctcgcggtttcttcaattatcaggcatctatcttcgcagaaaacttcggccctcgtttcacaaagggtgagggtttttttagtgtgttcgccatttttttccccgctgccaccgggatcttggcaggggccaatatcagtggagacctcgaggacccccaagacgccatcccacgcggcacaatgctggctatctttatcactacagtggcttacttgggggtagcaatctgtgtgggtgcctgcgtcgtaagggacgccacaggcaacatgaacgataccattatcagtggcatgaactgtaatgggtccgccgcgtgtggactcggttacgacttctccagatgcaggcacgaaccgtgccagtacggcttaatgaataacttccaagtcatgtccatggtttccggtttcgggcccctcatcacggcaggcatcttcagcgccactctatcttccgccttggcatctttggtgtcagcccccaaagtatttcaagcattatgcaaggacaatatctacaaggccttgcagttttttgcaaaagggtacggcaagaataatgagcccctccggggatatattctgaccttcttgatcgccatggctttcatcttaattgccgagttgaacacaattgccccaatcattagcaatttcttcttggcaagctatgcccttatcaacttctcttgttttcacgcgtcatacgccaaatcacccggttggcggccagcatacggtatctacaacatgtgggtgtccctgttcggtgccgtgctctgttgcgccgttatgttcgtgattaattggtgggcagccgtgattacctacgtgatcgagttctttctgtacgtttatgtgacctgcaagaagccagacgttaactggggtagctcaacccaggctctctcgtatgtttccgcgttggataatgcccttgagctcacgactgtggaggatcacgtcaagaattttaggccccagtgcattgttctgacggggggtcccatgacacgccctgccctgcttgacatcacccacgcatttacgaagaactcaggcctgtgcatctgttgcgaggtgttcgtgggcccacgtaagctctgtgtaaaggagatgaacagcggaatggcaaagaagcaggcttggctgattaagaacaaaattaaagctttctacgccgcggtcgccgcggactgtttccgtgatggcgtgcgcagcctgctgcaggctagcggcctggggcgcatgaaacccaacacactggtcatcggatataaaaaaaattggcgaaaggcgcccctgacagagatcgagaactatgtgggtattattcatgatgccttcgacttcgagattggcgtggtcattgtgcgaataagccagggtttcgacatcagccaagttctgcaggttcaagaggagctcgagcgcctggaacaggaaaggctggcactagaagcgacgattaaagacaacgaatgcgaagaagagtccggcggtatccgcggtctgttcaaaaaagccggcaaactcaacatcacaaagaccactcccaagaaagatgggagcatcaacaccagccagtccatgcacgtaggggaatttaaccagaagctcgtggaggcttcaacccaatttaagaagaaacaggagaaaggaactattgatgtctggtggctgtttgatgatggaggactgaccctgctcatcccatacatcctgacgctaagaaaaaagtggaaagactgcaagctcaggatttacgtgggaggcaagattaacagaatagaagaagaaaagattgtgatggcctccctgctgtccaagttcagaatcaaattcgcagatatccacattataggggacattaacatacgacccaacaaagaatcctggaaggtgttcgaggaaatgatagaaccctaccgcctccatgaaagctgcaaggacctgactaccgcagagaagcttaagagagagaccccctggaagatcaccgatgctgagctggaggccgtgaaagaaaaatcatacaggcaggtgcggttgaacgagcttctccaggagcatagccgcgctgcgaacttgatcgtcctgagcctgcccgtcgcccggaaagggagcatcagcgatttgttatacatggcatggcttgagatactgactaaaaatttgccacctgtgctactggtcagaggcaatcataagaatgtgttgaccttttactct

SEQ ID NO: 71588 - DNA, 3297 bp, Artificial Sequence
  derived and/or modified sequence
atgtctctgaacaattcctctaacgtctttttggactccgtcccaagcaacactaaccgtttccaagtttccgtgattaatgaaaatcacgagtccagtgcggctgctgacgacaatacagaccccccacactatgaagagacttccttcggcgacgaagcacagaagaggcttcgtatctcattccgccccgggaatcaggaatgttatgacaacttcctgcagtcaggggaaaccgccaaaaccgatgccagcttccatgcttacgactcccacactaacacctattatctgcagaccttcggacacaacactatggatgccgttcctaagatcgagtactatcgcaacaccggaagtattagcggcccaaaagtgaaccggccctccctactcgaaatccatgagcagctagccaagaatgtcgctgtcacaccatccagcgcagatcgggtggccaatggggatgggatacccggggatgaacaagcagaaaacaaggaggacgatcaggccggggtcgtcaaattcggctgggttaaaggggtactggtgagatgtatgttaaacatttggggcgtgatgctgttcatacgtttgtcttggattgtgggagaagccggtatcggacttggcgtaataatcatcggtttgagcgtggttgtcactacactgacgggcattagtatgtcagcaatatgtacaaacggagtggtaaggggtgggggcgcctactacctaatcagtaggtcactggggccggaatttggcggctccatcggtctgatctttgcgttcgccaatgctgtggccgtggctatgtatgtggtaggattcgctgaaacagtggttgatttgctgaaagaaagcgattcaatgatggttgaccccacgaatgatattcgcatcattggatctattactgtcgttatccttctaggaatttcagtggctggcatggaatgggaagctaaggctcaggtcatcctgctggtcattctccttattgccattgcaaacttttttataggcactgtgataccgtctaataacgaaaaaaagtcaagggggttcttcaattaccaggcaagcatttttgctgaaaactttggaccccggttcaccaaaggtgaaggcttttttagtgtctttgctatattctttcctgcagccacaggcatcctggcgggtgctaacatttccggggacctggaggaccctcaggatgctatcccgagaggcacaatgctggcgattttcattacaacagtggcgtacctgggcgtggcaatttgtgtgggagcctgcgtggtccgagacgccacgggaaatatgaatgacacaattatctccggaatgaactgcaacggcagcgccgcttgcggacttggttatgatttctccagatgccgacacgaaccctgccagtatgggctcatgaacaatttccaagtgatgtcaatggtaagtggcttcggacccctaatcactgcgggaatcttctcggccaccctctcctctgccctagcaagtctggtgtccgcacccaaggtgtttcaggctctgtgcaaggataacatctacaaggcccttcaattcttcgccaaaggctacggtaagaacaacgaacctctgcgaggatatattctgaccttcttaatcgcaatggcgttcattctcattgccgagctgaataccatcgcacccatcattagcaacttcttccttgcttcctacgccctaataaacttcagttgctttcatgcgagctacgcgaagtcccctggatggagaccagcctatggtatatataatatgtgggtgtcactgtttggggccgtgctgtgttgcgcagttatgttcgtaatcaactggtgggctgcggtgattacgtacgtcatcgaattctttttgtacgtgtatgtgacctgtaagaagccagacgtgaactggggatcctcaacccaggccctcagttacgtgagcgctcttgacaatgccctagaactcactaccgttgaagaccatgtaaaaaacttcaggccccaatgtatagttctgactggaggtccaatgacaagacctgctcttttggatatcactcacgcattcacgaagaactccggactctgcatatgctgcgaggtcttcgtaggacccagaaagctgtgtgttaaggagatgaatagcggaatggccaagaaacaggcctggctgattaagaataagattaaagccttttatgctgcagtggctgccgattgttttcgagatggggtccggtctctactgcaagcaagtggactcggccgaatgaaaccgaataccctggtgatagggtataaaaaaaactggcgaaaggccccactgaccgaaatagagaactacgtcggcattattcacgatgctttcgacttcgaaattggggtcgtgattgtgagaattagtcaggggttcgacatcagtcaggtgcttcaggtgcaggaggaactcgaacgtctggagcaggagaggctcgcgttagaggctaccattaaagacaatgaatgcgaggaagaatccggggggattaggggtctatttaagaaagccggaaagctcaatataaccaagaccacacccaagaaggacggctctattaacactagtcagagtatgcatgtgggtgaattcaaccagaaactcgtcgaggcgagcacgcaattcaagaagaaacaggagaagggaaccatcgacgtgtggtggctctttgatgacgggggacttaccctgctgatcccctatattctcacgctgcgcaagaaatggaaagattgtaaactgagaatctatgtgggcggaaagatcaatagaatagaggaggagaaaatcgttatggcatcactgctgtctaagtttcgaattaaattcgccgatatccatatcatcggcgacatcaatatacgaccgaacaaggaatcctggaaagtctttgaagagatgatcgaaccttataggctgcacgagtcctgcaaagacctgaccacagcagagaaactgaagcgagagaccccctggaagatcaccgatgccgagcttgaggcggtgaaggagaaaagctatcgacaggtgagactcaatgagctgcttcaggagcacagcagagccgctaatctgatagtgttgtcgctgccggtcgccaggaaaggttcaataagcgatctgctgtacatggcttggctggagatcctgactaagaacttaccacccgttctgttggtaagaggtaatcataagaacgtgttgactttttattcg

SEQ ID NO: 71589 - DNA, 3297 bp, Artificial Sequence
  derived and/or modified sequence
atgtccctgaacaattcttctaatgtgttcctcgattccgtgccatctaatacaaatcgatttcaggttagtgtcatcaacgagaatcatgagtcctctgcagccgccgacgacaataccgatccacctcactacgaggaaacctcctttggagatgaagctcagaagagactgagaattagtttccgtcccggaaatcaggaatgttacgacaatttcctgcagtccggcgaaaccgcgaagacggatgcgagctttcatgcttacgattcccatacgaatacatattatctgcaaactttcggccacaataccatggacgctgtgccaaagatagagtactacagaaacacgggttcaatttcaggtcccaaagtaaatagaccaagtctgctggagattcacgagcagctggcaaaaaatgtggctgtaactcctagctcagcagaccgagtcgccaatggggacggtataccaggggatgagcaggccgagaacaaggaggatgaccaggctggcgtggtcaagttcgggtgggtgaagggcgttttggtccgatgcatgttgaatatttggggtgttatgctctttattagactgagctggatcgtgggagaagccggtataggcctcggagtgatcatcataggattaagtgttgtggttaccaccttaacagggatctccatgtccgcaatttgcacaaatggcgtggtaaggggcggaggcgcctattacctaatcagccgaagcctggggccggagtttggcggcagcatcgggctcatctttgcatttgcgaacgctgtggctgtcgccatgtacgtggtcggcttcgcagagactgtcgtggacctgttaaaagaatcagattccatgatggttgaccctacaaacgatatccggatcatcgggtctattaccgtggtgattctccttggaatttcagtggccggcatggagtgggaagctaaagcccaggtaattctcctggtcattctccttatcgctatcgccaatttttttatcggcacggtgatacccagcaacaacgagaagaagagtagggggttctttaattaccaggctagcatttttgcagagaacttcggccctcggttcaccaagggggaaggttttttcagcgtatttgcaatctttttcccagccgctactgggatcctcgctggtgccaacatctctggggacttagaagatcctcaagatgctatcccccgcggcactatgttggcaatcttcattacgacggttgcctacctgggcgtagccatctgcgtgggagcgtgcgtcgttagggacgccactggcaatatgaacgacactattatctctggcatgaactgcaatggaagcgcagcatgcgggcttgggtacgacttttctcgttgcaggcacgaaccctgtcagtacgggctgatgaacaacttccaggtgatgtccatggtctctggcttcggccctctcatcaccgccggaatattcagtgcgacgctctcctccgctctcgcctctcttgtgtcagcacccaaagtctttcaggccttatgcaaggataatatttacaaagccttacaattcttcgctaaagggtacggaaaaaataacgagcctttgcgggggtacatcctaacgttcctgattgccatggcctttattcttatcgccgagctgaacaccatcgcacctattattagcaacttctttttagcttcctatgccctgataaattttagctgcttccatgcttcctacgcaaagtcccccggctggcggcctgcatatgggatttataatatgtgggtgagcctctttggcgcagtgttatgctgtgcggtaatgtttgttataaactggtgggccgctgtcataacttacgtgatcgagttttttttgtatgtgtacgtcacttgcaaaaagcctgatgtgaattgggggagctccactcaggccttgagctatgtgagtgctctggataacgcacttgagttaaccacggtggaggaccacgttaaaaactttagaccacagtgtattgtgctgacaggtggccccatgaccaggcctgcactgttggatatcactcacgcctttaccaagaactcaggactttgtatttgttgtgaagtgtttgttgggccccgcaagctgtgtgttaaagaaatgaactcaggcatggccaagaaacaggcgtggctcattaagaacaaaataaaggcgttctatgccgccgtggcagccgactgcttcagagatggggtacggagcctgctccaggcttccgggttaggcaggatgaagcctaacactctggtcatcgggtataagaagaattggcggaaagcaccactcacagaaattgagaactatgtgggaataatccacgatgcctttgatttcgaaatcggggtagttatcgttcggattagccagggattcgatatttctcaagtgttgcaggtgcaggaggaactcgagaggctcgagcaggagcgcctggccttggaagccaccatcaaagacaacgaatgcgaggaggagtctggcggcatccgaggattgttcaaaaaggccggtaagttgaatatcaccaagaccaccccaaagaaagatggttctattaacacctctcagtcaatgcacgttggggaatttaatcagaagctggtagaagcgtccacccagtttaagaaaaaacaggagaagggtacgatcgatgtgtggtggttgtttgacgatgggggtctgactctgctcataccttatattctgactctgagaaagaaatggaaggactgcaagctgaggatctatgtgggcgggaaaattaataggatcgaggaggaaaagattgttatggcttccctgttgtcaaagtttcgcatcaagtttgccgatatacatatcataggtgatattaacatccgtccgaataaggagagctggaaggtgttcgaggaaatgattgaaccatacaggttgcacgaatcttgcaaagacttgactaccgccgagaagctaaaaagggagaccccctggaaaataactgacgctgaattggaggccgtgaaagaaaaatcgtatagacaggtcagactcaacgagcttctccaggaacactcccgggccgccaatctgatagttctgagcttgccggtggcaagaaagggttccatttcggatttgctctacatggcctggctcgagatcctcaccaaaaacctcccacccgtgctcctggtaaggggcaaccacaagaatgtcctgactttctattct

SEQ ID NO: 71590 - DNA, 3297 bp, Artificial Sequence
  derived and/or modified sequence
atgagcctcaataacagtagcaacgtgtttctggactccgtgcccagcaacactaataggtttcaggtgtcggtgatcaatgagaaccacgagtcatcggcagcagcagacgataatacggatcctccccattacgaggaaactagcttcggagatgaggcgcaaaagcgccttcgtattagcttcaggcctggaaaccaggaatgttacgacaattttcttcaatccggtgagacggccaagactgatgcatcttttcatgcttacgattcacataccaatacctactacctgcaaacttttggacataatactatggacgcagtgccgaaaatagaatactaccggaataccggatcgatttcgggacctaaggtgaacagaccatccctccttgagatacatgaacagctggcaaagaatgtggcagttaccccttcctccgcagatcgcgtggcaaacggggacggtattccaggggatgaacaggccgagaacaaagaagatgatcaggcaggagtggtgaagttcggatgggtgaagggagtcctggtgaggtgcatgctcaacatttggggcgtcatgcttttcatacgactcagctggatagtcggtgaggcaggcatcggactgggagtgattatcattgggcttagcgtggtggtgactaccctgactggtatctcgatgagcgcaatttgtactaatggtgtggtgcgcgggggcggcgcctactacttgatctcaaggagcttgggaccagaattcggtggttccatcggactgatcttcgcctttgcgaatgcagtggcagtcgccatgtacgtcgtgggttttgcagaaacggtcgtggacctgctgaaggaatccgactccatgatggtagatccaaccaatgacattcgcatcataggatcgattaccgtggttattctcttgggaatttccgtggcaggaatggaatgggaggccaaggcacaggtgattcttcttgtgattctgctgatagctatcgcaaacttcttcataggaaccgtgattccttcgaataacgagaagaaaagcaggggattctttaactaccaggcaagcattttcgccgagaactttggtccaagatttaccaaaggagagggctttttcagcgtgtttgcaatattctttcccgcggctaccgggattcttgcaggcgccaacatatcgggggatctggaggatcctcaagatgcaatccctcgggggactatgctggcaatctttatcaccaccgtcgcctatcttggggtggcaatttgcgtgggagcatgcgtggtgcgagatgcaactggaaacatgaacgacactatcatttcgggtatgaattgtaacggcagcgccgcgtgcggactgggttatgatttttcgcgctgccgccacgagccgtgtcagtacggactcatgaataactttcaagtgatgtcgatggtcagcggatttggccctctgatcacggcaggcattttcagcgcaacgctctcaagcgcacttgcctctcttgtcagcgccccaaaggtctttcaggcactttgtaaagacaatatctacaaggccctccaattctttgcaaaaggatatggtaagaataacgaacccctgaggggatacattctcacctttctcattgcaatggcttttatcctgattgcagagcttaacacgatcgcacctatcatcagcaactttttcctcgcaagctacgccctgatcaacttttcctgttttcatgcctcgtacgcaaagtcgcctggatggcggccagcatatggaatctacaacatgtgggtgtccctgtttggtgcggtcctttgttgcgccgtaatgttcgtgattaactggtgggcagccgtgatcacttacgtgatagaattctttctttacgtgtacgtgacttgcaagaagcccgacgtgaactggggatcgtcgacccaagcgctgagctatgtgagcgcacttgacaatgcactggaactcactaccgtggaggatcacgtgaagaatttcagacctcaatgtatcgtgttgacggggggtccgatgaccaggccagctctcctggatatcactcatgcgtttacgaagaatagcggactttgcatctgctgtgaagtctttgtcggtcctaggaagctgtgtgtcaaggaaatgaatagcggtatggcgaagaagcaagcatggctcattaagaacaagattaaagcattttacgcagcggtggccgcggattgttttagagacggggtcagatcactcctgcaagcctcgggactgggtaggatgaaaccaaacaccctggtgattggttacaagaaaaactggcggaaggcaccactgaccgaaatcgaaaactatgtcggaattatccatgatgcatttgacttcgagataggggtcgtgattgtgcggatatcacaaggattcgatatctctcaggtgctgcaggtgcaggaggaactggaacgcctcgagcaggaacgccttgcacttgaggcaaccattaaggacaacgagtgtgaggaagaatccggaggtattcgtgggctcttcaaaaaggcaggaaagctgaatatcactaagacgacccccaagaaggatgggagcattaacacgtcgcagtcgatgcacgtgggagaattcaaccagaaattggtcgaggcatcgacccagttcaaaaagaagcaagaaaagggaaccatagatgtgtggtggctttttgatgatggcgggctcactctgctgatcccttacattttgaccctgcgcaaaaagtggaaagattgtaagctcagaatttacgtcggaggaaagataaacagaatcgaggaagagaaaattgtgatggcatcgctgcttagcaaatttcgaataaagtttgcggacattcacatcattggagacatcaatatccgcccaaacaaggaatcatggaaggtctttgaggaaatgatcgaaccttacagacttcatgaatcctgtaaggatctgactaccgcagaaaaactgaagcgcgaaaccccatggaagattactgacgcagagctcgaggcagttaaagaaaagtcctaccggcaagtgcgacttaatgaactgctgcaagaacactcgcgggccgctaacctgattgtcctttccctgccggttgcccgtaagggttcaattagcgacctcctctacatggcgtggctcgaaatacttaccaaaaacctgcctccagtgcttctggtcaggggaaaccacaagaacgttctcactttctacagc

SEQ ID NO: 71591 - DNA, 3297 bp, Artificial Sequence
  derived and/or modified sequence
atgtccctgaacaattcctctaatgtgttcctcgactcagttccttcaaacaccaaccgcttccaagtgtccgtgatcaatgagaaccacgagtcaagcgcagcagcggacgacaatacggacccgccgcattacgaggaaacttcgttcggggacgaagcgcagaagcgcctgcgcatttccttcagacccgggaatcaggaatgctacgacaatttcctgcagtcgggagagactgctaagactgacgcctcgttccacgcatacgattcccacaccaacacctactatctgcaaaccttcggtcataacactatggacgctgtccctaaaatcgagtactatcgcaacaccggatcaatcagcggtccgaaggtcaacagaccgagcctgctggaaattcacgaacagctcgccaagaatgtggcagtcactccctcaagcgctgacagagtggccaacggcgacggcatcccaggagacgaacaggcggaaaacaaggaagatgatcaagcgggtgtggtcaagttcggatgggttaaaggagtgctggtgaggtgcatgctgaatatctggggagtcatgctgtttatcaggctttcctggatcgtgggagaagccggtattggattgggagtcatcattatcggactctcggtggtcgtcaccaccctcaccggcatctcgatgtcggcgatttgcactaatggggtggttcgtggcggtggagcctactacctgatcagccggtcgctcggcccggaattcggtggcagcattggactcatttttgctttcgcgaacgcggtggcagtcgccatgtatgtggtggggtttgcagaaaccgtggtcgatctgcttaaggagtcagactcgatgatggtggatccgaccaacgacatccggatcatcggctccatcaccgttgtcatcctgttgggaatctcagtggccgggatggaatgggaagctaaggcacaggtgatcctgctcgtgatcctgctgatcgccatcgctaacttcttcatcggaaccgtcatcccatctaataacgagaagaaatcgcgagggttcttcaattaccaggcttcaatcttcgccgaaaactttggcccgcgcttcaccaaaggagagggatttttcagcgtctttgccatctttttcccagccgccactggaattcttgctggcgcgaacatctcgggtgaccttgaagatccacaagatgccatccctcggggcaccatgctcgcgatattcatcactaccgtggcataccttggggtggcaatttgcgtcggtgcctgtgtcgtccgcgatgcaactggcaatatgaatgacactatcatcagcggtatgaattgcaatggcagcgccgcttgcggactgggatacgacttttcgagatgtcgccacgaaccttgccagtacggactcatgaataacttccaagtgatgtctatggtgtccgggttcggtccgctcatcaccgctggcatcttctcagctactctttcctcggcactggcgtcccttgtgtcagcccctaaagtgtttcaggccctgtgtaaagacaacatctacaaggcgttgcagttcttcgccaaagggtatggcaaaaacaacgaacctctgcggggttatatcctgactttcctgattgctatggcattcatcctcatcgccgagctcaacacgatcgccccaattatctcgaacttcttcctcgcgtcgtacgcgctcatcaacttctcctgcttccacgccagctacgctaaatctcccggttggcgccctgcatacggaatctacaatatgtgggtgagcctgttcggcgcggtgctctgctgtgcagtcatgtttgtgatcaactggtgggctgcagtgatcacttatgtcatagagttttttctctacgtttacgttacttgtaagaagccggatgtgaactggggatcgtcaacccaggctctcagctacgtgtcagccctcgacaatgcgctggaattgactacggtggaggatcacgtcaagaacttcaggccgcagtgcatcgtgctgacgggtggacccatgacccgcccagcacttctggacatcacccacgccttcaccaaaaactcaggactgtgcatctgctgcgaggtgttcgtgggccctaggaagttgtgtgtgaaagagatgaattccggaatggcgaagaagcaggcctggctgattaagaacaagatcaaggcgttttacgccgcggtggccgccgactgtttcagagacggcgttcggagccttttgcaagcgtcgggactcggacggatgaagccaaacacgctcgtcatcggctacaaaaagaattggcgcaaggcgccgctgactgaaatcgagaactacgtggggattatccatgacgctttcgatttcgagatcggcgtcgtgattgttagaatctcacaaggtttcgatatatcacaggtcctccaagtgcaggaagagctggaacgactggagcaagagcggcttgcccttgaggccacgataaaggacaatgagtgcgaggaagaatcgggcggcatccgcgggctgtttaagaaagcaggaaagctgaacatcactaaaaccactccgaagaaggatggctcaatcaacacctcgcaatccatgcacgtgggcgagtttaaccaaaagctggttgaagcgtctacccagttcaagaaaaaacaggagaaaggtaccatcgatgtgtggtggctcttcgatgatgggggactgaccctgctgatcccatacattctcacgttgcggaagaagtggaaggactgcaagctccggatctacgttggaggtaagattaatcgcattgaagaggagaagatcgtgatggcttccttgctgtccaagttccggatcaagttcgccgatatccacatcatcggagacatcaacattcggccgaacaaagaaagctggaaagtgtttgaggaaatgatagaaccctaccgcctccatgaatcgtgcaaggatttgactaccgctgaaaaactgaaaagagaaactccgtggaagattaccgacgccgagctggaagccgtgaaggagaaatcctacagacaggttagactcaatgagctgcttcaggaacattcacgcgcggcaaatctcatcgtgctgtcacttccggtggctaggaagggaagcatctccgacctgctttacatggcttggctggaaatccttaccaaaaatctgccgccggtgctgctcgtgcggggcaatcataagaacgtgctcaccttttactcc

SEQ ID NO: 71592 - DNA, 3297 bp, Artificial Sequence
  derived and/or modified sequence
atgagcctgaacaattccagcaacgtgtttctcgattcagtgccatccaatactaacagatttcaagtgtcggtgattaacgaaaatcacgaaagcagcgctgccgccgatgataacaccgatcctccacactacgaggaaactagctttggtgatgaagcacagaagagacttcgaatcagctttagaccggggaatcaagaatgttacgacaactttctgcaatcaggtgaaactgccaagaccgacgcatcgtttcatgcctacgactcgcatacgaatacctactaccttcaaacctttgggcacaataccatggatgccgttccaaagattgagtactacaggaataccggatcgattagcggtcctaaagtaaacaggccttctctgttggaaattcatgaacagctggcgaaaaatgtggccgtgacgccctccagcgccgatagggtggcaaatggagatggaattccaggagatgagcaagcagagaacaaagaggatgatcaggcaggtgtcgtgaagttcggttgggtgaagggagtgttggtccggtgtatgctgaacatatggggcgtgatgctcttcatccggctttcgtggattgtaggcgaagccggaatcggtttgggtgtcatcataataggactcagcgtcgtggtcactaccctgaccggaatctccatgtcggctatttgtaccaatggcgtggtccgcggtggtggagcgtactatcttatttccaggagcctgggtcctgagttcggaggctccatcggtcttatctttgcattcgcgaacgcagtggcagtcgctatgtacgtggtgggatttgctgaaactgtggttgatctcctgaaagagtctgattccatgatggtggatcctactaatgacattcgcatcattggatcaataaccgtggtcattctccttggtatatcagtggcaggaatggagtgggaagcgaaggcccaggtcattcttctggtcatcctccttatcgccatcgccaatttcttcatcggcaccgtcattccttcaaacaacgaaaagaagtctcgtggattctttaactaccaagcatccattttcgcagagaatttcgggcctcggtttaccaaaggcgagggatttttctccgtgttcgcaattttcttccctgcagctactgggatccttgcaggagcaaacatatcgggggacctcgaagatccgcaggatgctatcccccgcggaactatgctcgccatcttcataacgactgtcgcatacctcggggtggccatttgtgttggtgcatgtgtggtgagagacgccaccggaaatatgaatgacacgattatctccggaatgaactgtaatggctcggcagcatgcggtctgggctatgacttttctcgatgcagacatgaaccttgtcagtacggactcatgaacaacttccaagtcatgtccatggtatccggattcggacctctcattacggcgggtatcttctcggcgacgctttcgagcgcactcgcatccctggtatcagcacctaaggtgttccaagccctgtgcaaggacaacatctataaggcactgcagttttttgcaaagggatacgggaaaaacaacgaaccattgagaggttacatccttaccttcctcattgcaatggcatttatccttatcgcagaactcaacacgatcgcacctatcattagcaatttctttctggcaagctacgcactgatcaacttctcatgttttcatgcgtcctacgcaaagtcgcccggatggcggccagcatacgggatttacaatatgtgggtgagcctttttggagccgtgctctgttgcgctgtgatgtttgtgattaactggtgggccgcggtgattacttacgtgattgaattctttttgtacgtgtacgttacgtgtaagaaacctgatgtcaactggggatccagcacccaggcactttcgtacgtgtcggccctggataacgcgcttgagctcaccactgtggaggaccacgtcaagaacttcagacctcagtgtatagtcctcaccggaggtccaatgacgaggccggcacttctggacattacccacgcatttaccaagaactcgggtctgtgtatctgttgtgaagtgtttgtgggaccacggaaactctgcgtgaaggaaatgaactcaggcatggccaaaaagcaagcctggctcatcaaaaacaagattaaagcgttttacgctgccgttgcggccgattgtttccgggacggagtgaggtcactgctccaagcatcgggacttggacgaatgaaacccaacaccctcgtgatcggttacaaaaagaactggaggaaggccccacttacggagatagagaactacgtgggtatcatacatgatgcctttgattttgaaatcggagtcgtgatcgtgcgtatttcgcaaggttttgacattagccaagtgttgcaggtgcaagaagaacttgagcgactggaacaggaacgcctggcactggaagccactattaaggacaacgaatgtgaagaggaatcaggtggaattcgaggtctgtttaagaaggcaggaaaactcaacatcaccaagaccaccccgaaaaaggatgggtccattaacacttcgcagagtatgcatgtcggtgaattcaatcaaaaactggtggaggcaagcactcagttcaaaaagaagcaagagaaaggaactatcgatgtgtggtggctgttcgatgacggaggccttactctgctgatcccttatatcctgactcttcgtaagaagtggaaggattgcaagctgcgcatctacgttgggggtaagattaacagaatcgaggaagaaaagatcgtcatggcatcgcttctgagcaagttccgcataaagttcgcggacattcacattatcggagatatcaatattcgtcctaacaaagaatcatggaaggtgttcgaggaaatgatcgaaccatacagactgcacgagtcttgcaaggacttgactactgcagagaagctgaagcgagaaaccccatggaagattaccgacgcagaattggaggcagtgaaggagaaaagctatagacaggttagactgaacgaacttctgcaggaacattcaagagcagccaacctcatcgtcctttcacttccagtcgcacggaagggttccatttcggacctcctgtacatggcgtggctcgaaatccttaccaaaaacctgccccctgtgctgctggtgcggggtaatcataagaacgtgctgactttttactca

SEQ ID NO: 71593 - DNA, 3297 bp, Artificial Sequence
  derived and/or modified sequence
atgtcactgaataactcgtcgaatgtgtttctcgattcagtcccttccaatactaacaggtttcaggtgtcggtcattaacgaaaaccacgagtcgtccgcggcagcagatgacaatactgatccaccgcactacgaggaaacctcattcggggacgaagctcagaaacggttgcggatctcgttccgaccggggaaccaagagtgctacgataactttcttcaatccggagagactgcaaaaaccgacgcatcttttcatgcatacgatagtcacaccaacacctactaccttcagacctttggacataacaccatggatgcagttcccaaaattgaatactaccgaaataccggatcgatttccggaccgaaggtcaatagaccttccctgctggagatacatgaacagcttgcgaaaaacgtggcggtgacccctagctctgccgacagagtggcaaacggcgacggtatcccaggggatgagcaggcagaaaacaaggaggacgaccaggcaggagtcgttaagttcggttgggtgaagggcgttttggtgcgctgcatgctgaacatttggggagtcatgttgttcatccgattgtcctggattgtcggtgaagcaggaattggccttggcgtaatcattatcggtctttcagtggtggtgactactctcactgggatctccatgtcagcaatctgtactaacggtgtggtcaggggcggaggtgcgtattacctgatctcaagaagccttggacccgaattcggaggttccatcggattgattttcgcctttgcaaacgccgtggccgtcgctatgtacgtggtgggttttgcagaaactgtggtagatctcctgaaagaatcggactccatgatggtcgatccaactaatgatataaggatcattggctcaataaccgtggtgatcctgctcgggatctcagtagcagggatggagtgggaagcaaaggcacaggtgatacttcttgttatcctcctcattgcaattgccaacttctttatcggaaccgtgatcccttcgaacaatgaaaagaaatccagaggattctttaactaccaagcatccatatttgcagagaactttggaccaagatttaccaaaggagaaggtttcttttcggtgttcgccattttcttccctgcggccaccggcattctggccggagccaacatctctggtgatctcgaggacccgcaagatgctattcctagagggacgatgcttgcgatcttcattactaccgtcgcatacctgggggtcgctatttgtgttggagcatgtgtggtgcgcgatgctactggcaatatgaacgatacgattatctctggaatgaactgtaacggttcggcggcgtgtggcctcggatacgacttttcgaggtgcaggcacgagccttgtcaatacggactgatgaacaactttcaggtgatgtctatggtcagcggatttggtccacttattacggcagggatctttagcgcaaccctgtcctcagccttggccagcctggtcagcgcccctaaggtgtttcaagcactgtgcaaggacaatatctacaaggcgcttcagtttttcgcgaaggggtacggtaagaacaatgagcctctgcgcggctacattcttactttcctgattgcaatggcgtttatacttatcgcagaattgaacactatcgcgccaattatctcaaatttcttcttggcgtcttatgccctgatcaatttctcctgttttcacgcgagctacgctaagtcccccggatggcggcctgcatatgggatttacaatatgtgggtcagcctttttggcgcagtgctgtgttgcgcagtcatgttcgtgatcaattggtgggcagcggtgatcacttacgtgattgagttttttctgtacgtgtacgtgacttgtaagaagcctgatgtgaactggggatcctccactcaggccttgagctacgtgtcagctctggacaacgcacttgaactcaccaccgtcgaggaccacgttaagaatttcaggcctcaatgtatcgtgttgacgggtgggcctatgacccggcctgcactcctggatataactcatgcttttacgaagaacagcggactctgcatctgttgtgaggtgttcgtgggtccacgaaagctctgtgtgaaggagatgaactccggcatggcaaaaaagcaagcatggctcataaagaataagatcaaggcattttacgccgcagtggcagcagattgctttcgagacggtgtcagatcattgcttcaagcatcaggcctgggtcgcatgaaaccaaacactctggtcatcggttacaaaaagaactggcggaaggcacccttgaccgagattgagaattacgtgggaatcattcatgatgccttcgactttgaaatcggcgtggttatcgtgcggatttcgcaaggatttgacatatcgcaagtcctccaagtccaggaagaacttgaacgacttgaacaagaaagactcgcactcgaagcaactattaaggataatgagtgtgaagaggaatcgggaggaatccgtgggctgtttaagaaggctggtaagctgaacattaccaagaccacccccaagaaggacgggagcattaacacctcgcaatctatgcatgttggtgaattcaaccagaaacttgtagaagcatcgacccagtttaagaaaaaacaagaaaagggaaccattgacgtgtggtggctctttgatgatggcggactcactctgctgattccttacattctgacgctgcgcaagaaatggaaggattgtaagctgagaatatacgtcggtggaaagattaacagaattgaagaggaaaagattgtcatggcatcccttcttagcaaatttcggatcaaatttgcagatatacatatcattggggatatcaacatacgcccaaacaaagaatcatggaaagtgtttgaagaaatgattgaaccctacaggcttcatgaatcgtgcaaagatttgaccacggcagaaaagctgaagcgtgaaactccatggaagatcaccgatgccgaactggaggcggtcaaggagaagagctacagacaggtgagacttaatgaacttctccaagaacattccagagcagccaacctgatcgtgttgtccctcccagtcgcccgcaaggggtcgatatccgatcttctgtatatggcctggttggaaatcttgaccaagaatctgcctcccgtgcttctggtccggggaaatcataagaatgtcctgaccttttactcg

SEQ ID NO: 71594 - DNA, 3297 bp, Artificial Sequence
  derived and/or modified sequence
atgtcgctgaacaacagctcgaacgtgtttctggactccgtgccctccaacaccaaccggtttcaggtgagcgtgatcaacgaaaaccacgagtcgtccgccgctgccgacgacaataccgaccctccacattacgaagaaactagcttcggagatgaagcacagaagcggctcagaatcagctttcgcccaggtaaccaggaatgctacgataacttcctgcaatcaggtgaaactgctaagactgatgcatcgtttcacgcgtatgactcccataccaatacctactacctgcagaccttcggacacaataccatggacgccgtgccgaagatcgagtactaccggaataccgggagtatctctggaccaaaggtgaaccggccgtcgctgttggaaatacacgaacaactggcaaaaaacgtcgctgttaccccatcctcagctgaccgcgtcgccaatggcgatggaatcccgggagacgaacaggccgagaacaaggaggacgaccaggcgggtgtcgttaagttcggttgggtgaagggagtgctcgtgagatgcatgttgaacatatggggggtcatgctcttcattcgcctttcgtggatcgtgggcgaagcgggaattggacttggggtgatcatcatcgggctctcggtggtggtgacgaccctgaccggaatctccatgtcggccatctgcacgaacggggtcgtgaggggaggtggggcatactacctgattagtcgctcgctgggtccggagtttggcggaagcatcggactcatcttcgcgttcgcaaacgccgtggcagtggccatgtacgtcgtgggattcgctgagactgtggtggatctgctgaaagaatccgactccatgatggtcgatccgactaatgacattaggatcataggatccatcactgtggtgatcctcctcggcatctcggtggccggaatggaatgggaggcaaaggcgcaggtgatcctgctggtgattctgctgatcgcaatcgccaacttcttcatcggaaccgtgattccatcaaataacgaaaagaagtccagaggcttcttcaactaccaggctagcatcttcgcggagaatttcggaccgcgcttcactaagggagaaggattcttcagcgttttcgccatcttcttcccagcggcgacggggatccttgccggagcaaacatttccggagatctggaagatccgcaagatgcgattccacgcggaactatgctcgccatcttcatcaccaccgtggcgtacctgggagtggccatttgcgtgggtgcctgcgtggtgcgcgacgccaccggtaatatgaacgataccatcatctcggggatgaattgtaacggctccgccgcctgcgggctggggtacgacttctcccgctgtagacatgaaccgtgccagtacggattgatgaacaactttcaggtgatgtctatggtcagcggattcggcccgctgattaccgcgggcatcttctcagccaccctctcgagcgctctggcctcgttggtgtcagccccgaaggtgtttcaggcgctgtgcaaggacaacatttacaaggccctccaattcttcgcgaagggctacggcaagaacaatgaaccacttcggggttatatcctgaccttcctgatcgcgatggcgttcatcctgatcgcagaactgaatactatcgcccccatcatttcgaacttcttcctggctagctacgcgctgatcaacttttcgtgcttccacgcaagctacgccaagtcgccgggttggaggccggcctatggcatctacaatatgtgggtgtcgctcttcggagcggtgctttgttgcgcggtgatgttcgtgatcaactggtgggccgctgttatcacctacgtcattgagtttttcctgtatgtctacgtcacttgtaagaaaccggacgtgaattggggatcgagcactcaagccctcagctacgtgtcagcgctcgataatgcgttggagctgacgaccgtcgaggaccatgtgaaaaactttcgccctcagtgtatcgtgctcaccggcggtcccatgacgcggcccgccctgctggatatcactcacgccttcaccaagaattccgggctgtgcatctgttgcgaggtgttcgtgggtccgcggaaactgtgcgtgaaggagatgaattcaggaatggcaaaaaagcaagcgtggttgatcaagaacaaaatcaaggccttctacgctgcggtcgccgctgattgcttcagagacggggtcagatcgctgttgcaagcctcaggactgggacgcatgaaacctaacaccctcgtcattggctacaagaaaaactggcgcaaggccccgctcaccgaaattgaaaactacgtcggcatcatacatgatgcatttgacttcgaaatcggagtggtgatcgtgcggatcagccaggggttcgacatctcgcaagtgctgcaggtgcaagaagaactggaacgcctggagcaggaaagactcgccctggaagcaactattaaggataacgagtgcgaagaggaaagcggaggtatcaggggactcttcaagaaggcgggaaagctcaacatcaccaagacgactccaaagaaggacggctcaatcaacacgtcacagtccatgcatgtgggagagttcaatcagaagttggtggaggcgtcaactcagtttaagaagaaacaggaaaaaggcactatcgacgtctggtggctgttcgacgacggaggccttactctgctcatcccgtacatccttactctccgcaagaagtggaaggactgtaagctgcgcatctacgttggaggcaaaatcaaccgcatcgaagaagagaagattgtgatggcctcactcctgtcaaaattccggattaagtttgccgatatccacatcattggagacatcaatattcgccctaataaggagtcgtggaaagtgttcgaggaaatgatcgaaccataccggctccacgagagctgtaaggacctcactactgccgaaaagctgaagcgcgaaaccccatggaagatcactgacgctgagctggaagcggtgaaggaaaagtcataccgtcaggtgaggctgaacgaattgctccaagagcacagcagagccgccaacctgatcgtgctgtcgctcccagtggccagaaagggaagcatctcggacctgctgtacatggcatggctggagattctgactaagaacctgccgccggtcctgcttgtccgggggaatcataagaacgtgttgactttttactca

SEQ ID NO: 71595 - DNA, 3297 bp, Artificial Sequence
  derived and/or modified sequence
atgtccctcaacaattccagtaatgtattcctggacagcgtgccatccaacacaaaccgctttcaagtatccgtgatcaacgagaaccacgagtcctcagctgccgctgacgacaatacagatccgcctcactacgaggagacaagtttcggggatgaagcccagaagcgcttgcgcatttccttcaggcccgggaatcaagaatgctacgacaacttcctgcagtctggcgagactgctaagacagacgctagcttccatgcttatgactctcacacaaacacttactacctgcagacattcggtcacaacaccatggatgcggtgcctaagattgagtattacagaaataccggatctatttctgggccaaaggtgaataggccttcccttctcgaaatccacgagcaactggcaaagaacgtggctgtgaccccaagttccgctgaccgagtggccaatggagatggcatccctggcgatgagcaggctgaaaataaggaggacgaccaggcaggcgtagtgaagtttggctgggtgaaaggggtcctggtgagatgcatgctgaatatctggggggtgatgctgttcatccggctctcctggattgttggggaagcaggaattggtctcggcgtcattatcatcggactttctgttgtagtgacgaccctgaccggcatctctatgtcagccatttgcactaatggcgtggtccgcggcggaggcgcatactatctcatttcccggagcctcggccccgagtttgggggtagtatcggtctcatcttcgccttcgcaaacgcggtggccgtcgcaatgtacgtcgttggtttcgccgagaccgtggtggatctgcttaaagagtcagactctatgatggtggatcccaccaacgatattcggattattggaagcatcactgtggtgattctgctgggaatttctgtcgctggaatggaatgggaggcgaaggctcaagtcatcttgctggtaattttgttgatagcaatcgccaatttttttatcggcacggtgattccatccaataacgagaagaagagtcgggggttctttaattaccaggccagcatttttgcggaaaactttgggcctcggttcaccaagggagaaggattttttagcgtgtttgccatctttttccccgcagctaccgggattctggctggggcaaatattagcggggatcttgaggaccctcaagacgccatcccgcggggcacaatgcttgctatcttcatcaccaccgtggcctacctgggcgtggctatttgtgtaggcgcctgcgtggtgagagatgcaaccgggaatatgaacgatacgatcatttcaggtatgaactgcaacggctccgctgcctgtggcctggggtatgatttttcaagatgtcgacatgagccatgccagtatggactgatgaacaacttccaggtcatgagcatggtgtcaggattcggtcccctgatcaccgctggtatattctccgccaccttgtcctcagccctcgcgagccttgtcagtgcccctaaagtattccaggcactgtgtaaggataatatatataaagcgctgcagttttttgccaagggctacggaaagaacaacgagcctctgagagggtatattctgacatttctcattgcaatggccttcattctcattgccgagctgaatacaatagctcctatcatatccaacttctttctggcgagttacgccctgatcaatttcagctgtttccacgcctcatacgccaagtcccctggctggaggccagcctacggcatctacaacatgtgggtaagcctgttcggcgctgtgctgtgctgcgctgtgatgttcgtgatcaattggtgggccgcagtgattacatacgtcatcgagttttttttgtacgtctacgtgacctgtaaaaagccagacgtgaactggggtagctccacacaagctctgagttatgtgtccgctctcgacaatgccctcgagttgaccaccgttgaggaccatgtcaagaattttcggccccaatgtattgtgctcaccggcggacccatgactaggcctgcgttgcttgacatcacccacgctttcactaagaatagtggtctgtgcatctgttgtgaagtatttgtgggtccacggaaactgtgtgtgaaggagatgaattccggcatggcaaagaaacaggcctggctgattaagaataaaataaaggcattttatgctgctgtggcagccgattgctttcgggacggcgtgcgatccctcctgcaggctagcgggctgggcaggatgaaacccaataccctggtgattgggtataagaagaattggcgaaaagctcccctcactgagattgaaaattacgtgggaatcattcacgacgccttcgatttcgagattggagttgttatagtccgaatctcacagggctttgacatcagtcaggtccttcaggttcaggaggagctcgagcggctcgaacaggagaggttggccttggaagctaccattaaagacaatgagtgtgaagaggagtcaggcggtatccgaggccttttcaaaaaggcagggaaactgaacatcactaaaaccactccaaagaaagacggaagcattaacacatcacagagtatgcacgtaggcgaatttaatcagaagctggtggaagcctctacgcagttcaagaagaaacaggagaaagggaccatcgacgtgtggtggctctttgacgacgggggtcttacattgctgattccatacatcctgaccctgagaaaaaaatggaaggactgcaagctgagaatctacgtgggcggcaaaataaaccggattgaagaggaaaagatcgtaatggccagcttgctctccaagtttcgaataaaattcgcagacatacacatcattggagacatcaacattcgaccgaacaaggagagctggaaggtgtttgaagagatgatcgagccttatagactgcatgagtcatgcaaggacctgacgactgccgaaaagctgaagcgcgaaacaccatggaagatcactgatgcagagctggaggccgttaaagagaagtcttatcgacaagttaggctcaatgaattgttgcaggaacatagccgggcggccaatctgatcgtcctttccctgccagtggccaggaaggggtccatctcagacctgctctatatggcatggctggaaatcctcacaaagaatctgccccctgtgctgttggtgaggggaaaccataagaatgttctgactttttattca

SEQ ID NO: 71596 - DNA, 3297 bp, Artificial Sequence
  derived and/or modified sequence
atgtctctaaataacagctccaatgtgtttttggacagcgtcccttccaatactaaccggttccaagtctccgtgattaacgagaatcacgaatcttccgctgctgctgatgataacaccgacccacctcactatgaagagaccagcttcggcgatgaagcacagaagagactgcgaattagttttcggccaggaaaccaagaatgctacgataacttcctgcagtccggggagaccgcaaaaacggacgcttcattccatgcatatgacagccataccaacacgtactacctccaaacctttggccacaacaccatggacgccgtcccaaaaatagaatattaccggaacacaggaagtatcagcggaccgaaagtgaatcgaccctcccttctggagatccatgaacagttggcgaagaacgtagccgtgactccatcctctgccgaccgcgtagctaacggcgatgggattccaggagacgaacaagccgaaaacaaagaggacgatcaagccggagtggttaaatttgggtgggtcaaaggtgtccttgtgcgctgcatgctaaacatatggggcgtaatgctgttcatacgcctgagttggatcgttggagaggcgggaataggactcggcgtgataatcatcggactatctgttgttgttactacccttactgggatctcaatgtccgccatatgtactaacggggtggtgaggggcggaggcgcctactatttaatcagtaggtctctcggcccagagttcggcggaagcatcggattgatcttcgcattcgccaacgcagtcgccgttgctatgtacgtggtgggattcgctgagacggtcgtggacctactgaaagaatccgatagtatgatggtggaccctactaatgacattcgaataatagggagcataacagttgtgattctcctgggcattagtgtggcggggatggaatgggaagccaaggcccaggttatcctcttagtgatccttctcattgctattgctaatttcttcatcggaacggtcatcccatccaataatgaaaagaagagccgcgggtttttcaactatcaggcttctatttttgcagaaaattttggtcccagattcactaaaggtgagggttttttttccgtgtttgctatcttctttccagcagcaaccggtattctcgctggggcaaacatttcaggcgacctggaggatcctcaggacgccattccgaggggcactatgctggcgatatttatcacaacagtggcctatctaggtgttgcaatatgcgtcggagcctgcgtggtgcgtgacgccacagggaatatgaacgatacgattatttccgggatgaactgtaatgggtccgctgcgtgcggtctgggttacgacttttcccggtgtaggcacgagccatgccagtatggactcatgaataatttccaagtgatgagcatggtcagcgggttcggccccctgataaccgccgggattttttcagccaccctgagcagtgctcttgcttccctcgtgtctgctcctaaagtcttccaggccttatgtaaagataatatttacaaggcccttcaatttttcgcaaaaggatatggtaaaaacaacgaaccgttgcggggctatatcctcacgttcctgatcgctatggcatttatactgatcgccgagttaaatacaatagctcccatcatttcaaatttctttctcgcctcttacgcacttattaacttctcttgtttccacgcctcatatgcaaagagtcctgggtggagaccagcatacggtatttacaacatgtgggtgagtctgttcggagcggtgctgtgctgcgccgtgatgttcgtgatcaactggtgggcagccgtaattacctatgtgattgagttctttctttacgtttacgtgacctgcaaaaagccagatgtcaactggggaagcagtacacaggccctttcctacgtaagcgctttggacaacgcccttgagcttaccaccgtggaggatcatgttaaaaattttcggccacagtgtattgtactgactggggggccaatgacaaggcctgcgctgctggatatcacacacgcctttactaaaaacagcgggctctgtatttgctgtgaggtctttgtaggacctagaaagctctgtgtgaaagaaatgaacagtggaatggctaagaaacaggcctggcttataaagaacaagattaaagctttttacgccgccgtggccgctgattgttttcgggatggggtcagatcattgttgcaggcatcaggcctcgggcgcatgaagccaaacacactggtcatcggatataagaaaaactggcggaaagcaccactcacagagatagagaactacgttggaattatccacgatgcatttgatttcgagatcggggtagtgatcgttaggatctctcagggattcgatatttcgcaggtactccaagtgcaagaggaactcgaaaggctcgagcaggaacgactcgctctggaagccaccatcaaagataacgagtgtgaagaagaatcaggtggcattaggggtctgtttaagaaagcaggcaagctgaacatcaccaagaccactccaaagaaggatgggagtatcaacacctcacagtccatgcacgtgggagaatttaaccagaaattggtggaagcctctacacaatttaagaaaaagcaagagaaaggtacgatcgatgtctggtggctgttcgatgacggcgggctgacactgctgattccatacatcctgactcttcggaaaaagtggaaagattgtaagctgaggatttacgtaggagggaagattaacagaattgaggaggaaaaaatcgtcatggccagccttttatctaagttccggatcaaatttgcggatatccacattatcggcgacattaatattcgccccaacaaagaaagttggaaggttttcgaagagatgatcgagccttatcggctccatgaaagttgcaaagacttgacgactgcagagaaactcaaaagggagacgccctggaaaatcactgatgcggagcttgaggccgtcaaggaaaagagctaccggcaggttcgattaaacgagctgctgcaggaacattcgagggcagcaaacttgatcgtcttgtctttgcccgtcgcccggaagggttccatctcagacctcttgtatatggcgtggctcgagatactgaccaaaaacctgccacccgttctgcttgtcagggggaaccacaagaacgtattaacattttactca

SEQ ID NO: 71597 - DNA, 3297 bp, Artificial Sequence
  derived and/or modified sequence
atgtccctgaataactcctcgaatgtgttcttagattcggtgccctctaatacgaaccgattccaagtgtcggtgatcaacgaaaatcatgaaagcagcgcggcagcagatgacaacaccgaccccccccattacgaagagaccagtttcggagatgaggctcaaaagcgcttgcggatctcatttagaccaggtaaccaggagtgttacgataatttcctgcaatctggggagacggctaagaccgacgccagtttccacgcatacgattcgcatacgaacacatattacctccaaaccttcggccacaacacgatggacgccgtgccgaagattgagtattaccgaaataccggctcaatctccggaccaaaggttaacaggccctctctactggagatccacgagcagctggccaagaatgtggctgtgacgccctccagcgctgaccgcgtcgctaatggcgatggcatccccggtgatgaacaggcggagaacaaggaggacgatcaagctggagtggtaaagttcggatgggtgaagggcgtcttagttagatgcatgctcaatatctggggtgtcatgctgttcatccggctgtcgtggattgtgggcgaagccggaattggactcggcgttatcattatcgggctgtccgttgtcgtcacgactttgacaggtatctcgatgtcggcaatatgcacaaatggcgttgtgcgtggcggcggagcgtactacctgatatcgaggagtctcggacccgaatttggtggttccataggtctgatctttgcttttgcaaacgccgttgcggtggccatgtatgtggtcggcttcgctgagaccgtggttgacttattgaaggagagcgattcgatgatggtggatcccacgaacgatatacgtatcattggcagtattaccgttgtcatcctgctggggataagtgtggccggcatggagtgggaggccaaggcccaagtcatcctgctggtgattttgctcatagccattgctaacttcttcattgggacggtgatcccgtccaacaatgagaagaaatcacgaggcttttttaattaccaggcctctatcttcgcggagaattttggcccacgcttcaccaagggcgaggggtttttttctgtgtttgccatttttttccccgcggccactggcatcctggctggtgcaaatatctccggagatctggaggatccccaggatgcaatcccgcggggaacaatgctggctatcttcatcaccacagttgcctatctgggcgtcgccatctgcgtcggtgcatgtgtggtaagagatgcaacaggtaacatgaacgacaccattatcagcggcatgaactgcaacggctccgctgcctgcggactgggctacgatttttctcgttgcaggcatgagccgtgccagtacggcttaatgaataatttccaagtgatgtccatggtctcgggcttcggccccctgatcacagccggaatattcagcgccacgctgagttccgccctcgccagcctggtatcggccccaaaagtgttccaggccttgtgtaaggataatatctacaaagctttgcagttcttcgccaaggggtatggtaagaataatgagcctttgcgcggttacatcctgacgttccttattgctatggccttcatactgattgccgaattgaatactatcgctccaatcattagcaacttcttcctcgcgtcctacgcactgatcaacttctcttgcttccacgcctcttatgctaaatccccgggctggcgccctgcgtacggtatatataatatgtgggtttctctgttcggcgcggtactctgttgcgccgtgatgtttgttatcaactggtgggccgccgttattacctacgtgattgagttttttctttacgtgtacgtcacatgtaagaagcccgatgtgaattggggatcgagtacacaggccttgtcctacgtctctgccctggataatgccttggaattgacaactgtcgaagaccacgtgaaaaacttcagaccccagtgtatcgtccttacaggtggaccgatgacccggcccgcactactggatattacccacgctttcaccaagaatagcggcttgtgcatttgctgcgaggtcttcgtgggccctcgcaagctctgcgtgaaggaaatgaattctggcatggcgaagaagcaagcatggttgatcaagaacaagattaaggccttttatgccgcagtggcagctgattgctttcgagatggagtgcgaagccttttgcaggcgtcaggcttgggccgtatgaagcctaataccctagtcataggctacaagaagaattggcgcaaggcacccttgaccgagatcgagaactacgtgggcatcatacatgacgcgttcgatttcgaaataggcgtcgtcattgtaaggataagccagggattcgatatatcccaggtgctgcaggtgcaggaggagctcgagcgcttggaacaggaacgcttggccttggaagctaccattaaggataacgagtgcgaggaggagagcggcggcatccgaggtctgttcaagaaagcgggcaagctgaacataacgaaaactaccccgaagaaggatggatccataaacactagtcagagcatgcatgtgggcgaattcaaccaaaagctggtggaagcgtcgacacaatttaaaaagaagcaggagaaaggaaccatcgatgtctggtggcttttcgacgatggcggccttacactactgatcccatatatcctgacgttgcggaaaaagtggaaggattgcaaactccgaatatacgtcggaggcaagattaataggatcgaggaagagaagatcgtgatggcatccttactgtccaagttccgaataaagttcgccgacattcatatcataggagacataaacatccgaccgaataaggagagctggaaggtgtttgaggaaatgatcgaaccctaccgattgcacgagagctgcaaggatctcaccacagctgagaagctcaagcgggagactccatggaaaatcaccgatgcggagttggaagccgttaaagagaagtcctataggcaagtgcgtctcaatgagctgctgcaggagcacagccgcgccgctaacctgattgtcctcagtttgccggttgcccgtaaaggaagcataagtgatctgttgtatatggcctggctggagatcctgaccaagaatctgccccccgtgctgctagtgaggggaaatcacaagaatgtgttgaccttctactcc

SEQ ID NO: 71598 - DNA, 3297 bp, Artificial Sequence
  derived and/or modified sequence
atgtcattaaataactcttccaacgtctttctggatagtgtgccctccaatactaaccgatttcaggtgtcagtgatcaatgaaaaccatgaatcttctgccgctgccgatgacaatactgaccctccccactatgaggaaacatcttttggggacgaggctcagaaaaggttgagaatctcttttcggcctggaaaccaagaatgttacgataacttcctccagtctggagagacagccaaaactgatgcaagttttcatgcctatgattcccatactaacacatattatctgcagacatttgggcataatacaatggatgctgtgcccaagatcgaatattatcgcaacacagggtccatatctgggcctaaagtgaatcgccccagtctcctggaaatacatgaacagctcgctaaaaatgtagcggtaacacccagttccgccgacagagtggccaatggagatgggatccccggagacgaacaggccgagaataaagaagatgatcaggctggggtggttaaatttggatgggtaaagggagtcctggtccggtgcatgctaaatatatggggggttatgctctttattcgactgtcgtggatcgttggagaagctggaatagggttaggggtaataattataggactctccgtggtagtgacaactctcactggaatctctatgagtgctatttgcactaacggagtggtacgagggggaggagcgtattatttaataagtagatccctcgggcccgaattcgggggaagtatcggattaatattcgcttttgcaaatgccgtcgctgtggcaatgtatgtggtcgggttcgctgaaacggtcgttgaccttctcaaagaatccgattctatgatggttgatcctactaacgatataaggattataggatctatcacagtggtgattctgctcggaatttcggtggcagggatggaatgggaagctaaagcacaggtcatcctactggtaatccttctgatcgctatagctaacttctttatcggaacagtgattccatccaacaatgaaaagaaatcacggggattcttcaactatcaggcttcaatctttgcagagaatttcgggcctagatttactaagggagaagggtttttctctgtgttcgccatatttttccctgctgcgactggaatcctagctggagccaatatatctggagaccttgaagatcctcaggacgccatccctcgagggactatgctcgcaatattcataacgactgtggcatacctcggagttgcaatctgtgtaggagcatgcgtggtgagagatgccacaggaaatatgaacgatactataatatcagggatgaactgtaacggaagtgctgcatgtgggctcggatatgatttctccaggtgtcgccacgagccatgccagtatgggctgatgaataattttcaggtgatgagtatggtgtcaggattcgggcctctaatcactgccgggatcttcagtgcaacactctcttctgcattggctagtctggtatcagcccctaaagtgttccaggctctctgtaaagataatatatataaagccttgcagttttttgccaaaggatacggaaagaataacgaaccccttcgggggtacatcctcacatttctaatcgctatggcttttatcctcatagcagaattgaacactatcgccccaatcatatccaatttctttctggcttcttacgcgctcataaacttctcctgcttccacgcctcctatgctaaatcgcccggatggcggcctgcctatgggatttataacatgtgggtgtccctatttggagcagtactttgttgcgctgtgatgtttgtcataaattggtgggccgctgtgatcacatatgtgatcgaatttttcttgtacgtctacgtgacttgcaagaaacctgatgtgaactgggggtcaagtacacaggcactatcttatgtgtcagcactcgataatgcacttgaattaactactgttgaagaccacgtgaaaaattttcgaccccagtgcatagtcctaacaggaggaccaatgactcgacccgcgttattagatatcacacacgcctttacaaaaaactctgggttatgcatttgttgtgaagttttcgtcggaccaaggaaattatgcgtcaaagagatgaactccgggatggcaaaaaaacaggcctggctgataaaaaacaaaataaaagccttttatgcagcggttgccgctgattgtttccgtgatggagtaagatcactcttacaggcttcggggctggggcgtatgaaacccaatactcttgtgatcggatacaaaaaaaactggcggaaggctcccctgacagagatcgagaattatgtaggaattatccacgatgcatttgactttgaaataggagtggtgattgttcgtatatctcaggggtttgatatatctcaggtcctccaggtgcaggaagaactcgaacgcctagaacaagagagactggctctggaagccacaatcaaagacaatgaatgcgaagaagaatcaggagggatcagggggctcttcaaaaaggctgggaagctgaacataacaaagactacaccaaaaaaagatgggtccatcaatacatcgcagtcaatgcacgttggagagttcaaccagaaattggtggaagcttcaactcagtttaaaaaaaaacaggaaaaggggactatcgatgtatggtggttgttcgatgatggaggacttacactgctaataccctatatcctcactctccgcaagaaatggaaggattgtaaactccggatctatgtgggagggaaaataaatcgcatagaagaagaaaagatcgtcatggcctccttactctctaaattccgcatcaaattcgcggatatacatattattggggatatcaacattcgcccaaataaggaatcttggaaggtatttgaagaaatgatagaaccctacaggctgcatgaaagttgtaaagatctaacaactgccgaaaaattaaagagggaaacaccttggaaaatcacagatgcggaattggaagctgtcaaagaaaaatcttacaggcaggtgcgacttaatgagctcctccaggaacattcacgggcagccaatctcatagtactgtctttacctgtagcccggaaagggtccatcagtgacctcctctatatggcatggttagagatactcactaaaaatctgccacctgttctgctggtccgcggaaaccataagaatgtcctcacattctattct

SEQ ID NO: 71599 - DNA, 3297 bp, Artificial Sequence
  derived and/or modified sequence
atgtctctgaacaactcatccaacgtgttcctcgattcggtgccctcgaataccaacaggttccaagtcagcgtgattaacgaaaaccatgagagctcagcagcagcggatgacaatactgatccaccccactacgaagaaacctcgttcggagacgaagcccagaaacgcctgagaatcagctttaggcctggaaaccaagaatgctacgacaacttcctgcaatccggagaaacggccaagaccgacgcgagctttcacgcatacgattcccacaccaacacctactacctgcagactttcgggcataacacgatggacgccgtgcctaagatcgaatactacagaaataccgggagcatctcagggccgaaggtgaatagaccctccctgctggaaatccacgagcagttggctaaaaacgtggccgtcacgccgtcatctgccgacagggtcgccaacggagacggtatccctggagacgaacaggccgagaataaggaggacgaccaggccggagtggtgaaattcggctgggtgaagggagtgctggtgcggtgtatgctcaacatctggggagtgatgctctttatccggctctcgtggatcgtgggggaagctggaatcggactgggcgtcatcatcatcggactctcggtggttgtgaccactctgaccggcatttcgatgagcgccatctgtactaacggagtggttcgcggagggggcgcttactacctcatctcgagatccctcggcccagaattcggaggatcgatcggactgatctttgcctttgccaatgccgtggcagtggccatgtacgtcgtggggttcgctgaaactgtggtggacctgctgaaggaaagcgattccatgatggtggacccgactaatgacatcaggatcatcggatcaatcactgtcgtgatcctgctcggcatctcggtcgccggcatggaatgggaggcgaaggcccaagttattctgctggtgatcctcttgattgccatcgcgaacttcttcatcgggactgtgatcccaagcaataacgaaaagaagtcgaggggcttctttaactaccaggcttcaatctttgcggagaacttcggccctcgcttcaccaagggagagggattctttagcgtctttgctatcttcttccccgctgcgactggcatcctcgccggagcgaacattagtggcgatcttgaagatccacaggacgcaataccacgcggcaccatgcttgctatcttcatcaccacggtcgcgtacctgggcgtggccatctgcgtgggagcctgtgtggtgcgggacgcgaccggaaacatgaatgatactataatctcgggtatgaattgtaatgggtccgccgcatgtggactgggatacgatttcagccgctgtcgccacgagccctgccagtacggtctgatgaacaatttccaagtgatgtcgatggtgtcgggcttcggtccgttgatcaccgccggaatcttttcggctaccctttcttccgccctcgcgtcactggtcagcgctccgaaggtctttcaagcactttgcaaggataacatttacaaagccctgcagtttttcgccaagggatacggaaagaataacgaaccactgcggggctatatactgaccttcctgatcgctatggctttcattcttatcgctgaactgaatacgatcgcccctatcatttccaactttttccttgcctcgtacgccctgatcaacttctcatgtttccatgcatcctacgccaaaagcccggggtggcgaccagcttacgggatctacaatatgtgggtcagtctgttcggtgctgtgctgtgttgcgcagtcatgttcgtgatcaattggtgggccgccgtgatcacttacgtgatcgagtttttcctgtacgtgtacgttacttgcaagaagccagacgtgaactggggttcgtcaactcaggccctgagctacgtcagcgctctcgacaatgccctggaactgacgaccgtggaggatcatgtgaagaattttcggcctcagtgcatcgtcctgaccggaggcccgatgacccggcctgcacttctggacattactcatgcgttcactaagaacagcggactgtgtatctgctgcgaagtgttcgtcggcccgagaaagctctgcgtcaaggaaatgaattccggaatggccaaaaagcaggcgtggctgatcaagaacaagatcaaggcattctacgccgcggtggcagcagattgcttccgcgacggtgtcagatcactgctccaggcctcaggactcggaagaatgaagccgaacaccctcgtgatcggctacaagaagaactggcgcaaagccccactcaccgagatagagaactacgtggggatcatccatgatgcattcgacttcgaaatcggtgtggtgatcgtgagaatctctcaaggctttgatatctcccaggtcctgcaagtgcaggaagaactcgaacgcttggagcaagaaagactggctcttgaggccactatcaaagataatgagtgcgaggaggaatcaggaggaatccggggcctcttcaaaaaggcaggaaagctgaatatcaccaagactaccccaaagaaggatggaagcattaacacctcgcagtccatgcatgtgggagaattcaaccaaaaactggtcgaagcctcgacccagttcaagaagaagcaggagaagggaactatcgacgtgtggtggctcttcgacgacggcgggctcactctcctgataccctacatccttaccctgaggaaaaagtggaaggactgtaagctgagaatctacgtgggcggcaaaatcaaccggatcgaagaggagaaaatcgtgatggcatcactgttgtccaagttccggatcaagttcgcggacatccacatcatcggcgatatcaatattcggccgaacaaggaatcgtggaaggtgtttgaagaaatgatcgagccctaccgcctccacgagtcctgcaaggatctgaccactgcagaaaagctgaaacgcgagactccgtggaagatcaccgacgccgaactggaggccgtgaaggaaaaatcctaccgccaggtccgccttaacgaactgctgcaggagcattcgcgcgccgcaaatctcatcgtgctctcgctcccggtggcgcgcaagggatcaatttcggatctgctctacatggcgtggctcgagatcctgaccaagaacctcccgccagtcctgctggtccgcggaaaccacaagaacgtgctgactttctactca

SEQ ID NO: 71600 - DNA, 3297 bp, Artificial Sequence
  derived and/or modified sequence
atgtccctgaacaactcgagcaacgtgtttttggactctgtcccctccaatactaatcgctttcaggtgtcggtgataaatgagaatcatgaatcatcagcggccgccgacgataatactgatcctccgcattacgaagagacttcgttcggcgatgaggcccagaaacggctgaggatttcgtttcgcccgggaaatcaggagtgttacgacaacttcctgcagagcggggaaaccgcgaaaaccgatgcatcttttcacgcgtacgactcccacactaacacctactacctccaaacttttggacacaacactatggacgcagtaccgaagatcgaatactatcggaataccggcagcatcagcggccctaaggtgaaccgtccatcgctcttggaaattcatgaacaattggccaagaatgtggcggttacgccttcgtcagccgatcgcgtggctaacggtgacggaatccctggagacgaacaagctgagaataaagaagatgatcaagccggggtggtgaaatttggatgggtgaagggagtgctcgtgaggtgcatgttgaatatctggggagtcatgttgttcattcgcttgtcctggatcgtgggcgaagccggaatcggacttggtgtcatcatcatcggactgtccgtcgtggtgactactctgactggaatttccatgagcgcaatctgtactaacggagtggtgcgcggaggcggagcgtactacctcatctcccgctccctgggaccggaatttggtggatccatcggactgattttcgcgttcgctaacgccgtggcagtggccatgtacgtggtgggattcgccgaaactgtggtggaccttcttaaagagtcggacagcatgatggtcgacccgaccaatgacatcagaatcatcggtagcatcaccgtggtgatcctgctgggaatctcggtggccggcatggagtgggaggccaaggctcaggtgattctcctggtcattctgctgatcgctatcgctaacttctttatcgggaccgtgatcccgagcaacaacgaaaagaaatcacggggctttttcaattaccaggcttcgattttcgcagagaactttggtccgcggttcaccaagggcgagggattcttcagcgtgttcgctatctttttcccggcggcaaccggaatcctggccggagcaaatatctcgggagatctggaagatccgcaggacgccatcccgagaggaaccatgcttgcaatcttcatcactactgtcgcatacctcggagttgccatctgcgtgggagcatgcgtggtccgagacgccacgggaaacatgaatgacactatcatctcagggatgaattgcaacggatcagccgcatgcggactgggatacgatttttcgagatgtcgccacgaaccatgccagtacggactgatgaacaatttccaggtgatgtcgatggtatcaggattcggaccactcatcactgctggaatcttctcagcaactctctcgtcagcactggcctccctggtgtcagccccgaaagtctttcaggcgctgtgcaaggataacatctacaaggctctccagtttttcgcaaagggatacggaaagaacaatgaaccgctccgggggtacatcctgactttcttgatcgccatggcctttattctgatcgctgagctgaatacgattgcacctatcatctccaatttcttcctcgcgtcctacgccctcatcaatttctcctgtttccatgcttcatacgctaagtctccaggatggcggcccgcctatggcatttacaacatgtgggtgtccctgtttggagccgtgctgtgctgtgccgtcatgttcgtcattaactggtgggcggctgtgatcacctacgtcatagaattctttctgtatgtctacgtcacttgcaagaaaccggacgtgaattggggctcatcgacgcaagcgctctcgtacgtcagcgccctggataacgcccttgagctgactaccgtggaagatcatgtcaaaaactttagaccgcagtgcatcgtcctgaccggcgggccgatgacccgcccggcgctgctcgatatcactcacgccttcaccaagaattcgggactctgtatctgctgcgaagtctttgtgggcccgagaaagttgtgtgtgaaggaaatgaattccggaatggccaagaagcaggcctggctcatcaagaataagattaaagcgttctatgcggcggtggcggctgattgtttccgcgatggcgtgcggagcctgctccaagcctccggactgggcaggatgaagcctaacacgttggtgatcggttacaagaaaaactggcggaaggccccgcttactgagatcgagaactacgtgggaattatccatgatgcattcgacttcgaaatcggagtggtgattgtcaggatctctcaaggcttcgatatcagccaggtgcttcaggtccaggaagagctcgagaggctggaacaagaacggctggctttggaagcgactatcaaagataatgaatgtgaggaagagtctggaggaatcagaggtctgtttaagaaggctggaaaactgaatatcaccaaaaccacccctaagaaggatgggtcaatcaacacgtcgcaaagcatgcacgtgggcgaattcaaccagaagctggtggaagcgagcacccaattcaagaaaaagcaagaaaaaggaaccatcgatgtgtggtggctgttcgacgacggtggattgactctcctgatcccgtacatattgaccttgagaaagaaatggaaggactgtaagctcagaatctacgtcggaggaaaaatcaacagaatcgaagaggagaagatcgtgatggccagcctgctgtccaagttccgcatcaagttcgcggatattcatatcatcggggacatcaacattcggccaaacaaggaaagctggaaagtgttcgaggagatgatcgagccatacaggctgcacgaatcgtgtaaggatctgaccaccgccgagaagctcaagcgggaaactccatggaagatcaccgacgcagaactcgaagcagtgaaagagaagtcctacagacaggtgcgcctgaacgaactgctgcaggaacattcccgcgccgcaaacctcatcgtgctgtcgctcccagtggcgaggaagggaagcatcagcgacctcctctatatggcctggttggagattctgaccaagaacctgcccccggtcttgctggtccggggaaatcacaaaaatgtcctgactttttactct

SEQ ID NO: 71601 - DNA, 3297 bp, Artificial Sequence
  derived and/or modified sequence
atgagcttgaacaactcaagcaatgtgtttctcgactccgtgcctagcaacactaacaggtttcaggtgagcgttatcaacgagaatcatgaatcttcggccgctgcggatgacaacacagatcctccccattatgaagaaaccagtttcggagatgaggcccagaaacgcctgcgcatctctttccgcccgggaaatcaggaatgttatgacaactttctgcaatctggtgagacggctaaaactgatgcttcctttcacgcctatgattctcacactaatacgtattacttacagacattcggtcacaacacaatggatgccgttcccaagatcgaatattacaggaataccgggagtatctcaggccccaaggtgaaccggccctccctcttggagatccatgagcaactggccaaaaatgtggccgtgacgccttccagtgcagacagagtggctaacggagatggcatccccggcgatgagcaggccgaaaataaagaggacgatcaggcaggcgtggtcaagttcgggtgggtcaagggggtcctggtccgctgcatgctgaacatatggggcgtgatgctgtttatccggctctcttggattgttggcgaagctggcatcggactgggggtcataatcattggtctgtctgtagtggtaaccaccctgacaggcatctccatgtcagcaatctgtaccaatggtgtggttagaggaggcggagcctactacctgatcagtcgatccctaggcccggagtttgggggaagcattgggctgatttttgcctttgccaacgcagtggcagtggccatgtacgttgtgggtttcgccgaaactgtcgtggacctactcaaggagagtgattctatgatggtggatccgaccaacgacattcggatcattggctcaattacagttgtcatccttctcgggatctccgtggcggggatggagtgggaggccaaagcccaggtgattcttcttgtgattctcctgatcgctattgccaatttcttcatcggtaccgtgatcccttctaacaacgagaagaagtcgcgaggtttctttaactaccaggcaagcatctttgccgagaactttgggccacggttcacgaaaggtgaaggtttcttcagtgtcttcgcgatcttctttcctgctgcaactgggatactggccggcgcgaatatttcaggggatctcgaggatcctcaggacgcaatcccaaggggaacaatgctggcaatctttataactaccgtcgcctacttgggcgttgctatctgtgtaggcgcctgcgtcgtccgcgatgcaaccggcaatatgaacgacaccatcatttccggtatgaattgtaatggaagtgcagcctgcggtttgggatacgatttctctaggtgccggcatgaaccatgccaatacggactgatgaataacttccaagtgatgtctatggtcagtggcttcggccctctgataacggctggaatcttcagcgcaacgttgtccagcgctcttgcctcacttgtgtctgcgccaaaggtctttcaggcgctgtgcaaggacaacatttataaagcattacaattcttcgctaaggggtatggtaagaacaacgaaccccttcgcggctatatcctaaccttccttatagcaatggccttcatcctgattgccgagctcaataccatagctccaataattagtaacttttttctggccagctacgccctgataaactttagttgctttcacgcctcctacgcgaagtcccctggatggagaccagcttacgggatctacaacatgtgggtgagcctgttcggcgccgtgctgtgttgtgctgtcatgttcgttattaactggtgggccgctgtgatcacctatgtgatcgaatttttcctgtatgtgtacgttacttgtaagaaacctgacgtcaactgggggagcagtacacaggctctcagctatgtgtccgctctggacaacgccctggagctgactaccgttgaggatcatgtgaagaacttccgcccgcagtgcatagtgctaactggtggcccaatgactagaccggcgctgttggacatcacgcacgctttcacaaaaaacagcgggttgtgcatatgctgcgaggtttttgtcggtccacgtaaactgtgtgtaaaagagatgaattccgggatggctaaaaagcaggcatggctgattaaaaataagatcaaggcattctatgccgccgtggccgctgactgcttccgcgacggggtgcggtcattgttacaggcctcaggtctcggcaggatgaagccgaataccctggtgatcgggtacaaaaagaactggaggaaagctcctttgacagaaatcgagaactatgtcggcatcatccacgacgcgttcgacttcgagatcggggtggtgattgtcaggatcagccagggctttgatatcagccaagtccttcaggtgcaggaagagctggagaggctggaacaggaaagactagcccttgaggccaccatcaaagacaacgagtgtgaggaggagtccggcgggatccgcggactttttaagaaggcagggaaattgaacattactaagacaacccctaagaaggatggaagtatcaacaccagccagtctatgcatgtgggagaatttaatcaaaagctggtcgaggccagcacccagttcaaaaagaagcaggaaaaagggacaattgatgtctggtggctgtttgatgacggtgggctgacactgctgatcccatacatcctgacactaagaaagaagtggaaggattgcaagctgcggatctatgttggtgggaagatcaaccgcatcgaagaggaaaagatcgtcatggcaagtttgctttcgaaattccggattaagtttgcagacatacacatcattggtgacatcaacatcaggccaaataaggagtcttggaaagtctttgaggaaatgattgagccctaccgactgcacgagtcctgtaaggacctgaccacggctgaaaaactgaagcgcgaaaccccctggaagattacggacgcggaacttgaagccgtgaaagaaaaaagctaccggcaggtccgcttaaacgaactgttgcaagaacactctagggcagcaaatctaattgtcctttcactgccagtggccaggaagggttctatcagtgatctgctttatatggcatggctcgaaatactgactaaaaatttgcctcctgtgttgctcgtgcggggtaatcacaagaacgtgctgacgttttatagc

SEQ ID NO: 71602 - DNA, 3297 bp, Artificial Sequence
  derived and/or modified sequence
atgagcttgaataactcatcgaatgtgtttctggactcagtgccgtcaaataccaatcggttccaagtctctgtaatcaatgaaaatcacgaatcaagcgccgccgcagatgacaatactgatccgccacactacgaggagacgtcattcggagatgaggcccaaaagcgcttgcgcatctcgtttagacccggcaaccaggagtgctacgacaacttcctgcaatcgggtgaaaccgctaagacggacgcgtcgttccacgcctacgattcccataccaacacctactatctgcagacttttgggcacaatactatggatgcagtgccgaaaatcgaatactaccgcaatactggatccatcagcggcccaaaggttaaccggccatcgctgctcgagatccatgaacaacttgcgaagaacgtggctgtgaccccgagctcggccgacagagtggctaacggagacggaatccccggtgacgagcaggccgagaacaaagaggacgaccaggctggagttgtcaaattcggatgggtgaagggagtcctggtgagatgcatgctgaacatctggggggtgatgctcttcatccggctgtcgtggatcgtcggagaagccgggatcggcctcggagtgatcatcatcggcttgtcggtggtggtgaccactttgaccggaatctccatgtcagccatctgtactaacggagtggtgcgcgggggcggagcctactacctgatctcgcggtcgctgggacctgaattcggcggaagcattggactgatcttcgcgttcgcgaatgcggtagccgtcgctatgtacgtcgtcggcttcgccgaaaccgtggtggacctgctcaaggagtccgactcaatgatggtggatcctaccaatgacatacgtatcataggatctatcaccgtcgtcattctgctgggaatcagcgtcgctggcatggaatgggaggccaaagcccaagtgatccttctggtgattctccttatcgcgatcgctaatttctttattggcaccgtcatcccaagcaacaatgaaaagaagtcacggggcttcttcaactaccaggcctctattttcgcggagaacttcgggcctcggtttactaaaggagaaggtttcttcagcgtgttcgcaatattctttccagcggctactggaattctggccggtgccaacatttccggcgacctcgaggatccgcaagatgcgatcccaagagggaccatgctggcaatcttcatcaccactgtggcctatctcggcgtggcgatctgcgtgggggcgtgtgtggtcagggacgctaccggaaacatgaacgacactattatctccggaatgaattgtaacggctccgcggcctgcggactcggatacgatttctcacgctgccgccacgaaccttgccaatatggactgatgaacaatttccaggttatgtcgatggtttcgggatttggtcctctgattactgccggaatattctcagcaacgttgtcatccgccctggcttccctggtgtcagcaccaaaggtgtttcaagcgctgtgtaaggacaatatctacaaagcactgcagttttttgccaagggctacggaaaaaacaacgaacccctccggggttacatcctcactttcctgatcgccatggcattcatcctcattgcagaacttaacaccatcgctccaatcatctccaacttctttctcgcatcgtacgcccttatcaacttttcctgcttccacgcctcttatgcgaagagcccaggctggcggccggcttacggaatttacaacatgtgggtgagcctgtttggagccgtcctctgttgcgcggttatgttcgtgatcaactggtgggcagcagtgatcacttacgtgatcgaattctttctgtacgtctacgtgacgtgcaagaaacctgatgtgaattggggaagctctacgcaagctcttagctacgtctcagctctcgataatgctctggaattgacgactgtcgaggatcacgtgaagaatttcagaccgcaatgcattgtgctgactgggggaccaatgacccggccggcactgctggacattactcacgcattcaccaagaactctggactctgcatctgctgcgaagtattcgtcggtcctagaaaactctgcgttaaggagatgaattcaggaatggcgaagaagcaagcgtggctgatcaaaaacaagataaaagccttctacgcggccgtcgcagcggattgcttcagagacggagtgcgctcgctcctccaggcctcgggcctgggacggatgaaaccaaacaccctggtgatcggatacaagaagaactggagaaaggcgccgctcactgagatcgaaaactacgtgggcatcatccacgacgccttcgacttcgaaatcggagtcgtgattgtgcgcatttcgcaaggattcgatatctcgcaggtgttgcaggttcaggaagagttggaaagattggagcaggaacggctggccctcgaggcaaccatcaaagataatgaatgcgaggaagaatccgggggaatacgcggtctgttcaagaaagccggcaaactcaacatcaccaagaccacgccgaagaaggacggatcgatcaatacttcccagagcatgcacgtcggagagtttaaccagaaactggtggaggcctcgactcagttcaagaagaagcaagaaaaggggaccatcgacgtgtggtggctcttcgacgacggcggactgactctgctgatcccgtacatcttgactctgaggaagaaatggaaggactgcaagctgcgcatctacgtgggcggaaagatcaaccgcatcgaagaggagaaaatcgtgatggcttcccttctctcgaaatttcgcatcaaatttgcggacatccacatcatcggagatatcaacatacgacctaacaaggagagctggaaagtgttcgaggaaatgatcgaaccatacaggctgcatgagtcgtgtaaagacttgaccaccgccgaaaaactgaaacgcgaaactccgtggaagatcacggatgccgagctggaggcggtcaaggaaaagtcataccggcaggtcaggctgaatgagctgctccaggaacactcccgcgccgcgaaccttatcgttctttcccttccggtggcacggaagggatcgatctcggatctgctttacatggcctggctggaaatcctgactaagaatcttccgccggtgctcttggtccgcggaaaccataagaacgtgctcaccttctactcc

SEQ ID NO: 71603 - DNA, 3297 bp, Artificial Sequence
  derived and/or modified sequence
atgtccttgaataactcgtccaacgttttcctcgattcagtcccatccaatactaatagattccaagtctccgtcatcaatgagaaccacgaaagttcggcggccgctgacgacaacactgacccaccgcactacgaagaaacttcgtttggagacgaggcgcaaaagagactgcggatctcattccggccggggaaccaggagtgctacgataacttccttcagtccggagaaaccgcaaaaactgacgcgagctttcatgcgtacgactcgcataccaatacctactacctgcaaactttcggacataacactatggacgccgtgcctaagatcgagtattatcgaaacacgggaagcattagcgggccgaaagtgaatcgccccagcctgctcgaaatccatgaacagctcgcaaagaacgtcgcagtgaccccttcatccgccgatcgcgtggcgaacggagacggaatcccaggcgacgaacaggcggagaacaaggaagatgaccaagccggcgtggtcaaatttgggtgggtgaaaggagtgctcgtgaggtgcatgctcaacatctggggagtgatgttgtttatccgcctgtcgtggatcgttggcgaagccggaatcggtctgggggtcatcattatcggactgtcggtcgtggtgactaccctgaccggcatttcgatgtccgcgatctgcaccaatggagtggtgcggggaggcggagcttactaccttatctccagatccctcggcccggaattcggcggtagcatcggcctgatcttcgccttcgctaacgccgtcgccgtggcgatgtacgtggtgggattcgccgaaaccgtggtcgacctgcttaaggagtcggatagcatgatggttgacccgaccaatgatatccgcatcatcggaagcattacggtggtgatccttttgggtatcagcgtggcgggtatggagtgggaggctaaggcccaagtcattttgctcgtgatcctgctgatcgctattgctaacttcttcatcgggaccgtcattccgagcaataacgaaaagaagtcacgtggattcttcaactaccaggcttcgatattcgcggaaaactttggccctaggtttactaaaggagaaggattcttctcagtatttgccatcttttttccagccgccactggaatcctggcgggtgccaacatctcgggagatctcgaggacccacaagatgccatccctcgggggaccatgctggctatcttcatcaccaccgtcgcgtacttgggagtcgctatctgcgtgggagcctgcgtggttcgggacgctactggcaacatgaacgacaccataatctcaggcatgaactgcaacggctcggcagcttgcggactgggatatgacttctcaagatgccggcacgaaccctgccaatacgggctgatgaataacttccaggtgatgtcaatggtgtccggcttcggaccgcttatcactgcgggaattttctcggcaactctgtcgtcggccctcgcctccctggtgtcggcccctaaagtgtttcaggcgttgtgcaaggataacatctacaaagcactgcagttcttcgccaaaggatacggtaagaacaatgaaccactgcggggctacatcctcaccttcctcatcgcaatggccttcatcctgatcgctgaattgaacacgatcgcgccgatcatctcaaacttcttcctggcatcctacgctttgatcaatttctcgtgctttcacgcctcctacgcgaagagccccggatggcggccggcgtacggaatatacaacatgtgggtgtcactcttcggggccgtcctctgttgcgcagtgatgtttgtcattaactggtgggcagccgttattacctatgtgatcgaattctttctgtacgtctacgtcacttgcaagaagccagatgtcaactggggtagctccactcaggctctgtcctacgtgagcgcactcgacaatgccttggaacttactaccgtggaggatcacgtaaagaacttcaggccgcaatgtattgtgctgacgggcgggccaatgaccaggccagctctgctcgacatcactcacgccttcaccaagaattcgggattgtgcatatgttgtgaagtttttgtcggcccgcgcaaactttgtgtcaaggaaatgaacagcggaatggccaagaagcaggcgtggctcatcaagaataagatcaaggctttttacgccgctgtcgccgctgactgtttcagagacggggtgagaagcctgttgcaggcgtctgggctcggcaggatgaagccgaacaccctggtgattggctacaagaaaaactggcgcaaggcacctctcaccgagatcgagaactacgtgggcatcatacatgacgcgttcgacttcgaaataggagtggttatcgtgcggatcagccagggcttcgacatttctcaagtgctgcaggttcaggaagaactcgaaagattggagcaggagcgcctggcgctggaggccacgatcaaagacaatgagtgtgaggaagagtccggaggaatccgcggtcttttcaaaaaggcaggaaagctcaatatcactaagactacccccaagaaggacggatcaatcaacacctcgcagtcgatgcacgtcggagagtttaaccagaaactggttgaagccagcacgcaattcaaaaagaagcaagagaaagggactatcgatgtgtggtggctgtttgacgatggtggcctgaccctgcttattccctatatcctcaccttgcgcaaaaagtggaaagattgtaaattgagaatttacgttggaggaaagatcaaccggatcgaggaagagaagatcgtcatggcaagcctcctgtccaagttccgtatcaaatttgcagatatccacattattggagacattaacattcggccgaacaaggagagctggaaggtgttcgaggaaatgattgagccctacaggctgcacgaaagctgcaaggatctgaccaccgcagagaagttgaagcgcgaaacgccttggaagatcaccgatgcggagctggaagctgtcaaagagaagtcataccgccaggtgcgcctgaatgagctcctccaagagcactcccgggccgccaacctgatcgtgctctccctcccggtggctcgtaaaggatcgatctccgatctgctgtacatggcgtggctcgaaattctcactaaaaacttgccgccggtgctgctggtacggggaaaccataagaatgtgctgaccttctactcc

SEQ ID NO: 71604 - DNA, 3297 bp, Artificial Sequence
  derived and/or modified sequence
atgtctcttaacaatagtagtaacgtcttccttgactccgtgccgtctaacaccaatcggtttcaagtgtccgttatcaacgagaaccacgaaagtagcgctgccgcagacgacaacaccgatcctccccactacgaggagactagctttggcgacgaggctcagaaacggctacggatttcttttcgtccaggaaatcaggagtgctatgataattttctgcagtccggcgaaaccgctaagaccgacgctagttttcacgcctatgattcccacactaatacttattatctgcagacatttgggcataacacgatggatgccgtcccaaaaattgagtattatcgcaacactggatcaattagcggtcccaaggtaaatcgtcccagtctcctcgaaatccacgagcagctggccaaaaatgtggcggtgacaccaagtagtgccgacagggtggcgaatggggatgggatccctggtgacgaacaggccgagaataaagaggacgaccaggctggggtggtgaagttcggctgggtaaagggggttctggtgagatgcatgctgaacatctggggagtcatgctcttcattcggctgtcatggattgttggcgaagcaggcatcgggctgggtgtgattatcattggattgtctgtggtcgtgaccactctgacaggcatctccatgtcagcaatctgcaccaatggggtggtaaggggagggggtgcctattacctgatcagcagatccctaggacctgagtttggtggttctattggcctgatcttcgcttttgccaatgctgtcgcagtagcgatgtatgtggtgggtttcgctgaaacagtggtggatttactcaaagagagcgactctatgatggtagaccccaccaatgacataaggatcatcggctctataaccgtggtgattctgcttggcatcagcgtcgctggcatggagtgggaggctaaggcccaggtgattctgctggtgatcctcttgattgcaatagccaattttttcattggaactgtgattccttccaacaatgagaaaaagtctcgaggctttttcaattaccaggccagcattttcgccgagaatttcgggcccagatttaccaagggcgagggattcttcagtgtatttgctattttcttcccggctgccacgggcattctggccggcgccaatatttcaggtgatctagaggatccccaggacgctataccgcgggggaccatgctcgccattttcattaccacagttgcctacctgggcgtggcgatctgtgtgggcgcgtgcgtagtgcgagatgccaccgggaacatgaacgataccatcatctcaggcatgaactgtaacggctctgcggcctgcggtctggggtatgattttagtagatgcaggcacgagccatgtcagtacggactgatgaacaatttccaggtgatgtctatggtgagtggcttcggccccttgataactgcgggaatattcagtgcaacactatcttccgcactggctagcctggtcagcgccccgaaagtgttccaggccctttgtaaagacaatatctacaaggcattgcagttcttcgctaagggatatggaaaaaataatgagcccctccgtggttatatcctcacattcctgatcgccatggcattcattttgatcgccgagctgaacactatcgccccaataatctcaaactttttccttgcaagctacgccttaatcaatttttcctgtttccacgcttcctatgctaaaagtccagggtggagacccgcctatggtatctacaatatgtgggtctctctcttcggagccgtgctgtgttgtgcagtaatgttcgtcatcaattggtgggccgctgtcatcacctatgtaattgagttcttcctgtatgtgtacgtcacatgtaagaaacccgacgtaaattggggcagctccacacaggccctaagctatgtcagcgccctggacaacgctcttgagctgaccaccgttgaagatcacgtgaaaaatttcaggccacaatgcatcgtgctgaccgggggacctatgacccggccggcccttctggatattacacacgcatttaccaagaactctgggttatgcatatgctgcgaggttttcgtggggcctcgcaaactttgtgtgaaggagatgaacagcggcatggccaagaagcaggcctggttaatcaaaaataagataaaagccttttatgcagccgtggctgcagactgctttagagatggtgttaggagcttattgcaggccagcgggctgggtcggatgaagccaaacaccctggttattggttataagaagaactggaggaaggcgcctcttactgaaatagaaaactatgttggaattattcatgatgctttcgacttcgagattggagtggtaatcgttagaatcagtcaaggatttgacatttctcaagtgctgcaggtgcaggaggaattggaacggctggaacaggagcgcctggccttggaggctacgattaaggacaacgagtgcgaagaagagagtggcggtattcgggggctctttaagaaggcagggaaactgaatatcaccaagaccacacccaaaaaagatggctctataaatacttcacagtccatgcacgtgggagaattcaaccagaaattggttgaggcctccacccagttcaaaaaaaagcaggaaaagggcactatagacgtgtggtggctgtttgatgacggtgggctcactttactgattccctacatcttgactttaaggaagaaatggaaggactgcaaactgaggatatatgtcggcggtaagatcaaccgcattgaggaggagaagatcgtgatggcatccctgttgtccaaattccgcattaaatttgcagatatccatataatcggcgatattaatattcggcctaataaggaatcttggaaagtcttcgaggaaatgatcgagccttatcgacttcacgaatcgtgcaaggatctgaccactgccgagaaactgaagagagagacaccctggaaaattacagatgccgagctggaagctgtcaaggagaagtcttatagacaggtgcgtctgaacgaactcttgcaggaacatagccgtgccgccaacttgatagtactgtctctgcctgtagcccgcaagggctctatctcagatctgttatacatggcctggctggagatactcactaaaaatcttccccctgtattgcttgtgcgcggaaatcacaaaaacgtgctcactttctactca

SEQ ID NO: 71605 - DNA, 3297 bp, Artificial Sequence
  derived and/or modified sequence
atgtcactgaataacagctctaatgtgttcctggacagtgtgccctcaaacacaaaccggttccaggtatctgtgatcaacgagaatcatgaaagttccgcggccgccgacgacaacaccgaccctccccattatgaggagacaagtttcggtgatgaagcccaaaaacggcttagaatctcgttccgtccaggaaaccaggaatgttatgacaattttctccagtccggagaaacggccaaaaccgacgcaagtttccacgcctatgactcccacaccaatacttactaccttcagacctttggccataacacaatggacgcggtcccaaagatagaatattatcgtaacaccggatccatctccggtccaaaggtgaatcggccttcacttctcgagatacacgagcagctcgctaaaaatgtggccgttacgccctccagcgccgatcgagtggcaaacggtgacgggatcccaggggatgagcaggctgaaaacaaagaagatgaccaggcaggggtggttaagttcgggtgggtcaagggagtgctcgttcgctgtatgctgaatatctggggggtcatgctctttatccgcctgagctggatagtgggagaagcgggtataggtcttggggtgatcattatcggtctgtctgtcgtggttactactcttacaggtatttctatgtctgccatttgtactaacggcgtggtgagaggcggcggggcatattacctgatttccagaagtctggggcctgagttcgggggatccatcggccttatcttcgcgtttgccaacgcggtggctgttgccatgtacgtcgttggatttgccgaaacagtcgttgatttgctgaaggaaagcgactccatgatggtggaccccacgaacgatattcgtataatagggtcaatcacggtggttattctgcttggaatttctgtcgctggcatggagtgggaggccaaagctcaggttatcctgctcgtgatactgttgatcgccattgccaacttttttatcgggacagtgatcccctctaacaatgaaaaaaagagtcgggggttcttcaactatcaagccagcatctttgccgagaacttcggaccaaggttcaccaaaggtgagggcttcttttccgtcttcgccatcttttttcctgccgccacaggaattctcgctggcgcgaacatcagtggagacttggaggatccgcaggacgctatccctaggggtacaatgcttgccatattcattacaaccgtcgcctacctgggcgttgcgatctgcgtaggggcatgcgtggtgcgagatgccactggtaatatgaacgacaccattatttccggcatgaattgcaacggaagtgcagcgtgtggtttggggtacgatttcagcagatgtagacatgagccctgccagtatggtcttatgaacaatttccaagtgatgtccatggttagcggattcggcccactgattaccgccggaattttcagcgccacgttatcgtcagctctcgctagcttggtctctgcccccaaagtctttcaagccctatgtaaagacaacatctacaaggctcttcagtttttcgcgaagggatacggcaaaaacaatgagccgctgagagggtatatactcacttttctaatcgccatggcgttcatcttgattgctgagttaaatacgatcgcgccgataatcagcaactttttcctggcctcatatgccctcataaattttagctgctttcatgctagctacgcaaagagtcccggttggcgccctgcctacggcatctataatatgtgggtgtccctgtttggggccgttctctgctgcgcagtgatgtttgttattaactggtgggctgcggtgatcacgtatgtcatcgagttttttctgtacgtctatgtgacctgcaagaaacccgatgtgaactggggctcgtccacgcaggcgctgtcgtacgtgtctgccctagacaatgctcttgaattgactactgttgaggaccatgtgaaaaactttagaccacagtgcattgtcctgactgggggcccgatgactcgccccgctctgctggatattactcacgcattcaccaagaattccgggctctgcatttgttgcgaggtttttgttggtcccagaaaactgtgtgtgaaagaaatgaactcagggatggccaagaagcaagcctggttgataaaaaataaaattaaggctttctacgccgccgtcgccgctgattgcttcagggatggcgtccgtagtcttctgcaggcgtccggccttggccggatgaagcctaacaccttagtcatcggctataagaaaaattggaggaaagcccccctgacagagatagaaaactacgtgggaatcattcacgacgcttttgacttcgagattggagttgtaattgtccgcattagccagggtttcgacatctcgcaggtactgcaggtgcaggaagagcttgagcgtctggaacaggagaggctcgccctagaggctaccattaaagacaacgagtgcgaagaggagtcgggaggcattcgcggcctgttcaaaaaagcaggcaagttgaacattacgaaaaccacccctaaaaaagacggctctataaacaccagtcagagcatgcatgtcggtgagttcaatcagaagctggttgaggccagcacacagtttaaaaagaaacaggagaagggaaccatcgatgtatggtggctgtttgacgacggagggctgacattactcattccctacatcttgactctcagaaaaaaatggaaggactgtaaacttaggatttacgtcggaggtaagatcaaccgcatagaggaggagaaaattgtgatggcttctctgctctctaagtttcgcattaaattcgctgatattcacattatcggtgatattaacattagacccaataaggagtcctggaaagtgtttgaagagatgatagagccctaccgtctgcacgagagttgcaaagatctaacaactgccgagaagctgaaacgcgagacaccatggaagattaccgacgctgaattggaggccgttaaagagaaaagttatcgtcaagtacgcctaaacgaactcttacaggagcacagccgggctgctaatttgatcgtgttgtctttaccggtggcgcgtaagggatcaatttccgacctgttgtatatggcgtggctcgagatcctcaccaagaaccttccccctgttctgttggtgaggggtaaccacaagaatgttctcacattctatagc

SEQ ID NO: 71606 - DNA, 3297 bp, Artificial Sequence
  derived and/or modified sequence
atgagtcttaataactccagtaatgtatttcttgattctgtaccatcaaacacaaaccgattccaggtttctgtaatcaatgaaaaccacgaatctagtgctgcagctgatgataacactgatccccctcactacgaagaaacatcctttggagacgaagctcagaaaagactccgcatttcttttaggcctggaaatcaggagtgctacgacaacttcctgcagtcgggagagacagccaaaacagatgcttcctttcatgcttatgattcacatactaatacatattatctccagacattcggacataacacaatggacgctgtgcctaaaattgaatattataggaacactgggtctatctccggacctaaagtaaacagaccctctctcctagaaatacacgaacagctagccaaaaacgttgcggtcactccatcctctgccgatcgcgtggccaatggagatggaatacccggagatgaacaggctgaaaacaaagaagatgaccaggcaggggtcgtaaaattcgggtgggtcaagggagttctggtaagatgtatgctaaacatctggggagtgatgctgtttatacggctatcctggatcgtaggagaagccggaatcgggctcggagtaattatcattggactgtcggttgtggtgactactcttactggaatctccatgtctgccatatgtacaaacggggtggttcggggagggggggcctattatcttatctctcgctccttggggcccgaattcggagggtctatcggactgatcttcgcttttgctaacgccgttgctgtggctatgtacgtcgttggattcgctgaaacagtcgtcgatctgctcaaggaaagtgattcaatgatggtggatcccacaaacgatatcaggattattgggtctataacagtggtgatacttttagggatctcagtggccggaatggagtgggaagctaaggctcaggtaattcttcttgttatactcctaatagcgatcgccaatttcttcattgggactgtgataccttcgaataatgaaaaaaaatcgaggggatttttcaattaccaggcctcaatctttgctgaaaatttcgggcccaggtttactaaaggggaaggatttttttcagtcttcgctatattttttcctgccgccacagggatcttagccggagctaatatctccggagacctcgaagatccccaggatgcaatacctagggggacaatgctcgccatcttcataactacagtggcttatttaggagtagctatatgcgtaggggcttgtgtcgtgagggatgcaactggaaacatgaatgatacaatcatctccgggatgaactgcaacgggagtgctgcatgtggactggggtatgatttttctcggtgtagacacgaaccttgtcagtatgggttaatgaacaacttccaggtcatgtcaatggtgagtgggttcgggcctctgataactgccgggatattctcggccacactgtcctccgctctcgctagtcttgtgtctgcccctaaagtctttcaggccttgtgtaaagataacatctacaaagcactacagttcttcgcgaaagggtatgggaaaaacaacgaaccacttaggggatacatccttacattcctcatagccatggcttttatactcattgccgagctgaatactatcgcacctattatttctaacttctttttagcgagttatgccctcattaacttcagttgtttccacgccagttatgccaagtcccctggatggcgccccgcttatgggatatataacatgtgggtatctctatttggggctgtgctgtgctgtgcagttatgtttgttattaattggtgggccgctgtgatcacttatgtcatcgagttcttcctgtatgtgtatgttacatgcaaaaaacctgatgttaactggggatcctcaactcaggccctctcttatgtgtctgctctggataacgcattagaactcactacagtggaggaccacgtgaaaaattttaggccccagtgtatagtgcttactggaggacccatgactcggcccgcactactcgatatcacacatgcatttacaaaaaattccggattgtgcatatgctgtgaagtgttcgttggacctaggaaactctgtgtgaaagaaatgaattcaggaatggccaagaaacaggcctggctaataaaaaataaaattaaagccttttacgcagcagtagccgcagactgcttccgcgatggggtccgttctctgctccaggcttcggggctggggcgtatgaaacctaacactttagtgatcggatataagaaaaattggcgcaaagccccactcacagaaatcgaaaactatgttggaataattcatgatgcattcgactttgaaatcggggtagtgatagtacgaatcagtcaggggttcgatataagtcaggtgttacaggtgcaggaagagcttgaacgccttgaacaggaacggctggctttggaagcaacaattaaagacaacgagtgcgaagaagaatctggaggaatccgggggctttttaaaaaggccgggaaactaaatattactaaaactactccgaaaaaagatggatctataaacacttcacagtccatgcacgtcggagagtttaatcagaaactcgttgaagcatcgacacagttcaaaaaaaaacaagagaaaggaacaatcgacgtttggtggctctttgatgatggaggactgactctattgattccttatattctcacgctaagaaaaaaatggaaggattgtaaactgaggatctatgtgggggggaaaatcaataggatcgaagaagagaaaatcgttatggccagtctactatctaaatttcggataaaatttgcagatatacacattataggggatattaatataagaccaaataaagaatcatggaaagttttcgaggaaatgattgaaccttatcgactccatgaatcttgcaaagacctgacaactgctgaaaagctcaaaagggaaacaccatggaaaatcacagatgccgaactggaagctgtgaaagaaaaatcctatagacaagtgaggctgaatgaattgcttcaggagcactcccgcgccgcaaatttaatagttctttcacttcctgtggccaggaaaggatctatcagtgacctgctctatatggcctggctggaaatactcacaaaaaacctccctcccgttttgcttgtgcgagggaatcacaaaaatgtgctgacattctatagt

SEQ ID NO: 71607 - DNA, 3297 bp, Artificial Sequence
  derived and/or modified sequence
atgtcgctcaacaattcatcgaacgtctttcttgattccgtcccatcgaatacgaatagattccaggtgtcggtaatcaacgagaatcatgaaagctccgcagcagcggacgataacaccgatcctccgcactacgaagagacgtcattcggagacgaggcgcaaaagaggcttagaatctcatttcgccctggcaatcaggagtgttacgataacttcctgcagtccggagaaactgccaagaccgatgcctctttccacgcctacgacagccatactaatacttactaccttcaaaccttcggacataacaccatggatgcagtgcctaagattgagtactaccgaaacacggggagcatctcaggccctaaggtgaaccgaccatcgcttctggaaatacacgagcagttggccaagaacgtggcagtcaccccctcgagcgccgacagagtggctaacggggacggtattcctggcgatgaacaagcagaaaacaaagaggacgaccaagcgggagtggtgaagtttgggtgggtgaagggtgtgctggtgcggtgtatgctgaatatctggggtgtgatgctctttattcggctctcctggatcgtgggagaagcagggatcggactcggagtcatcattattggtctttcagtggtggtcaccacccttaccggtatctcaatgtcagccatttgtactaacggtgtggtcagaggtggaggagcgtactacttgatttcgagaagcctcggacccgaatttggtggaagcattgggttgatcttcgcatttgctaacgcggtggcggtggcaatgtacgtggtgggatttgcggagactgtggtggatctgctgaaggagtcggactccatgatggtggatcctaccaatgatattagaatcatcggttcgattactgtggtcattcttcttggaatcagcgtggccggtatggagtgggaagccaaggcacaagtcatcttgctcgttattctccttatcgcaattgcaaatttctttatcggaacggtgatcccttccaataacgaaaagaagtcacgcgggttcttcaattatcaggcttccatctttgcagagaatttcggacctcgatttaccaaaggggaaggttttttctctgtgtttgcgattttctttccagcagcaaccggcattctcgccggtgcaaacatttcaggagatcttgaagatccgcaagatgccatacccagaggcaccatgctggcaattttcattactaccgtggcataccttggcgtggcaatctgtgttggagcgtgcgttgtgagagacgccaccggtaacatgaacgacactatcatttcgggcatgaactgcaatggttcagcagcatgtggactcgggtatgatttttcaagatgtaggcacgagccttgtcaatacggcctgatgaataactttcaggtgatgtcaatggtgtccggctttggacccctcatcaccgcagggattttctcggccaccctgtcctctgcactcgcgagcctcgtcagcgctccgaaggttttccaggctctttgcaaggataacatctacaaggctctgcaattcttcgcaaagggatatggcaagaataatgagccccttaggggctacatcctgacttttcttatcgccatggcatttatccttattgccgagcttaataccattgcgccgataatctccaatttctttctcgcatcctatgcattgatcaacttcagctgtttccacgcttcctacgctaagagccccgggtggcggcccgcgtacggcatttacaacatgtgggtcagcctctttggagccgtgctgtgttgtgcagtgatgtttgtgattaactggtgggcggcagtcattacttacgtgattgaattcttcctttacgtgtacgtcacctgtaagaagcctgacgtgaattggggctcctcaacccaagcactgagctacgtctcggcacttgacaatgcccttgaattgaccacggtcgaagatcacgtgaagaactttcgcccacaatgtatcgtgctcaccggaggtccaatgactcggcctgcacttctggacattacgcacgcatttactaagaattcaggtctttgcatatgttgcgaagtgtttgtgggtccaagaaagctgtgcgtgaaggagatgaactcgggaatggccaaaaaacaggcgtggcttatcaagaataagatcaaggcattttacgcagcagtggcagcagattgtttccgggatggggtgcgctcgctgctgcaagcaagcggactcggacgcatgaagcctaatactctcgtcattggttataagaagaattggagaaaggcgcccctgactgagattgaaaactacgtcggaataatccatgatgcattcgactttgagatcggtgtggtgatagtgcggatatcccaaggatttgacatcagccaagtgctgcaggtgcaagaggagctggaacggctggaacaggagcgattggcactggaagcaaccatcaaagataatgaatgtgaggaagaatccggtggtattcgcggtttgtttaagaaggctggaaagctgaacatcaccaagaccacccccaaaaaagatggatcgataaacacctcccaaagcatgcacgtcggcgagtttaatcagaagctggtggaagcaagcacgcaattcaagaagaagcaggaaaagggcactatcgacgtgtggtggctgtttgatgacgggggcctgacgctgctgattccatacatactgaccctccggaaaaagtggaaagattgtaagctgcgaatttacgtcggaggaaagattaaccgcattgaggaagaaaagatagtgatggcaagcctgttgagcaaattccgcatcaagtttgctgatattcacatcattggagacattaacattagacccaataaagaaagctggaaggtgtttgaggaaatgatcgaaccgtaccgcctccacgaatcgtgtaaagatctgaccactgctgaaaaacttaagcgcgaaaccccatggaagattactgatgcagagctggaggccgtgaaggaaaagagttaccgacaagtgagacttaacgaactgctccaggaacactcgagagcggcaaaccttatagttctttcgctgccggtggcgcgtaagggatcaatcagcgatctcctttacatggcatggctcgagattcttacgaagaaccttcctcccgtgcttctcgtccgtggaaaccataagaatgtccttacgttttactct

SEQ ID NO: 71608 - DNA, 3297 bp, Artificial Sequence
  derived and/or modified sequence
atgtctctgaataactcaagtaatgtgtttttggactccgtcccgtccaataccaaccgctttcaggtgtccgtcatcaacgaaaaccacgaaagctccgcagcagccgacgataataccgatccgccccattacgaagaaacctcctttggagatgaagctcagaagcgacttaggatttcctttaggccaggtaaccaggaatgctacgataacttcctgcagtcgggggaaaccgcaaagaccgacgcatcattccatgcgtacgacagccataccaacacttactacctgcagacttttggacataacactatggatgcagtgccaaagatcgagtactaccgcaataccggaagcatcagcgggcccaaggtgaatcgtccttcgctgctcgaaatccacgagcaacttgcaaagaacgtcgcagtgactccatcatcggccgacagagtggcaaatggagatggaatcccaggagatgagcaagcagaaaacaaagaggacgatcaagccggagtcgtgaagttcggttgggtgaagggagtccttgtgcggtgtatgctgaacatttggggggtcatgctgttcattaggctttcgtggatagtgggcgaagccggaattggcctcggagtgatcatcattggactgtcagtggtcgtgaccacccttaccggaatcagcatgagcgcaatatgtaccaacggtgtggtgaggggaggcggagcatactacctcatttcgaggtcacttgggccagagtttggtggctccattggacttatcttcgcctttgccaacgccgtggccgtcgcaatgtacgtcgtgggttttgcggagactgtcgtggaccttctcaaggagtccgacagcatgatggtggatccaactaatgacataagaatcatcggttcgataacggtggtgatccttcttggtatttcggtggcaggcatggaatgggaggcaaaggcccaggtgattctgcttgtcatactccttatcgcaatcgcaaacttctttattggcactgtgatccctagcaacaatgaaaagaagtcaagaggattctttaactaccaagcaagcatctttgccgagaattttggtccacggttcactaaaggggagggattcttctcagtctttgccattttctttcctgctgcaacgggtattcttgccggagccaacatttcaggcgatttggaggatccccaagacgcaattccacggggaaccatgcttgcaatcttcattaccaccgtggcataccttggtgtggccatttgcgtcggagcatgcgtggtgcgagatgcaactggtaatatgaatgacactattatctccgggatgaattgcaacggatcggctgcatgtggactgggctacgattttagcagatgccgacacgagccttgtcagtacgggctcatgaacaacttccaagtgatgtcgatggtgagcggtttcggacctcttattaccgcgggaattttctccgcaactctttcctcggcactggcctcccttgtgtcggctcccaaggtgtttcaggcgctttgtaaggacaacatctacaaggcgctgcagtttttcgcgaaaggttatggcaagaacaatgagcccctgaggggatacatcctcacttttcttattgcaatggcatttatccttattgcagaactgaacactattgcgccaattatctctaactttttcctcgcatcctacgccctgataaacttttcctgttttcatgcctcgtacgcaaaatcacctggctggcggccggcatacggcatatacaacatgtgggtcagcctttttggagccgtgctttgttgcgcagtcatgttcgtgattaactggtgggccgcagtgataacgtacgtgattgaattcttcctgtacgtgtacgtgacctgtaagaagccagacgtgaattggggtagctctactcaggccctttcatacgtgtcagcactggataatgctctcgaacttactaccgtcgaagatcatgtgaagaatttccggccgcagtgcattgtgctgaccgggggacccatgaccagaccagcgctgcttgatattacgcatgcatttactaagaattcgggtctgtgcatttgctgtgaagtgtttgtgggaccacgcaaactgtgcgttaaggaaatgaattcggggatggccaaaaaacaagcatggctgataaagaacaagatcaaagcattttacgcagcagtggcagcagactgctttagagatggagtgagaagccttcttcaagcatcgggcctggggagaatgaagcctaataccctggtgattggatataagaagaattggcgaaaagcacccctcaccgaaattgaaaactacgttggcattattcacgacgcgtttgattttgagattggtgtggtgatcgtgagaatctcgcagggctttgacatctcgcaggtgttgcaggtccaagaagagcttgaacgtctggagcaagagagacttgcactggaggccactattaaggacaatgagtgtgaagaggaatcgggtgggattcgcggtttgtttaagaaggcagggaaactgaacattaccaaaaccacccccaagaaggatggcagcattaacacgagccagtcgatgcacgtgggcgaattcaaccagaagctcgtggaagcatcaacccagtttaagaagaagcaagaaaaggggactatcgatgtgtggtggctttttgatgatggagggcttacgctgttgatcccatatatccttactctgcggaagaagtggaaggattgcaagctcagaatatacgttggtggcaaaatcaatagaatagaggaagagaagatcgtgatggcaagtctgctgtcaaagtttcgaatcaagttcgcagatatccatatcattggagacattaacatccggcctaacaaagaatcgtggaaagtgtttgaagagatgattgaaccatacagacttcacgagtcgtgtaaggacctcaccaccgccgaaaaacttaagagggagactccttggaaaatcactgacgctgaactcgaagctgtgaaggagaaatcataccgacaggtgcgacttaatgagcttctccaggaacacagcagagccgcaaatctgattgtcttgagcctcccagtggccagaaagggtagcataagcgatcttctctatatggcttggctggagattctcaccaagaatttgcctccagtgctgttggtgcgtggtaaccacaaaaacgtgctcactttctactca

SEQ ID NO: 71609 - DNA, 3297 bp, Artificial Sequence
  derived and/or modified sequence
atgtccctgaacaactcaagcaacgttttcctcgactctgtacccagcaatactaaccgctttcaggtgagcgtgatcaacgagaaccacgaaagcagcgcagctgccgatgataatacggaccccccccattacgaggagacttcttttggcgacgaggcccagaagcggctgagaatctcctttcggccaggcaatcaggagtgttacgacaacttccttcagtcaggcgagacagcaaagaccgacgcatcctttcacgcctacgactcacacacgaacacgtactacctgcaaacattcggacataacacgatggatgccgtcccgaaaattgaatactatcggaatacagggtctataagtggcccaaaggtgaatcgaccttctctgctggaaatccacgaacagcttgctaagaacgtcgccgtaacccctagttcagcagatcgggtggccaatggcgatggtatcccaggtgacgaacaggctgagaataaagaggacgaccaagctggggtcgtcaaattcggctgggttaagggtgtgctggtgaggtgtatgctgaatatatggggtgttatgctgttcatacggctcagctggattgtgggcgaagccggcataggactgggggttatcatcataggcctgagcgtagtggtgacaactctgacagggatcagcatgagtgctatttgcaccaacggtgtggtccggggtggtggcgcatactacctgattagccggagtttggggccggagtttgggggctctattggtctgattttcgcctttgccaacgccgtggccgtcgcaatgtatgtagtaggcttcgcggaaactgttgtggacctgttgaaagagtctgacagtatgatggtggatcccacaaatgatatacgcattatcggctctatcaccgtggtgattctgctcggaatttcagtggcagggatggagtgggaagcgaaggcacaggtgatcctcctggtgatcctgctgatcgctatagcgaactttttcatcggcaccgtgatcccttccaacaacgaaaaaaagagcagaggttttttcaattatcaggcaagtatttttgccgagaattttggacctagattcactaagggggagggattctttagtgtgtttgcgatcttttttccggccgccaccggaatactggcgggagcaaacatctctggagatttggaggatccacaagatgccattccaaggggtaccatgcttgccatttttatcaccacagtcgcatacctgggggtggccatttgcgtgggagcttgtgtcgtgcgcgatgccacgggaaatatgaacgacaccattatatcaggaatgaactgtaatgggtctgccgcatgcggcttggggtatgactttagcaggtgtcggcatgaaccctgccagtatgggctgatgaacaactttcaggtgatgtccatggtgtccggatttggacctctgatcaccgccggcatatttagcgcaacactgtcatcagctctcgcttcacttgtgtcagctccaaaggtttttcaggccctgtgcaaggacaatatttacaaggccttgcaattcttcgctaagggatacggaaagaacaacgaacccctgagggggtatatcctgacattcctcattgcaatggcctttattctcatcgcagaacttaataccatcgcacctataatttcaaacttcttcttggcaagctacgccctgatcaacttttcatgcttccatgcttcatatgccaagagccccggctggagacccgcgtatgggatctataacatgtgggtttcacttttcggtgcagtactctgctgcgccgtaatgttcgtgatcaactggtgggccgctgtgattacctatgtcattgagttttttctgtacgtatacgtgacttgcaagaaacccgatgtgaactggggcagcagcactcaggctctgagctacgtgtcagcactggacaatgcattggagcttaccaccgtggaggaccacgttaagaacttcaggccacagtgcatcgtgttgaccgggggtccaatgacgcgccccgctctgctggatataactcatgctttcaccaagaattccggcctgtgcatctgctgcgaagtcttcgtaggcccccggaagctctgcgtgaaggaaatgaattccggaatggcaaagaaacaggcctggctcattaaaaacaagattaaggctttctatgcggccgtcgcggctgattgttttcgagatggcgtccgcagcctccttcaggcaagtggactgggccgcatgaagcctaacacccttgtgattggctacaagaagaactggaggaaggccccattgaccgaaattgagaattatgtggggattattcacgacgcatttgattttgaaattggcgtggtgattgtcagaatctctcaggggtttgacatcagtcaggtgctgcaggtgcaagaagaactggaaagactggaacaggagaggttggccctggaagccacgatcaaggacaatgagtgcgaagaggagtcaggaggcatccggggactgttcaaaaaggccggtaagctcaatatcactaaaaccacacctaagaaggatgggagtattaatacctcccagtctatgcatgtcggagagttcaatcagaagctggtggaggcatcaacacaattcaaaaaaaaacaggagaagggcaccatcgacgtttggtggttgtttgatgatgggggcctgacattgctcatcccgtacattctgacattgcggaaaaagtggaaggattgtaaattgcggatttacgtgggaggcaaaattaaccggatcgaggaggaaaagatcgtcatggcctctctgctgtccaagtttcgaattaagtttgcggatattcacatcatcggggatataaatatccgccctaataaagagagttggaaggtgttcgaggaaatgattgagccataccggcttcacgagtcctgcaaagatcttactacagccgagaagctgaagcgagagacgccgtggaagatcacagatgccgaactcgaagccgtcaaagaaaaatcataccggcaggttagacttaatgaacttctgcaagaacacagtagggcggccaatctgatcgtgctctctcttcccgtcgccaggaaaggaagcatatccgatctgctttatatggcgtggctggaaatactgacaaagaatctgccacccgtgttgttggtccggggcaatcacaagaacgtgctgaccttttattca

SEQ ID NO: 71610 - DNA, 3297 bp, Artificial Sequence
  derived and/or modified sequence
atgagcctcaataactcgtccaacgtgttccttgattcagtgccaagcaatactaaccgatttcaagtcagcgtcatcaacgagaaccatgaatcatcggcagccgcagatgataatacggatccgcctcattatgaggagacttcctttggcgatgaagcacagaaaaggcttcgcatttcgttccgccccggaaaccaagaatgctacgacaactttctgcagtctggcgaaactgcaaaaactgatgcctcatttcatgcatacgactcacacaccaacacctattacctccaaacctttggacacaacactatggatgcagttcctaagattgagtactacagaaacaccggatccatttccggacctaaagtgaacagacccagccttctggaaattcatgaacaacttgcaaagaacgtggcagtgactccctcgtccgcagaccgggtggcaaacggcgacggtatcccgggagatgaacaagctgaaaacaaagaagatgaccaagcaggtgtggtcaaatttggatgggtgaaaggcgtcctggtgcgatgtatgcttaacatctggggagtgatgttgttcataagattgtcgtggatagtgggtgaggcaggtatcggattgggtgtgatcattattggtctttcggtggtggtgactaccctgactgggatttccatgtcagccatttgcaccaatggagtggtgaggggcggtggagcctactacctgatttcaaggtcgctcggtccagaatttggtggatccattggactcatttttgccttcgctaacgcagtggcggtggcaatgtacgtcgtgggctttgctgagacggtggtggatctccttaaggaatcagattcgatgatggtcgacccaactaatgatattagaatcatcggttccatcactgtcgtcatactgctgggcattagcgtcgcaggtatggaatgggaggctaaagcccaagtgatactgctggtgattctgctgattgccattgcaaacttctttataggcaccgtgattccttccaataacgaaaagaagtcgagaggcttcttcaattaccaggcatcaattttcgcagagaattttggaccacgcttcactaagggagaagggtttttcagcgtctttgcaatcttttttcctgcagcaaccgggatccttgccggagcaaatatctctggagatctggaagatccgcaagacgccattccccgcggaacgatgttggcgatcttcataactactgtggcataccttggtgtggcaatttgtgtcggtgcctgtgtggttcgtgatgcaactggaaacatgaatgataccatcatatccggcatgaattgcaacggtagcgcggcctgcggtctgggctacgatttttccagatgtcggcatgaaccctgccagtacggacttatgaacaatttccaagttatgtcaatggtttccggttttggaccactgatcaccgcaggcatattctcagcaactctcagctccgctcttgcttccctcgtgtccgctcccaaggtgtttcaagccctttgtaaggacaacatttacaaggcactgcagtttttcgccaaggggtacggcaagaacaacgaaccactcagaggctacattcttacgtttcttatcgcgatggcgtttatcctgattgccgagcttaacaccatcgcacccatcataagcaacttttttctggcatcgtacgcactgatcaatttcagctgtttccatgcatcatacgcaaaatccccgggttggaggcctgcctacgggatctacaacatgtgggtgagcctgtttggcgcggttctgtgttgcgctgtgatgttcgtcattaactggtgggcggctgtcatcacttatgtcatcgaattcttcctgtacgtgtacgttacttgcaagaagcctgacgtcaactggggctcgtcgactcaggcactcagctacgtgtcagccctcgacaatgcgctggagctgaccaccgtggaagatcatgtcaagaatttccgccctcagtgtattgtcctgaccggaggaccaatgacccggccagcacttcttgatataactcatgcgttcaccaagaacagcggactttgcatttgctgtgaggtgtttgtggggccacgcaagctgtgtgtgaaggagatgaactccggaatggctaagaagcaggcctggctgatcaagaataagatcaaagcattttacgcggcagtggcagccgattgttttagagatggagtgagatctttgcttcaggcatcgggactcggacggatgaaacctaacacccttgttatcgggtataagaagaattggcgaaaagccccacttactgaaatcgagaactatgtgggaatcattcatgatgcgtttgacttcgaaattggagtggtcatcgtgcgcatctcacaaggtttcgacatttcgcaagtgctgcaagtccaagaagaactcgaacggttggaacaagaaagacttgcactggaagcaacgatcaaggacaatgagtgtgaggaggagtcaggtggcattcggggactctttaagaaggccggaaaactcaacataactaagacgacccccaaaaaagacggttccattaacacctcacaatccatgcatgttggtgaattcaatcagaagttggtcgaagcatcaactcagtttaagaagaaacaggagaaaggtactatagatgtctggtggctgttcgacgatgggggtcttacgctgcttattccgtacattctcacccttagaaagaaatggaaggattgtaaacttagaatctacgtcggaggaaagattaacaggattgaggaagagaagatagtgatggcatcactgttgtcaaagtttagaattaagttcgccgatatacatatcattggagacattaacatacgacccaataaggagtcgtggaaggtgttcgaggaaatgatagaaccctataggcttcatgaatcgtgcaaagatcttaccactgctgaaaagctcaagagagaaactccttggaagatcaccgatgcggagctcgaagctgtcaaggaaaagtcgtaccgccaagtccggctcaacgaattgctgcaggagcattcacgggcagctaaccttatcgtgttgagcctgcctgtggcaaggaagggcagcatatcggacctgctgtacatggcttggctggaaattctgaccaaaaatcttcctccagtgcttcttgtgcgaggaaatcataagaatgtcctcactttttactcg

SEQ ID NO: 71611 - DNA, 3297 bp, Artificial Sequence
  derived and/or modified sequence
atgagcttgaacaattcctcgaacgtattcttggactcggtcccatccaataccaacagattccaagtgtcagttatcaacgagaaccatgaatcctcagcagcggccgatgacaataccgatccgccacactacgaggaaacctcattcggcgatgaagcgcagaaacggctccgcatctcattccgaccgggcaatcaggagtgttacgacaatttcttgcaaagcggagaaacggccaagactgacgccagctttcacgcttacgactcacatactaatacttactacctgcaaaccttcggacacaacaccatggacgcagtgcctaagatcgagtactatcgcaatactgggtcaatctctggtccgaaggtcaatcggccttcgctcctggaaatccacgaacaactcgcaaagaacgtggccgtcaccccatcgtcagccgaccgggtggcaaacggcgatgggattccaggggatgagcaggctgaaaacaaggaggacgatcaggctggggtcgtgaagttcggctgggtcaaaggagttctggttcgctgcatgctcaacatctggggggtgatgcttttcatcagactgtcctggatcgtgggagaggccggaatcggactgggagtgattatcataggactttccgtggtcgtgactaccctgaccggaatatccatgtccgctatctgtacgaacggcgtggtgcgagggggaggggcctattacctgatttccagaagcctgggaccggaattcggcggatccatcggcctcatctttgcattcgctaacgcggtcgctgtggctatgtacgtcgttggatttgccgaaaccgtggtcgacctcctgaaggaatccgattcgatgatggtggaccccaccaatgatatccgcatcattggatctatcacggtcgtcattctcctgggcatctcagtagcgggcatggagtgggaggctaaagcacaagtgatcctgctcgtaatcctcctgatcgctatcgccaactttttcatcggcactgtcattccctcgaacaacgagaagaagagcaggggcttcttcaattatcaggcctcaatctttgctgagaatttcggaccgcgcttcaccaagggagagggtttcttctcggtgtttgctatcttctttccggcggccactggcatcctcgcgggcgccaacatcagtggagacttggaggacccacaggacgccattcctaggggaactatgctggcaatcttcattaccactgtcgcatacctgggggtcgcgatctgcgtgggagcatgtgtggttagagacgctaccggaaacatgaatgataccatcatttctggtatgaactgcaatggttcagcggcatgtggtttgggctacgattttagcaggtgccggcatgaaccttgtcagtacgggctgatgaacaacttccaggtcatgtcgatggtcagcggatttggtccgctcatcactgccggtatcttctcggctacgctgagctccgcgctggctagcctcgtcagcgcaccaaaagtgttccaggcactgtgcaaggataacatatacaaggcccttcaattcttcgcgaaaggatacgggaaaaacaatgaaccccttcgtggatacatcctgacctttctgatagccatggccttcatcctgatcgccgagctgaacactattgcgcctatcatctccaacttttttctcgcctcgtacgccctgatcaacttctcatgcttccacgcgtcttacgccaaatcgcctggatggcggccggcctacggaatctacaatatgtgggtgagcctcttcggcgctgtcctttgctgcgctgtgatgtttgtgatcaattggtgggctgcggtcattacttacgtcatcgagttctttctgtacgtgtacgtgacctgcaagaagccggatgtgaattggggatcttcgactcaggctctttcctacgtgagtgcactcgataacgccctcgaacttaccactgtggaggaccacgtgaaaaacttccggccgcagtgcatcgtgctgaccggaggcccaatgaccagacccgcattgctggacatcacccatgcattcactaaaaactccggtctgtgcatttgctgcgaggtgttcgtgggaccgcgcaaactctgcgtcaaggaaatgaattcaggaatggccaagaaacaagcctggctgattaagaataagattaaggctttttacgcggccgtggccgcagactgcttcagggatggagtgagatccctgctccaggcgtcggggctggggcgcatgaagccgaacacgctcgtgatcgggtacaaaaagaactggaggaaggcccctctcaccgaaattgagaactacgtaggaatcattcatgatgctttcgacttcgaaatcggagtcgtgatcgtccggatttcgcaaggatttgacatctcgcaagtgctccaggtgcaggaggagctggaacgcttggagcaagaacggctggcgttggaggcaaccatcaaggacaacgagtgtgaagaagaatcaggaggcatccgcggactgttcaagaaggcaggcaagttgaacattactaaaactaccccgaagaaagacggtagcatcaacacttcccaatccatgcatgtcggagagtttaatcagaagctggtggaagcctctacccagttcaagaagaagcaggaaaaaggaactatcgatgtgtggtggctctttgatgacggcggtctgaccctgctgatcccgtacatcctcactctcagaaagaagtggaaggattgcaaattgcgcatctacgtgggaggtaagatcaaccggatcgaagaggagaaaatagtgatggcgtccctcctctcgaagttccgcatcaaattcgcagacatccacatcatcggcgacatcaatatccgaccgaacaaggagtcgtggaaggtattcgaagaaatgattgaaccgtaccgcctgcacgagtcatgcaaagacttgactaccgccgaaaaactgaagcgggagactccatggaagatcaccgacgccgaactggaagcagtgaaggaaaagtcgtatcgccaagtgcggctgaacgaactcctgcaggaacactcgcgcgccgccaaccttatcgtgctgtccttgcctgtggccaggaagggaagcattagcgacctgctgtacatggcctggctggaaatccttactaagaacctgcccccagtgctgctggtgcggggaaatcacaaaaacgtgctgaccttctacagc

SEQ ID NO: 71612 - DNA, 3297 bp, Artificial Sequence
  derived and/or modified sequence
atgagcctgaataactccagcaatgtttttctagatagcgtgccttccaacaccaaccgatttcaggtgtccgttattaatgaaaatcatgagtcctcagccgctgccgacgataataccgaccccccccactatgaagagacgagcttcggggacgaagcgcagaaaagactgcgtatctcttttcggcccggcaaccaggagtgctacgacaatttcctgcagtccggtgagaccgcaaaaaccgacgcatcatttcatgcgtatgattctcacacaaacacctactatcttcagacttttgggcacaataccatggacgcggtgccaaagattgagtattatcgtaacactgggtccatatctggccccaaagtgaacaggccctcactactcgaaattcatgaacagctggccaagaatgtggctgtgactcctagtagtgcggacagagtggccaatggagatggaattcccggcgacgagcaggcagaaaataaagaagatgaccaggccggagtagtgaagttcggatgggtgaaaggcgttctggttaggtgtatgcttaacatctggggggtcatgctcttcatccgcctgagctggattgtcggggaggcaggtatcggcttgggcgtgattataataggccttagcgtcgtggttacaacccttaccggaatatctatgtctgccatctgtaccaacggcgtggtccggggaggcggcgcgtactatctgatttctaggtctctaggtccagagtttggcggctctattggcctcatatttgcctttgcgaacgccgtggctgtggccatgtatgtggtggggttcgccgagacggtggtagatctcctgaaggagtctgactctatgatggtcgatccgactaatgatatccgaatcatcggttcaatcacggtggttattttgctagggattagcgtagcaggaatggaatgggaggcaaaagctcaggttatcctcctggtgattttattgattgccattgctaacttcttcatcgggaccgtgatcccctccaacaatgagaaaaaatctagagggttcttcaattatcaggccagtatattcgcggagaactttggtcctcgattcactaagggcgagggattctttagcgtctttgcaattttttttcccgccgcaaccggcatcctggcgggagccaacataagcggcgacctggaagatcctcaggacgctattcctcggggaacgatgctggctatttttatcactactgtcgcttatctcggcgtggccatctgcgtgggcgcctgcgtcgttcgggatgccaccggaaacatgaacgatacaatcatatccgggatgaactgcaacggctcagcggcatgcggactagggtacgactttagccggtgcaggcacgagccatgccagtacgggcttatgaataacttccaggtgatgtcaatggtctccggcttcgggccactcattacagccggaattttcagcgccacactctcctctgcccttgccagtctggtctcagccccaaaggtctttcaagccctttgtaaggacaacatttacaaggccctgcaattctttgccaaagggtatggaaagaataacgagcccttgcgaggatatattctcacctttctgatagccatggcattcattttgattgctgagttgaacacaattgccccaatcatttctaactttttcctggccagctacgcactgatcaacttctcttgctttcatgcctcctacgcaaagtcccctgggtggagacccgcgtatggcatatacaacatgtgggtgtctttgtttggcgccgtactgtgctgcgccgtgatgttcgtgatcaattggtgggctgccgtaataacctacgttatagagtttttcctgtatgtatatgtcacatgtaagaaacctgatgtgaattggggttcatcgacccaggccctatcttacgtctccgcgctggataatgccctcgaactgaccaccgtggaggatcacgtcaagaacttccgcccccagtgtatcgtcttgacaggcggacctatgactaggcctgcccttctcgatataactcacgcattcaccaaaaattcagggctctgcatctgttgtgaggtcttcgttggaccgaggaagctgtgtgtgaaggagatgaactctggaatggctaagaaacaggcttggctcattaagaacaaaattaaggcgttttatgcagctgtagcagctgactgttttcgagatggcgtgaggtctctgcttcaggctagtggcttgggcaggatgaaaccgaacaccctagtgattggttataaaaaaaattggcgtaaagctccactgacagaaatagagaattacgtggggatcattcatgatgcatttgatttcgaaataggagttgtaattgtgagaatctcacagggctttgatatttctcaggtgctacaggtccaggaagaactggagcgcctagaacaggagcggcttgccctggaggctacgattaaagacaacgagtgcgaggaagagagtggtgggattcgcgggctgttcaaaaaggccggtaaactgaacatcaccaagaccactccaaagaaggacggatctataaacacgagtcagtcaatgcacgttggagagtttaatcaaaaactagtggaagcgtcaacccagtttaaaaaaaaacaggaaaaaggcacgatcgatgtatggtggctatttgatgatggtggcctcactttgctgattccgtacattcttaccctgcgaaaaaaatggaaggactgtaagttaagaatctacgtgggcggtaagatcaatcggatagaggaagagaaaatcgttatggcctcccttctgagcaagttccgcatcaagttcgccgacattcacattatcggagatatcaacattcgtcccaacaaagagtcatggaaggtattcgaggagatgattgagccatatcgactgcatgagagctgcaaggatctgactacagccgaaaaactgaaacgtgagacaccttggaagattacggacgcagaattagaagctgtgaaggagaaaagttaccgccaggtacgtttgaatgaactgctccaggagcattcaagggccgctaacctgatcgtcctgtctctgcctgtggctcgtaaagggtctatttctgacttactttatatggcttggctcgagattctgacaaagaatctgccccctgttctgttagtgcgggggaaccataaaaacgtgttaaccttctactct

SEQ ID NO: 71613 - DNA, 3297 bp, Artificial Sequence
  derived and/or modified sequence
atgtccctcaataactcatcgaacgtctttttggattcagtgccttcgaacaccaacaggttccaggtgtcggtgattaacgagaaccacgaatcgagcgctgcagcagatgacaatacggatcctccacattacgaggaaacctcgttcggggatgaagcccaaaagagactgagaatctcgttccgacccggaaaccaggaatgttatgataactttctgcaatcaggggagactgcgaaaaccgacgcctcctttcacgcatacgatagccatactaacacttactaccttcagactttcggacataacaccatggacgcagtgcctaagatagaatactatagaaatactggatcaatttcaggaccaaaggtgaaccggcccagcctgctggaaattcatgagcagttggcaaagaacgtggcggtgaccccatcctcggccgatcgggtggcaaacggtgatggcattcccggggacgaacaggcagagaataaggaggacgaccaggcaggtgtcgtcaaatttgggtgggtgaagggcgtgctggttaggtgtatgctcaatatctggggggtgatgcttttcatccggctgagctggattgtcggagaagcgggaatcggacttggtgtgatcattattggcctctcggtggtggtgactacgttgactgggatatcgatgtccgccatctgtaccaatggtgtcgtgcgcggaggaggtgcatactacctgatttcccgctccctgggtccagaatttgggggatcaatcggactcattttcgcttttgcaaacgcagttgcagtggcgatgtacgtcgtgggttttgcggagactgtggtggacctgctgaaagagagcgattcgatgatggtggatccaaccaatgatataaggattattggatcgataaccgtggttatccttctcggaatatctgtggcaggtatggagtgggaggcaaaggcacaagtgattctcctggtcatcctgcttattgcgatagcaaatttctttattgggaccgtgattccttcgaataacgagaagaagtcgcgcgggttctttaactatcaagcatcgatttttgcagagaactttggacctcgatttaccaaaggggagggatttttctcggtctttgcgatattcttccccgccgcaacggggattctggcaggtgccaatatcagcggagatctggaagatcctcaagatgcgataccccgaggaactatgctggcgattttcattaccactgtcgcgtacctgggagtggccatctgtgtgggtgcgtgtgtggtgagggacgccactggcaacatgaatgacaccattatctccggaatgaactgcaacggatcggcagcctgtggccttggatatgatttcagccggtgtcgacatgagccttgtcagtacggtctgatgaacaactttcaggtcatgagcatggtgtcagggtttggccctctcattaccgcagggattttcagcgcaactctttcgtccgcactggcatcgcttgtgtccgcacctaaggtgttccaggctctgtgcaaagacaacatttacaaggcccttcagttttttgcgaaaggttacgggaagaacaatgaaccccttagggggtacattcttacctttttgatagcaatggcattcattttgattgcagaactgaacaccatcgctcctataatctcaaactttttcctcgcgagctacgctctgatcaatttctcgtgtttccacgcctcttatgcaaaatcgcctggttggcggccggcatacgggatatacaacatgtgggtgtccctgtttggcgcagtgctctgttgcgcggtgatgtttgtgatcaactggtgggcagccgtcattacttacgtgatcgaattctttctctacgtgtacgtcacttgcaagaaacctgacgtgaactggggatcaagcactcaagctctgagctacgtgtccgcgctcgacaacgcgctggaactgacgaccgtggaagatcatgtcaagaacttccgccctcaatgtatcgtgctgaccggcggaccaatgaccagacctgcacttctcgacatcacccatgcctttaccaagaattcaggtctgtgtatctgctgcgaggtctttgtcggtcctcgaaagctctgtgtcaaggaaatgaactccggaatggcgaaaaagcaggcctggctgatcaagaacaagatcaaggcattttacgcagcagtggccgcagattgttttagagacggcgtccgctccctcctccaagcctccggtctgggtcgcatgaaacccaacactctggtgattggttacaaaaagaactggcgtaaggcaccactgaccgaaatcgaaaactacgtgggcattattcatgatgcgtttgactttgagatcggcgtggtcatcgtccggatcagccagggttttgatatttcacaagtgcttcaagttcaagaggaacttgagaggctggagcaggaaagattggcactcgaggcgacgattaaagataatgagtgcgaggaagaatcaggaggaattagagggctgttcaagaaagcaggaaaactcaacataactaagaccactccgaaaaaagacggttccattaacacctcgcagtcaatgcatgtgggagaattcaatcagaagttggtggaagcatccacccagttcaagaagaagcaggagaaaggaaccattgacgtgtggtggttgtttgacgatgggggacttactcttcttattccatacattcttacgcttagaaaaaagtggaaggactgtaagctgcggatctacgtgggtggcaagattaatcgaatcgaagaggaaaagatcgtcatggcctcgcttctgagtaagtttcgaatcaaattcgcggacatccacataatcggggacattaacattagacctaacaaagagagctggaaggtgtttgaagagatgattgaaccttaccgcctgcatgaatcatgcaaggaccttacgacggccgaaaaactgaaaagggagactccgtggaagataaccgatgccgaactcgaggctgtgaaggaaaagagctacaggcaggttcgactcaacgaacttctccaggagcactcgcgcgccgcgaatctgatcgtcctcagccttccagtcgcgcggaaaggctccatttcagatttgctgtacatggcatggctggagattcttactaagaatcttcctcccgtgttgcttgtgcggggaaaccataagaatgtgctgaccttctactcc

SEQ ID NO: 71614 - DNA, 3297 bp, Artificial Sequence
  derived and/or modified sequence
atgtcgctgaacaactcctcgaacgtctttctggattcggtcccctctaacaccaatcgcttccaggtgtcagtgatcaacgaaaatcatgaatcaagcgcggcagccgatgataacaccgacccaccgcactacgaagaaacctctttcggcgatgaggcgcagaagcggctgcgcatctcttttagaccgggtaatcaggagtgctacgataactttctgcagtcgggcgagacggccaaaactgacgcatccttccatgcatacgactcccacaccaacacttactacctgcaaacgttcggacacaataccatggacgctgtgcctaaaatcgagtactaccgcaacactggatcgatctcgggacccaaagtcaaccggccgtccctgctggaaatccacgagcaattggcaaagaatgtcgcagtgacgccgagcagcgctgacagggtggctaatggagatggaattcctggagacgaacaagcagagaataaggaggacgaccaagcgggggtggtgaagttcggatgggtgaagggcgtcctcgtcagatgcatgctcaacatctggggcgtcatgctcttcatcaggctgtcgtggatcgtgggagaggccggaatcggcttgggggtgatcatcattgggctgagcgtggtggtgaccaccctgaccggaatctcaatgtccgcaatttgcaccaacggagtggtccggggcggaggagcctactacttgatcagccggtcattgggaccagaattcggtggaagcatcggactgatcttcgcgttcgccaacgccgtcgcggttgcgatgtacgtggtggggtttgccgaaaccgtggtggacctgctgaaggagagcgatagcatgatggtggacccgactaatgatatcagaatcatcgggtcaatcactgtggtgatcctgctgggcatctcagtggccggcatggaatgggaagcgaaagcgcaggtgatcctcctggtcatcctgctgattgccatcgccaacttcttcattggtaccgtgattccatccaataacgagaagaagtcaagaggttttttcaattaccaagcgtcgatcttcgccgagaattttggcccaagattcactaaaggagagggctttttctccgtgttcgccatcttctttccggccgctaccggcattcttgcgggagctaacatatccggcgatctggaggatccgcaggacgccatcccgcggggaaccatgttggccatcttcatcaccactgtcgcctacctcggggtggccatctgcgtgggagcctgcgtggtgcgcgatgccaccgggaatatgaatgacaccattatctccggaatgaactgcaatggctcggccgcttgcggcctgggctacgatttctcgcggtgccgccacgagccgtgccagtacggtctgatgaataactttcaggtcatgagcatggtgagcggtttcggccctctgattaccgctggtatcttctcggccaccctttccagcgccctggcgagcctcgtctcggccccgaaggtgtttcaggcactctgcaaggacaacatctacaaagcgctgcagttcttcgccaagggatacggtaagaataacgaacctcttcgcggatacatcctcactttcctcatcgccatggccttcatcttgatcgctgagctcaacactatagcccccattatctcaaacttctttttggcgtcatacgcactgataaacttttcgtgtttccacgccagctacgccaaatcgccgggatggcggcccgcatacggcatctacaatatgtgggtgtccttgttcggtgccgtcctgtgctgcgccgtgatgttcgtcattaactggtgggccgccgtgatcacttacgtcattgaattctttttgtacgtctatgtcacctgcaagaagccagacgtgaactggggatcctccacccaggctctctcgtacgtttcggcactggacaatgccctcgaactgaccactgtggaagatcatgtgaagaatttccgaccacagtgtatcgtgctcactggcgggccaatgacccggcccgccctgctcgacatcactcacgcgtttactaagaattccggtctgtgcatctgttgcgaagtttttgtggggccccgcaaactgtgtgtgaaggagatgaattcaggaatggcgaagaaacaggcatggctgatcaagaataagatcaaggccttttacgcagccgtcgccgcagattgcttccgcgatggggtccgcagtctgctgcaagcgtccggactggggaggatgaagccaaataccctggtgattggctacaagaagaattggagaaaggctccgctgaccgagatcgagaattacgtgggaatcatccatgacgcatttgacttcgaaatcggagtcgtgatcgtgcgcatcagccaaggattcgatattagccaggtgctgcaagtgcaggaagagctcgagcggctcgaacaggagcgcctggccctggaagccaccattaaagataacgagtgtgaggaggaaagcggcggtattcgcggcctcttcaaaaaggcggggaaactgaacatcactaagactacgccgaagaaagatggatcgataaacacttcgcagtccatgcacgtgggagaattcaaccaaaagttggtggaggccagcacgcaattcaaaaagaaacaagaaaaaggaaccatcgacgtctggtggctgttcgacgatggcggactgactctcctgattccttacattctgaccctccggaagaaatggaaggactgcaaacttcgcatatacgtcggaggcaagatcaatagaatcgaggaggaaaagattgtgatggcgtcgctcctgtcgaaattccggatcaagttcgccgatatccacatcatcggagacatcaacatccgccccaataaagaatcgtggaaagtgtttgaagagatgatcgaaccctaccgcctccacgaatcatgcaaggacctgaccaccgccgaaaaacttaagagagaaacgccttggaagattactgatgccgagcttgaggccgtgaaggaaaaatcctaccggcaggtccggctcaatgaactcctccaagaacactcccgagccgcaaatctgatcgtgctgtccctgccagtcgctaggaagggtagcatcagcgacctgctgtacatggcgtggctggagatccttactaagaacctgccgccagtgctgctggtccggggaaatcataagaacgtcctgaccttttactcc

SEQ ID NO: 71615 - DNA, 3297 bp, Artificial Sequence
  derived and/or modified sequence
atgtccctgaacaactcttctaacgttttcctagactcagtgcctagtaataccaataggttccaagtgagtgttattaatgagaaccacgagagttctgccgctgctgacgacaatacagatccaccacactacgaagagacatccttcggcgacgaagctcagaagcggcttcgaatctcattccggcccgggaaccaggaatgttatgataatttcctacaaagcggtgagacagctaagactgacgccagctttcatgcctacgactcacacactaacacttactacctacagacgttcgggcacaatactatggacgcagttccgaaaattgaatactaccgcaatacgggctctatctccgggcccaaagttaaccgacccagccttctggagattcatgagcagttagccaagaatgttgccgttactccatccagtgctgaccgtgtggcaaatggtgacggtattcccggagacgaacaagcagagaacaaggaagacgaccaggcgggagtcgtcaaatttgggtgggttaagggcgtgctagtgcggtgcatgttgaatatttggggtgtgatgctgtttattcgcctcagctggatcgtgggcgaggctggaattggccttggcgtgattattatcgggctgtctgtcgtcgtcacgactctgacgggtatctcaatgtctgccatctgcacaaatggggttgtccgaggaggcggcgcctactatctgattagccgctccctgggcccagaattcggcggctcgatcgggctcatattcgccttcgctaatgccgtggctgtggcaatgtatgttgtgggcttcgcggaaacagtggtggatctcttgaaggagagcgattcaatgatggttgatccgaccaatgacatccgaatcatcggttccattaccgtggtgatcttgctgggtatatcagtggcaggcatggagtgggaggcaaaggcccaagtgatcctcctcgtcattctcctgatcgcgattgcaaacttctttatcggcacggtcattcccagtaacaatgagaaaaagagccggggcttcttcaactaccaggcatcaatttttgctgaaaactttggacctcgcttcacaaaaggtgaagggttttttagcgtcttcgctatcttttttccggccgctacaggcattcttgccggtgcgaacattagtggcgatttggaggaccctcaagacgccatcccgcggggtacgatgttggccatcttcattaccacagtggcgtatctgggagtcgcgatctgtgtcggtgcctgcgtggtccgcgacgccacaggcaatatgaacgacactataatatcaggcatgaactgtaatgggtccgctgcgtgcggcttaggctatgattttagtcgatgcagacatgagccatgccaatatggcctaatgaataactttcaggtgatgtcaatggttagtggatttggccccttgattaccgctggtatcttcagtgcgaccctgtcgtccgcccttgcctcactggtctctgcccccaaagtgttccaggctctctgtaaggataacatatacaaagcccttcagttttttgcaaaggggtatggcaaaaacaacgagccgttgaggggctatatcctgacattcctgatcgctatggcgttcatcttgattgccgagctcaacacgattgcacccataatcagcaattttttcctagcctcttacgcgctgatcaactttagttgttttcatgcatcttatgctaagtctccggggtggagacctgcctatggcatttataacatgtgggtgagtctgttcggcgccgtactgtgctgtgccgttatgtttgtcattaactggtgggcagccgtgattacctatgtcattgagttctttctgtacgtctatgtgacctgtaagaagccagatgtcaactggggaagtagcactcaagcactcagctatgtcagcgccttagacaacgccctggaactgactacagtggaggaccatgtcaagaactttaggcctcaatgcatcgtgctgactggagggcccatgacgaggcccgctctcttagatatcacgcacgcatttaccaaaaatagtgggctgtgcatctgctgcgaggtcttcgttggtccacggaaactctgcgtgaaggagatgaattcgggcatggcgaagaagcaagcatggctgattaaaaataaaatcaaagcattctatgccgccgtggctgctgactgtttcagggatggtgttagatctttgcttcaggcttccggcctaggaagaatgaagccaaataccctggtaattggctataagaagaactggcggaaggctccactgacggaaatagaaaattacgttggtataatccatgatgcattcgattttgagattggcgtcgtaatagttagaatatcacagggcttcgacattagtcaggttcttcaggtgcaggaggaactagagcggctcgaacaagaacgcctggccttggaagctacaattaaggacaatgagtgtgaagaggaatcgggaggcatcagggggctttttaagaaagcaggcaaacttaatataacaaaaacaacacctaaaaaagacgggagtattaacacttctcaaagtatgcatgtgggcgaattcaatcagaaactcgttgaggccagcacacagtttaagaagaagcaagagaagggcacaatagatgtatggtggctgttcgacgacggcgggcttacgctgctgatcccttatattctcactctaagaaagaaatggaaggactgcaaacttcgcatttacgtcggcggaaagattaatcggatcgaagaggagaaaatcgtgatggcttcacttctaagcaagttccgcatcaagttcgctgacatacatatcattggggacattaacatccggccaaataaggaatcttggaaggtgtttgaggagatgatcgagccctacaggcttcacgaatcatgcaaggatttgaccacggcggaaaagctcaaaagggagactccttggaaaataaccgacgccgagctcgaggccgttaaggagaagagctacagacaggttcggctgaatgaactgttgcaggagcattcccgcgctgctaacttgatcgtgctctcccttccggtagctcgtaagggaagcatatctgatctgctctacatggcatggttggagatcctgaccaagaacctcccgccagtgctcttagtgcgcggaaaccataagaatgtgcttaccttctactcg

SEQ ID NO: 71616 - DNA, 3297 bp, Artificial Sequence
  derived and/or modified sequence
atgtcgctaaataattcgtcgaatgtttttttagattcggtaccgtcgaatacgaatcgttttcaagtatcggtaataaatgaaaatcatgaatcgtcggcggcggcggatgataatacggatccgccgcattatgaagaaacgtcgtttggtgatgaagcgcaaaaacgattacgaatatcgtttcgaccgggtaatcaagaatgttatgataattttctacaatcgggtgaaacggcgaaaacggatgcgtcgtttcatgcgtatgattcgcatacgaatacgtattatttacaaacgtttggtcataatacgatggatgcggttccgaaaatagaatattatcgaaatacgggttcgatatcgggtccgaaagtaaatcgtccgtcgctattagaaatacatgaacaactagcgaaaaatgtagcggttacgccgtcgtcggcggatcgagtagcgaatggtgatggtataccgggtgatgaacaagcggaaaataaagaagatgatcaagcgggtgttgtaaaatttggttgggttaaaggtgttttagttcgttgtatgctaaatatatggggtgttatgctatttatacgtctatcgtggatagttggtgaagcgggtataggtttaggtgtaataataataggtttatcggtagtagttacgacgttaacgggtatatcgatgtcggcgatatgtacgaatggtgtagtacgtggtggtggtgcgtattatttaatatcgcgttcgctaggtccggaatttggtggttcgataggtttaatatttgcgtttgcgaatgcggtagcggtagcgatgtatgtagtaggttttgcggaaacggttgttgatttattaaaagaatcggattcgatgatggtagatccgacgaatgatatacgaataataggttcgataacggtagtaatattactaggtatatcggtagcgggtatggaatgggaagcgaaagcgcaagttatactactagtaatactattaatagcgatagcgaatttttttataggtacggtaataccgtcgaataatgaaaaaaaatcgcgtggtttttttaattatcaagcgtcgatatttgcggaaaattttggtccgcgatttacgaaaggtgaaggttttttttcggtatttgcgatattttttccggcggcgacgggtatattagcgggtgcgaatatatcgggtgatctagaagatccgcaagatgcgataccgcgtggtacgatgctagcgatatttataacgacggtagcgtatttaggtgttgcgatatgtgtaggtgcgtgtgtagtacgagatgcgacgggtaatatgaatgatacgataatatcgggtatgaattgtaatggttcggcggcgtgtggtttaggttatgatttttcgcgatgtcgtcatgaaccgtgtcaatatggtttaatgaataattttcaagttatgtcgatggtatcgggttttggtccgctaataacggcgggtatattttcggcgacgttatcgtcggcgttagcgtcgttagtatcggcgccgaaagtatttcaagcgttatgtaaagataatatatataaagcgctacaattttttgcgaaaggttatggtaaaaataatgaaccgttacgtggttatatactaacgtttctaatagcgatggcgtttatattaatagcggaattaaatacgatagcgccgataatatcgaatttttttctagcgtcgtatgcgctaataaatttttcgtgttttcatgcgtcgtatgcgaaatcgccgggttggcgtccggcgtatggtatatataatatgtgggtatcgctatttggtgcggtattatgttgtgcggtaatgtttgttataaattggtgggcggcggtaataacgtatgtaatagaattttttctatatgtatatgtaacgtgtaaaaaaccggatgttaattggggttcgtcgacgcaagcgttatcgtatgtatcggcgttagataatgcgttagaactaacgacggtagaagatcatgttaaaaattttcgtccgcaatgtatagttctaacgggtggtccgatgacgcgaccggcgttattagatataacgcatgcgtttacgaaaaattcgggtctatgtatatgttgtgaagtatttgtaggtccgcgtaaactatgtgtaaaagaaatgaattcgggtatggcgaaaaaacaagcgtggctaataaaaaataaaataaaagcgttttatgcggcggtagcggcggattgttttcgagatggtgtacgttcgctactacaagcgtcgggtttaggtcgaatgaaaccgaatacgctagtaataggttataaaaaaaattggcgtaaagcgccgctaacggaaatagaaaattatgtaggtataatacatgatgcgtttgattttgaaataggtgtagttatagttcgtatatcgcaaggttttgatatatcgcaagtactacaagttcaagaagaactagaacgtttagaacaagaacgactagcgttagaagcgacgataaaagataatgaatgtgaagaagaatcgggtggtatacgaggtttatttaaaaaagcgggtaaactaaatataacgaaaacgacgccgaaaaaagatggttcgataaatacgtcgcaatcgatgcatgttggtgaatttaatcaaaaattagttgaagcgtcgacgcaatttaaaaaaaaacaagaaaaaggtacgatagatgtttggtggctatttgatgatggtggtttaacgttactaataccgtatatattaacgctacgtaaaaaatggaaagattgtaaattacgaatatatgtaggtggtaaaataaatcgtatagaagaagaaaaaatagtaatggcgtcgttattatcgaaatttcgtataaaatttgcggatatacatataataggtgatataaatatacgaccgaataaagaatcgtggaaagtttttgaagaaatgatagaaccgtatcgtttacatgaatcgtgtaaagatctaacgacggcggaaaaattaaaacgtgaaacgccgtggaaaataacggatgcggaattagaagcggtaaaagaaaaatcgtatcgacaagttcgtctaaatgaattattacaagaacattcgcgagcggcgaatctaatagtactatcgctaccggttgcgcgaaaaggttcgatatcggatctattatatatggcgtggttagaaatattaacgaaaaatctaccgccggttttattagttcgtggtaatcataaaaatgtattaacgttttattcg

SEQ ID NO: 71617 - DNA, 4708 bp, Artificial Sequence
  derived and/or modified sequence
acatttcctcagaagaaggctccttggtgctttgaagaacatcctgaagattatatcggagacaatatatcaagaatctatttattgaatcatctagaacaaaagccaggagctccctaatggaagcacattagtgtttattttgatgaagaaatatatagattttttaaaacaaccacaaagtagatagctcagtaaaaaatcaattttggaagatgtcactgaacaactcttccaatgtatttctggattcagtgcccagtaataccaatcgctttcaagttagtgtcataaatgagaaccatgagagcagtgcagctgcagatgacaatactgacccaccacattatgaagaaacctcttttggggatgaagctcagaaaagactcagaatcagctttaggcctgggaatcaggagtgctatgacaatttcctccaaagtggagaaactgctaaaacagatgccagttttcacgcttatgattctcacacaaacacatactatctacaaacttttggccacaacaccatggatgccgttcccaagatagagtactatcgtaacaccggcagcatcagtgggcccaaggtcaaccgacccagcctgcttgagattcacgagcaactcgcaaagaatgtggcagtcaccccaagttcagctgacagagttgctaacggtgatgggatacctggagatgaacaagctgaaaataaggaagatgatcaagctggtgttgtgaagtttggatgggtgaaaggtgtgctggtaagatgcatgctgaacatctggggagtcatgctcttcattcgcctctcctggattgttggagaagctggaattggtcttggagtcatcatcattggcctaagtgtggtagtaacgacactcacaggtatttctatgtctgctatttgcacgaatggagtagtaagaggaggtggggcctactatcttatttccagaagtttagggcccgagttcggtgggtcaataggcctgatctttgcttttgctaatgcagtggctgttgctatgtatgtggtgggatttgctgagactgtagtagatcttcttaaggagagtgattcgatgatggtggatccaaccaatgacatccggattataggctccatcacagtggtgattcttctaggaatttcagtagctggaatggaatgggaggcaaaggcccaagtcattcttctggtcattcttctaattgctattgcaaacttcttcattggaactgtcattccatccaacaatgagaaaaagtccagaggtttctttaattaccaagcatcaatatttgcagaaaactttgggccacgcttcacaaagggtgaaggcttcttctctgtctttgccatttttttcccagcagctactgggattcttgctggtgccaatatctcaggagatttggaggatccccaagatgccatccccagaggaaccatgctggccattttcatcaccactgttgcctacttaggggttgcaatttgtgtaggggcctgtgtggtccgagatgccaccgggaacatgaatgacaccatcatttctgggatgaactgcaatggttcagcagcatgtgggttgggctatgacttctcaagatgtcgacatgaaccatgtcagtacgggctgatgaacaatttccaggtcatgagcatggtatcagggttcggccccctcatcactgcgggaatcttttctgcaacactctcctccgccctggcctcccttgtcagcgcacccaaagtgttccaggctctgtgcaaggacaacatctacaaagccctgcagttttttgcaaagggatatgggaaaaacaatgaacccctgagaggatatattctcacttttcttatagccatggcatttattcttattgcggaactgaacaccattgctcccatcatctccaactttttcctggcctcatatgcacttattaatttctcctgcttccatgcctcttatgccaaatctccaggatggagacctgcgtatggaatttacaacatgtgggtatctctttttggagctgttttgtgctgtgcagtcatgtttgtcatcaactggtgggcagctgtcatcacctatgtcattgaattcttcctttacgtctatgtgacttgtaagaagccagatgtgaactggggctcctccacacaggctctttcctacgtgagtgctttagacaatgctctggaattaaccacagtggaagaccacgtaaaaaacttcaggccccagtgcattgtcttaacagggggacccatgacaagacctgctctcctggacataactcacgcctttaccaagaacagtggcctttgcatctgctgtgaagtctttgtgggaccgcgcaaactgtgtgttaaggagatgaacagtggcatggcgaaaaaacaggcctggcttataaagaacaaaatcaaggctttttatgctgcagtggcggcagactgtttcagggatggtgtccgaagtcttcttcaggcctcaggcttaggaagaatgaaaccaaacactctggtgattggatataagaaaaactggaggaaagctcccttgacagagattgagaactacgtgggaatcatacatgatgcatttgattttgagattggcgtggttatagtcagaatcagccaaggatttgacatctctcaggttcttcaggtgcaagaggaattagagagattagaacaggagagactagcattggaagcgactatcaaagataatgagtgtgaagaggaaagtggaggcatccgaggcttgtttaaaaaagctggcaagttgaacattactaagacaacgcctaaaaaagatggcagcattaacacaagccagtcgatgcatgtgggagagttcaaccagaaactggtggaagccagcactcaatttaaaaagaaacaagaaaaaggcacaattgatgtttggtggttgtttgatgatggagggttaacacttcttatcccctatatcttaactctcagaaaaaaatggaaagactgtaaattaagaatctatgtgggagggaagatcaaccgcattgaagaagaaaaaattgtaatggcttcccttctgagcaaatttaggataaaatttgcagacatccatatcatcggtgacatcaacattaggccaaacaaagagagctggaaagtctttgaagagatgattgaaccatatcgtctccatgaaagctgcaaagatttaacaactgctgagaaattaaaaagagaaactccgtggaaaattacagatgcagaactggaagcagtcaaggaaaagagttaccgccaagttcgactgaatgaactcttacaggagcactccagagctgctaatctcattgtcctgagccttcccgtggcaagaaagggatccatatcggatttgttgtatatggcttggttggaaatcctcacaaagaacctcccacctgtcttactagttagaggaaatcacaaaaatgtcttgacattttactcttaaaacatgaaagattggaatacattttaacttaatgtaatgcataattaagaaacatgttccagtactttatgttgtaaatctgatctatggatatgcaaacctctggagaggatcctaccagattctacatacattgcataatttttatcagttaatgcgagcttttttttctcttctcagcttaaggggttgtcaaagccaatgttatccctagaaaaacatttttgtcactgctgttgataaacaagaaaatcaaggaaactcatgttggcttatgctcatgaaaaccaccaatgtgattgtaaacttctccagacaaacttaaccttttgtttcttaattttttgttttgagtgtttgcttctcagccctggtataggtctcagccccacagcaggatctcaataaatgcttattgacaggctggcatagtaaccacaggtggttatcaaaggaaaagaccaataggctggggaacataattatgcttggccccctcagaggcttatacctccaaagcagatttaaaaatcagtaactcaaaactttaagaagtagttgagtctacaaaatattcaaagcagttacctaaataaggttatttaatgtaacagattatatacttaaagtgatctgagcaatcattgataacatatggcttaaatttgctgctgcctgaaaagtatattaactagattagaagacaccatatactccaataaaatgaaatatattctattctcaatatataaactttaattgtactccctatcaaatattttgaaatttccatcacggcattactttgcatatttttttctaattaaatggttagtacagatgaaatctttatagatgactacttgaaaactaagtgctacaaattttcaaaccattattaagaaatatatcctgaatcatatatttagttactttctatagtgattgtatggatttaaaagaataattaaaatgtgaagttgaaaaacttgtaaaatttggaatatacagatactgatttttttcatttttgttagtatacctataatacataatcacattgacaaaccaatgaaaatattgattttctgatgaatggcttgatttttctccttgacatgttttgactgttcattctaactgaaaacatatatgggaaaatatgaacctgaaataaaagcactcaaattcaa

SEQ ID NO: 71618 - DNA, 3300 bp, Artificial Sequence
  derived and/or modified sequence
atgagcctgaacaacagcagcaacgtgttcctggacagcgtgcccagcaacaccaacagattccaggtgagcgtgatcaacgagaaccacgagagcagcgccgccgccgacgacaacaccgaccccccccactacgaggagaccagcttcggcgacgaggcccagaagagactgagaatcagcttcagacccggcaaccaggagtgctacgacaacttcctgcagagcggcgagaccgccaagaccgacgccagcttccacgcctacgacagccacaccaacacctactacctgcagaccttcggccacaacaccatggacgccgtgcccaagatcgagtactacagaaacaccggcagcatcagcggccccaaggtgaacagacccagcctgctggagatccacgagcagctggccaagaacgtggccgtgacccccagcagcgccgacagagtggccaacggcgacggcatccccggcgacgagcaggccgagaacaaggaggacgaccaggccggcgtggtgaagttcggctgggtgaagggcgtgctggtgagatgcatgctgaacatctggggcgtgatgctgttcatcagactgagctggatcgtgggcgaggccggcatcggcctgggcgtgatcatcatcggcctgagcgtggtggtgaccaccctgaccggcatcagcatgagcgccatctgcaccaacggcgtggtgagaggcggcggcgcctactacctgatcagcagaagcctgggccccgagttcggcggcagcatcggcctgatcttcgccttcgccaacgccgtggccgtggccatgtacgtggtgggcttcgccgagaccgtggtggacctgctgaaggagagcgacagcatgatggtggaccccaccaacgacatcagaatcatcggcagcatcaccgtggtgatcctgctgggcatcagcgtggccggcatggagtgggaggccaaggcccaggtgatcctgctggtgatcctgctgatcgccatcgccaacttcttcatcggcaccgtgatccccagcaacaacgagaagaagagcagaggcttcttcaactaccaggccagcatcttcgccgagaacttcggccccagattcaccaagggcgagggcttcttcagcgtgttcgccatcttcttccccgccgccaccggcatcctggccggcgccaacatcagcggcgacctggaggacccccaggacgccatccccagaggcaccatgctggccatcttcatcaccaccgtggcctacctgggcgtggccatctgcgtgggcgcctgcgtggtgagagacgccaccggcaacatgaacgacaccatcatcagcggcatgaactgcaacggcagcgccgcctgcggcctgggctacgacttcagcagatgcagacacgagccctgccagtacggcctgatgaacaacttccaggtgatgagcatggtgagcggcttcggccccctgatcaccgccggcatcttcagcgccaccctgagcagcgccctggccagcctggtgagcgcccccaaggtgttccaggccctgtgcaaggacaacatctacaaggccctgcagttcttcgccaagggctacggcaagaacaacgagcccctgagaggctacatcctgaccttcctgatcgccatggccttcatcctgatcgccgagctgaacaccatcgcccccatcatcagcaacttcttcctggccagctacgccctgatcaacttcagctgcttccacgccagctacgccaagagccccggctggagacccgcctacggcatctacaacatgtgggtgagcctgttcggcgccgtgctgtgctgcgccgtgatgttcgtgatcaactggtgggccgccgtgatcacctacgtgatcgagttcttcctgtacgtgtacgtgacctgcaagaagcccgacgtgaactggggcagcagcacccaggccctgagctacgtgagcgccctggacaacgccctggagctgaccaccgtggaggaccacgtgaagaacttcagaccccagtgcatcgtgctgaccggcggccccatgaccagacccgccctgctggacatcacccacgccttcaccaagaacagcggcctgtgcatctgctgcgaggtgttcgtgggccccagaaagctgtgcgtgaaggagatgaacagcggcatggccaagaagcaggcctggctgatcaagaacaagatcaaggccttctacgccgccgtggccgccgactgcttcagagacggcgtgagaagcctgctgcaggccagcggcctgggcagaatgaagcccaacaccctggtgatcggctacaagaagaactggagaaaggcccccctgaccgagatcgagaactacgtgggcatcatccacgacgccttcgacttcgagatcggcgtggtgatcgtgagaatcagccagggcttcgacatcagccaggtgctgcaggtgcaggaggagctggagagactggagcaggagagactggccctggaggccaccatcaaggacaacgagtgcgaggaggagagcggcggcatcagaggcctgttcaagaaggccggcaagctgaacatcaccaagaccacccccaagaaggacggcagcatcaacaccagccagagcatgcacgtgggcgagttcaaccagaagctggtggaggccagcacccagttcaagaagaagcaggagaagggcaccatcgacgtgtggtggctgttcgacgacggcggcctgaccctgctgatcccctacatcctgaccctgagaaagaagtggaaggactgcaagctgagaatctacgtgggcggcaagatcaacagaatcgaggaggagaagatcgtgatggccagcctgctgagcaagttcagaatcaagttcgccgacatccacatcatcggcgacatcaacatcagacccaacaaggagagctggaaggtgttcgaggagatgatcgagccctacagactgcacgagagctgcaaggacctgaccaccgccgagaagctgaagagagagaccccctggaagatcaccgacgccgagctggaggccgtgaaggagaagagctacagacaggtgagactgaacgagctgctgcaggagcacagcagagccgccaacctgatcgtgctgagcctgcccgtggccagaaagggcagcatcagcgacctgctgtacatggcctggctggagatcctgaccaagaacctgccccccgtgctgctggtgagaggcaaccacaagaacgtgctgaccttctacagctag

SEQ ID NO: 71619 - protein, 1001 aa, Artificial Sequence
  derived and/or modified sequence
MVFSVRQCGHVGRTEEVLLTFKIFLVIICLHVVLVTSLEEDTDNSSLSPPPDEETGACSDVTLSLLPSNETEKTKITIVKTFNASGVKPQRNICNLSSICNDSAFFRGEIMFQYDKESTVPQNQHITNGTLTGVLSLSELKRSELNKTLQTLSETYFIMCATAEAQSTLNCTFTIKLNNTMNACAVIAALERVKIRPMEHCCCSVRIPCPSSPEELEKLQCDLQDPIVCLADHPRGPPFSSSQSIPVVPRATVLSQVPKATSFAEPPDYSPVTHNVPSPIGEIQPLSPQPSAPIASSPAIDMPPQSETISSPMPQTHVSGTPPPVKASFSSPTVSAPANVNTTSAPPVQTDIVNTSSISDLENQVLQMEKALSLGSLEPNLAGEMINQVSRLLHSPPDMLAPLAQRLLKVVDDIGLQLNFSNTTISLTSPSLALAVIRVNASSFNTTTFVAQDPANLQVSLETQAPENSIGTITLPSSLMNNLPAHDMELASRVQFNFFETPALFQDPSLENLSLISYVISSSVANLTVRNLTRNVTVTLKHINPSQDELTVRCVFWDLGRNGGRGGWSDNGCSVKDRRLNETICTCSHLTSFGVLLDLSRTSVLPAQMMALTFITYIGCGLSSIFLSVTLVTYIAFEKIRRDYPSKILIQLCAALLLLNLVFLLDSWIALYKMQGLCISVAVFLHYFLLVSFTWMGLEAFHMYLALVKVFNTYIRKYILKFCIVGWGVPAVVVTIILTISPDNYGLGSYGKFPNGSPDDFCWINNNAVFYITVVGYFCVIFLLNVSMFIVVLVQLCRIKKKKQLGAQRKTSIQDLRSIAGLTFLLGITWGFAFFAWGPVNVTFMYLFAIFNTLQGFFIFIFYCVAKENVRKQWRRYLCCGKLRLAENSDWSKTATNGLKKQTVNQGVSSSSNSLQSSSNSTNSTTLLVNNDCSVHASGNGNASTERNGVSFSVQNGDVCLHDFTGKQHMFNEKEDSCNGKGRMALRRTSKRGSLHFIEQM

SEQ ID NO: 71620 - protein, 1001 aa, Artificial Sequence
  derived and/or modified sequence
MVFSVRQCGHVGRTEEVLLTFKIFLVIICLHVVLVTSLEEDTDNSSLSPPPEVETTSLNDVTLSLLPSNETEKTKITIVKTFNASGVKPQRNICNLSSICNDSAFFRGEIMFQYDKESTVPQNQHITNGTLTGVLSLSELKRSELNKTLQTLSETYFIMCATAEAQSTLNCTFTIKLNNTMNACAVIAALERVKIRPMEHCCCSVRIPCPSSPEELEKLQCDLQDPIVCLADHPRGPPFSSSQSIPVVPRATVLSQVPKATSFAEPPDYSPVTHNVPSPIGEIQPLSPQPSAPIASSPAIDMPPQSETISSPMPQTHVSGTPPPVKASFSSPTVSAPANVNTTSAPPVQTDIVNTSSISDLENQVLQMEKALSLGSLEPNLAGEMINQVSRLLHSPPDMLAPLAQRLLKVVDDIGLQLNFSNTTISLTSPSLALAVIRVNASSFNTTTFVAQDPANLQVSLETQAPENSIGTITLPSSLMNNLPAHDMELASRVQFNFFETPALFQDPSLENLSLISYVISSSVANLTVRNLTRNVTVTLKHINPSQDELTVRCVFWDLGRNGGRGGWSDNGCSVKDRRLNETICTCSHLTSFGVLLDLSRTSVLPAQMMALTFITYIGCGLSSIFLSVTLVTYIAFEKIRRDYPSKILIQLCAALLLLNLVFLLDSWIALYKMQGLCISVAVFLHYFLLVSFTWMGLEAFHMYLALVKVFNTYIRKYILKFCIVGWGVPAVVVTIILTISPDNYGLGSYGKFPNGSPDDFCWINNNAVFYITVVGYFCVIFLLNVSMFIVVLVQLCRIKKKKQLGAQRKTSIQDLRSIAGLTFLLGITWGFAFFAWGPVNVTFMYLFAIFNTLQGFFIFIFYCVAKENVRKQWRRYLCCGKLRLAENSDWSKTATNGLKKQTVNQGVSSSSNSLQSSSNSTNSTTLLVNNDCSVHASGNGNASTERNGVSFSVQNGDVCLHDFTGKQHMFNEKEDSCNGKGRMALRRTSKRGSLHFIEQM

SEQ ID NO: 71621 - DNA, 3006 bp, Artificial Sequence
  derived and/or modified sequence
atggtgttttctgtcaggcaatgtggccatgtcggacggacagaagaagtcctactcacattcaaaatatttttagtgatcatttgtctgcatgtcgtcctggtcacctcactcgaggaggacacagacaattccagtctctctccgccgcccgacgaggagactggtgcgtgttccgacgtgacactatcactgctccccagcaatgagacagagaaaacgaagataactatcgtaaagaccttcaatgcttccggcgtgaagcctcagcggaatatatgtaatttatcaagtatatgcaacgatagcgctttcttccggggcgaaattatgtttcagtacgataaggaatccactgtaccccagaatcagcacatcactaacggaaccttaactggtgtccttagcctcagcgaactgaagaggtcagaacttaataaaacactgcaaacgctgtccgaaacgtactttattatgtgcgctaccgctgaagcgcagtctactctgaattgcacctttaccattaaactgaataataccatgaacgcatgcgccgttatcgctgccctggagagagtgaaaattaggcccatggagcactgctgctgtagtgtcagaattccttgcccttctagccctgaagaactggagaagttgcagtgtgacctccaggatcccatcgtctgcctggcagaccaccctcgcggaccgccattttccagcagccagtccattcccgtagtcccaagagcgactgttctgagccaggtgccaaaggccacaagcttcgctgagcccccagactatagccctgtcactcataatgtaccatccccaatcggtgagatacagccactttctccacagcctagtgcacccattgcatccagtcccgctatcgacatgcccccccagagcgaaaccatctcgtcccccatgcctcagacacacgtttcaggaacccccccaccagtgaaggctagttttagttctcctaccgtgtccgcacccgccaatgttaataccacatcagcccctcccgttcagaccgacattgtaaataccagttctattagtgacctggaaaatcaggtactccagatggagaaggctttaagtctcggatcactggagcccaatctggccggcgaaatgatcaaccaggtttcacggctcttgcattctccaccggacatgctagccccactggcacagagactactcaaggtcgtggatgatattggattacagctaaacttcagtaacaccaccataagcttgacatccccttcacttgcactggccgtgattcgcgtaaacgcttcctccttcaataccaccacatttgtagcacaagaccccgccaacttgcaggtaagcttggagacacaagcgcctgagaactctattgggacaattaccctcccctctagtctaatgaataacttgcctgcccacgatatggagttggcctcaagggtccagtttaacttttttgagactccagctcttttccaggatcctagcttagagaatctgagtcttatcagttatgtcatctcatcgtcagttgcaaatttgactgttcggaatttaacccggaacgtgaccgtgactctgaagcacatcaacccgtcgcaggacgaattaactgttaggtgtgtgttctgggaccttggcagaaacggagggagaggcgggtggagtgacaatggctgcagtgttaaagatagaaggctgaacgagactatctgtacctgctcccacctgacaagcttcggggtgctcctggacctgtcccgaactagcgttctccctgcacagatgatggctctgacgtttataacatacataggctgtggtcttagttccatcttcctgtccgtgacgttggtgacttatatcgccttcgagaaaatccggcgagattacccatctaagattttaatccagttatgcgccgcgttgctgttgctcaatctggttttcctgttagactcctggattgctctgtataagatgcagggtctgtgcatcagcgtggccgtgttcctgcattactttttgctcgtgtcattcacttggatgggactggaggcatttcacatgtacctagcccttgtgaaagtgtttaacacttacatccgcaaatacatccttaagttttgcatcgtgggatggggagtgcctgctgtcgtcgtaacgatcattctcacgatctctccggacaattatggcctgggttcctatggcaagtttccaaatggtagccccgacgatttttgttggattaataacaacgcagtgttttacattaccgtagtgggatatttttgcgtgattttcctgcttaacgtgtctatgttcattgtagtgcttgtacagctctgccgcattaagaagaaaaagcagctgggcgcacagaggaagaccagtatccaggatcttcggtcaatcgccggtttaacatttttgctcggtataacttggggtttcgccttcttcgcatggggaccagtgaacgtgacctttatgtatctctttgctatattcaacactctgcaaggcttctttatattcattttttactgcgtggcgaaagagaacgtgcggaaacagtggcgacgctatctctgttgtggaaaactacgattggccgaaaattctgactggagtaaaactgctacgaatggactgaagaagcagaccgtcaatcagggcgtatcctcctcatctaacagcctccagtcatcttctaatagcactaactcaactacccttttggtgaataacgactgttctgtgcatgccagcggcaacggcaacgcgtccactgagcgtaatggggtctctttcagtgtacaaaatggggatgtctgtcttcacgatttcacagggaagcagcatatgtttaacgaaaaagaggacagctgtaacggcaaaggcaggatggcactacggcgcacatccaaacgcggatcccttcatttcattgaacagatgtag

SEQ ID NO: 71622 - DNA, 3006 bp, Artificial Sequence
  derived and/or modified sequence
atggtatttagcgttcgacagtgtggccatgtcggacgcacggaggaagttttgctgaccttcaagattttcttagtcattatatgcctccacgtcgtgttggtgacctcactcgaggaagacaccgacaactcatccttatcgccaccccctgaggtggagactacaagcctgaacgatgtgacgctctcactgttaccttctaacgagacggaaaagacgaagatcaccatcgtaaagacatttaacgcctctggcgtcaagccacagcggaatatctgcaaccttagcagtatttgtaatgacagtgctttttttaggggcgagattatgtttcagtacgataaagagagtaccgtccctcagaaccaacatattactaatgggaccctgacaggagtactgtctctctctgaattgaagcggtctgagctgaacaagactttacagactctgtcagaaacatacttcatcatgtgtgctaccgctgaagcccagtccacattaaactgcacttttacaataaagctaaataataccatgaatgcctgcgccgtaatcgccgccttggaacgggttaagattcgccctatggagcattgttgttgtagtgttcggattccctgtccatcctcccccgaggaattagaaaagctccagtgcgacttgcaggatcctatagtctgcctggcagaccaccctcgcggtccacccttctcttccagccagtcaataccagtcgttccgcgggcaacagtcctgtcccaggtgccaaaggctactagcttcgcggagcctcctgactacagcccagtaacccacaatgtcccatcccccattggcgaaatacagccactatctcctcaacccagcgcaccgatagcgagcagtcctgctatcgatatgcctccacaatcagaaaccatctcttctcctatgcctcaaacgcacgtgtccggcacaccaccacccgtgaaggccagcttctcctctccaactgtgagcgcccctgccaatgtgaataccacatcagcaccacctgtgcaaaccgacatcgtcaatacttctagcatcagcgatttggaaaatcaagtactacagatggaaaaggcgctgtctttgggcagcctggaacccaacctcgccggcgaaatgattaaccaggtgtctcggctcctccattcacctccagatatgctcgctcccttggcccaaaggttgcttaaagttgttgacgatatcggactgcagctaaatttctccaataccacaatttccttgacaagccccagcctcgccttggcggtgattcgcgttaacgccagtagcttcaacaccacaacatttgtggcccaggaccctgccaatctgcaagtctcattggaaacacaggcacctgagaattctatcgggactatcaccctccccagctcgctcatgaataatttgcccgctcacgacatggagctggcctctcgggtccagtttaatttttttgaaaccccggcactctttcaggaccccagccttgaaaacctgagtctgatctcatatgtcataagctcttctgtggccaatctgaccgtccggaatctgacaagaaatgttacagtgaccttaaaacatatcaatccctcacaggatgagctgacagttcgctgtgttttttgggaccttgggcggaacggggggagaggaggctggtcggacaatggctgttccgtgaaggaccggagactcaatgagactatctgcacttgctcccatctgacctccttcggagtgttactggatctgagcagaaccagtgtcttacctgcacagatgatggccctgacatttattacctatatcggctgtggcctctcctcgatcttcctgagcgttacactggtgacatacattgcgttcgaaaagattcggcgggattacccatcaaagatacttatccagctgtgtgctgctctgcttctgcttaatttggtcttcctgcttgacagctggatagcactttacaagatgcaggggctctgcatttctgtggccgtgtttctccactacttcctgctggtgtcattcacctggatggggctggaagctttccatatgtacctggcacttgtgaaggtgtttaacacatacatccggaaatatattctaaagttttgtatcgtcggttggggcgtgcctgcggtggtggtgacaatcattttgaccatctctcctgataattatggattggggtcctatggaaagttcccgaatgggtcacctgatgatttctgttggataaacaacaacgctgtgttctacatcacagttgtaggctatttctgtgtcatcttcctcctgaacgtatccatgttcattgtggtgctagtgcagttgtgccgcatcaagaagaaaaagcagctgggcgcacaacggaaaacttccattcaagatctccgctctatcgccggactgaccttcctgcttggcattacttggggttttgctttctttgcctggggcccggttaatgtaaccttcatgtacctctttgcgatatttaacacccttcagggtttttttatcttcattttttattgcgttgcaaaggagaatgtgcgcaaacagtggagaaggtatctctgttgcggcaagctccgcctggcagagaacagcgattggtctaagactgcaacgaacggtctcaagaagcagacagtcaatcagggcgtgtctagctcatcgaattcgctgcagtcttcatctaattcaacgaattctaccaccctgctggtaaataatgactgttccgtgcatgcttctgggaacggcaacgcctccactgagcgtaatggagttagcttttctgtgcagaatggcgatgtttgcctgcatgactttacaggaaaacagcatatgttcaacgagaaagaggatagctgtaatgggaagggtcgaatggcactcagacggacgtccaagcgcggctctctgcacttcattgagcaaatgtag

SEQ ID NO: 71623 - DNA, 3006 bp, Artificial Sequence
  derived and/or modified sequence
atggtgttttctgtgcggcagtgtggccacgtgggccgcacagaggaggtgctgctgaccttcaagatcttcctggtgatcatctgcctgcacgtggtgctggtgaccagcctggaggaggacacagacaacagcagcctgagccccccaccagatgaggagactggagcctgcagtgatgtgaccctgagcctgctgcccagcaatgaaacagagaagaccaagatcaccatcgtgaagaccttcaatgccagcggcgtgaagccccagaggaacatctgcaacctgagcagcatctgcaatgattctgccttcttccggggggagatcatgttccagtatgacaaggagagcacagtgccccagaaccagcacatcaccaacggcaccctgactggagtgctgagcctgtctgagctgaagaggtctgagctgaacaagaccctgcagaccctgtctgagacctacttcatcatgtgtgccacagctgaggcccagagcaccctgaactgcaccttcaccatcaagctgaacaacaccatgaatgcctgtgctgtgattgctgccctggagcgggtgaagatccggcccatggagcactgctgctgcagcgtgcgcatcccctgccccagcagccctgaggagctggagaagctgcagtgtgacctgcaggaccccatcgtgtgcctggccgaccacccccggggcccccccttcagcagcagccagagcatccctgtggtgccccgggccaccgtgctgagccaggtgcccaaggccaccagctttgctgagcccccagactacagccctgtgacccacaacgtgcccagccccatcggggagatccagcccctgagcccccagcccagcgcccccatcgccagcagccctgccatcgacatgccaccccagagcgagaccatcagcagccccatgccccagacccacgtgtctggcaccccacctcctgtgaaggccagcttcagcagccccaccgtgtctgccccagccaacgtgaacaccaccagcgcccctcctgtgcagacagacatcgtgaacaccagcagcatcagtgacctggagaaccaggtgctgcagatggagaaggccctgagcctgggcagcctggagcccaacctggccggggagatgatcaaccaggtgtcccggctgctgcacagccccccagacatgctggcccccctggcccagaggctgctgaaggtggtggatgacatcggcctgcagctgaacttcagcaacaccaccatcagcctgaccagccccagcctggccctggccgtcatccgggtgaatgccagcagcttcaacaccaccacctttgtggcccaggaccctgccaacctgcaggtgtccctggagacccaggccccagaaaattccatcggcaccatcaccctgcccagcagcctgatgaacaacctgcctgcccatgacatggagctggccagccgggtgcagttcaacttctttgagaccccagccctcttccaggaccccagcctggagaacctgagcctcatctcctatgtgatcagcagctctgtggccaacctgactgtgaggaacctgaccagaaatgtgacagtgaccctgaagcacatcaaccccagccaggatgagctgactgtgcgctgtgtgttctgggacctgggcagaaatggaggccggggcggctggagcgacaatggctgcagcgtgaaggaccggcggctgaatgagaccatctgcacctgcagccacctgaccagctttggagtgctgctggacctgagcaggacctctgtgctgcctgcccagatgatggccctgaccttcatcacctacatcggctgcggcctgagcagcatcttcctgtctgtgaccctggtgacctacatcgcctttgagaagatcagaagagactaccccagcaagatcctgatccagctgtgtgccgccctgctgctgctgaacctggtgttcctgctggacagctggatcgccctgtacaagatgcagggcctgtgcatctctgtggccgtgttcctgcactacttcctgctggtgtccttcacctggatgggcctggaggccttccacatgtacctggccctggtgaaggtgttcaacacctacatcaggaagtacatcctgaagttctgcatcgtgggctggggcgtgcctgctgtggtggtgaccatcatcctgaccatcagcccagacaactacggcctgggcagctatggcaagttccccaacggcagcccagatgacttctgctggatcaacaacaatgctgtgttctacatcaccgtggtgggctacttctgtgtgatcttcctgctgaatgtgtccatgttcatcgtggtgctggtgcagctgtgccgcatcaagaagaagaagcagctgggcgcccagaggaagaccagcatccaggacctgcggagcattgctggcctgaccttcctgctgggcatcacctggggctttgccttctttgcctggggccctgtgaatgtgaccttcatgtacctgtttgccatcttcaacaccctgcagggcttcttcatcttcatcttctactgtgtggccaaggaaaatgtgaggaagcagtggaggcgctacctgtgctgcggcaagctgcggctggctgaaaattctgactggagcaagacagccaccaacggcctgaagaagcagacagtgaaccagggcgtgagcagcagcagcaacagcctgcagagcagcagcaacagcaccaacagcaccaccctgctggtgaacaatgactgcagcgtgcacgccagcggaaatggaaatgccagcacagaaagaaatggagtgtccttctctgtgcagaatggagatgtgtgcctgcatgacttcaccgggaagcagcacatgtttaatgagaaggaggacagctgcaatggaaaaggaaggatggccctgcggaggaccagcaagaggggcagcctgcacttcatcgagcagatgtag

SEQ ID NO: 71624 - DNA, 3006 bp, Artificial Sequence
  derived and/or modified sequence
atggtgttttctgtgcggcagtgtggccacgtgggccgcacagaggaggtgctgctgaccttcaagatcttcctggtgatcatctgcctgcacgtggtgctggtgaccagcctggaggaggacacagacaacagcagcctgagccccccacctgaggtggagaccaccagcctgaatgatgtgaccctgagcctgctgcccagcaatgaaacagagaagaccaagatcaccatcgtgaagaccttcaatgccagcggcgtgaagccccagaggaacatctgcaacctgagcagcatctgcaatgattctgccttcttccggggggagatcatgttccagtatgacaaggagagcacagtgccccagaaccagcacatcaccaacggcaccctgactggagtgctgagcctgtctgagctgaagaggtctgagctgaacaagaccctgcagaccctgtctgagacctacttcatcatgtgtgccacagctgaggcccagagcaccctgaactgcaccttcaccatcaagctgaacaacaccatgaatgcctgtgctgtgattgctgccctggagcgggtgaagatccggcccatggagcactgctgctgcagcgtgcgcatcccctgccccagcagccctgaggagctggagaagctgcagtgtgacctgcaggaccccatcgtgtgcctggccgaccacccccggggcccccccttcagcagcagccagagcatccctgtggtgccccgggccaccgtgctgagccaggtgcccaaggccaccagctttgctgagcccccagactacagccctgtgacccacaacgtgcccagccccatcggggagatccagcccctgagcccccagcccagcgcccccatcgccagcagccctgccatcgacatgccaccccagagcgagaccatcagcagccccatgccccagacccacgtgtctggcaccccacctcctgtgaaggccagcttcagcagccccaccgtgtctgccccagccaacgtgaacaccaccagcgcccctcctgtgcagacagacatcgtgaacaccagcagcatcagtgacctggagaaccaggtgctgcagatggagaaggccctgagcctgggcagcctggagcccaacctggccggggagatgatcaaccaggtgtcccggctgctgcacagccccccagacatgctggcccccctggcccagaggctgctgaaggtggtggatgacatcggcctgcagctgaacttcagcaacaccaccatcagcctgaccagccccagcctggccctggccgtcatccgggtgaatgccagcagcttcaacaccaccacctttgtggcccaggaccctgccaacctgcaggtgtccctggagacccaggccccagaaaattccatcggcaccatcaccctgcccagcagcctgatgaacaacctgcctgcccatgacatggagctggccagccgggtgcagttcaacttctttgagaccccagccctcttccaggaccccagcctggagaacctgagcctcatctcctatgtgatcagcagctctgtggccaacctgactgtgaggaacctgaccagaaatgtgacagtgaccctgaagcacatcaaccccagccaggatgagctgactgtgcgctgtgtgttctgggacctgggcagaaatggaggccggggcggctggagcgacaatggctgcagcgtgaaggaccggcggctgaatgagaccatctgcacctgcagccacctgaccagctttggagtgctgctggacctgagcaggacctctgtgctgcctgcccagatgatggccctgaccttcatcacctacatcggctgcggcctgagcagcatcttcctgtctgtgaccctggtgacctacatcgcctttgagaagatcagaagagactaccccagcaagatcctgatccagctgtgtgccgccctgctgctgctgaacctggtgttcctgctggacagctggatcgccctgtacaagatgcagggcctgtgcatctctgtggccgtgttcctgcactacttcctgctggtgtccttcacctggatgggcctggaggccttccacatgtacctggccctggtgaaggtgttcaacacctacatcaggaagtacatcctgaagttctgcatcgtgggctggggcgtgcctgctgtggtggtgaccatcatcctgaccatcagcccagacaactacggcctgggcagctatggcaagttccccaacggcagcccagatgacttctgctggatcaacaacaatgctgtgttctacatcaccgtggtgggctacttctgtgtgatcttcctgctgaatgtgtccatgttcatcgtggtgctggtgcagctgtgccgcatcaagaagaagaagcagctgggcgcccagaggaagaccagcatccaggacctgcggagcattgctggcctgaccttcctgctgggcatcacctggggctttgccttctttgcctggggccctgtgaatgtgaccttcatgtacctgtttgccatcttcaacaccctgcagggcttcttcatcttcatcttctactgtgtggccaaggaaaatgtgaggaagcagtggaggcgctacctgtgctgcggcaagctgcggctggctgaaaattctgactggagcaagacagccaccaacggcctgaagaagcagacagtgaaccagggcgtgagcagcagcagcaacagcctgcagagcagcagcaacagcaccaacagcaccaccctgctggtgaacaatgactgcagcgtgcacgccagcggaaatggaaatgccagcacagaaagaaatggagtgtccttctctgtgcagaatggagatgtgtgcctgcatgacttcaccgggaagcagcacatgtttaatgagaaggaggacagctgcaatggaaaaggaaggatggccctgcggaggaccagcaagaggggcagcctgcacttcatcgagcagatgtag

SEQ ID NO: 71625 - DNA, 3006 bp, Artificial Sequence
  derived and/or modified sequence
atggtgttcagcgtgcggcagtgcggccacgtgggccggaccgaggaggtcttgctcacattcaaaatattcttagtgatcatttgccttcatgtggtactggtgaccagcctagaggaggacactgacaattcctccctgagtccacctcccgatgaagaaaccggggcttgttctgacgtcactctgtcactgcttcctagcaacgaaacggaaaaaaccaagattaccatcgttaaaacctttaacgccagtggggttaaacctcaacgtaatatatgcaacttatcatcaatttgcaacgacagcgccttctttagaggggagatcatgtttcagtacgataaggagagcacggtgccacagaaccagcatattacaaacgggacactaacaggggtcttgtccctttccgaattaaagcgctctgaattgaacaagaccctgcaaaccctgagcgagacatattttataatgtgtgctacagctgaggcgcaatccacactcaattgtacgttcaccatcaaattgaataacactatgaacgcatgcgctgttatagcagccctggaacgggtgaagatccggcccatggaacactgctgttgctctgttagaattccatgcccctcaagtcctgaggagctggaaaagctccaatgcgatctccaggatcccatcgtgtgcctcgcagatcacccccgtggtcctccgtttagcagcagccagagcatacccgtggttccaagagccacagtcctgtcacaggtgccaaaggctacgagctttgccgaacctcctgattacagcccagtcacacataatgtcccctcccccattggcgagattcagcccctttccccgcagccaagcgcccctatagcgagcagtcctgcaatcgatatgcccccgcagtctgagactatttcatcacctatgcctcagacccatgtttctggaacccccccccctgtcaaagccagcttttcctcccctacagtctcggcccccgcaaatgtgaataccaccagcgctccccccgtgcagaccgatattgtgaacacctcaagcatttccgacttggagaatcaagtactacagatggaaaaggcccttagcttgggtagcctcgaaccgaatttagccggcgaaatgattaaccaagtgagccggctgctacactcaccacctgatatgctggccccgcttgcacagaggctgttgaaagttgtcgatgacataggccttcaactcaacttttcaaatacaaccataagtctgacctcaccctctttagctttggccgtaattagagtgaatgcctcttcctttaacactacaacctttgtagcgcaggatcccgctaaccttcaggtctcattagagacacaggctcccgagaactccattgggactattacactgccaagcagcctcatgaacaatctgcccgcccacgatatggaactggcatccagagttcagtttaattttttcgagacccctgcgcttttccaggatcccagtttagaaaatttatccctgatcagctacgtgattagttcctctgtcgccaatcttaccgtgaggaacctgacaagaaacgtgacagttactctaaagcatatcaacccttcgcaggatgaacttacagtcaggtgtgtgttctgggatctgggtcgaaacggtggacgcggtggctggtcagataacggctgttcggtgaaagatagaaggctcaacgaaactatctgtacttgctcccatttgacatcctttggagttcttctcgatctgtctagaacttctgtacttcccgcccagatgatggctctgacattcatcacctatatcggctgcgggctctcttccatcttcctatctgtgacactggtcacctacatcgcgttcgaaaagattcgtcgcgattacccttccaaaatcctcatccagctgtgtgctgccctgctgctcttaaacctcgttttcttgttggatagctggattgccctgtataagatgcagggcctctgtatatctgtggccgtgttcctccactattttctgctcgtgagctttacatggatgggtttggaagcatttcacatgtacctggctctggtcaaagtcttcaatacatatatccggaaatatattctgaaattctgtatcgtgggttggggggtgcccgctgtggtggtcacaataatcctgaccatcagtcccgacaactatgggttgggttcatatggcaagtttccaaacggatctccagatgatttttgttggatcaataacaacgctgtgttctacatcacagtcgtgggttatttctgtgtgatctttcttttaaacgtgagcatgtttatagtggtgctggtccagctctgtaggatcaagaagaagaaacagctcggcgctcagagaaagacctccatccaggacctgcggagcattgctggcttgacgttcctgctcggaatcacatggggtttcgcattcttcgcctggggcccagtcaacgtgacttttatgtacctgtttgccatattcaacacactacagggattttttatattcattttctactgcgtggctaaagaaaacgtccggaaacagtggagaaggtatctgtgctgcgggaaactccgtttagccgaaaactctgattggtccaaaacagctactaacggactgaagaagcaaacagtcaatcagggtgtgtcctcaagttcaaattcactgcaaagttcatctaactcaacaaattcgacgacgctcctggtaaataatgattgttccgtgcatgcgagtggcaacggaaacgcatccacagagagaaacggagtaagcttctctgtgcaaaacggagacgtctgcctgcacgactttaccgggaagcaacacatgttcaatgaaaaggaagattcttgcaacggcaaagggagaatggccttgaggaggaccagcaagcgcggttccctccactttattgagcagatgtag

SEQ ID NO: 71626 - DNA, 3006 bp, Artificial Sequence
  derived and/or modified sequence
atggtgttcagcgtgcggcagtgcggccacgtgggccggaccgaggaggtgctcttaacgtttaaaattttccttgttatcatctgcctgcacgtggtgttggtgacttctttggaagaggacaccgacaatagcagcttgtcccctccccccgaggttgaaactacaagcctgaatgatgttactctgtccttgttaccatccaacgagactgaaaagaccaaaatcacaatcgtcaagacctttaatgccagtggagtgaagcctcaacgcaacatctgcaacctgagctctatctgtaacgattcggcttttttcagaggagaaataatgttccagtacgataaggagtcgacagtgccacagaaccagcatattactaatggaacactgacgggggtgcttagcctgtctgagctaaaacggtctgagctaaataagaccctgcaaaccttatcggagacatacttcattatgtgcgccactgcggaggcgcagtccacattaaactgtacgttcactattaagttgaacaacactatgaacgcctgtgctgtgatagcagcattggagagggtcaaaattaggcccatggagcattgctgctgttccgtgagaatcccctgtcctagtagtcccgaagaacttgaaaagcttcagtgcgaccttcaggaccccatcgtctgcctggcagaccatcctcgggggcctcctttctcctcgtctcaaagcatacctgtggtgccacgggccactgtgctgtctcaggttccgaaagcgacctcattcgcagagcccccagattattcccctgtgacccataatgtgccttcccctatcggggaaattcagccacttagccctcagccttctgcaccgatcgcctcatctcctgctattgatatgccgcctcagtccgaaacaatttcatcacctatgccccagacccatgtttcaggaactcccccgcccgtaaaagcctctttcagtagtcccaccgttagcgcacccgccaacgtgaacactacctcagcccctcctgtgcagacagatattgtaaatacctcttctatcagtgatctagaaaaccaggtccttcagatggagaaggccttgtcgcttggtagtttggaacccaatttagccggagaaatgattaatcaagtcagtaggttgctccacagccccccagacatgctggcccctctagcgcagcgtttacttaaggttgtggacgacatcgggttgcagcttaatttcagtaacaccacaatctccctgacgagcccctctttagcgttagccgtcatccgcgtaaacgcttcctcctttaatactaccacttttgtggcgcaggatcccgccaatctgcaggtgagcctagaaacccaggccccggagaatagcatcggcacaattaccctgccttccagcctcatgaacaacctcccagcgcacgacatggagttggccagcagagtgcagttcaattttttcgaaacgcccgctctctttcaggacccctcattagaaaatctgtctcttatcagttacgtgattagtagttcagttgcaaatctgacagtcaggaacctgacaaggaatgtaactgtgactttgaaacatatcaaccctagtcaggatgaactaacagtgcgctgcgtattctgggacctgggccgtaacggtggccggggggggtggagtgataacggatgtagcgtgaaggatcgcagactgaatgagactatctgtacctgttctcatctgacaagtttcggcgtattacttgacttatcaagaacctccgtgctcccagcacagatgatggcgcttacatttattacatatattggatgcggactttcctcaatcttcctgtcagtaaccctggtcacctatattgcgtttgagaagatacgccgtgactacccttctaagatcctgatccagctgtgcgccgccctgctgctgctcaacttagtgttcctgctcgatagctggatcgccttgtataaaatgcaggggctgtgtattagcgttgcagtatttctgcactactttctgttggtgtccttcacctggatgggactagaggcctttcacatgtaccttgctcttgttaaggtgtttaatacatacatccgtaaatatattctgaagttttgcatcgtgggatggggggttcccgccgtggtcgtcactatcatattgactatctcacctgacaattatgggcttggatcatacggcaaatttcccaatggatctcccgatgatttctgctggattaacaacaatgccgtgttttacatcacggtggttggctacttttgtgtgattttcttgttgaacgttagcatgtttatcgtcgttctggtgcagctgtgtcgcatcaagaagaagaaacagcttggcgcacaaagaaagacaagcattcaggacctgaggtccatcgctggcttgacgttcctgcttggcattacctggggcttcgcattctttgcatgggggcctgtaaatgtgacattcatgtatctgtttgctatctttaatactctgcagggatttttcatcttcatcttttattgtgtcgccaaggagaacgtgcggaagcagtggcggaggtatttgtgttgtggaaagctacgtctagcggagaactcagactggagtaaaactgctacgaatggcttaaagaaacagacagtcaatcaaggggtctcctcttcctctaactccctgcagagctcttctaacagcaccaattctaccaccttgctggttaataacgattgttcagtgcacgcaagcggcaatgggaacgcttccactgagcgcaacggcgtctccttcagcgttcagaatggcgatgtgtgtttacatgatttcaccgggaagcagcatatgtttaacgagaaggaagatagttgcaatggcaaaggtaggatggccttgcgccgcacatccaagcgagggagtcttcacttcattgaacagatgtag

SEQ ID NO: 71627 - DNA, 3006 bp, Artificial Sequence
  derived and/or modified sequence
atggtattctcggtgaggcagtgcggccacgtaggccgtactgaggaagtgctgctaacatttaagattttcctggtgattatatgcctgcacgtggtgttggtcacgtccttggaggaagacacagacaacagttccctgtcgccccctcctgatgaagaaactggggcatgtagtgatgtgaccttaagtctgctgccttccaacgagacagaaaaaaccaaaattacgattgtgaagacgttcaatgcaagtggcgttaaaccccagcgcaatatttgcaacctaagtagtatttgcaacgacagtgcattctttaggggagagatcatgtttcagtacgacaaggaatcaaccgtcccacagaaccagcacattaccaatggaacccttactggcgtactgagcctgtccgaactgaaacgatccgaactgaacaagacgctccagaccctttctgaaacatattttattatgtgtgccacagcagaagcccagagtacactgaattgtacctttactatcaagttgaataatactatgaatgcgtgtgcggtcattgccgctctcgagcgggtcaaaattcggccaatggagcactgttgttgttcggtccgaatcccatgcccctcttctcccgaggagctcgaaaagctgcaatgcgatctgcaggaccctatcgtctgtcttgctgaccatcccaggggcccaccattttcttctagccagagtatcccagtggtacctagggccaccgtcctctcacaggttcccaaagcaacatcattcgccgaacctcccgattatagccctgtgactcacaatgtgccaagtcctatcggagagattcagccgttaagcccacagccaagcgctcccatcgcctcaagccccgcaatcgatatgccgcctcagtccgaaacaatcagcagtcccatgccgcagacacacgtaagtggcacccctcccccagttaaggctagcttttcctctcctacagtgtcagctccggcaaatgtcaatacgacatccgcccctccagtgcagactgatattgttaacactagttccatttcggacctggaaaaccaagtgttacaaatggaaaaagctctcagcctagggagcctggagcccaacttagccggagagatgataaaccaagtctcacgcctgctccacagccctcccgatatgctggccccactcgcccagaggttgcttaaagtagttgacgacataggactccaactcaatttctcaaatacgactatttccttgacctcgccctcccttgctctggccgtgattagagtgaacgcttcttcgttcaatacaaccaccttcgtggcccaggaccctgctaaccttcaagtctcactggagactcaggcgccagagaattctattggaacaatcactcttccatcttctctcatgaataacctgcccgctcatgatatggagttggcaagccgagtacagtttaattttttcgagacccccgctctcttccaggatccgagccttgagaacctgagccttatcagctacgtgatctcctctagcgttgccaacctgacagtgagaaatctcaccaggaacgtcaccgtgactctcaagcacattaacccttcccaggacgaactaaccgtacgctgtgtattctgggacctcggtcgcaacgggggaagaggcggatggtccgacaatggttgctcggtgaaggacagaagattaaacgagacgatttgtacatgttcgcatctcacttcttttggcgttctgctcgatctgtccaggacaagcgtgcttcccgctcagatgatggccttgacctttattacatacattggatgcgggctatcatccatcttcttgagcgtgacattagttacgtacatcgccttcgagaaaatcaggagagattatccttccaagatcttgatacagctttgcgcagccctcctgctgctcaatctggttttcctgctagactcgtggatagccctgtataagatgcagggtttatgcatctctgtcgctgtgtttctgcactactttctcctggtgagttttacctggatgggcctggaggcgtttcatatgtacctggcgctggttaaggtgtttaacacctacatccgaaagtacatactgaaattctgtatcgtggggtggggagtgcctgccgtggtggttacgatcatcctgactatcagccccgataattatggtctgggctcttacggcaagtttcctaacggcagtcccgacgatttttgctggattaacaataacgctgtgttttacatcactgtggtcggatatttttgtgtcattttcctcctcaacgtcagtatgttcattgtcgtgctggttcagctatgccgtattaaaaagaaaaagcaactgggggcacaacgcaagacgtctattcaggaccttcgctctatagctggccttacatttcttctaggcatcacatggggcttcgccttcttcgcctggggtcccgtcaacgtgacctttatgtacttgttcgcaatattcaacacactccagggattctttatttttatcttctattgcgtggcaaaagaaaacgttaggaagcagtggagacggtatctctgttgcgggaagctcagactggccgaaaatagcgattggagcaaaaccgctacaaatggtcttaaaaagcaaaccgtcaatcagggcgtatctagtagctcaaacagcctgcagtctagctccaatagtaccaacagcaccaccttgttggtcaacaatgattgttccgtacacgcgtccggaaatgggaacgcatctacggagagaaacggggtcagcttttctgtccagaacggagacgtttgtctgcacgactttactggaaaacagcacatgttcaacgagaaggaggactcatgtaacgggaaggggcgtatggctctacgccgaacatcaaagcgtgggtcccttcatttcattgagcagatgtag

SEQ ID NO: 71628 - DNA, 3006 bp, Artificial Sequence
  derived and/or modified sequence
atggtatttagcgtgaggcagtgcggccatgtgggtcggacagaagaggtccttctaacattcaagatctttctggtgataatctgtctccacgttgtccttgtgacatcgctggaggaagatactgacaattctagccttagtccacctccagaagttgagaccacctcactgaatgacgtgacactcagtctcttgccatccaatgagaccgagaagaccaagatcacaatcgtgaagaccttcaacgcatctggagtcaagccccagcggaatatttgtaatctatccagtatctgcaatgactccgcattctttaggggggagattatgttccagtacgataaagagagtacggtgccccagaatcaacacattacaaatggcactctcactggagtgttgagcctgtcagagctaaaaaggagcgaactgaataaaacactccagactctgagcgaaacatacttcatcatgtgcgccacagcagaggctcagtctacactcaattgcactttcactattaagttaaacaatacaatgaatgcctgtgcagtgatcgcggctttagaacgcgtgaaaattaggcctatggaacactgctgctgctccgtgagaatcccgtgtccctcttcccccgaagaactggaaaaacttcagtgtgacttacaggatccgattgtctgcctggccgaccaccccagaggcccacctttctccagtagccaaagtatacctgtggtgccgagggccactgtgctatcccaggtccccaaggccacatctttcgcggaaccaccggattactcgcctgttacacacaatgtcccaagcccgatcggggaaatccagcccctgagccctcaacccagcgcccctatagcttctagccccgcaattgacatgccgcctcaaagtgaaaccataagctcaccaatgccacagacccacgtaagcgggaccccaccaccagtgaaggcgtccttctcatccccaactgtctctgcacccgctaatgtcaatactacttctgcacccccagtacagactgacatcgtcaatacttcatcaatttcggatctggaaaatcaggtgctccagatggagaaggctctgtctctcggatctctggagcctaatctcgccggagagatgattaaccaggtatcacggctcctgcattctccacctgacatgttagcccctttggcccagcgcctgctgaaagtggtggacgatattggcttacagctgaacttctctaatactacgatctctctgacctcaccttcacttgccctagcggtgatcagagtgaatgcttctagcttcaacactacaaccttcgtagcacaagacccagccaacttgcaagtgtcactggaaacccaggcccctgaaaattccatcggaaccatcactttgcctagctccctcatgaacaatctgccggcacatgatatggagctcgccagtcgggttcagttcaattttttcgagacgccggcactctttcaggatccctcactggagaacctgtctctgatctcatacgtaatcagttcctccgttgccaaccttaccgtgcgcaatctgacaagaaatgttaccgttacactaaagcacatcaatcccagccaagacgagctgaccgtgcgttgcgtcttttgggaccttggtagaaacggtgggaggggcggatggtccgataatggttgtagtgtgaaagacaggcggctgaatgagaccatatgtacctgcagccatctcactagttttggagtcctactggatctcagccgaacatccgtgctgccggctcagatgatggcactgaccttcatcacctacatcggatgtggtctttccagtatctttctgagcgtgactcttgtgacttatattgcatttgagaagatcaggcgagactatccgagcaaaatcctgatccagctgtgcgcagctcttctcctgctaaatttagtgttcctgcttgattcctggattgctttatacaaaatgcagggtctgtgcatctcggtggcagtgttccttcactactttcttctcgtgagcttcacatggatgggccttgaagcgtttcatatgtatcttgctctggtcaaggtatttaatacatacataaggaaatacatcttgaaattttgcatcgtgggctggggagttcctgcggtggtcgttaccatcatcttaaccatttcacctgataactatggcctaggcagctacggcaagtttcctaacgggagccctgatgatttttgttggattaacaataatgcggttttttacatcaccgtggtcggctatttctgtgtcatttttctcctaaacgtgtctatgtttattgtggttctcgtgcagctttgccgcatcaaaaagaagaagcagctgggcgctcagcgtaagacctctatccaggacctgaggagtattgcgggactgacctttctccttggaatcacttggggtttcgcctttttcgcctggggtcctgtcaacgtcaccttcatgtatctttttgccatctttaacacactgcaaggattttttatcttcattttttactgcgtggcaaaggagaatgtgagaaaacagtggagacgatacctgtgttgtggaaaactgcggctagccgaaaactcggactggtccaagaccgccaccaatgggctgaagaaacagacagtcaatcaaggagtgtccagcagcagtaattctcttcagtcgagcagcaattccaccaattcgactacactgctggtcaacaatgactgttccgttcacgcttcggggaacgggaacgcatcaaccgagaggaatggggtgtcattttccgtgcagaatggcgatgtgtgtctgcacgatttcaccgggaagcagcacatgttcaatgaaaaagaggattcttgcaacggcaagggacgcatggccctgcgcaggaccagtaagagaggctctcttcacttcattgaacagatgtag

SEQ ID NO: 71629 - DNA, 3006 bp, Artificial Sequence
  derived and/or modified sequence
atggtgttcagcgtgagacagtgcggccacgtgggcagaaccgaggaggtgctgctgaccttcaagatcttcctggtgatcatctgcctgcacgtggtgctggtgaccagcctggaggaggacaccgacaacagcagcctgagccccccccccgacgaggagaccggcgcctgcagcgacgtgaccctgagcctgctgcccagcaacgagaccgagaagaccaagatcaccatcgtgaagaccttcaacgccagcggcgtgaagccccagagaaacatctgcaacctgagcagcatctgcaacgacagcgccttcttcagaggcgagatcatgttccagtacgacaaggagagcaccgtgccccagaaccagcacatcaccaacggcaccctgaccggcgtgctgagcctgagcgagctgaagagaagcgagctgaacaagaccctgcagaccctgagcgagacctacttcatcatgtgcgccaccgccgaggcccagagcaccctgaactgcaccttcaccatcaagctgaacaacaccatgaacgcctgcgccgtgatcgccgccctggagagagtgaagatcagacccatggagcactgctgctgcagcgtgagaatcccctgccccagcagccccgaggagctggagaagctgcagtgcgacctgcaggaccccatcgtgtgcctggccgaccaccccagaggcccccccttcagcagcagccagagcatccccgtggtgcccagagccaccgtgctgagccaggtgcccaaggccaccagcttcgccgagccccccgactacagccccgtgacccacaacgtgcccagccccatcggcgagatccagcccctgagcccccagcccagcgcccccatcgccagcagccccgccatcgacatgcccccccagagcgagaccatcagcagccccatgccccagacccacgtgagcggcacccccccccccgtgaaggccagcttcagcagccccaccgtgagcgcccccgccaacgtgaacaccaccagcgccccccccgtgcagaccgacatcgtgaacaccagcagcatcagcgacctggagaaccaggtgctgcagatggagaaggccctgagcctgggcagcctggagcccaacctggccggcgagatgatcaaccaggtgagcagactgctgcacagcccccccgacatgctggcccccctggcccagagactgctgaaggtggtggacgacatcggcctgcagctgaacttcagcaacaccaccatcagcctgaccagccccagcctggccctggccgtgatcagagtgaacgccagcagcttcaacaccaccaccttcgtggcccaggaccccgccaacctgcaggtgagcctggagacccaggcccccgagaacagcatcggcaccatcaccctgcccagcagcctgatgaacaacctgcccgcccacgacatggagctggccagcagagtgcagttcaacttcttcgagacccccgccctgttccaggaccccagcctggagaacctgagcctgatcagctacgtgatcagcagcagcgtggccaacctgaccgtgagaaacctgaccagaaacgtgaccgtgaccctgaagcacatcaaccccagccaggacgagctgaccgtgagatgcgtgttctgggacctgggcagaaacggcggcagaggcggctggagcgacaacggctgcagcgtgaaggacagaagactgaacgagaccatctgcacctgcagccacctgaccagcttcggcgtgctgctggacctgagcagaaccagcgtgctgcccgcccagatgatggccctgaccttcatcacctacatcggctgcggcctgagcagcatcttcctgagcgtgaccctggtgacctacatcgccttcgagaagatcagaagagactaccccagcaagatcctgatccagctgtgcgccgccctgctgctgctgaacctggtgttcctgctggacagctggatcgccctgtacaagatgcagggcctgtgcatcagcgtggccgtgttcctgcactacttcctgctggtgagcttcacctggatgggcctggaggccttccacatgtacctggccctggtgaaggtgttcaacacctacatcagaaagtacatcctgaagttctgcatcgtgggctggggcgtgcccgccgtggtggtgaccatcatcctgaccatcagccccgacaactacggcctgggcagctacggcaagttccccaacggcagccccgacgacttctgctggatcaacaacaacgccgtgttctacatcaccgtggtgggctacttctgcgtgatcttcctgctgaacgtgagcatgttcatcgtggtgctggtgcagctgtgcagaatcaagaagaagaagcagctgggcgcccagagaaagaccagcatccaggacctgagaagcatcgccggcctgaccttcctgctgggcatcacctggggcttcgccttcttcgcctggggccccgtgaacgtgaccttcatgtacctgttcgccatcttcaacaccctgcagggcttcttcatcttcatcttctactgcgtggccaaggagaacgtgagaaagcagtggagaagatacctgtgctgcggcaagctgagactggccgagaacagcgactggagcaagaccgccaccaacggcctgaagaagcagaccgtgaaccagggcgtgagcagcagcagcaacagcctgcagagcagcagcaacagcaccaacagcaccaccctgctggtgaacaacgactgcagcgtgcacgccagcggcaacggcaacgccagcaccgagagaaacggcgtgagcttcagcgtgcagaacggcgacgtgtgcctgcacgacttcaccggcaagcagcacatgttcaacgagaaggaggacagctgcaacggcaagggcagaatggccctgagaagaaccagcaagagaggcagcctgcacttcatcgagcagatgtag

SEQ ID NO: 71630 - DNA, 3006 bp, Artificial Sequence
  derived and/or modified sequence
atggtgttcagcgtgagacagtgcggccacgtgggcagaaccgaggaggtgctgctgaccttcaagatcttcctggtgatcatctgcctgcacgtggtgctggtgaccagcctggaggaggacaccgacaacagcagcctgagccccccccccgaggtggagaccaccagcctgaacgacgtgaccctgagcctgctgcccagcaacgagaccgagaagaccaagatcaccatcgtgaagaccttcaacgccagcggcgtgaagccccagagaaacatctgcaacctgagcagcatctgcaacgacagcgccttcttcagaggcgagatcatgttccagtacgacaaggagagcaccgtgccccagaaccagcacatcaccaacggcaccctgaccggcgtgctgagcctgagcgagctgaagagaagcgagctgaacaagaccctgcagaccctgagcgagacctacttcatcatgtgcgccaccgccgaggcccagagcaccctgaactgcaccttcaccatcaagctgaacaacaccatgaacgcctgcgccgtgatcgccgccctggagagagtgaagatcagacccatggagcactgctgctgcagcgtgagaatcccctgccccagcagccccgaggagctggagaagctgcagtgcgacctgcaggaccccatcgtgtgcctggccgaccaccccagaggcccccccttcagcagcagccagagcatccccgtggtgcccagagccaccgtgctgagccaggtgcccaaggccaccagcttcgccgagccccccgactacagccccgtgacccacaacgtgcccagccccatcggcgagatccagcccctgagcccccagcccagcgcccccatcgccagcagccccgccatcgacatgcccccccagagcgagaccatcagcagccccatgccccagacccacgtgagcggcacccccccccccgtgaaggccagcttcagcagccccaccgtgagcgcccccgccaacgtgaacaccaccagcgccccccccgtgcagaccgacatcgtgaacaccagcagcatcagcgacctggagaaccaggtgctgcagatggagaaggccctgagcctgggcagcctggagcccaacctggccggcgagatgatcaaccaggtgagcagactgctgcacagcccccccgacatgctggcccccctggcccagagactgctgaaggtggtggacgacatcggcctgcagctgaacttcagcaacaccaccatcagcctgaccagccccagcctggccctggccgtgatcagagtgaacgccagcagcttcaacaccaccaccttcgtggcccaggaccccgccaacctgcaggtgagcctggagacccaggcccccgagaacagcatcggcaccatcaccctgcccagcagcctgatgaacaacctgcccgcccacgacatggagctggccagcagagtgcagttcaacttcttcgagacccccgccctgttccaggaccccagcctggagaacctgagcctgatcagctacgtgatcagcagcagcgtggccaacctgaccgtgagaaacctgaccagaaacgtgaccgtgaccctgaagcacatcaaccccagccaggacgagctgaccgtgagatgcgtgttctgggacctgggcagaaacggcggcagaggcggctggagcgacaacggctgcagcgtgaaggacagaagactgaacgagaccatctgcacctgcagccacctgaccagcttcggcgtgctgctggacctgagcagaaccagcgtgctgcccgcccagatgatggccctgaccttcatcacctacatcggctgcggcctgagcagcatcttcctgagcgtgaccctggtgacctacatcgccttcgagaagatcagaagagactaccccagcaagatcctgatccagctgtgcgccgccctgctgctgctgaacctggtgttcctgctggacagctggatcgccctgtacaagatgcagggcctgtgcatcagcgtggccgtgttcctgcactacttcctgctggtgagcttcacctggatgggcctggaggccttccacatgtacctggccctggtgaaggtgttcaacacctacatcagaaagtacatcctgaagttctgcatcgtgggctggggcgtgcccgccgtggtggtgaccatcatcctgaccatcagccccgacaactacggcctgggcagctacggcaagttccccaacggcagccccgacgacttctgctggatcaacaacaacgccgtgttctacatcaccgtggtgggctacttctgcgtgatcttcctgctgaacgtgagcatgttcatcgtggtgctggtgcagctgtgcagaatcaagaagaagaagcagctgggcgcccagagaaagaccagcatccaggacctgagaagcatcgccggcctgaccttcctgctgggcatcacctggggcttcgccttcttcgcctggggccccgtgaacgtgaccttcatgtacctgttcgccatcttcaacaccctgcagggcttcttcatcttcatcttctactgcgtggccaaggagaacgtgagaaagcagtggagaagatacctgtgctgcggcaagctgagactggccgagaacagcgactggagcaagaccgccaccaacggcctgaagaagcagaccgtgaaccagggcgtgagcagcagcagcaacagcctgcagagcagcagcaacagcaccaacagcaccaccctgctggtgaacaacgactgcagcgtgcacgccagcggcaacggcaacgccagcaccgagagaaacggcgtgagcttcagcgtgcagaacggcgacgtgtgcctgcacgacttcaccggcaagcagcacatgttcaacgagaaggaggacagctgcaacggcaagggcagaatggccctgagaagaaccagcaagagaggcagcctgcacttcatcgagcagatgtag

SEQ ID NO: 71631 - protein, 966 aa, Artificial Sequence
  derived and/or modified sequence
MVFSVRQCGHVGRTEEVLLTFKIFLVIICLHVVLVTSLEEDTDNSSLSPPPAKLSVVSFAPSSNGTPEVETTSLNDVTLSLLPSNETEKTKITIVKTFNASGVKPQRNICNLSSICNDSAFFRGEIMFQYDKESTVPQNQHITNGTLTGVLSLSELKRSELNKTLQTLSETYFIMCATAEAQSTLNCTFTIKLNNTMNACAVIAALERVKIRPMEHCCCSVRIPCPSSPEELEKLQCDLQDPIVCLADHPRGPPFSSSQSIPVVPRATVLSQVPKATSFAEPPDYSPVTHNVPSPIGEIQPLSPQPSAPIASSPAIDMPPQSETISSPMPQTHVSGTPPPVKASFSSPTVSAPANVNTTSAPPVQTDIVNTSSISDLENQVLQMEKALSLGSLEPNLAGEMINQVSRLLHSPPDMLAPLAQRLLKVVDDIGLQLNFSNTTISLTSPSLALAVIRVNASSFNTTTFVAQDPANLQVSLETQAPENSIGTITLPSSLMNNLPAHDMELASRVQFNFFETPALFQDPSLENLSLISYVISSSVANLTVRNLTRNVTVTLKHINPSQDELTVRCVFWDLGRNGGRGGWSDNGCSVKDRRLNETICTCSHLTSFGVLLDLSRTSVLPAQMMALTFITYIGCGLSSIFLSVTLVTYIAFEKIRRDYPSKILIQLCAALLLLNLVFLLDSWIALYKMQGLCISVAVFLHYFLLVSFTWMGLEAFHMYLALVKVFNTYIRKYILKFCIVGWGVPAVVVTIILTISPDNYGLGSYGKFPNGSPDDFCWINNNAVFYITVVGYFCVIFLLNVSMFIVVLVQLCRIKKKKQLGAQRKTSIQDLRSIAGLTFLLGITWGFAFFAWGPVNVTFMYLFAIFNTLQGFFIFIFYCVAKENVRKQWRRYLCCGKLRLAENSGNASTERNGVSFSVQNGDVCLHDFTGKQHMFNEKEDSCNGKGRMALRRTSKRGSLHFIEQM

SEQ ID NO: 71632 - DNA, 4698 bp, Artificial Sequence
  derived and/or modified sequence
gcgcccagcctcgccgccgccgagcgcccgacgcgccacgccgcgctgggcagctggagagctggcggcggagcgggccgggagcggcgggggcggcgccgaggccgcgggcggggggaggagggccgcagccccggagaggggaaaaggcgggccggacggcgccagcagccagccccgaggacgcgagcggcaggtgtgcacagaggttctccactttgttttctgaactcgcggtcaggatggttttctctgtcaggcagtgtggccatgttggcagaactgaagaagttttactgacgttcaagatattccttgtcatcatttgtcttcatgtcgttctggtaacatccctggaagaagatactgataattccagtttgtcaccaccacctgctaaattatctgttgtcagttttgccccctcctccaatggtactccagaggttgaaacaacaagcctcaatgatgttactttaagcttactcccttcaaacgaaacagaaaaaactaaaatcactatagtaaaaaccttcaatgcatcaggcgtcaaaccccagagaaatatctgcaatttgtcatctatttgcaatgactcagcattttttagaggtgagatcatgtttcaatatgataaagaaagcactgttccccagaatcaacatataacgaatggcaccttaactggagtcctgtctctaagtgaattaaaacgctcagagctcaacaaaaccctgcaaaccctaagtgagacttactttataatgtgtgctacagcagaggcccaaagcacattaaattgtacattcacaataaaactgaataatacaatgaatgcatgtgctgtaatagctgctttggaaagagtaaagattcgaccaatggaacactgctgctgttctgtcaggataccctgcccttcctccccagaagagttggaaaagcttcagtgtgacctgcaggatcccattgtctgtcttgctgaccatccacgtggcccaccattttcttccagccaatccatcccagtggtgcctcgggccactgtgctttcccaggtccccaaagctacctcttttgctgagcctccagattattcacctgtgacccacaatgttccctctccaataggggagattcaacccctttcaccccagccttcagctcccatagcttccagccctgccattgacatgcccccacagtctgaaacgatctcttcccctatgccccaaacccatgtctccggcaccccacctcctgtgaaagcctcattttcctctcccaccgtgtctgcccctgcgaatgtcaacactaccagcgcacctcctgtccagacagacatcgtcaacaccagcagtatttctgatcttgagaaccaagtgttgcagatggagaaggctctgtccttgggcagcctggagcctaacctcgcaggagaaatgatcaaccaagtcagcagactccttcattccccgcctgacatgctggcccctctggctcaaagattgctgaaagtagtggatgacattggcctacagctgaacttttcaaacacgactataagtctaacctccccttctttggctctggctgtgatcagagtgaatgccagtagtttcaacacaactacctttgtggcccaagaccctgcaaatcttcaggtttctctggaaacccaagctcctgagaacagtattggcacaattactcttccttcatcgctgatgaataatttaccagctcatgacatggagctagcttccagggttcagttcaatttttttgaaacacctgctttgtttcaggatccttccctggagaacctctctctgatcagctacgtcatatcatcgagtgttgcaaacctgaccgtcaggaacttgacaagaaacgtgacagtcacattaaagcacatcaacccgagccaggatgagttaacagtgagatgtgtattttgggacttgggcagaaatggtggcagaggaggctggtcagacaatggctgctctgtcaaagacaggagattgaatgaaaccatctgtacctgtagccatctaacaagcttcggcgttctgctggacctatctaggacatctgtgctgcctgctcaaatgatggctctgacgttcattacatatattggttgtgggctttcatcaatttttctgtcagtgactcttgtaacctacatagcttttgaaaagatccggagggattacccttccaaaatcctcatccagctgtgtgctgctctgcttctgctgaacctggtcttcctcctggactcgtggattgctctgtataagatgcaaggcctctgcatctcagtggctgtatttcttcattattttctcttggtctcattcacatggatgggcctagaagcattccatatgtacctggcccttgtcaaagtatttaatacttacatccgaaaatacatccttaaattctgcattgtcggttggggggtaccagctgtggttgtgaccatcatcctgactatatccccagataactatgggcttggatcctatgggaaattccccaatggttcaccggatgacttctgctggatcaacaacaatgcagtattctacattacggtggtgggatatttctgtgtgatatttttgctgaacgtcagcatgttcattgtggtcctggttcagctctgtcgaattaaaaagaagaagcaactgggagcccagcgaaaaaccagtattcaagacctcaggagtatcgctggccttacatttttactgggaataacttggggctttgccttctttgcctggggaccagttaacgtgaccttcatgtatctgtttgccatctttaataccttacaaggatttttcatattcatcttttactgtgtggccaaagaaaatgtcaggaagcaatggaggcggtatctttgttgtggaaagttacggctggctgaaaattctggaaatgcttctacagagaggaatggggtctcttttagtgttcagaatggagatgtgtgccttcacgatttcactggaaaacagcacatgtttaacgagaaggaagattcctgcaatgggaaaggccgtatggctctcagaaggacttcaaagcggggaagcttacactttattgagcaaatgtgattcctttcttctaaaatcaaagcatgatgcttgacagtgtgaaatgtccaattttaccttttacacaatgtgagatgtatgaaaatcaactcattttattctcggcaacatctggagaagcataagctaattaagggcgatgattattattacaagaagaaaccaagacattacaccatggtttttagacatttctgatttggtttcttatctttcattttataagaaggttggttttaaacaatacactaagaatgactcctataaagaaaacaaaaaaaggtagtgaactttcagctaccttttaaagaggctaagttatctttgataacatcatataaagcaactgttgacttcagcctgttggtgagtttagttgtgcatgcctttgttgtatataagctaaattctagtgacccatgtgtcaaaaatcttacttctacatttttttgtatttattttctactgtgtaaatgtattcctttgtagaatcatggttgttttgtctcacgtgataattcagaaaatccttgctcgttccgcaaatcctaaagctccttttggagatgatataggatgtgaaatacagaaacctcagtgaaatcaagaaataatgatcccagccagactgagaaaatgtaagcagacagtgccacagttagctcatacagtgcctttgagcaagttaggaaaagatgcccccactgggcagacacagccctatgggctcatggtttgacaaacagagtggagagaccatattttagccccactcaccctcttgggtgcacgacctgtacagccaaacacagcatccaatatgaatacccatcccctgaccgcatccccagtagtcagattatagaatctgcaccaagatgtttagctttataccttggccacagagagggatgaactgtcatccagaccatgtgtcaggaaaattgtgaacgtagatgaggtacatacactgccgcttctcaaatccccagagcctttaggaacaggagagtagactaggattccttctcttaaaaaggtacatatatatggaaaaaaatcatattgccgttctttaaaaggcaactgcatggtacattgttgattgttatgactggtacactctggcccagccagagctataattgttttttaaatgtgtcttgaagaatgcacagtgacaaggggagtagctattgggaacagggaactgtcctacactgctattgttgctacatgtatcgagccttgattgctcctagttatatacagggtctatcttgcttcctacctacatctgcttgagcagtgcctcaagtacatccttattaggaacatttcaaaccccttttagttaagtctttcactaaggttctcttgcatatatttcaagtgaatgttggatctcagactaaccatagtaataatacacatttctgtgagtgctgacttgtctttgcaatatttcttttctgatttatttaattttcttgtatttatatgttaaaatcaaaaatgttaaaatcaatgaaataaatttgcagttaagatcttt

SEQ ID NO: 71633 - DNA, 2901 bp, Artificial Sequence
  derived and/or modified sequence
atggttttcagcgttcgacaatgcggccacgtaggcagaaccgaggaggtgttacttacattcaagatcttcctcgtgatcatttgtctgcatgtcgtgctggtgacttcactggaagaagacacagacaattcatccctgtcccctccacccgcaaagctttcagtggtctcctttgcccctagttctaatggcacgccagaggttgagaccactagcttgaatgatgtcacgctgtcgctcctcccttctaatgaaacagaaaagacaaaaatcacaatcgtcaagacttttaacgctagcggggtgaagcctcagcggaacatctgcaacttgtcttccatttgcaacgactctgcgttctttaggggcgagatcatgtttcaatacgataaggagtccacagtgccgcagaatcagcatataaccaacgggaccctcactggcgtgttgtccctgagcgaactcaagcggtcggaactgaataagacactccaaacactgagcgaaacatactttatcatgtgcgccactgcggaggcacagtctaccctgaactgcacgttcaccatcaaattgaataacacaatgaatgcatgcgcggttatcgccgcgctggagagagtgaagatacgacctatggagcattgttgttgctccgtgcggatcccctgtccctccagtccagaggagctggagaagttgcagtgcgatcttcaagatcccattgtctgcctggccgatcacccaagaggcccccctttttccagttctcaaagcatccccgtggtgccaagagccacagtgctgagtcaggtgcctaaggccactagttttgcggagcctcccgattacagcccagtcacacataacgtgcccagcccaattggcgagatacagccactgagtccacagccctctgcccctattgcctcatcacccgctattgatatgccaccgcagtctgagaccatttcgtccccaatgccacagactcacgtcagtggcacacctccgcccgtgaaagcaagtttttccagcccaaccgtctcagcccccgccaacgttaacacaacgtctgcccctcccgtgcagactgacatcgtaaatacgtcctcaataagcgacctggaaaaccaagtcctacaaatggaaaaggcactctccctgggttcactcgaaccaaacttagccggagagatgatcaaccaggtatccaggttgctgcactcgccgccagatatgctcgcccctttggcacaacggcttctcaaagtggtggacgatattggattgcagcttaattttagtaatacaactatctcactcactagtccaagtctggcgcttgctgttatcagggttaacgcgtcttcgtttaacacgacaaccttcgtggcccaagatccagctaatctgcaggtatcactcgaaacccaagccccagaaaacagcatcgggaccattacactccctagctcactgatgaacaatttgcccgcacacgatatggaacttgccagtcgcgttcagttcaacttcttcgagacccctgcactgtttcaagatccatccttagaaaacctgagtctcatttcatacgtgatctcatcctcggttgctaatctgactgtgcgaaatttgacaaggaacgttacagtgactctcaaacatataaatccttcacaagacgaactgacagttcgatgtgttttctgggacctgggcagaaacggtggccgcggcggctggagcgataatggatgctccgtgaaggatcggcggctcaacgagacgatttgcacgtgctcccacctcacgtcttttggcgtacttctggatcttagccggactagcgtgctgcctgcccaaatgatggccctgacgttcataacatacattggctgcgggctgtcttctatttttttatcggtgactctggtcacatacattgctttcgaaaaaattaggagggattatccgtctaagattctgatccagttatgtgccgctctgctgctcctgaatctggtgttccttttagatagctggattgccctgtataagatgcaggggctgtgcatctctgtggcggtcttccttcactactttctgcttgtatccttcacctggatgggattagaggccttccatatgtatcttgcactggtcaaggtgtttaatacctacatcaggaagtatattctgaaattttgcattgtgggttggggagttccggccgtggtggtcaccatcatcctcacaatatcccccgataactatgggcttggttcctacggcaagttccctaatgggtcccctgatgacttctgttggattaataataacgccgtcttttatatcacggtggtgggctatttctgcgtcatttttctgctcaatgttagcatgttcatagtggttctcgtccaactgtgccgcatcaaaaagaaaaaacagttgggcgcccagaggaaaactagtattcaggatctgagatcaattgctgggctgactttcctactcggtataacatgggggttcgcctttttcgcttggggcccggtgaatgtgacattcatgtacctcttcgccatcttcaatactttgcaggggttctttatttttattttttattgcgttgctaaagagaatgtgcggaagcagtggcgacggtatctgtgctgcggcaagttaaggctggcagagaacagtgggaatgctagtactgaacgaaatggcgtctcatttagtgttcaaaatggagatgtctgtttacatgactttaccgggaaacagcatatgtttaatgagaaggaggacagctgcaacggtaagggccgaatggctcttcggagaacatccaaaaggggaagtctccatttcattgaacagatgtag

SEQ ID NO: 71634 - DNA, 354 bp, Artificial Sequence
  derived and/or modified sequence
atcctgttaaccatgcaacacattaataccggaatcgatatgctgaatcaactgggatgtgtcttcttcgctggcgtcaaaccccagcgaaacatctgtaacctttccagcatttgcaacgatagtgccttcttccgaggcgagattatgtttcaatacgataaggagtcaactgtgccgcagaaccagcatatcaccaacggaacattaacaggtgtacttagcttgagcgaattaaaacgcagtgagctaaataaaacgcttcagaccctctctgaaacatatttcatcatgtgtgccacagcagaggcccaaagacacatcaagttgtacatccataataagaccgaatag

SEQ ID NO: 71635 - DNA, 2901 bp, Artificial Sequence
  derived and/or modified sequence
atggtgttttctgtgcggcagtgtggccacgtgggccgcacagaggaggtgctgctgaccttcaagatcttcctggtgatcatctgcctgcacgtggtgctggtgaccagcctggaggaggacacagacaacagcagcctgagccccccaccagccaagctgtctgtggtgtcctttgcccccagcagcaatggcaccccagaggtggagaccaccagcctgaatgatgtgaccctgagcctgctgcccagcaatgaaacagagaagaccaagatcaccatcgtgaagaccttcaatgccagcggcgtgaagccccagaggaacatctgcaacctgagcagcatctgcaatgattctgccttcttccggggggagatcatgttccagtatgacaaggagagcacagtgccccagaaccagcacatcaccaacggcaccctgactggagtgctgagcctgtctgagctgaagaggtctgagctgaacaagaccctgcagaccctgtctgagacctacttcatcatgtgtgccacagctgaggcccagagcaccctgaactgcaccttcaccatcaagctgaacaacaccatgaatgcctgtgctgtgattgctgccctggagcgggtgaagatccggcccatggagcactgctgctgcagcgtgcgcatcccctgccccagcagccctgaggagctggagaagctgcagtgtgacctgcaggaccccatcgtgtgcctggccgaccacccccggggcccccccttcagcagcagccagagcatccctgtggtgccccgggccaccgtgctgagccaggtgcccaaggccaccagctttgctgagcccccagactacagccctgtgacccacaacgtgcccagccccatcggggagatccagcccctgagcccccagcccagcgcccccatcgccagcagccctgccatcgacatgccaccccagagcgagaccatcagcagccccatgccccagacccacgtgtctggcaccccacctcctgtgaaggccagcttcagcagccccaccgtgtctgccccagccaacgtgaacaccaccagcgcccctcctgtgcagacagacatcgtgaacaccagcagcatcagtgacctggagaaccaggtgctgcagatggagaaggccctgagcctgggcagcctggagcccaacctggccggggagatgatcaaccaggtgtcccggctgctgcacagccccccagacatgctggcccccctggcccagaggctgctgaaggtggtggatgacatcggcctgcagctgaacttcagcaacaccaccatcagcctgaccagccccagcctggccctggccgtcatccgggtgaatgccagcagcttcaacaccaccacctttgtggcccaggaccctgccaacctgcaggtgtccctggagacccaggccccagaaaattccatcggcaccatcaccctgcccagcagcctgatgaacaacctgcctgcccatgacatggagctggccagccgggtgcagttcaacttctttgagaccccagccctcttccaggaccccagcctggagaacctgagcctcatctcctatgtgatcagcagctctgtggccaacctgactgtgaggaacctgaccagaaatgtgacagtgaccctgaagcacatcaaccccagccaggatgagctgactgtgcgctgtgtgttctgggacctgggcagaaatggaggccggggcggctggagcgacaatggctgcagcgtgaaggaccggcggctgaatgagaccatctgcacctgcagccacctgaccagctttggagtgctgctggacctgagcaggacctctgtgctgcctgcccagatgatggccctgaccttcatcacctacatcggctgcggcctgagcagcatcttcctgtctgtgaccctggtgacctacatcgcctttgagaagatcagaagagactaccccagcaagatcctgatccagctgtgtgccgccctgctgctgctgaacctggtgttcctgctggacagctggatcgccctgtacaagatgcagggcctgtgcatctctgtggccgtgttcctgcactacttcctgctggtgtccttcacctggatgggcctggaggccttccacatgtacctggccctggtgaaggtgttcaacacctacatcaggaagtacatcctgaagttctgcatcgtgggctggggcgtgcctgctgtggtggtgaccatcatcctgaccatcagcccagacaactacggcctgggcagctatggcaagttccccaacggcagcccagatgacttctgctggatcaacaacaatgctgtgttctacatcaccgtggtgggctacttctgtgtgatcttcctgctgaatgtgtccatgttcatcgtggtgctggtgcagctgtgccgcatcaagaagaagaagcagctgggcgcccagaggaagaccagcatccaggacctgcggagcattgctggcctgaccttcctgctgggcatcacctggggctttgccttctttgcctggggccctgtgaatgtgaccttcatgtacctgtttgccatcttcaacaccctgcagggcttcttcatcttcatcttctactgtgtggccaaggaaaatgtgaggaagcagtggaggcgctacctgtgctgcggcaagctgcggctggctgaaaattctggaaatgccagcacagaaagaaatggagtgtccttctctgtgcagaatggagatgtgtgcctgcatgacttcaccgggaagcagcacatgtttaatgagaaggaggacagctgcaatggcaagggccgcatggccctgcggaggaccagcaagaggggcagcctgcacttcatcgagcagatgtag

SEQ ID NO: 71636 - DNA, 354 bp, Artificial Sequence
  derived and/or modified sequence
atcctgctgaccatgcagcacatcaacacaggcatcgacatgctgaaccagctgggctgtgtgttctttgctggggtgaagccccagaggaacatctgcaacctgagcagcatctgcaatgacagcgccttcttccggggggagatcatgttccagtatgacaaggagagcacagtgccccagaaccagcacatcaccaacggcaccctgactggagtgctgagcctgtctgagctgaagaggtctgagctgaacaagaccctgcagaccctgtctgagacctacttcatcatgtgtgccacagctgaggcccagaggcacatcaagctgtacatccacaacaagacagaatag

SEQ ID NO: 71637 - DNA, 2901 bp, Artificial Sequence
  derived and/or modified sequence
atggtgttcagcgtgcggcagtgcggccacgtgggccggaccgaggaagtgctgttaacattcaaaatcttcctggtcattatctgtttacacgtggtcctggttacgagccttgaagaggacacggacaattccagcctaagcccacctccagccaaactgtccgttgtgtccttcgcccccagttccaatggtactcccgaagtagagaccacgtctctaaacgatgtgacactgtctcttttgccttctaacgaaaccgagaagacaaagattacaattgttaaaactttcaatgcctcaggggtgaagcctcagagaaacatctgtaacctttcatctatttgcaatgattccgcctttttccgcggcgagatcatgtttcagtatgacaaggaaagcaccgttccacaaaatcagcatattactaacgggaccctgacgggagtcctatcactgtcagagcttaagaggtcggagctgaataaaaccttacaaactttgtctgaaacgtacttcataatgtgcgctaccgccgaggcacaatctacgttaaactgtactttcactattaaactgaacaacacaatgaacgcctgcgcggtgatcgctgcactggaacgcgtcaaaatacgcccaatggagcactgttgctgtagcgtccgcatcccttgtccaagctcccccgaggagttagaaaagctacagtgcgatctccaggatcccatagtctgtctggctgatcacccgcggggcccccccttcagcagttctcagtccattcccgtcgtgcccagagctaccgtacttagccaggtcccaaaggctactagcttcgctgagcctcctgactacagccccgtgactcacaatgttccctcccccattggtgagatccagcccctaagtccccagcctagtgccccgattgcatccagcccagccatagacatgccaccacaaagtgaaacgatttccagccccatgccccaaacccatgtctccggaactccgcctcctgtgaaagcgtccttcagctcacctaccgtctctgctccggcaaatgtgaacacaacctccgctccaccggtgcagacagacattgtgaacacctcctccatctccgatctcgagaaccaggtgctgcaaatggagaaggccctgagcctgggatccttagagcccaacctagccggagagatgatcaaccaggtgtctagattgctccacagtccacctgacatgctggcaccgctggcccagagactgctcaaggttgtcgatgacatagggttgcagctgaacttctcaaacaccaccatctccttaacatctcccagcctggccctggccgtgatacgcgtgaacgcttccagcttcaatactactactttcgtcgcacaagatcctgcaaatttgcaggtctccctggagactcaggcaccagaaaacagcatcggtactataactctcccatcgagtctgatgaacaatctgcctgcacatgacatggaactggcaagtcgcgtacaattcaacttcttcgagacgcccgctttgttccaggacccgtccctggagaatctgagtctgatctcctatgtgatctctagctctgttgctaacctcaccgtccgcaacctgacaaggaatgtgactgtgacactgaagcacattaaccccagccaggatgagctcacagtcagatgcgttttctgggatctggggcggaacggcggccggggaggctggtcagataatggatgcagtgtgaaagatcggaggctgaacgaaactatttgcacctgctcccacctgacgagttttggggtgttactcgatctctcgagaaccagcgtgctccccgcgcagatgatggccctaacctttatcacttatataggctgtggcttgtccagcatctttttgagtgtcaccctcgtgacgtacatagcctttgaaaagattcgccgtgattacccctccaaaatcttaatccagctctgtgccgctttgctgctgcttaacctggtgtttcttctggatagctggattgccctgtataaaatgcagggcctgtgtataagtgtggccgtctttcttcactacttcctgctggtttcttttacctggatgggattggaggcctttcacatgtacctggcactggtgaaggtgtttaacacatacatacgtaagtatatccttaagttttgcattgtcgggtggggtgtccctgccgtggtcgttactatcatcctaactatctctccagacaattacggtctgggaagctacggcaagtttccaaatgggtcacccgacgacttttgttggatcaacaacaatgcggtattttatatcactgtcgtcggctatttctgtgtcattttcctgttgaatgtgtccatgttcatcgtcgttctggttcagctgtgcagaatcaaaaagaaaaagcagctgggggctcaaagaaaaacctccatccaggatctgcgttctatcgcggggcttacatttctgctcggcatcacttggggattcgcattcttcgcctggggtccagttaacgtcacgttcatgtacctattcgccatcttcaacactttgcagggctttttcattttcatcttctactgcgtagccaaggaaaatgtgaggaagcagtggcgccgctacctttgttgcggcaagctccgtctcgccgagaactccggtaacgcatcaactgagcgtaacggcgtttctttcagcgtgcagaatggagatgtgtgcctgcacgatttcaccggcaaacaacacatgttcaatgaaaaggaggatagttgtaacgggaaagggagaatggctctccggcgcaccagtaagaggggatcactgcattttatagagcagatgtag

SEQ ID NO: 71638 - DNA, 354 bp, Artificial Sequence
  derived and/or modified sequence
atcctgctgaccatgcagcacatcaacaccggcatcgacatgctgaatcagctagggtgtgtgtttttcgctggggttaaacctcagagaaacatctgtaatctttcatctatttgcaatgactccgctttcttccgtggggaaatcatgttccaatacgacaaggaatcgacggtgccccaaaatcagcacatcaccaacggaacactgactggcgtattaagcttgagtgagctcaagcggtcagagcttaacaagacactgcagacgctgagcgagacatactttatcatgtgtgctacagccgaggcccagcgccacattaagctctacatccataataagactgagtag

SEQ ID NO: 71639 - DNA, 2901 bp, Artificial Sequence
  derived and/or modified sequence
atggttttttcagtccgacagtgcggacacgtgggtagaacggaagaagtgcttttaacttttaagatttttctagtgattatctgccttcatgttgtgctggtaacaagtctggaggaggacactgataactcatctctcagccccccacctgcaaaactctcagtggtgagcttcgctccatcaagcaatgggacaccagaagttgaaaccacttctctgaatgatgtaacgctgagtttgcttccgagtaatgagacagagaaaacaaagatcacaatcgtgaaaactttcaacgccagtggggtaaagccacagagaaatatttgcaacctcagctcaatctgcaatgactcagcattttttaggggtgagattatgttccaatacgataaggagtctactgttcctcagaatcagcacatcaccaatggtaccctcacaggggtcctgtccctctcagagttaaaacgtagtgagctgaataaaacgcttcaaactctgagcgagacatatttcatcatgtgcgccacagcagaggcacagagcaccctcaactgcacattcaccatcaagctgaacaacacaatgaacgcctgcgctgtgattgccgctctggaacgagtgaaaatccggcctatggagcattgctgctgctccgttcggataccatgccctagctctcctgaagagctcgagaagttacagtgtgatctgcaggatcccatagtctgtctcgccgatcaccccagggggccacccttcagctcatcccagagcatcccagtggtgcccagagctaccgtgctctctcaagtgccgaaggctaccagctttgccgaaccacctgactactccccggttacacacaatgtcccttccccaatcggggaaatccagcctctgtcacctcagccttccgccccaattgcatcctcccctgctattgatatgcctcctcagtccgaaacaatctcaagtcccatgccccaaacccacgtcagcggtacccctcctccagtcaaggcctctttttcaagtcccactgtcagtgcgcctgccaacgtgaataccacatctgcgccacctgttcagaccgacatcgttaatacttctagtatctccgacctggaaaaccaggtgctccagatggaaaaggccctctcccttggaagtctggagcctaatttggccggagagatgatcaaccaggtcagtcgactgcttcattctcctcccgacatgctggcacccctcgcacagcggttgttaaaggtcgtcgatgatatagggctgcaactgaatttcagcaacactactatctcacttacgagtccgtcgctggccttggctgtgatccgcgtcaatgcatcttcgtttaacactactaccttcgtggcccaggatcccgctaatctccaagtgtcactggagacacaggccccagagaactcaatcggcacgatcacactgccctcgtcactgatgaacaacctgcccgctcacgacatggaactggcttcaagggtccaattcaacttcttcgagactccagccttgttccaagacccctctctggagaacctgagcctgatctcctatgtgatttcttcttcagtagccaatttaacagtgcgaaatttaacccggaatgttaccgtcacattgaaacatatcaatccctctcaggatgaactcaccgtgcgctgcgtgttctgggacctgggccgaaacggtggtcggggtggatggtccgataacggctgtagcgtgaaggatagacgccttaatgaaaccatttgcacttgctcgcacctgacttcctttggtgtgctgttggatttgagcagaacctcagtcctgcccgctcaaatgatggctctgacgttcataacttacataggttgtggactgtcatccattttcctatctgttaccctggtaacctacatagctttcgagaagatcaggcgagattacccaagcaagatcctcatccagctgtgcgcagcactgctcctgttaaatttagtattcctgctggatagctggatcgccctgtacaagatgcaagggctgtgtattagtgttgcagtctttctgcactactttttgcttgtttcctttacgtggatggggctcgaagctttccacatgtacctggcactggtgaaggtattcaatacttacatccggaaatacattcttaagttttgtatcgtaggctggggggtgccagccgtggtcgtcactatcatcctgaccatttccccagacaattatggtcttggaagctacggcaagtttcccaacgggtcgcccgatgatttctgctggattaacaataacgccgttttctacatcaccgttgtggggtatttctgtgtaatcttcctcctaaatgtgtccatgtttatcgtggtgttggtccagttatgtcgcattaaaaagaaaaagcagctgggggctcagcgtaagacctctattcaggacctcaggtctattgctggtctaacttttctgctaggaattacctggggattcgcattctttgcatggggccctgtgaatgttacttttatgtacctgtttgctatcttcaatacccttcagggatttttcatattcatattttactgtgttgcaaaagagaatgtcagaaaacaatggcggcgttatttgtgctgcgggaagttgagattggcggagaacagcgggaacgctagcactgagcgtaatggcgtcagcttttccgtgcagaatggggatgtctgcctccatgatttcaccgggaaacagcacatgttcaacgagaaggaagattcgtgcaacggtaaagggaggatggcactaagaagaacgtccaaacggggaagcctccacttcatcgagcagatgtag

SEQ ID NO: 71640 - DNA, 354 bp, Artificial Sequence
  derived and/or modified sequence
atcttactgacgatgcagcatatcaacactgggatagatatgcttaatcaactgggatgcgtgtttttcgctggagttaaaccgcagcggaatatttgtaatctgtcaagcatttgcaacgattcagctttcttccggggagagataatgtttcagtacgataaggagtcaacagtcccccagaaccagcatatcacgaatggcaccctgaccggcgtcctgagcttgtcggaactcaaaaggagcgaattaaacaaaactctgcagacactttcagaaacctactttattatgtgtgctacagccgaagcccaaaggcacattaagttgtacatccacaataagaccgagtag

SEQ ID NO: 71641 - DNA, 2901 bp, Artificial Sequence
  derived and/or modified sequence
atggtgttcagcgtgagacagtgcggccacgtgggcagaaccgaggaggtgctgctgaccttcaagatcttcctggtgatcatctgcctgcacgtggtgctggtgaccagcctggaggaggacaccgacaacagcagcctgagccccccccccgccaagctgagcgtggtgagcttcgcccccagcagcaacggcacccccgaggtggagaccaccagcctgaacgacgtgaccctgagcctgctgcccagcaacgagaccgagaagaccaagatcaccatcgtgaagaccttcaacgccagcggcgtgaagccccagagaaacatctgcaacctgagcagcatctgcaacgacagcgccttcttcagaggcgagatcatgttccagtacgacaaggagagcaccgtgccccagaaccagcacatcaccaacggcaccctgaccggcgtgctgagcctgagcgagctgaagagaagcgagctgaacaagaccctgcagaccctgagcgagacctacttcatcatgtgcgccaccgccgaggcccagagcaccctgaactgcaccttcaccatcaagctgaacaacaccatgaacgcctgcgccgtgatcgccgccctggagagagtgaagatcagacccatggagcactgctgctgcagcgtgagaatcccctgccccagcagccccgaggagctggagaagctgcagtgcgacctgcaggaccccatcgtgtgcctggccgaccaccccagaggcccccccttcagcagcagccagagcatccccgtggtgcccagagccaccgtgctgagccaggtgcccaaggccaccagcttcgccgagccccccgactacagccccgtgacccacaacgtgcccagccccatcggcgagatccagcccctgagcccccagcccagcgcccccatcgccagcagccccgccatcgacatgcccccccagagcgagaccatcagcagccccatgccccagacccacgtgagcggcacccccccccccgtgaaggccagcttcagcagccccaccgtgagcgcccccgccaacgtgaacaccaccagcgccccccccgtgcagaccgacatcgtgaacaccagcagcatcagcgacctggagaaccaggtgctgcagatggagaaggccctgagcctgggcagcctggagcccaacctggccggcgagatgatcaaccaggtgagcagactgctgcacagcccccccgacatgctggcccccctggcccagagactgctgaaggtggtggacgacatcggcctgcagctgaacttcagcaacaccaccatcagcctgaccagccccagcctggccctggccgtgatcagagtgaacgccagcagcttcaacaccaccaccttcgtggcccaggaccccgccaacctgcaggtgagcctggagacccaggcccccgagaacagcatcggcaccatcaccctgcccagcagcctgatgaacaacctgcccgcccacgacatggagctggccagcagagtgcagttcaacttcttcgagacccccgccctgttccaggaccccagcctggagaacctgagcctgatcagctacgtgatcagcagcagcgtggccaacctgaccgtgagaaacctgaccagaaacgtgaccgtgaccctgaagcacatcaaccccagccaggacgagctgaccgtgagatgcgtgttctgggacctgggcagaaacggcggcagaggcggctggagcgacaacggctgcagcgtgaaggacagaagactgaacgagaccatctgcacctgcagccacctgaccagcttcggcgtgctgctggacctgagcagaaccagcgtgctgcccgcccagatgatggccctgaccttcatcacctacatcggctgcggcctgagcagcatcttcctgagcgtgaccctggtgacctacatcgccttcgagaagatcagaagagactaccccagcaagatcctgatccagctgtgcgccgccctgctgctgctgaacctggtgttcctgctggacagctggatcgccctgtacaagatgcagggcctgtgcatcagcgtggccgtgttcctgcactacttcctgctggtgagcttcacctggatgggcctggaggccttccacatgtacctggccctggtgaaggtgttcaacacctacatcagaaagtacatcctgaagttctgcatcgtgggctggggcgtgcccgccgtggtggtgaccatcatcctgaccatcagccccgacaactacggcctgggcagctacggcaagttccccaacggcagccccgacgacttctgctggatcaacaacaacgccgtgttctacatcaccgtggtgggctacttctgcgtgatcttcctgctgaacgtgagcatgttcatcgtggtgctggtgcagctgtgcagaatcaagaagaagaagcagctgggcgcccagagaaagaccagcatccaggacctgagaagcatcgccggcctgaccttcctgctgggcatcacctggggcttcgccttcttcgcctggggccccgtgaacgtgaccttcatgtacctgttcgccatcttcaacaccctgcagggcttcttcatcttcatcttctactgcgtggccaaggagaacgtgagaaagcagtggagaagatacctgtgctgcggcaagctgagactggccgagaacagcggcaacgccagcaccgagagaaacggcgtgagcttcagcgtgcagaacggcgacgtgtgcctgcacgacttcaccggcaagcagcacatgttcaacgagaaggaggacagctgcaacggcaagggcagaatggccctgagaagaaccagcaagagaggcagcctgcacttcatcgagcagatgtag

SEQ ID NO: 71642 - DNA, 354 bp, Artificial Sequence
  derived and/or modified sequence
atcctgctgaccatgcagcacatcaacaccggcatcgacatgctgaaccagctgggctgcgtgttcttcgccggcgtgaagccccagagaaacatctgcaacctgagcagcatctgcaacgacagcgccttcttcagaggcgagatcatgttccagtacgacaaggagagcaccgtgccccagaaccagcacatcaccaacggcaccctgaccggcgtgctgagcctgagcgagctgaagagaagcgagctgaacaagaccctgcagaccctgagcgagacctacttcatcatgtgcgccaccgccgaggcccagagacacatcaagctgtacatccacaacaagaccgagtag

SEQ ID NO: 71643 - DNA, 2977 bp, Artificial Sequence
  derived and/or modified sequence
attctcttgacaatgcagcacataaacacgggcattgacatgcttaaccagctgggttgtgttttctttgcaggcgtcaaaccccagagaaatatctgcaatttgtcatctatttgcaatgactcagcattttttagaggtgagatcatgtttcaatatgataaagaaagcactgttccccagaatcaacatataacgaatggcaccttaactggagtcctgtctctaagtgaattaaaacgctcagagctcaacaaaaccctgcaaaccctaagtgagacttactttataatgtgtgctacagcagaggcccaaaggcacattaaattgtacattcacaataaaactgaataatacaatgaatgcatgtgctgtaatagctgctttggaaagagtaaagattcgaccaatggaacactgctgctgttctgtcaggataccctgcccttcctccccagaagagttggaaaagcttcagtgtgacctgcaggatcccattgtctgtcttgctgaccatccacgtggcccaccattttcttccagccaatccatcccagtggtgcctcgggccactgtgctttcccaggtccccaaagctacctcttttgctgagcctccagattattcacctgtgacccacaatgttccctctccaataggggagattcaacccctttcaccccagccttcagctcccatagcttccagccctgccattgacatgcccccacagtctgaaacgatctcttcccctatgccccaaacccatgtctccggcaccccacctcctgtgaaagcctcattttcctctcccaccgtgtctgcccctgcgaatgtcaacactaccagcgcacctcctgtccagacagacatcgtcaacaccagcagtatttctgatcttgagaaccaagtgttgcagatggagaaggctctgtccttgggcagcctggagcctaacctcgcaggagaaatgatcaaccaagtcagcagactccttcattccccgcctgacatgctggcccctctggctcaaagattgctgaaagtagtggatgacattggcctacagctgaacttttcaaacacgactataagtctaacctccccttctttggctctggctgtgatcagagtgaatgccagtagtttcaacacaactacctttgtggcccaagaccctgcaaatcttcaggtttctctggaaacccaagctcctgagaacagtattggcacaattactcttccttcatcgctgatgaataatttaccagctcatgacatggagctagcttccagggttcagttcaatttttttgaaacacctgctttgtttcaggatccttccctggagaacctctctctgatcagctacgtcatatcatcgagtgttgcaaacctgaccgtcaggaacttgacaagaaacgtgacagtcacattaaagcacatcaacccgagccaggatgagttaacagtgagatgtgtattttgggacttgggcagaaatggtggcagaggaggctggtcagacaatggctgctctgtcaaagacaggagattgaatgaaaccatctgtacctgtagccatctaacaagcttcggcgttctgctggacctatctaggacatctgtgctgcctgctcaaatgatggctctgacgttcattacatatattggttgtgggctttcatcaatttttctgtcagtgactcttgtaacctacatagcttttgaaaagatccggagggattacccttccaaaatcctcatccagctgtgtgctgctctgcttctgctgaacctggtcttcctcctggactcgtggattgctctgtataagatgcaaggcctctgcatctcagtggctgtatttcttcattattttctcttggtctcattcacatggatgggcctagaagcattccatatgtacctggcccttgtcaaagtatttaatacttacatccgaaaatacatccttaaattctgcattgtcggttggggggtaccagctgtggttgtgaccatcatcctgactatatccccagataactatgggcttggatcctatgggaaattccccaatggttcaccggatgacttctgctggatcaacaacaatgcagtattctacattacggtggtgggatatttctgtgtgatatttttgctgaacgtcagcatgttcattgtggtcctggttcagctctgtcgaattaaaaagaagaagcaactgggagcccagcgaaaaaccagtattcaagacctcaggagtatcgctggccttacatttttactgggaataacttggggctttgccttctttgcctggggaccagttaacgtgaccttcatgtatctgtttgccatctttaataccttacaaggatttttcatattcatcttttactgtgtggccaaagaaaatgtcaggaagcaatggaggcggtatctttgttgtggaaagttacggctggctgaaaattctgactggagtaaaactgctactaatggtttaaagaagcagactgtaaaccaaggagtgtccagctcttcaaattccttacagtcaagcagtaactccactaactccaccacactgctagtgaataatgattgctcagtacacgcaagcgggaatggaaatgcttctacagagaggaatggggtctcttttagtgttcagaatggagatgtgtgccttcacgatttcactggaaaacagcacatgtttaacgagaaggaagattcctgcaatgggaaaggccgtatggctctcagaaggacttcaaagcggggaagcttacactttattgagcaaatgtgattcctttcttctaaaatcaaagcatgatgcttgacagtgtgaaatgtccaattttaccttttacacaatgtgagatgtatgaaaatcaactcattttattctcggcaacatctggagaagcataagctaattaagggcgatgattattattac

SEQ ID NO: 71644 - DNA, 2697 bp, Artificial Sequence
  derived and/or modified sequence
atggttttttcagtaagacagtgtggccatgtgggtcggaccgaggaggtactgctgaccttcaaaatattcttggtcatcatctgtctgcacgttgtactcgtgactagcctggaggaggacaccgacaacagttcgcttagtcctccccccgaggtggagacaaccagtcttaatgacgtgaccctaagtttgctgccatctaacgagaccggcgtaaagccccagaggaacatttgcaacctgtcttcgatctgtaatgactccgcctttttcaggggcgagataatgttccagtatgacaaggagtcaacggtgcctcaaaatcagcacatcaccaatggtaccttgacaggggtgctctccctatcagagctcaaaaggtcagagctgaataagacattacaaacactttctgagacatatttcatcatgtgcgcaacagcagaggctcagagtacactgaactgtacatttaccatcaagctgaacaatactatgaacgcctgtgccgttattgccgctcttgagcgggtgaagatcagacctatggaacattgctgctgctctgtacggattccttgtccttcaagcccagaggaattggaaaagctgcagtgcgaccttcaagatccgattgtgtgtctggctgatcatcctagaggtccccctttttcctcatcccagtcaatccctgtagtcccgagggctacagttctgagtcaagtacccaaagccaccagcttcgccgaaccacccgattattctccagtgacacacaacgttccatcccccatcggggaaatccagcccctgtcgccacagccgtcagctcctatagcctcttcgccagccattgatatgcctccgcaatccgagaccatcagttcccccatgcctcagacacacgtttcaggtactccaccccctgtcaaggcaagcttttcgagtccaacagtgagtgctcctgcaaatgtaaacaccacatcggctccacccgtgcagacagacatcgtcaatacttccagcatatctgaccttgaaaaccaggtactccagatggaaaaagccctgagtctaggaagtcttgaaccaaatcttgccggggagatgataaatcaggtgagcagactgctgcactcgcctccagatatgctggctcccctggcacagcgcttattgaaggttgtggacgatatcggtcttcagcttaacttttcgaacaccaccatcagcctcacttctccttcactcgccctcgctgtgatccgggtcaatgcctcttcatttaacacaaccacctttgtcgctcaggaccctgccaatctccaagatgagctgacggtacggtgcgttttttgggatttagggcgaaatggtggccggggagggtggagcgacaacggatgtagcgtgaaggaccggcggctgaatgagaccatatgcacctgttcgcatctgacgtctttcggagtcctcctggacctctctagaaccagtgtgcttccagcgcagatgatggcgctgacatttatcacctacattgggtgtgggctttcaagtattttcctgtcagtcactcttgttacgtatattgccttcgaaaagatcaggcgagattaccccagcaaaatcttaattcaactttgcgccgcgctgctgctcctgaatctcgtgtttcttttagatagttggatcgccctgtacaagatgcaaggcctgtgtatcagtgtcgccgtattcttgcattattttctgctggtgtccttcacatggatgggcctggaagcctttcatatgtatctggccctcgtgaaggtttttaatacatacatccggaaatacatcctcaaattttgtatcgtgggatggggagtacctgctgtggttgtgacgattatcctcactatatcacctgacaattatgggctgggctcttacggcaagtttccaaatggttcccccgacgatttttgctggatcaataacaatgccgttttctacatcacagtggtcggctacttctgtgtgatcttcctgctgaatgtgtctatgttcattgtggtcctcgtgcagctgtgccggatcaagaagaagaaacagctgggcgcacaacgaaagacgtcgatccaggacctcaggtctatcgctggcctgacgttcctactgggaatcacttggggattcgcgttcttcgcctggggtcctgtgaatgtaacgtttatgtatctgttcgccatcttcaacacacttcagggctttttcatattcatcttctactgtgtggcaaaagagaatgtgcgaaagcaatggcggaggtacctctgctgcggaaaattacgacttgcagagaacagtgactggtctaaaacggcaacaaatggcttgaagaagcagacggtaaatcaaggcgtaagtagctcttctaactccctgcaaagctcatctaactcgactaactctaccaccttgttagtcaataatgattgttctgttcacgcttccggtaacggcaatgcttctactgaacgaaatggtgtgtcattctccgtccaaaatggagacgtatgtctgcacgacttcaccggcaaacagcacatgttcaatgagaaagaagacagctgcaatggaaagggtcgcatggctctccgcagaacaagcaaacgcggatccttacacttcatcgaacagatgtag

SEQ ID NO: 71645 - DNA, 2697 bp, Artificial Sequence
  derived and/or modified sequence
atggtgttttctgtgcggcagtgtggccacgtgggccgcacagaggaggtgctgctgaccttcaagatcttcctggtgatcatctgcctgcacgtggtgctggtgaccagcctggaggaggacacagacaacagcagcctgagccccccacctgaggtggagaccaccagcctgaatgatgtgaccctgagcctgctgcccagcaatgaaacaggagtgaagccccagaggaacatctgcaacctgagcagcatctgcaatgattctgccttcttccggggggagatcatgttccagtatgacaaggagagcacagtgccccagaaccagcacatcaccaacggcaccctgactggagtgctgagcctgtctgagctgaagaggtctgagctgaacaagaccctgcagaccctgtctgagacctacttcatcatgtgtgccacagctgaggcccagagcaccctgaactgcaccttcaccatcaagctgaacaacaccatgaatgcctgtgctgtgattgctgccctggagcgggtgaagatccggcccatggagcactgctgctgcagcgtgcgcatcccctgccccagcagccctgaggagctggagaagctgcagtgtgacctgcaggaccccatcgtgtgcctggccgaccacccccggggcccccccttcagcagcagccagagcatccctgtggtgccccgggccaccgtgctgagccaggtgcccaaggccaccagctttgctgagcccccagactacagccctgtgacccacaacgtgcccagccccatcggggagatccagcccctgagcccccagcccagcgcccccatcgccagcagccctgccatcgacatgccaccccagagcgagaccatcagcagccccatgccccagacccacgtgtctggcaccccacctcctgtgaaggccagcttcagcagccccaccgtgtctgccccagccaacgtgaacaccaccagcgcccctcctgtgcagacagacatcgtgaacaccagcagcatcagtgacctggagaaccaggtgctgcagatggagaaggccctgagcctgggcagcctggagcccaacctggccggggagatgatcaaccaggtgtcccggctgctgcacagccccccagacatgctggcccccctggcccagaggctgctgaaggtggtggatgacatcggcctgcagctgaacttcagcaacaccaccatcagcctgaccagccccagcctggccctggccgtcatccgggtgaatgccagcagcttcaacaccaccacctttgtggcccaggaccctgccaacctgcaggatgagctgactgtgcgctgtgtgttctgggacctgggcagaaatggaggccggggcggctggagcgacaatggctgcagcgtgaaggaccggcggctgaatgagaccatctgcacctgcagccacctgaccagctttggagtgctgctggacctgagcaggacctctgtgctgcctgcccagatgatggccctgaccttcatcacctacatcggctgcggcctgagcagcatcttcctgtctgtgaccctggtgacctacatcgcctttgagaagatccggcgggactaccccagcaagatcctgatccagctgtgtgccgccctgctgctgctgaacctggtgttcctgctggacagctggatcgccctgtacaagatgcagggcctgtgcatctctgtggccgtgttcctgcactacttcctgctggtgtccttcacctggatgggcctggaggccttccacatgtacctggccctggtgaaggtgttcaacacctacatcaggaagtacatcctgaagttctgcatcgtgggctggggcgtgcctgctgtggtggtgaccatcatcctgaccatcagcccagacaactacggcctgggcagctatggcaagttccccaacggcagcccagatgacttctgctggatcaacaacaatgctgtgttctacatcaccgtggtgggctacttctgtgtgatcttcctgctgaatgtgtccatgtttattgtggtgctggtgcagctgtgccgcatcaagaagaagaagcagctgggcgcccagaggaagaccagcatccaggacctgcggagcattgctggcctgaccttcctgctgggcatcacctggggctttgccttctttgcctggggccctgtgaatgtgaccttcatgtacctgtttgccatcttcaacaccctgcagggcttcttcatcttcatcttctactgtgtggccaaggaaaatgtgaggaagcagtggaggcgctacctgtgctgcggcaagctgcggctggccgagaacagcgactggagcaagacagccaccaacggcctgaagaagcagacagtgaaccagggcgtgagcagcagcagcaacagcctgcagagcagcagcaacagcaccaacagcaccaccctgctggtgaacaatgactgcagcgtgcacgccagcggaaatggaaatgccagcacagaaagaaatggagtgtccttctctgtgcagaatggagatgtgtgcctgcatgacttcaccgggaagcagcacatgtttaatgagaaggaggacagctgcaatggcaagggccgcatggccctgcggaggaccagcaagaggggcagcctgcacttcatcgagcagatgtag

SEQ ID NO: 71646 - DNA, 2697 bp, Artificial Sequence
  derived and/or modified sequence
atggtgttcagcgtgcggcagtgcggccacgtgggccggaccgaggaggtgctattgacatttaagatatttctcgtcatcatctgtctccacgtcgtgttggtcacaagcctggaagaggataccgataactcgagcttgtccccccctccagaagtcgagaccacaagtctcaacgatgtgacactgagtctgctgccttcaaatgaaaccggagttaaacctcagcgcaacatttgcaatctgtccagcatctgcaatgattcagcttttttccgcggggaaatcatgttccagtacgataaggagtctactgtcccgcaaaaccagcatattaccaatggtacactaaccggcgtgcttagcttaagcgaattaaaaagatcagaattgaataagaccctccagacgctcagcgagacctacttcatcatgtgcgccactgccgaggcgcagtctacactcaactgcacctttacaattaagctaaacaataccatgaacgcctgcgccgtgattgctgctctcgagcgcgtgaaaataaggccaatggaacactgttgctgttctgtacggatcccgtgccccagcagccctgaagagcttgagaagctgcaatgcgatctgcaggatccaatcgtatgcttggccgatcatccacgcgggcccccattcagtagcagtcagagcataccagtcgttccaagggcaacagtgctgtcccaggtgccaaaggcaacttctttcgccgagccgcctgattacagccccgtgacacataacgttcccagtcctatcggcgaaatccagcctctttcaccccagccatctgccccaatcgcctccagtcccgccatcgacatgccaccacagtccgaaacaatatctagccctatgccacagacgcacgtgtctggaacccctcctcctgtgaaggcctccttcagttccccaacagtatccgctcctgctaacgttaatacaacatctgcccctcccgtccagactgatatcgtgaatactagctcgatttccgacctggagaaccaggttcttcagatggaaaaagcgctttctctgggaagcctggagccaaatctcgcgggagagatgataaaccaggtgagccggctgctgcactctcccccagatatgcttgcccctctcgcacagaggctgcttaaagtggtggacgatattggtctgcagctgaacttctccaatactactatctcactcacctccccatccctggccttagctgtgatccgcgtcaatgcgagctcattcaataccacgacctttgtggcgcaagaccctgcgaatctgcaggacgaattgacagttagatgcgtgttttgggacttgggacgcaatggcggacggggaggctggtctgataacgggtgctctgtcaaggaccggaggctgaacgaaaccatctgtacctgttctcatctcacaagctttggtgtgctgttggacctgtcacgaacgtctgtcctccccgctcagatgatggccctcactttcatcacatacatcggatgcggactgagtagcattttcctatctgttacccttgtcacttacattgcctttgagaagattcggagagactatccaagcaagattttgatccagttatgcgcagctttactcctgctaaacctcgtgtttctgctagatagctggattgccctgtataagatgcagggactctgtatttcggtggcagtgtttcttcattatttcctactggtgtctttcacatggatgggcttagaggccttccatatgtacctcgccttggtgaaagtgttcaacacctacatcaggaagtacatactcaagttttgtattgttggatggggggtgccagccgttgtcgttacgattatactgacaatttccccagataactacggcctaggaagctatggcaagttccccaacggatctcctgacgatttttgctggatcaataataacgctgtattttatattacggtggtaggttatttttgcgtcatttttctcctaaacgtgtctatgttcatagtcgtgctggtccagctgtgtcggatcaaaaagaagaagcagctcggggcgcagaggaaaaccagtatccaggatctcagatctatagccggtttgacattcctactggggattacctggggtttcgctttttttgcttggggccccgttaacgtaacatttatgtacctgtttgcgatattcaacacccttcagggcttttttatatttatcttttactgcgtggccaaagaaaacgtgaggaagcaatggcggcgatacctgtgttgcgggaagcttagactggctgagaattctgattggtctaagacagccacgaacggactcaaaaaacagactgtaaaccaaggcgtgtccagcagttcaaattctcttcagagtagttccaattccaccaatagtactacactgctggtgaataacgattgcagtgtgcacgctagcggaaacggaaatgctagcactgagaggaatggcgttagcttctccgtgcagaacggtgacgtgtgtctgcatgattttactggaaagcagcacatgttcaatgaaaaggaggactcttgtaatgggaaaggcaggatggccctgcgacgcacctccaagcgaggctcactgcacttcatagaacagatgtag

SEQ ID NO: 71647 - DNA, 2697 bp, Artificial Sequence
  derived and/or modified sequence
atggtattctccgtgcgacagtgtgggcatgttggccgaaccgaagaagttctccttaccttcaaaatatttctcgtaatcatttgtctgcatgtcgtcttagtaaccagcctggaagaggataccgacaatagtagcctctctcctcctcccgaagtagagacaacctcacttaatgacgttactttatcactgctgccctctaacgagaccggagtcaaacctcaacgcaatatttgcaacctgtcctctatctgtaacgattccgcatttttccgcggagagataatgtttcagtatgacaaagagagcaccgtgccccaaaaccaacacattacaaatggcaccctcacaggcgttctgtcactgtctgaattaaagcggtccgagctgaacaaaactctgcagaccctcagtgagacctacttcattatgtgcgccaccgctgaagcccaaagtaccctgaactgcactttcacaattaagctcaataacacaatgaacgcttgtgcggttattgcagccctggagcgcgtgaaaatacggccaatggagcattgctgctgctccgtgcgcattccttgcccctcaagccccgaggagctggagaaacttcagtgtgatctgcaggatcccatagtgtgcctcgccgaccatccacgtgggccaccctttagcagttcccagagtataccagtcgtgccacgcgcaacagtcttaagccaagtgcctaaggctacttcattcgccgagccacccgattattctccggtgacccacaacgttcctagccccattggggagatccaacccctcagcccgcagccctccgccccaattgcttcgtcacccgctatcgatatgccccctcagtctgagacaataagctctcccatgccccagacccacgtgtctggcacaccaccgcctgttaaggcctcctttagctctccaaccgtctctgcccctgccaacgtcaacactaccagcgctcctccggtccagaccgacatagttaatactagctctatatccgacctggagaaccaggtgctgcaaatggaaaaagccttgtccctcggctcgctcgaacccaatttagcaggcgagatgatcaaccaggtaagcagactgttacatagtcccccagatatgctagccccactggcccagcgcctactcaaagtcgttgatgatatcgggttgcagctgaatttttccaataccaccatctctttgaccagtccctccctcgccctggccgtaatcagagtgaatgcgagcagctttaataccaccacgtttgtggcacaggatcccgctaacctgcaggatgaactgactgtgcgctgcgtcttttgggaccttggtaggaatgggggtcgtggcggatggtccgacaacggatgctcagtaaaggaccgcaggttgaacgagacaatttgcacatgcagccatctcacaagtttcggagtgctgctggacttaagtcgcacgtccgttctccctgcccagatgatggctctgaccttcattacctatatcggatgtggtctcagcagtatctttttgagcgtgaccttggtgacctacatcgccttcgaaaaaatccgccgagactacccatcgaaaattcttatccaactgtgcgccgctctcctgttgctgaatctggtgtttctactggatagttggatagccctctacaaaatgcagggcctgtgtattagcgttgcagtgtttctccattatttccttcttgtgagttttacttggatgggtctagaagcctttcatatgtacttggcactggtcaaggtctttaatacctacattaggaagtatatcctgaagttctgcattgtggggtggggagttccagcggttgtggttacaatcattctgactattagcccggataactatggactggggagctatgggaagtttccaaacggctcacccgatgatttttgctggatcaacaataacgcagtattttatataactgtcgttgggtacttctgtgtgatctttctgctaaatgtatcaatgtttattgtggtgcttgtgcagctctgtcgaatcaagaagaaaaagcagttgggggctcagaggaagacatctatccaggacctgaggagcattgcaggtctcacatttcttctaggaattacctggggcttcgctttcttcgcctgggggcctgtcaatgtgacattcatgtaccttttcgccatttttaatacactgcaaggcttcttcatcttcatcttttactgtgttgccaaggagaacgtgagaaaacaatggcgccgttatctgtgttgcggcaaactgaggttggccgaaaattcagattggagcaaaacagccacgaatggcctcaaaaaacagacagtgaatcagggcgtatccagcagctcaaattccctgcagtcctctagcaatagcaccaacagtacaactctgctggtgaataatgattgctcagtgcacgcttcaggcaatggcaacgccagcaccgaaagaaacggcgtcagcttcagtgtccagaatggggacgtctgccttcatgacttcacaggcaagcagcacatgttcaatgaaaaggaagactcatgcaatgggaaaggtcgcatggccctgcgcaggacatcaaaacgtggttccctgcatttcatcgagcagatgtag

SEQ ID NO: 71648 - DNA, 2697 bp, Artificial Sequence
  derived and/or modified sequence
atggtgttcagcgtgagacagtgcggccacgtgggcagaaccgaggaggtgctgctgaccttcaagatcttcctggtgatcatctgcctgcacgtggtgctggtgaccagcctggaggaggacaccgacaacagcagcctgagccccccccccgaggtggagaccaccagcctgaacgacgtgaccctgagcctgctgcccagcaacgagaccggcgtgaagccccagagaaacatctgcaacctgagcagcatctgcaacgacagcgccttcttcagaggcgagatcatgttccagtacgacaaggagagcaccgtgccccagaaccagcacatcaccaacggcaccctgaccggcgtgctgagcctgagcgagctgaagagaagcgagctgaacaagaccctgcagaccctgagcgagacctacttcatcatgtgcgccaccgccgaggcccagagcaccctgaactgcaccttcaccatcaagctgaacaacaccatgaacgcctgcgccgtgatcgccgccctggagagagtgaagatcagacccatggagcactgctgctgcagcgtgagaatcccctgccccagcagccccgaggagctggagaagctgcagtgcgacctgcaggaccccatcgtgtgcctggccgaccaccccagaggcccccccttcagcagcagccagagcatccccgtggtgcccagagccaccgtgctgagccaggtgcccaaggccaccagcttcgccgagccccccgactacagccccgtgacccacaacgtgcccagccccatcggcgagatccagcccctgagcccccagcccagcgcccccatcgccagcagccccgccatcgacatgcccccccagagcgagaccatcagcagccccatgccccagacccacgtgagcggcacccccccccccgtgaaggccagcttcagcagccccaccgtgagcgcccccgccaacgtgaacaccaccagcgccccccccgtgcagaccgacatcgtgaacaccagcagcatcagcgacctggagaaccaggtgctgcagatggagaaggccctgagcctgggcagcctggagcccaacctggccggcgagatgatcaaccaggtgagcagactgctgcacagcccccccgacatgctggcccccctggcccagagactgctgaaggtggtggacgacatcggcctgcagctgaacttcagcaacaccaccatcagcctgaccagccccagcctggccctggccgtgatcagagtgaacgccagcagcttcaacaccaccaccttcgtggcccaggaccccgccaacctgcaggacgagctgaccgtgagatgcgtgttctgggacctgggcagaaacggcggcagaggcggctggagcgacaacggctgcagcgtgaaggacagaagactgaacgagaccatctgcacctgcagccacctgaccagcttcggcgtgctgctggacctgagcagaaccagcgtgctgcccgcccagatgatggccctgaccttcatcacctacatcggctgcggcctgagcagcatcttcctgagcgtgaccctggtgacctacatcgccttcgagaagatcagaagagactaccccagcaagatcctgatccagctgtgcgccgccctgctgctgctgaacctggtgttcctgctggacagctggatcgccctgtacaagatgcagggcctgtgcatcagcgtggccgtgttcctgcactacttcctgctggtgagcttcacctggatgggcctggaggccttccacatgtacctggccctggtgaaggtgttcaacacctacatcagaaagtacatcctgaagttctgcatcgtgggctggggcgtgcccgccgtggtggtgaccatcatcctgaccatcagccccgacaactacggcctgggcagctacggcaagttccccaacggcagccccgacgacttctgctggatcaacaacaacgccgtgttctacatcaccgtggtgggctacttctgcgtgatcttcctgctgaacgtgagcatgttcatcgtggtgctggtgcagctgtgcagaatcaagaagaagaagcagctgggcgcccagagaaagaccagcatccaggacctgagaagcatcgccggcctgaccttcctgctgggcatcacctggggcttcgccttcttcgcctggggccccgtgaacgtgaccttcatgtacctgttcgccatcttcaacaccctgcagggcttcttcatcttcatcttctactgcgtggccaaggagaacgtgagaaagcagtggagaagatacctgtgctgcggcaagctgagactggccgagaacagcgactggagcaagaccgccaccaacggcctgaagaagcagaccgtgaaccagggcgtgagcagcagcagcaacagcctgcagagcagcagcaacagcaccaacagcaccaccctgctggtgaacaacgactgcagcgtgcacgccagcggcaacggcaacgccagcaccgagagaaacggcgtgagcttcagcgtgcagaacggcgacgtgtgcctgcacgacttcaccggcaagcagcacatgttcaacgagaaggaggacagctgcaacggcaagggcagaatggccctgagaagaaccagcaagagaggcagcctgcacttcatcgagcagatgtag

SEQ ID NO: 71649 - protein, 993 aa, Artificial Sequence
  derived and/or modified sequence
MVFSVRQCGHVGRTEEVLLTFKIFLVIICLHVVLVTSLEEDTDNSSLSPPPDVTLSLLPSNETEKTKITIVKTFNASGVKPQRNICNLSSICNDSAFFRGEIMFQYDKESTVPQNQHITNGTLTGVLSLSELKRSELNKTLQTLSETYFIMCATAEAQSTLNCTFTIKLNNTMNACAVIAALERVKIRPMEHCCCSVRIPCPSSPEELEKLQCDLQDPIVCLADHPRGPPFSSSQSIPVVPRATVLSQVPKATSFAEPPDYSPVTHNVPSPIGEIQPLSPQPSAPIASSPAIDMPPQSETISSPMPQTHVSGTPPPVKASFSSPTVSAPANVNTTSAPPVQTDIVNTSSISDLENQVLQMEKALSLGSLEPNLAGEMINQVSRLLHSPPDMLAPLAQRLLKVVDDIGLQLNFSNTTISLTSPSLALAVIRVNASSFNTTTFVAQDPANLQVSLETQAPENSIGTITLPSSLMNNLPAHDMELASRVQFNFFETPALFQDPSLENLSLISYVISSSVANLTVRNLTRNVTVTLKHINPSQDELTVRCVFWDLGRNGGRGGWSDNGCSVKDRRLNETICTCSHLTSFGVLLDLSRTSVLPAQMMALTFITYIGCGLSSIFLSVTLVTYIAFEKIRRDYPSKILIQLCAALLLLNLVFLLDSWIALYKMQGLCISVAVFLHYFLLVSFTWMGLEAFHMYLALVKVFNTYIRKYILKFCIVGWGVPAVVVTIILTISPDNYGLGSYGKFPNGSPDDFCWINNNAVFYITVVGYFCVIFLLNVSMFIVVLVQLCRIKKKKQLGAQRKTSIQDLRSIAGLTFLLGITWGFAFFAWGPVNVTFMYLFAIFNTLQGFFIFIFYCVAKENVRKQWRRYLCCGKLRLAENSDWSKTATNGLKKQTVNQGVSSSSNSLQSSSNSTNSTTLLVNNDCSVHASGNGNASTERNGVSFSVQNGDVCLHDFTGKQHMFNEKEDSCNGKGRMALRRTSKRGSLHFIEQM

SEQ ID NO: 71650 - DNA, 2982 bp, Artificial Sequence
  derived and/or modified sequence
atggtgttctcagttcgacagtgtggccacgtcggccggaccgaggaggtgctgttaacttttaaaatttttctggtaatcatatgcctccacgttgtcctcgtcacctccctggaggaagacactgataatagtagcctttcccccccaccagacgtgaccctgtctcttcttcccagcaacgaaactgaaaagactaaaattactattgttaagacatttaacgccagtggggtgaagccacaacggaacatctgtaacctaagctcaatatgtaacgactcagccttctttcggggcgaaataatgtttcagtatgataaagagtctacagtgccccagaatcagcatattaccaacggcacccttaccggagtgctgagcctgagcgagctgaaacgttctgagctgaataagacactccagaccctctccgagacctactttatcatgtgcgcaactgcggaggctcaaagcacactaaattgcacatttaccatcaaactcaacaacaccatgaacgcctgtgctgttattgccgctctcgagagagtgaagatcagaccaatggaacattgctgctgctcagtgcgcataccctgcccgtcttcacccgaggaactggaaaaactccagtgcgacttgcaggaccccatagtttgcctggcagaccacccacgcggtcctccattttcatccagccagtctattcctgtggtgcctagggcaaccgtcctcagtcaggtgcctaaggctacaagttttgccgagccccccgattattctcctgtgacgcacaacgtgcccagccccattggcgaaatacagccgttatcaccacaaccatccgccccaattgcttcctcaccagcgattgacatgccacctcaatccgaaaccatttcttccccaatgccccaaactcacgtgagcgggacaccaccccccgtcaaggctagcttctccagccccactgtttcagccccagccaacgtcaataccacttctgctccacctgtgcaaactgatattgtcaatacctcttcaatatcagacttggagaaccaggtgcttcaaatggagaaggcactctccctcggatcacttgagcccaatttggcgggcgaaatgataaatcaggtgagtaggctgctgcattcacccccggacatgctggctccccttgcccagcgcttattgaaggtcgtggacgacatcggattgcagctgaattttagcaacacgactatctctctcaccagcccatcgctagccctggcggttatcagggtgaacgcaagctccttcaacaccaccactttcgtcgctcaagatcccgccaacttgcaggtttctctggaaacccaggccccagaaaactccattggtaccattacactcccttcatccctgatgaacaacctacctgcccatgacatggagctggccagccgcgtgcagttcaactttttcgagactccagctctgttccaggaccctagccttgagaatctctccctgatcagttatgtaatcagttctagcgtggccaatctcactgtcagaaaccttacacgtaacgttacagtgaccctcaagcatatcaatccttctcaggacgaactgacagttcgatgcgtgttctgggacctgggcaggaatgggggacggggcggttggtccgataatggttgctccgtcaaggataggagacttaatgagacaatctgtacctgcagccacctgacaagcttcggcgtcctcctggatctctcccgcacctctgtgctacccgcacagatgatggccctgacattcataacctacattggctgcggcctgtccagtatcttcctgtccgtaactctggtgacctacatagcctttgaaaaaatccgtagggattatccatcaaaaatcctgatacagttgtgcgctgcactcctgctactgaatttggtatttcttctggactcttggatcgctctctataaaatgcagggtctatgcatcagcgtcgcagtgttcttgcattatttcctcctagtgtcttttacttggatgggcctagaggctttccacatgtatctggctctggtcaaagtgttcaatacctacattcggaagtacatcctcaagttctgtatcgttggttggggggttcccgcagtggtggtgactatcatcctgacgattagtcctgacaattacggactaggaagttatggaaagtttccaaatggcagccccgacgacttttgttggatcaacaataacgcagttttctacattaccgttgtaggctatttctgtgttatcttcttgcttaatgtgtccatgtttatagtcgttctggtacagctctgccgtattaagaagaaaaagcagttaggagcccagaggaagaccagtatccaagacctaagatctattgctggacttacatttttgcttggcattacctggggattcgcctttttcgcttggggcccagttaacgtgacctttatgtacttattcgccatctttaatactcttcagggattctttatcttcatcttttattgcgtcgctaaagagaacgtacgcaagcaatggagaaggtatctttgctgtggaaaactccgtctcgccgaaaatagcgactggtcgaagaccgcgacaaacgggttaaaaaagcagactgtcaatcagggagtgagctccagttccaactccttgcagtcctcctcaaattctaccaattctaccacactcctggtaaataatgactgttctgtccatgcaagcggaaatggcaacgcttctactgagaggaacggcgtgtccttcagcgtgcagaatggcgatgtctgcctgcacgattttacagggaaacagcatatgtttaacgagaaagaagacagttgtaacggaaagggcaggatggctttgcgacggacatctaagcgtggatctctgcacttcatagagcagatgtag

SEQ ID NO: 71651 - DNA, 2982 bp, Artificial Sequence
  derived and/or modified sequence
atggtgttttctgtgcggcagtgtggccacgtgggccgcacagaggaggtgctgctgaccttcaagatcttcctggtgatcatctgcctgcacgtggtgctggtgaccagcctggaggaggacacagacaacagcagcctgagccccccaccagatgtgaccctgagcctgctgcccagcaatgaaacagagaagaccaagatcaccatcgtgaagaccttcaatgccagcggcgtgaagccccagaggaacatctgcaacctgagcagcatctgcaatgattctgccttcttccggggggagatcatgttccagtatgacaaggagagcacagtgccccagaaccagcacatcaccaacggcaccctgactggagtgctgagcctgtctgagctgaagaggtctgagctgaacaagaccctgcagaccctgtctgagacctacttcatcatgtgtgccacagctgaggcccagagcaccctgaactgcaccttcaccatcaagctgaacaacaccatgaatgcctgtgctgtgattgctgccctggagcgggtgaagatccggcccatggagcactgctgctgcagcgtgcgcatcccctgccccagcagccctgaggagctggagaagctgcagtgtgacctgcaggaccccatcgtgtgcctggccgaccacccccggggcccccccttcagcagcagccagagcatccctgtggtgccccgggccaccgtgctgagccaggtgcccaaggccaccagctttgctgagcccccagactacagccctgtgacccacaacgtgcccagccccatcggggagatccagcccctgagcccccagcccagcgcccccatcgccagcagccctgccatcgacatgccaccccagagcgagaccatcagcagccccatgccccagacccacgtgtctggcaccccacctcctgtgaaggccagcttcagcagccccaccgtgtctgccccagccaacgtgaacaccaccagcgcccctcctgtgcagacagacatcgtgaacaccagcagcatcagtgacctggagaaccaggtgctgcagatggagaaggccctgagcctgggcagcctggagcccaacctggccggggagatgatcaaccaggtgtcccggctgctgcacagccccccagacatgctggcccccctggcccagaggctgctgaaggtggtggatgacatcggcctgcagctgaacttcagcaacaccaccatcagcctgaccagccccagcctggccctggccgtcatccgggtgaatgccagcagcttcaacaccaccacctttgtggcccaggaccctgccaacctgcaggtgtccctggagacccaggccccagaaaattccatcggcaccatcaccctgcccagcagcctgatgaacaacctgcctgcccatgacatggagctggccagccgggtgcagttcaacttctttgagaccccagccctcttccaggaccccagcctggagaacctgagcctcatctcctatgtgatcagcagctctgtggccaacctgactgtgaggaacctgaccagaaatgtgacagtgaccctgaagcacatcaaccccagccaggatgagctgactgtgcgctgtgtgttctgggacctgggcagaaatggaggccggggcggctggagcgacaatggctgcagcgtgaaggaccggcggctgaatgagaccatctgcacctgcagccacctgaccagctttggagtgctgctggacctgagcaggacctctgtgctgcctgcccagatgatggccctgaccttcatcacctacatcggctgcggcctgagcagcatcttcctgtctgtgaccctggtgacctacatcgcctttgagaagatcagaagagactaccccagcaagatcctgatccagctgtgtgccgccctgctgctgctgaacctggtgttcctgctggacagctggatcgccctgtacaagatgcagggcctgtgcatctctgtggccgtgttcctgcactacttcctgctggtgtccttcacctggatgggcctggaggccttccacatgtacctggccctggtgaaggtgttcaacacctacatcaggaagtacatcctgaagttctgcatcgtgggctggggcgtgcctgctgtggtggtgaccatcatcctgaccatcagcccagacaactacggcctgggcagctatggcaagttccccaacggcagcccagatgacttctgctggatcaacaacaatgctgtgttctacatcaccgtggtgggctacttctgtgtgatcttcctgctgaatgtgtccatgttcatcgtggtgctggtgcagctgtgccgcatcaagaagaagaagcagctgggcgcccagaggaagaccagcatccaggacctgcggagcattgctggcctgaccttcctgctgggcatcacctggggctttgccttctttgcctggggccctgtgaatgtgaccttcatgtacctgtttgccatcttcaacaccctgcagggcttcttcatcttcatcttctactgtgtggccaaggaaaatgtgaggaagcagtggaggcgctacctgtgctgcggcaagctgcggctggctgaaaattctgactggagcaagacagccaccaacggcctgaagaagcagacagtgaaccagggcgtgagcagcagcagcaacagcctgcagagcagcagcaacagcaccaacagcaccaccctgctggtgaacaatgactgcagcgtgcacgccagcggaaatggaaatgccagcacagaaagaaatggagtgtccttctctgtgcagaatggagatgtgtgcctgcatgacttcaccgggaagcagcacatgtttaatgagaaggaggacagctgcaatggaaaaggaaggatggccctgcggaggaccagcaagaggggcagcctgcacttcatcgagcagatgtag

SEQ ID NO: 71652 - DNA, 2982 bp, Artificial Sequence
  derived and/or modified sequence
atggtgttcagcgtgcggcagtgcggccacgtgggccggaccgaggaagtgttgctgacattcaaaatttttctcgtgattatctgcctccacgtggtgctggtgacatctctggaggaggatactgataatagctcactgtctcctccacccgatgtgaccctgtctctcctgccctccaatgagaccgagaaaaccaaaataacaatcgtgaagactttcaacgcctccggcgttaagccgcagcgcaatatttgcaacctgagctcaatatgtaacgacagtgctttttttagaggagagattatgttccaatacgacaaggagtctacagttccacagaaccagcatatcactaacggaaccctgaccggcgtgctttccctctcagagctgaagcgaagcgaactaaacaagacacttcagaccttgagtgaaacctacttcattatgtgcgcgaccgccgaagcccagtccacactaaactgtacattcactatcaaactcaataataccatgaacgcgtgtgccgtgattgcggctctggaacgggtgaagatacgacccatggaacactgttgctgctccgtgcgcataccatgtccttcctcccctgaggaattagaaaagttacagtgtgatctgcaggaccccatcgtgtgtttggcggatcaccctcggggcccccccttctcgagtagccagtcaatacccgttgtgccacgggccaccgtgctcagccaggtccccaaggccacctctttcgcagagccccctgattacagccccgtaacccataacgtccctagcccgattggagaaatacagcccctctcacctcaacctagtgctcctatcgcttcgagcccagccatagacatgcctcctcagagtgagactatctcaagccccatgcctcagacacacgtgtccgggacaccaccgcctgtcaaagcctccttttcgtcgccgaccgtgtctgcgcctgccaatgttaatacaacaagcgcgccgcctgtacagaccgatatagtcaacactagcagtatcagtgacctagaaaaccaggtgctgcagatggagaaggccctctccctcggttctttggaaccaaatctggcaggagaaatgatcaaccaggtctctaggttgttacactctcctccagacatgctggcccccttggcacaacggctactgaaggttgtagatgatatagggctccagctcaacttctccaatactactattagcctgacatctcccagtctggctctggccgtcatccgggtaaacgcctctagcttcaacacgaccaccttcgttgcccaggatcccgccaacctgcaggtttctctcgagacacaggctccagagaattcgatcggaaccattacacttccatcctcattaatgaataacctgccagcccatgacatggaattggcgagcagagttcagttcaacttttttgagacccctgccctgttccaggatccttcactggagaacctgtccctgatatcctacgtgatttcctccagcgtagctaacctcaccgtgagaaatcttactcggaatgtgactgtgaccctgaaacatataaatccgtctcaggatgaactcaccgtgcggtgtgtcttctgggaccttggacgcaatggaggtagaggaggatggtcagacaatggttgtagcgtaaaggaccggcgattgaacgagaccatatgcacttgctcccatttgacttccttcggcgtcttactggacctgtctaggactagcgtgctgcccgctcagatgatggcactgacgttcatcacctatattggatgtggtctatcttcaatctttctgagtgtaacattagtgacatatattgcatttgagaagattcgacgcgattacccatccaagatcctcatccagctgtgtgctgccttgctgctgctcaacctcgttttcctcctagacagctggatcgcactatacaagatgcagggtctgtgtatctctgtggccgtattcctccactacttccttctggtgagctttacatggatgggtctggaagctttccatatgtacttagctctggtcaaggtttttaatacgtacatcagaaagtacattctgaagttctgcatcgttggctggggagtcccagcagttgtggtgacaatcattcttacaatcagccccgacaactacggcctcgggagctacggaaaatttcctaatggcagtccagacgatttctgttggatcaataataatgctgtgttttacattaccgtggtagggtatttttgtgtcatcttcctactgaatgtcagcatgtttatagtcgtgctggtccagctgtgcagaattaaaaaaaagaaacagctgggagctcaacgtaaaaccagtattcaggacctccgatctattgccgggttaactttcctcctcgggataacctggggtttcgctttttttgcctggggccctgtgaatgtaaccttcatgtacctcttcgcaatattcaacacattgcaaggattcttcatcttcattttctactgtgtggccaaagaaaatgtcagaaagcagtggcggcggtatctctgttgtggtaaattgaggctcgccgagaacagcgattggtctaagaccgccacgaatggactcaagaagcagaccgtgaatcaaggggtatcaagctctagcaatagtctccagagttcttctaatagcaccaactcaacaacattgctggtcaataacgactgcagtgtgcatgcaagcgggaatggcaacgcctccaccgagcggaacggcgtctcgttttccgtacagaacggcgatgtgtgcctgcatgacttcactgggaaacagcatatgttcaatgaaaaagaagattcatgcaacggaaaaggacggatggcacttaggaggacatcgaaacgcgggagtctccattttatcgagcagatgtag

SEQ ID NO: 71653 - DNA, 2982 bp, Artificial Sequence
  derived and/or modified sequence
atggtgttttcagtccgccagtgcggccatgtcgggaggacagaagaagtgcttctgacatttaaaatctttctggtgatcatctgccttcacgtggtgctggtgaccagtctcgaggaggacaccgataattcctctttgtccccccctcctgatgtcactctctccctgctgccctccaatgagaccgaaaagacaaaaataacaattgtgaaaaccttcaatgcttcaggagtgaagcctcagcgaaatatttgcaatttgtcttccatctgtaacgatagcgcgtttttccgcggagagatcatgtttcaatatgacaaggagtcgacagtgccccaaaaccagcatatcacaaatgggacactcaccggtgttttgagcttgtcagaactgaagaggtcagagctgaacaagacactgcagacgctcagcgaaacctactttattatgtgtgcaacagcagaggcacagtctacattaaactgtactttcactatcaaattaaacaacacgatgaacgcctgcgccgttatcgccgcactggagagggtaaagattcgcccaatggagcactgttgttgctctgtgcggatcccctgtccctccagcccagaggagctggaaaaacttcagtgcgatcttcaggaccccatagtgtgcctggctgatcatccccgtggacctcctttctcatcgagccagtctatcccagtggtacctcgtgcaaccgttctctcacaggtgccaaaagccacttccttcgctgaacctcccgactactccccagtgactcataacgtgccgtcacctatcggcgagatacagcctctgtctccacaaccctctgcccctattgcaagctcaccagcaattgatatgcctccacagagcgagactatttctagcccaatgcctcagacacacgtgtctggtacacctcctccggttaaagcttccttcagctcacctaccgtgtctgctcccgctaacgtcaacacaacgagcgctccccctgtacagactgacattgttaacacgtcctccatctccgacttggaaaaccaggtgcttcagatggaaaaagcactctccctgggctctctcgaaccgaacctggctggggaaatgattaatcaggtgtcaagactgctgcactcccccccagacatgctggccccactcgctcagagactcttgaaggtcgtggacgacatcggactgcagttgaacttcagtaacacaactatttctctgacatctccaagcctcgccctcgcagtaatccgtgtgaacgcatcctcgttcaacacaaccacatttgtggcccaggaccccgctaacctccaggtgtctctggagacgcaggcccctgaaaatagcatcggcacgatcacactgccatcaagtctgatgaacaacctgcctgcccatgatatggaacttgcatcccgcgtgcagttcaatttctttgaaacacctgcgctctttcaggatccatccctggaaaacctttcgctgatatcttatgtcattagtagtagcgtcgccaatctgactgtccgaaacctgacccgcaacgttaccgttacgctcaagcacattaatccatcccaggatgagctcaccgtgcgctgcgttttttgggacctggggcgaaatgggggtcgcggagggtggagcgacaacggctgcagcgtgaaagacagaaggcttaacgagaccatatgtacatgctcacaccttactagcttcggggtgctgctcgatttgagccgaacatccgtgcttccggctcaaatgatggccctgacattcattacctatatcggatgtgggcttagctccatttttctctccgtgactctggttacctacatcgcttttgagaagatccgcagagactacccctccaaaatcctcattcagctgtgtgccgctctgctgcttctcaatcttgtgtttctactcgatagttggattgccctttataaaatgcaggggctctgtatatccgtggccgtcttcctgcattatttcctccttgtgagtttcacttggatgggactcgaggcctttcacatgtacctcgccctagtaaaagtatttaacacctatatacgaaagtatatcctgaaattctgtatcgtgggctggggtgtccccgcagtcgtagtgaccatcatcttgacgatctctcctgataattatgggctcgggagctatggcaaatttcccaacgggtccccagacgacttctgttggattaacaacaatgccgtgttctatatcaccgtcgtgggttatttttgcgtcatttttctcttgaacgtaagtatgttcatcgtggtcctcgtccaactctgccgcattaagaaaaaaaagcagctcggagctcagagaaaaacctctatacaagacctacggtccatcgctggcctcactttcctgctagggataacatgggggttcgctttcttcgcttggggcccagtcaacgtgacttttatgtacctgttcgccatattcaataccctacagggtttctttattttcatattttactgtgtggccaaggagaacgtgagaaagcagtggaggagatacttgtgctgcggtaagctgagactcgctgagaattccgactggtctaagaccgccacgaacggtttaaagaaacagacagtgaatcagggagtgtcgagctcatctaattctctgcagtcctcctccaatagcacaaactctaccacgctgctggttaataatgattgttctgttcacgcctcaggcaacggaaacgctagtaccgaaagaaacggagtgtccttctctgtgcagaacggcgacgtatgtttacatgattttaccggaaaacagcatatgttcaacgaaaaggaggattcttgtaatggtaaaggtaggatggctctgcggcgaacctcaaaacgaggcagccttcactttatagagcagatgtag

SEQ ID NO: 71654 - DNA, 2982 bp, Artificial Sequence
  derived and/or modified sequence
atggtgttcagcgtgagacagtgcggccacgtgggcagaaccgaggaggtgctgctgaccttcaagatcttcctggtgatcatctgcctgcacgtggtgctggtgaccagcctggaggaggacaccgacaacagcagcctgagccccccccccgacgtgaccctgagcctgctgcccagcaacgagaccgagaagaccaagatcaccatcgtgaagaccttcaacgccagcggcgtgaagccccagagaaacatctgcaacctgagcagcatctgcaacgacagcgccttcttcagaggcgagatcatgttccagtacgacaaggagagcaccgtgccccagaaccagcacatcaccaacggcaccctgaccggcgtgctgagcctgagcgagctgaagagaagcgagctgaacaagaccctgcagaccctgagcgagacctacttcatcatgtgcgccaccgccgaggcccagagcaccctgaactgcaccttcaccatcaagctgaacaacaccatgaacgcctgcgccgtgatcgccgccctggagagagtgaagatcagacccatggagcactgctgctgcagcgtgagaatcccctgccccagcagccccgaggagctggagaagctgcagtgcgacctgcaggaccccatcgtgtgcctggccgaccaccccagaggcccccccttcagcagcagccagagcatccccgtggtgcccagagccaccgtgctgagccaggtgcccaaggccaccagcttcgccgagccccccgactacagccccgtgacccacaacgtgcccagccccatcggcgagatccagcccctgagcccccagcccagcgcccccatcgccagcagccccgccatcgacatgcccccccagagcgagaccatcagcagccccatgccccagacccacgtgagcggcacccccccccccgtgaaggccagcttcagcagccccaccgtgagcgcccccgccaacgtgaacaccaccagcgccccccccgtgcagaccgacatcgtgaacaccagcagcatcagcgacctggagaaccaggtgctgcagatggagaaggccctgagcctgggcagcctggagcccaacctggccggcgagatgatcaaccaggtgagcagactgctgcacagcccccccgacatgctggcccccctggcccagagactgctgaaggtggtggacgacatcggcctgcagctgaacttcagcaacaccaccatcagcctgaccagccccagcctggccctggccgtgatcagagtgaacgccagcagcttcaacaccaccaccttcgtggcccaggaccccgccaacctgcaggtgagcctggagacccaggcccccgagaacagcatcggcaccatcaccctgcccagcagcctgatgaacaacctgcccgcccacgacatggagctggccagcagagtgcagttcaacttcttcgagacccccgccctgttccaggaccccagcctggagaacctgagcctgatcagctacgtgatcagcagcagcgtggccaacctgaccgtgagaaacctgaccagaaacgtgaccgtgaccctgaagcacatcaaccccagccaggacgagctgaccgtgagatgcgtgttctgggacctgggcagaaacggcggcagaggcggctggagcgacaacggctgcagcgtgaaggacagaagactgaacgagaccatctgcacctgcagccacctgaccagcttcggcgtgctgctggacctgagcagaaccagcgtgctgcccgcccagatgatggccctgaccttcatcacctacatcggctgcggcctgagcagcatcttcctgagcgtgaccctggtgacctacatcgccttcgagaagatcagaagagactaccccagcaagatcctgatccagctgtgcgccgccctgctgctgctgaacctggtgttcctgctggacagctggatcgccctgtacaagatgcagggcctgtgcatcagcgtggccgtgttcctgcactacttcctgctggtgagcttcacctggatgggcctggaggccttccacatgtacctggccctggtgaaggtgttcaacacctacatcagaaagtacatcctgaagttctgcatcgtgggctggggcgtgcccgccgtggtggtgaccatcatcctgaccatcagccccgacaactacggcctgggcagctacggcaagttccccaacggcagccccgacgacttctgctggatcaacaacaacgccgtgttctacatcaccgtggtgggctacttctgcgtgatcttcctgctgaacgtgagcatgttcatcgtggtgctggtgcagctgtgcagaatcaagaagaagaagcagctgggcgcccagagaaagaccagcatccaggacctgagaagcatcgccggcctgaccttcctgctgggcatcacctggggcttcgccttcttcgcctggggccccgtgaacgtgaccttcatgtacctgttcgccatcttcaacaccctgcagggcttcttcatcttcatcttctactgcgtggccaaggagaacgtgagaaagcagtggagaagatacctgtgctgcggcaagctgagactggccgagaacagcgactggagcaagaccgccaccaacggcctgaagaagcagaccgtgaaccagggcgtgagcagcagcagcaacagcctgcagagcagcagcaacagcaccaacagcaccaccctgctggtgaacaacgactgcagcgtgcacgccagcggcaacggcaacgccagcaccgagagaaacggcgtgagcttcagcgtgcagaacggcgacgtgtgcctgcacgacttcaccggcaagcagcacatgttcaacgagaaggaggacagctgcaacggcaagggcagaatggccctgagaagaaccagcaagagaggcagcctgcacttcatcgagcagatgtag

SEQ ID NO: 71655 - protein, 898 aa, Artificial Sequence
  derived and/or modified sequence
MVFSVRQCGHVGRTEEVLLTFKIFLVIICLHVVLVTSLEEDTDNSSLSPPPEVETTSLNDVTLSLLPSNETGVKPQRNICNLSSICNDSAFFRGEIMFQYDKESTVPQNQHITNGTLTGVLSLSELKRSELNKTLQTLSETYFIMCATAEAQSTLNCTFTIKLNNTMNACAVIAALERVKIRPMEHCCCSVRIPCPSSPEELEKLQCDLQDPIVCLADHPRGPPFSSSQSIPVVPRATVLSQVPKATSFAEPPDYSPVTHNVPSPIGEIQPLSPQPSAPIASSPAIDMPPQSETISSPMPQTHVSGTPPPVKASFSSPTVSAPANVNTTSAPPVQTDIVNTSSISDLENQVLQMEKALSLGSLEPNLAGEMINQVSRLLHSPPDMLAPLAQRLLKVVDDIGLQLNFSNTTISLTSPSLALAVIRVNASSFNTTTFVAQDPANLQDELTVRCVFWDLGRNGGRGGWSDNGCSVKDRRLNETICTCSHLTSFGVLLDLSRTSVLPAQMMALTFITYIGCGLSSIFLSVTLVTYIAFEKIRRDYPSKILIQLCAALLLLNLVFLLDSWIALYKMQGLCISVAVFLHYFLLVSFTWMGLEAFHMYLALVKVFNTYIRKYILKFCIVGWGVPAVVVTIILTISPDNYGLGSYGKFPNGSPDDFCWINNNAVFYITVVGYFCVIFLLNVSMFIVVLVQLCRIKKKKQLGAQRKTSIQDLRSIAGLTFLLGITWGFAFFAWGPVNVTFMYLFAIFNTLQGFFIFIFYCVAKENVRKQWRRYLCCGKLRLAENSDWSKTATNGLKKQTVNQGVSSSSNSLQSSSNSTNSTTLLVNNDCSVHASGNGNASTERNGVSFSVQNGDVCLHDFTGKQHMFNEKEDSCNGKGRMALRRTSKRGSLHFIEQM

SEQ ID NO: 71656 - protein, 987 aa, Artificial Sequence
  derived and/or modified sequence
MVFSVRQCGHVGRTEEVLLTFKIFLVIICLHVVLVTSLEEDTDNSSLSPPPEVETTSLNDVTLSLLPSNETGVKPQRNICNLSSICNDSAFFRGEIMFQYDKESTVPQNQHITNGTLTGVLSLSELKRSELNKTLQTLSETYFIMCATAEAQSTLNCTFTIKLNNTMNACAVIAALERVKIRPMEHCCCSVRIPCPSSPEELEKLQCDLQDPIVCLADHPRGPPFSSSQSIPVVPRATVLSQVPKATSFAEPPDYSPVTHNVPSPIGEIQPLSPQPSAPIASSPAIDMPPQSETISSPMPQTHVSGTPPPVKASFSSPTVSAPANVNTTSAPPVQTDIVNTSSISDLENQVLQMEKALSLGSLEPNLAGEMINQVSRLLHSPPDMLAPLAQRLLKVVDDIGLQLNFSNTTISLTSPSLALAVIRVNASSFNTTTFVAQDPANLQVSLETQAPENSIGTITLPSSLMNNLPAHDMELASRVQFNFFETPALFQDPSLENLSLISYVISSSVANLTVRNLTRNVTVTLKHINPSQDELTVRCVFWDLGRNGGRGGWSDNGCSVKDRRLNETICTCSHLTSFGVLLDLSRTSVLPAQMMALTFITYIGCGLSSIFLSVTLVTYIAFEKIRRDYPSKILIQLCAALLLLNLVFLLDSWIALYKMQGLCISVAVFLHYFLLVSFTWMGLEAFHMYLALVKVFNTYIRKYILKFCIVGWGVPAVVVTIILTISPDNYGLGSYGKFPNGSPDDFCWINNNAVFYITVVGYFCVIFLLNVSMFIVVLVQLCRIKKKKQLGAQRKTSIQDLRSIAGLTFLLGITWGFAFFAWGPVNVTFMYLFAIFNTLQGFFIFIFYCVAKENVRKQWRRYLCCGKLRLAENSDWSKTATNGLKKQTVNQGVSSSSNSLQSSSNSTNSTTLLVNNDCSVHASGNGNASTERNGVSFSVQNGDVCLHDFTGKQHMFNEKEDSCNGKGRMALRRTSKRGSLHFIEQM

SEQ ID NO: 71657 - DNA, 2964 bp, Artificial Sequence
  derived and/or modified sequence
atggttttctcggtcaggcagtgcgggcacgtgggtagaaccgaagaggtcctattaacattcaaaatcttcctggtgatcatatgccttcacgtggtgctggtgactagtctcgaggaagataccgacaattcctccctcagtcctccgcccgaagtcgaaaccacgtcgcttaacgatgttaccctgagcctgctcccctcaaacgaaacaggggtgaagccccagcggaacatttgtaatcttagttcaatttgcaacgacagcgctttttttagaggagaaattatgtttcaatatgacaaggaatcaactgtgccacagaaccagcatattacaaatgggaccctgacgggggtgctatccctttccgagcttaagaggtctgaactcaacaagaccctgcagactctgtctgaaacttactttattatgtgtgcaactgcagaggctcagagcacactgaattgcaccttcaccatcaagctcaataacactatgaacgcctgtgcagtgattgcagctctggaacgtgttaagataaggcccatggagcattgctgttgttccgttagaattccctgcccaagttcgccagaggagcttgagaaactgcagtgtgatctgcaagaccctattgtctgtctggccgaccatcccagaggtcctcccttttcctcctctcagtctatccctgtggttcctcgggctacggtcctatcacaggttcccaaagccactagctttgcggaaccccctgattatagcccggtcacccacaacgtccctagccccatcggagaaatccagcccctatctccacagccgtcggcacctattgcctcatcaccagccatcgatatgcccccgcaatctgagacgatctcttcaccaatgccacagacccatgtgtccggaaccccacctcccgtaaaggcaagtttttcttctccaaccgtatcggcccccgctaatgttaatacgacgagcgcacctccggtgcaaactgacattgtgaacacttcctctataagcgatctcgagaaccaggtgttgcagatggagaaggcactaagtctgggctccttagagcccaacctggctggagagatgatcaaccaagtgagcaggctgcttcattccccgcccgacatgttggctccgctggcccagcgcttgctcaaagtggtagatgatattgggctacaactgaacttcagcaatacaactatctccctcacttcgccaagcctggcactcgccgtgattagggtgaatgctagttcatttaatactaccaccttcgtggctcaggatcctgcaaaccttcaagtgtccctggagacacaggcgccggagaactccatcggcactattacgttaccttcaagtcttatgaacaacctgccagctcatgacatggagttggcttctcgagtgcagtttaattttttcgagactcctgccctgttccaagaccccagcctggagaacttgagtctcatatcgtacgtgataagctcttccgtggccaaccttaccgtgcgcaacctgacaagaaatgtgactgtaacactgaagcatatcaatccttcccaagacgagctgactgttcgctgcgtcttctgggatcttggaaggaatggcggacgcggggggtggtccgataacggatgttcggttaaggatagaaggctcaatgaaaccatctgtacgtgttcgcatcttaccagctttggcgtattgcttgacctgtctagaactagcgtgctgcccgctcagatgatggcactgacttttatcacctacataggatgcggcctttcctcaatctttctctccgtgaccctagtgacgtatatcgcattcgagaaaatcaggcgcgattacccaagcaagatccttatacagctgtgtgccgcactgctgctattaaacctggtattcctcctggacagctggattgccctgtacaagatgcaaggtctgtgcataagtgtggcggtgttcttgcattactttctcttagtctctttcacttggatgggactggaggcatttcatatgtatctcgcgctggtcaaggtgttcaacacctacatacggaaatacattcttaagttttgtattgtcggctggggagtgcccgccgttgtggtaactatcatactaactattagcccagacaactacggcttgggctcctacggcaaatttcccaacggcagccctgatgacttttgctggatcaacaacaacgcggtgttctatatcacggttgtgggctatttttgtgtcatcttcttgctgaacgtgtcgatgtttattgtggttctcgtccagctttgccgtatcaaaaaaaaaaagcaacttggggcccagaggaaaacttccattcaagatctgagaagcatagcaggcttgactttccttctcgggattacctggggctttgctttctttgcttgggggccagtcaatgttacatttatgtacctctttgcaatttttaacaccttgcaggggttcttcatcttcatattttactgcgttgccaaagaaaacgtaaggaaacagtggaggcggtacctctgttgcgggaagttgcgtttggctgagaactccgattggagcaaaaccgccaccaacggcttgaaaaagcaaacggtgaaccagggagtgtcctcctcttctaatagtctccagtctagtagcaattcaaccaactcaacaaccttactagtaaacaatgattgttcggtacacgctagcggcaacggcaatgcttcaacagagaggaacggggtgagcttcagcgtacaaaacggggatgtatgtctgcatgatttcacaggcaagcaacacatgtttaatgagaaagaggactcatgtaacggtaagggtaggatggcgctgcggcggacatctaagcgtggttctctacacttcatcgagcagatgtag

SEQ ID NO: 71658 - DNA, 2964 bp, Artificial Sequence
  derived and/or modified sequence
atggtgttttctgtgcggcagtgtggccacgtgggccgcacagaggaggtgctgctgaccttcaagatcttcctggtgatcatctgcctgcacgtggtgctggtgaccagcctggaggaggacacagacaacagcagcctgagccccccacctgaggtggagaccaccagcctgaatgatgtgaccctgagcctgctgcccagcaatgaaacaggagtgaagccccagaggaacatctgcaacctgagcagcatctgcaatgattctgccttcttccggggggagatcatgttccagtatgacaaggagagcacagtgccccagaaccagcacatcaccaacggcaccctgactggagtgctgagcctgtctgagctgaagaggtctgagctgaacaagaccctgcagaccctgtctgagacctacttcatcatgtgtgccacagctgaggcccagagcaccctgaactgcaccttcaccatcaagctgaacaacaccatgaatgcctgtgctgtgattgctgccctggagcgggtgaagatccggcccatggagcactgctgctgcagcgtgcgcatcccctgccccagcagccctgaggagctggagaagctgcagtgtgacctgcaggaccccatcgtgtgcctggccgaccacccccggggcccccccttcagcagcagccagagcatccctgtggtgccccgggccaccgtgctgagccaggtgcccaaggccaccagctttgctgagcccccagactacagccctgtgacccacaacgtgcccagccccatcggggagatccagcccctgagcccccagcccagcgcccccatcgccagcagccctgccatcgacatgccaccccagagcgagaccatcagcagccccatgccccagacccacgtgtctggcaccccacctcctgtgaaggccagcttcagcagccccaccgtgtctgccccagccaacgtgaacaccaccagcgcccctcctgtgcagacagacatcgtgaacaccagcagcatcagtgacctggagaaccaggtgctgcagatggagaaggccctgagcctgggcagcctggagcccaacctggccggggagatgatcaaccaggtgtcccggctgctgcacagccccccagacatgctggcccccctggcccagaggctgctgaaggtggtggatgacatcggcctgcagctgaacttcagcaacaccaccatcagcctgaccagccccagcctggccctggccgtcatccgggtgaatgccagcagcttcaacaccaccacctttgtggcccaggaccctgccaacctgcaggtgtccctggagacccaggccccagaaaattccatcggcaccatcaccctgcccagcagcctgatgaacaacctgcctgcccatgacatggagctggccagccgggtgcagttcaacttctttgagaccccagccctcttccaggaccccagcctggagaacctgagcctcatctcctatgtgatcagcagctctgtggccaacctgactgtgaggaacctgaccagaaatgtgacagtgaccctgaagcacatcaaccccagccaggatgagctgactgtgcgctgtgtgttctgggacctgggcagaaatggaggccggggcggctggagcgacaatggctgcagcgtgaaggaccggcggctgaatgagaccatctgcacctgcagccacctgaccagctttggagtgctgctggacctgagcaggacctctgtgctgcctgcccagatgatggccctgaccttcatcacctacatcggctgcggcctgagcagcatcttcctgtctgtgaccctggtgacctacatcgcctttgagaagatcagaagagactaccccagcaagatcctgatccagctgtgtgccgccctgctgctgctgaacctggtgttcctgctggacagctggatcgccctgtacaagatgcagggcctgtgcatctctgtggccgtgttcctgcactacttcctgctggtgtccttcacctggatgggcctggaggccttccacatgtacctggccctggtgaaggtgttcaacacctacatcaggaagtacatcctgaagttctgcatcgtgggctggggcgtgcctgctgtggtggtgaccatcatcctgaccatcagcccagacaactacggcctgggcagctatggcaagttccccaacggcagcccagatgacttctgctggatcaacaacaatgctgtgttctacatcaccgtggtgggctacttctgtgtgatcttcctgctgaatgtgtccatgttcatcgtggtgctggtgcagctgtgccgcatcaagaagaagaagcagctgggcgcccagaggaagaccagcatccaggacctgcggagcattgctggcctgaccttcctgctgggcatcacctggggctttgccttctttgcctggggccctgtgaatgtgaccttcatgtacctgtttgccatcttcaacaccctgcagggcttcttcatcttcatcttctactgtgtggccaaggaaaatgtgaggaagcagtggaggcgctacctgtgctgcggcaagctgcggctggctgaaaattctgactggagcaagacagccaccaacggcctgaagaagcagacagtgaaccagggcgtgagcagcagcagcaacagcctgcagagcagcagcaacagcaccaacagcaccaccctgctggtgaacaatgactgcagcgtgcacgccagcggaaatggaaatgccagcacagaaagaaatggagtgtccttctctgtgcagaatggagatgtgtgcctgcatgacttcaccgggaagcagcacatgtttaatgagaaggaggacagctgcaatggaaaaggaaggatggccctgcggaggaccagcaagaggggcagcctgcacttcatcgagcagatgtag

SEQ ID NO: 71659 - DNA, 2964 bp, Artificial Sequence
  derived and/or modified sequence
atggtgttcagcgtgcggcagtgcggccacgtgggccggaccgaggaagtactgctgaccttcaagatcttcctggttatcatttgtctgcatgtcgtactggtcacctctcttgaggaggatacagacaattccagcttaagcccgccgcctgaagtggaaactacgtccctgaatgacgtgacgctcagcctgctgcccagcaacgaaacaggcgtgaagccgcagcgcaacatttgcaacctgtcaagtatttgcaatgactcggccttcttccgcggagagatcatgttccagtatgataaagagtctacagtgccccagaatcagcacattacaaacggtactttgaccggcgtgctctctctcagcgagctgaagcgctcagagctgaataagactctgcaaacgctgtcagaaacatacttcatcatgtgcgctaccgccgaagctcagtccaccttaaattgcacatttactattaagcttaataacaccatgaatgcttgcgccgtcattgcggccttggagagggtcaagatcagaccaatggagcattgctgctgcagtgtgaggatcccctgtccatcctctcctgaggaactggaaaaactgcaatgtgacctgcaggacccaattgtgtgcctagcagaccatccaaggggacccccgttctcttcatctcagagcattcccgtagtgccacgcgccacagttctatcccaggtcccgaaagctacatctttcgccgaacctcccgactatagtccggtgacacataacgtcccatccccgatcggcgaaatccagcctctgtccccgcaaccatccgcccctatcgcttctagccccgcaatcgacatgccccctcagagcgaaacgatttcaagcccaatgccgcaaactcatgtgtctgggacaccacccccggtgaaggcttctttctcttcacctacagtttctgcacctgccaacgtaaacaccacttctgcccccccagtccagactgacattgtgaacacttcttccatcagcgacctggaaaatcaagtactgcagatggaaaaggccctctctctcgggtcattggaacctaacctggcaggcgagatgattaatcaagtcagccgtctactccactctccgcccgacatgctagccccattggctcagagactgttgaaggtagtagacgacatcggcctgcagctgaacttctctaatacaactatatcgcttaccagcccgagtctggcgcttgcggtcatcagagtcaacgcctcatcgttcaataccactacatttgtcgctcaggaccctgcaaacctacaggtgagcctggagacccaggcaccagagaactctatcggcacaattactctgccctcatccttgatgaacaacctgcccgcccatgacatggagctggcctcccgcgttcagttcaactttttcgagaccccagcactgtttcaggacccaagcctggaaaatctgagtttgatatcttacgtgatctcgtcttcggtggctaacctgacagtgagaaatctgactagaaatgtcaccgtgactcttaagcacattaatccaagccaggatgagctgactgtgcggtgtgtgttctgggatctgggtcggaatggtgggcgaggcggatggagtgacaacgggtgtagcgtcaaagaccgcaggctgaatgagactatatgcacctgtagccacctgacttcatttggggtgctgctggacctgagccggaccagtgtcctaccagcccagatgatggctttgaccttcattacctacattggctgcggtctgagctccatattcctgagcgtgacattggtgacatacattgcttttgagaaaatcagacgagattacccctctaaaattctgatccagctgtgcgccgctcttctcttacttaatctcgtattcctgctggatagctggatcgccctgtataagatgcagggcctctgtatttctgtggcggtattcttgcactatttcttactggtgtctttcacttggatgggattagaggcctttcacatgtatctcgctttggtcaaggtttttaacacatatatacggaagtacatcttgaaattttgcattgtaggatggggagtaccagcggtcgtcgtcacaatcattctcacgatttctcccgacaattatggcctggggtcttatgggaaattccctaatggctcgccggatgacttctgttggatcaataacaacgcggtgttttacataacggtggtcggctacttttgtgtgatcttcctccttaatgtgagcatgtttatcgtcgtgctggtccagctatgccgcataaagaagaagaaacagctcggtgcccagcgcaaaacctcgattcaggatctgaggtccattgccggtctcacctttcttctgggcatcacatgggggttcgcctttttcgcttggggccctgtgaacgttacattcatgtacctgtttgccatctttaatacacttcagggcttcttcattttcattttttattgcgtggcaaaagaaaatgtgcggaagcagtggagacgatacttgtgctgtgggaaactcagattggccgagaacagcgattggtccaagactgccaccaacggcctcaagaagcagactgtaaatcaaggggtgtcaagcagcagtaatagtctgcagtcatcgtctaacagcaccaactctacaaccctcttggtgaacaacgattgctcagtgcacgcctcaggcaatggaaacgcctcgactgagagaaacggggtctcattttccgtccagaatggcgatgtatgtctccatgattttactggaaaacagcacatgtttaatgagaaggaggatagttgtaacggaaaggggcggatggccctcagaaggacctctaaacggggatcacttcatttcattgagcagatgtag

SEQ ID NO: 71660 - DNA, 2964 bp, Artificial Sequence
  derived and/or modified sequence
atggtgttcagcgtgcgtcagtgtggacacgtgggacgtacagaggaagtgctgttgacgttcaagatcttccttgtcatcatttgcctgcacgtggtgcttgtaacaagtttggaggaggatacggacaattcctctctctctccccctcctgaagtggagacgacctcacttaatgatgtgactctgtcgttactgccttccaacgaaaccggggtcaaaccccagcggaacatctgtaacctgtcgagcatctgcaacgattccgccttcttccggggagagattatgtttcagtacgataaagaatcaacagttccccagaatcagcacattaccaatggtacgcttactggggtgctcagcctcagcgaattgaagagaagtgagcttaacaagaccttacagacgttatcggagacatacttcatcatgtgtgccactgctgaggcccagtctactctgaattgcacatttacgataaagctgaacaatactatgaatgcctgtgctgtcatcgcagctttggagagggtcaagattaggccaatggaacattgctgttgtagcgtccgcatcccctgtccatcaagccccgaagagctggaaaagcttcagtgcgacctacaagatcctatagtgtgccttgcggaccatccacggggaccaccttttagttcatcccagagcattcccgtggttcccagagccactgtcctgagtcaggtacccaaagcaaccagcttcgccgaacctcctgactatagccctgtgacccataacgtaccctcccccattggggaaatacaacctttgagcccacaaccatcagccccaatcgccagttcccctgctatcgacatgccgccacagtccgaaaccatcagctctccaatgcctcaaacccacgtctccggaacaccccctcctgttaaggcgtctttcagtagcccaaccgtaagcgccccagcaaacgttaatacaacctcagcccctccagtgcagaccgatattgtgaataccagtagcatttccgatctcgagaaccaagttctgcagatggagaaggcactctcattgggcagtctcgagcctaacttggcgggtgaaatgattaaccaggtgtccaggcttctccattccccgcctgacatgctcgcccctcttgcacagagactcctcaaggtagtagacgatatcggcctgcagctgaatttctctaacactaccatctccttgactagcccttcactggctttagccgtaatacgagtgaatgcttcatccttcaacacgactacctttgtcgctcaagacccagcgaatcttcaggtctccctcgagacacaggcccctgagaattccattggcaccattacattgccttcctcgctgatgaataacctgcctgcgcatgatatggaactggcttctcgagtgcagttcaactttttcgagactccagccttgttccaagacccttccctggagaacctgtctcttatctcgtacgtgatttcctcaagcgtggcgaacttgactgtccgcaacctgacgagaaatgttactgtaaccttaaaacatatcaatcccagtcaggatgaactaacagtacgctgcgtgttttgggacttgggcagaaacggcggacgcggagggtggagcgacaatggctgctctgttaaagatcgcaggttaaatgagacaatctgtacctgcagccacttgacttctttcggcgtactgctcgatctttcgcggactagcgtgctgcctgcacagatgatggctttaaccttcataacatacattggctgcgggctgtcaagcatttttctctccgtcacactcgttacctacatcgcatttgaaaaaatccgcagagactatcccagcaaaattttgatccagctctgtgctgcgctcctcctattgaacttggtgtttctgcttgatagctggatcgctctctataaaatgcaaggcttgtgtatcagtgtagccgtatttctgcattacttcctgctggtgtcctttacctggatggggttggaagccttccacatgtacctggctcttgtgaaagtgtttaatacatacattcggaagtacatactcaagttttgcatagtaggatggggagtaccagcagttgtcgtgacaattattctcaccattagcccagataactacggcctgggctcatatggcaaatttcctaacgggagccctgacgacttctgctggatcaacaacaacgccgtcttttacatcaccgtagttggatacttttgtgtgatttttctgctgaatgtatctatgttcattgtcgtcttggtgcaattatgccgtatcaagaaaaagaagcagctgggcgcacagagaaaaacctccatccaggatctccgtagcattgcaggcctcaccttcctactggggatcacctggggattcgcttttttcgcctggggaccagtgaacgtgacgtttatgtatttatttgccatcttcaacacactgcaaggattttttatctttatcttctactgcgtcgctaaggagaatgtccgtaaacagtggagaagatatctctgttgcggtaaattacgcctggctgaaaactctgattggtccaaaactgcaactaacgggctgaagaaacagacagtgaaccagggcgtatcatccagctcaaattccctgcaatcatcatcgaattctaccaattctaccacactacttgtgaataacgactgttccgtacatgcaagtggcaatggaaacgccagcaccgagagaaacggcgtgagcttttccgttcagaacggtgatgtctgcctgcacgatttcaccggcaagcaacacatgttcaatgaaaaagaggactcatgcaacggcaaaggcaggatggctctgagacgcacgagtaagaggggcagtctgcactttatcgagcagatgtag

SEQ ID NO: 71661 - DNA, 2964 bp, Artificial Sequence
  derived and/or modified sequence
atggtgttcagcgtgagacagtgcggccacgtgggcagaaccgaggaggtgctgctgaccttcaagatcttcctggtgatcatctgcctgcacgtggtgctggtgaccagcctggaggaggacaccgacaacagcagcctgagccccccccccgaggtggagaccaccagcctgaacgacgtgaccctgagcctgctgcccagcaacgagaccggcgtgaagccccagagaaacatctgcaacctgagcagcatctgcaacgacagcgccttcttcagaggcgagatcatgttccagtacgacaaggagagcaccgtgccccagaaccagcacatcaccaacggcaccctgaccggcgtgctgagcctgagcgagctgaagagaagcgagctgaacaagaccctgcagaccctgagcgagacctacttcatcatgtgcgccaccgccgaggcccagagcaccctgaactgcaccttcaccatcaagctgaacaacaccatgaacgcctgcgccgtgatcgccgccctggagagagtgaagatcagacccatggagcactgctgctgcagcgtgagaatcccctgccccagcagccccgaggagctggagaagctgcagtgcgacctgcaggaccccatcgtgtgcctggccgaccaccccagaggcccccccttcagcagcagccagagcatccccgtggtgcccagagccaccgtgctgagccaggtgcccaaggccaccagcttcgccgagccccccgactacagccccgtgacccacaacgtgcccagccccatcggcgagatccagcccctgagcccccagcccagcgcccccatcgccagcagccccgccatcgacatgcccccccagagcgagaccatcagcagccccatgccccagacccacgtgagcggcacccccccccccgtgaaggccagcttcagcagccccaccgtgagcgcccccgccaacgtgaacaccaccagcgccccccccgtgcagaccgacatcgtgaacaccagcagcatcagcgacctggagaaccaggtgctgcagatggagaaggccctgagcctgggcagcctggagcccaacctggccggcgagatgatcaaccaggtgagcagactgctgcacagcccccccgacatgctggcccccctggcccagagactgctgaaggtggtggacgacatcggcctgcagctgaacttcagcaacaccaccatcagcctgaccagccccagcctggccctggccgtgatcagagtgaacgccagcagcttcaacaccaccaccttcgtggcccaggaccccgccaacctgcaggtgagcctggagacccaggcccccgagaacagcatcggcaccatcaccctgcccagcagcctgatgaacaacctgcccgcccacgacatggagctggccagcagagtgcagttcaacttcttcgagacccccgccctgttccaggaccccagcctggagaacctgagcctgatcagctacgtgatcagcagcagcgtggccaacctgaccgtgagaaacctgaccagaaacgtgaccgtgaccctgaagcacatcaaccccagccaggacgagctgaccgtgagatgcgtgttctgggacctgggcagaaacggcggcagaggcggctggagcgacaacggctgcagcgtgaaggacagaagactgaacgagaccatctgcacctgcagccacctgaccagcttcggcgtgctgctggacctgagcagaaccagcgtgctgcccgcccagatgatggccctgaccttcatcacctacatcggctgcggcctgagcagcatcttcctgagcgtgaccctggtgacctacatcgccttcgagaagatcagaagagactaccccagcaagatcctgatccagctgtgcgccgccctgctgctgctgaacctggtgttcctgctggacagctggatcgccctgtacaagatgcagggcctgtgcatcagcgtggccgtgttcctgcactacttcctgctggtgagcttcacctggatgggcctggaggccttccacatgtacctggccctggtgaaggtgttcaacacctacatcagaaagtacatcctgaagttctgcatcgtgggctggggcgtgcccgccgtggtggtgaccatcatcctgaccatcagccccgacaactacggcctgggcagctacggcaagttccccaacggcagccccgacgacttctgctggatcaacaacaacgccgtgttctacatcaccgtggtgggctacttctgcgtgatcttcctgctgaacgtgagcatgttcatcgtggtgctggtgcagctgtgcagaatcaagaagaagaagcagctgggcgcccagagaaagaccagcatccaggacctgagaagcatcgccggcctgaccttcctgctgggcatcacctggggcttcgccttcttcgcctggggccccgtgaacgtgaccttcatgtacctgttcgccatcttcaacaccctgcagggcttcttcatcttcatcttctactgcgtggccaaggagaacgtgagaaagcagtggagaagatacctgtgctgcggcaagctgagactggccgagaacagcgactggagcaagaccgccaccaacggcctgaagaagcagaccgtgaaccagggcgtgagcagcagcagcaacagcctgcagagcagcagcaacagcaccaacagcaccaccctgctggtgaacaacgactgcagcgtgcacgccagcggcaacggcaacgccagcaccgagagaaacggcgtgagcttcagcgtgcagaacggcgacgtgtgcctgcacgacttcaccggcaagcagcacatgttcaacgagaaggaggacagctgcaacggcaagggcagaatggccctgagaagaaccagcaagagaggcagcctgcacttcatcgagcagatgtag

SEQ ID NO: 71662 - protein, 365 aa, Artificial Sequence
  derived and/or modified sequence
MKLGCVLMAWALYLSLGVLWVAQMLLAAGCHAAASFETLQCEGPVCTEESSCHTEDDLTDAREAGFQVKAYTFSEPFHLIVSYDWLILQGPAKPVFEGDLLVLRCQAWQDWPLTQVTFYRDGSALGPPGPNREFSITVVQKADSGHYHCSGIFQSPGPGIPETASVVAITVQELFPAPILRAVPSAEPQAGSPMTLSCQTKLPLQRSAARLLFSFYKDGRIVQSRGLSSEFQIPTASEDHSGSYWCEAATEDNQVWKQSPQLEIRVQGASSSAAPPTLNPAPQKSAAPGTAPEEAPGPLPPPPTPSSEDPGFSSPLGMPDPHLYHQMGLLLKHMQDVRVLLGHLLMELRELSGHRKPGTTKATAE

SEQ ID NO: 71663 - protein, 382 aa, Artificial Sequence
  derived and/or modified sequence
MLKKISVGVAGDLNTVTMKLGCVLMAWALYLSLGVLWVAQMLLAAGCHAAASFETLQCEGPVCTEESSCHTEDDLTDAREAGFQVKAYTFSEPFHLIVSYDWLILQGPAKPVFEGDLLVLRCQAWQDWPLTQVTFYRDGSALGPPGPNREFSITVVQKADSGHYHCSGIFQSPGPGIPETASVVAITVQELFPAPILRAVPSAEPQAGSPMTLSCQTKLPLQRSAARLLFSFYKDGRIVQSRGLSSEFQIPTASEDHSGSYWCEAATEDNQVWKQSPQLEIRVQGASSSAAPPTLNPAPQKSAAPGTAPEEAPGPLPPPPTPSSEDPGFSSPLGMPDPHLYHQMGLLLKHMQDVRVLLGHLLMELRELSGHRKPGTTKATAE

SEQ ID NO: 71664 - protein, 365 aa, Artificial Sequence
  derived and/or modified sequence
MKLGCVLMAWALYLSLGVLWVAQMLLVASSFSAASFETLQCEGPVCTEESSCHTEDDLTDAREAGFQVKAYTFSEPFHLIVSYDWLILQGPAKPVFEGDLLVLRCQAWQDWPLTQVTFYRDGSALGPPGPNREFSITVVQKADSGHYHCSGIFQSPGPGIPETASVVAITVQELFPAPILRAVPSAEPQAGSPMTLSCQTKLPLQRSAARLLFSFYKDGRIVQSRGLSSEFQIPTASEDHSGSYWCEAATEDNQVWKQSPQLEIRVQGASSSAAPPTLNPAPQKSAAPGTAPEEAPGPLPPPPTPSSEDPGFSSPLGMPDPHLYHQMGLLLKHMQDVRVLLGHLLMELRELSGHRKPGTTKATAE

SEQ ID NO: 71665 - DNA, 1098 bp, Artificial Sequence
  derived and/or modified sequence
atgaagctgggctgcgtgctgatggcctgggccctgtacctgagccttggtgtgctgtgggtggcacagatgctactggtcgcaagtagcttttccgccgccagctttgaaacccttcagtgtgaaggccccgtttgtactgaagagtcatcttgccacaccgaggacgatcttacagacgctagggaagctgggttccaggttaaggcctacacttttagtgaaccttttcacctgatagtctcttacgattggttgatcctgcaaggtcctgccaaaccagtgttcgagggcgacctcctggtacttcgatgtcaagcatggcaagattggccactgacccaggtgaccttttacagagatgggtccgcactggggccccctggcccaaatagagagttctccattacagtggttcaaaaagcagattctggccactatcattgttccgggatattccagagccctgggcctggaattcccgaaactgctagtgttgttgctatcacggttcaagaactattccccgccccaattctgagagccgtcccttccgccgaaccacaggcagggtcccccatgaccctgagctgtcagaccaaactgccgctccaaaggagcgcggccaggcttctgtttagtttttataaagatggtagaatcgtccagtccaggggattgtccagtgaattccagattcccacagcctctgaagatcattcaggctcatattggtgtgaggcagccactgaggataaccaagtgtggaagcaatctccgcagcttgagatccgagtccagggagcctcatcatcggcagctcccccgacccttaatcccgctccacagaagtcagcagctccggggaccgcccccgaggaggcacccggccctcttccgccaccccctacccctagttctgaggatcctggattcagttctcctcttggcatgccggaccctcacctgtaccatcagatggggctactccttaaacatatgcaggatgtccgcgtgctgcttggccaccttttaatggagctgcgcgagctgagcgggcacaggaagccgggaaccacaaaagccactgcagagtag

SEQ ID NO: 71666 - DNA, 1098 bp, Artificial Sequence
  derived and/or modified sequence
atgaagctgggctgcgtgctgatggcctgggcactttacctcagcctcggggtgttgtgggtggctcagatgctgctggcagcagggtgtcacgcagctgctagtttcgaaaccttgcagtgcgaagggccagtgtgtacagaggaaagctcctgccacaccgaggatgatttgacagacgccagagaggcagggtttcaggtcaaagcctataccttcagtgagccctttcacctcatcgtttcctatgattggctgatcctccagggccctgctaaacccgtgttcgaaggggacttgctcgtcctcaggtgccaggcctggcaagactggccacttacacaggttaccttttatagggatggttcagccttgggtcctccaggccctaatagggaattcagtattacagtggtgcagaaagcggattctggccactatcattgctccgggatcttccaaagccccggtccaggcataccagaaactgcttccgttgtggctatcaccgtgcaagaattattcccagccccaatcctgagggctgtaccgagtgccgagccccaggctgggagcccgatgaccctctcatgccagactaagctgcctctgcagaggagcgctgcgaggctgctgttttccttctacaaagacgggagaatagtgcaatccagaggcctatcctcagagttccagatccctacagcgtccgaggaccatagcggcagttattggtgcgaggccgctaccgaggataatcaggtgtggaagcagtcacctcagttagagatcagggtccaaggtgcttcgtcttcagccgctcctccaactctaaatcctgcgccacagaagtctgctgcacctggcacggccccagaggaggcaccaggcccactgccccctcccccaacaccttcttccgaggaccctggcttctcatcaccgctggggatgccagacccccatctgtaccaccaaatgggattgttacttaaacacatgcaggatgtaagagttctgctgggacacctcctgatggagctccgtgagcttagtgggcatagaaaacccggaacgacaaaggccaccgccgagtag

SEQ ID NO: 71667 - DNA, 1149 bp, Artificial Sequence
  derived and/or modified sequence
atgctgaagaaaattagcgtgggcgtggccggtgacttaaacacggttaccatgaaactggggtgcgtccttatggcatgggctctctacctgtctctcggagtgctctgggtggctcagatgctgctcgccgcaggatgtcatgccgctgcttccttcgaaactctccaatgcgagggtcctgtgtgcacagaggaatccagctgccacacagaggacgatctgactgacgccagagaagctggattccaggtcaaggcctatactttcagcgaacccttccaccttatcgtgtcgtatgactggctgatcctgcaaggacccgcaaagccggtattcgaaggcgatttgttggttctccgctgtcaggcctggcaggactggcccctgacgcaagtgacgttctatagagatggaagcgcgctgggaccaccagggccaaatcgcgagttcagtattaccgtcgttcagaaagctgactccgggcactaccattgcagtgggattttccagagcccaggaccaggcatccccgaaaccgctagtgtcgttgcaatcaccgttcaggagctgttccctgcccctatcctcagagccgtcccctccgctgaacctcaggctgggagtcctatgacactttcctgccagactaaattgccactccagcggtccgccgcaaggctgctgttttctttctataaggatggaagaatcgtgcagtctagagggctttcgagtgagttccagattcctactgccagcgaagatcactcgggaagctactggtgcgaggccgcaaccgaggacaaccaagtctggaagcaatccccccagctggagatccgtgtgcagggcgctagctcttcagcagcaccacccacactcaaccccgcaccccagaagtcagcagccccagggaccgccccagaagaggcacccggaccccttccaccgcctcccaccccctcctccgaggacccagggttcagttcaccgctcggtatgcccgacccacacctctaccaccagatgggcctgctgctcaaacatatgcaggacgtgcgggttctgctgggccacctcctgatggagttgcgcgaactttccggccaccgaaagccaggtactaccaaagcgactgcagagtag

SEQ ID NO: 71668 - DNA, 1098 bp, Artificial Sequence
  derived and/or modified sequence
atgaagttgggctgcgtcctgatggcgtgggctctgtatctctcactgggcgtgttatgggtggctcagatgcttctggtggcctccagcttctctgcagcctctttcgagaccctgcagtgtgagggacccgtctgcacagaggagtcaagctgccacaccgaggatgatctcaccgatgcgagggaggctggattccaggtgaaggcttacactttctccgagccattccatctgatagtctcgtacgactggcttatacttcagggcccagcaaaacctgtatttgaaggggatcttctggtgctgcgctgtcaggcctggcaggactggcccctcacacaagtgactttctatcgcgatggctcagccctcggaccacctggtccaaatagagagttctcaattacagttgttcagaaagctgactcaggtcactaccactgttcgggcatctttcagagtcccggtcctggcattccagagacagctagtgtcgtagctataaccgtgcaggagctcttcccagcacccatccttagggcagtacccagtgctgagccgcaggccggttccccaatgacactctcctgccagactaaattaccactccagagaagcgcggcaagactgctgttttccttttataaagatggtcgcatcgttcagagtcgagggctgagcagcgagtttcaaatacctacagcgagtgaggaccactcagggtcctattggtgcgaggccgcaactgaagataatcaggtctggaaacagtcacctcagctggagattcgcgttcagggggcttcatctagcgcggcaccacccactctgaatcctgccccacagaaaagcgccgctcctgggactgcccctgaggaggccccagggccactcccaccaccacccacgcctagtagcgaggaccccggattctccagtccactgggtatgcctgatccccacctgtatcatcagatggggctgctgcttaagcacatgcaagacgtgagagtgttgctcgggcaccttctcatggagctgagagagttgagcggccatcggaaacccggtaccacaaaggcaacagctgagtag

SEQ ID NO: 71669 - DNA, 1098 bp, Artificial Sequence
  derived and/or modified sequence
atgaagcttggatgcgtactcatggcctgggctctttacttgtcactcggtgtcctctgggttgcacagatgttactggccgcaggatgccatgccgccgcctcttttgagacactccagtgtgaaggccccgtgtgtaccgaggaaagttcatgccataccgaagacgatctaactgacgcacgagaggccggcttccaagtgaaggcctacactttcagtgagcctttccaccttattgtgagttatgattggctgatactgcagggacctgcgaaacctgtgttcgaaggcgacctgctcgttctgcgttgccaggcgtggcaggactggccgcttacacaggtgactttctaccgagacgggtcagccctgggaccacctggaccaaatcgcgagttctctatcactgtcgtacagaaagctgacagtgggcactaccactgctcaggaatctttcaatccccagggcctggaatccctgaaaccgcatccgtagtagctattaccgttcaggaactcttccccgcgcccatactccgggcagtgccgagtgccgaaccccaggctggctcccccatgaccttaagctgtcagaccaaactgcctttacagaggtccgccgcaagacttctcttcagcttttataaagatgggcgcattgtccagagtcggggcctcagctccgagttccaaatccccacggcctctgaggatcattcaggaagttattggtgtgaggccgctactgaagacaatcaggtctggaaacaatctccacagctagagatccgcgtacagggggccagtagtagcgccgcacccccaaccctcaatcccgccccccaaaaatctgctgctcctggcaccgcccccgaagaggcccctggcccccttccccccccacctactccgtccagcgaggatcccggatttagttcccctctgggcatgcctgacccacatctctatcaccagatgggacttttgcttaagcacatgcaggatgtgagggtcctcctcggtcatttattgatggagttgagagaactgagcgggcaccgtaaaccaggcactaccaaggcgacggctgaatag

SEQ ID NO: 71670 - DNA, 1149 bp, Artificial Sequence
  derived and/or modified sequence
atgttgaagaagattagcgtaggagtggctggcgatctgaatactgtgacaatgaaactgggttgtgtgttaatggcctgggcactgtacctgagtttaggcgtgctctgggttgcccagatgctcctggccgctggctgtcacgctgccgcttcctttgagaccctacaatgtgaagggcctgtttgcaccgaagagtcaagttgtcacactgaagacgatttaacagacgctcgtgaggcgggcttccaggtcaaggcctacacgttttccgagccatttcaccttatcgtgagttatgattggctgattctgcagggtccagctaaacctgtgtttgagggggatctgttggttctccgatgtcaggcctggcaggactggcctctgacccaggtgaccttctatagggatggcagtgcgctgggaccccccggaccgaaccgcgaattttccattaccgtagtgcaaaaggccgattcaggccattaccactgttcagggatttttcagagcccaggcccagggattccagaaaccgcatccgtggtggcaattaccgttcaggaactgtttcccgctcccatactgcgcgccgtgccgtctgccgaacctcaggctggaagtcctatgaccctttcttgccagactaaactcccgctccagcgctccgcggctagacttctcttctccttttataaggatgggcgcatcgtccaatcccggggcctatcatcagaattccaaatccctaccgcgagcgaagatcactctggaagctactggtgcgaagctgcaactgaggacaaccaagtgtggaagcagtctcctcagcttgagattagagtacagggtgctagcagtagcgctgcaccccccaccctgaaccccgcaccgcagaaaagcgctgccccagggaccgctcctgaggaagctcctggtcctctgccacctccgcctactccttcctctgaggacccaggtttctcaagcccacttgggatgcctgacccccacctgtatcatcagatgggattgttgctgaagcatatgcaggacgtccgggtcctactaggccatctgctcatggagcttagagaactctccggacatagaaagccagggacaacaaaggccacagctgagtag

SEQ ID NO: 71671 - DNA, 1098 bp, Artificial Sequence
  derived and/or modified sequence
atgaagctgggatgtgtgctgatggcctgggcattatacctttcgctcggtgtgctctgggtggctcaaatgttattggtcgcatcctccttctctgctgcctccttcgaaaccctccagtgtgaaggccccgtctgcactgaagaaagttcgtgccacactgaggacgacttgaccgacgcccgagaagcgggcttccaggtcaaagcctacaccttttctgagcccttccatctgattgtgtcctatgactggctcattctccagggccctgcgaagcctgtgttcgagggtgatctcctagttctccggtgccaagcttggcaggattggcctttaacacaagtaacattttaccgggacggctcggccttggggcccccaggaccaaacagagagttcagcattaccgtagtccagaaggccgattctggccattatcattgctcggggatttttcagagtcccggacctgggatacccgaaaccgcatcagtggttgccattacagtccaggagctgttccctgctccaattctacgcgctgtccccagcgccgaaccccaagcaggaagcccgatgacactgtcatgccaaactaaacttccactgcagagaagtgcggcccgcctgctgttttccttttacaaggacggccgtatcgtgcaatcacgagggctgagctctgaatttcagatcccgacagcctctgaggatcactcgggctcatactggtgcgaagccgcaacagaagataaccaagtgtggaagcagtctcctcagttagaaatccgagttcagggcgctagctctagtgcggctccccctactcttaatcctgcaccacagaagtccgccgccccagggaccgccccggaggaagcccctggccctcttccaccacctcccacacccagtagcgaggaccctggcttcagttcaccccttggcatgccagatccccacttataccatcaaatggggcttctactgaaacatatgcaggacgtcagggtactgcttggacacctcctgatggagcttagagaattatcaggtcaccggaagcctggtaccacaaaagctaccgcggaatag

SEQ ID NO: 71672 - DNA, 1098 bp, Artificial Sequence
  derived and/or modified sequence
atgaagcttggatgcgtactcatggcctgggctctttacttgtcactcggtgtcctctgggttgcacagatgttactggccgcaggatgccatgccgccgcctcttttgagacactccagtgtgaaggccccgtgtgtaccgaggaaagttcatgccataccgaagacgatctaactgacgcacgagaggccggcttccaagtgaaggcctacactttcagtgagcctttccaccttattgtgagttatgattggctgatactgcagggacctgcgaaacctgtgttcgaaggcgacctgctggttctgaggtgtcaggcctggcaggattggccccttacacaagtcaccttctatcgggacggtagcgcacttggtccccctgggccgaatcgggagtttagtatcacggtagtccagaaagctgactcaggacactaccactgcagtggcatcttccagagccccggacccggaatccctgaaaccgccagtgtcgtagccattacagtccaggaactgtttccagcacccattttacgtgctgtgccaagcgccgaaccacaggccgggagcccaatgacgctgagttgtcagacaaaattacctttacagagatctgccgccagactcctgttctctttttacaaagacggaaggattgtacagtcacgcggcctgagctccgaattccagatccctacagccagcgaagaccacagtggaagctactggtgcgaagcagcaaccgaggataatcaggtgtggaaacagagcccacaactagagattcgggtccagggcgccagcagctccgcagccccccccaccctaaatcccgccccccagaaatcggcagcaccaggcacagctcctgaggaggccccaggacctctccctccacccccaactccatcctcagaagatcccggattttcttcccctctgggcatgcctgaccctcatctttaccaccaaatggggctgttgctgaaacacatgcaggacgttagagtccttctgggtcacctcctcatggagttacgagaactatctggacacagaaagcccggaaccaccaaggccaccgcagagtag

SEQ ID NO: 71673 - DNA, 1149 bp, Artificial Sequence
  derived and/or modified sequence
atgcttaagaaaatctccgtaggagtggccggggatctgaacactgtgacaatgaagctgggctgcgtcctgatggcatgggcactttatttgtcccttggcgtgctgtgggtagctcagatgctactcgctgcgggatgtcacgctgctgcctcattcgagactctgcagtgtgaaggacccgtatgtaccgaagaaagttcctgtcataccgaagatgacttgaccgacgctagagaagccggtttccaggttaaagcttacacgttctccgaaccctttcatttaatcgtcagttatgattggctcatactccagggtcccgcaaaacccgtgtttgagggcgacctgcttgtgctgcggtgccaggcttggcaggactggcccttaacccaggtgacattctacagagacggaagtgcactcgggccaccaggcccaaatcgcgaattctctatcacagtagtacagaaggccgattcaggccactaccattgttccggaatatttcagagcccaggacccggcataccagaaaccgcatctgttgtcgctatcacagtccaggagctgtttcctgctccaatccttcgcgctgtcccctctgcagaaccccaagctggaagtccaatgaccttaagctgccaaacaaaactgccactgcaaaggtccgctgcccgcctgctgttttcgttttataaggatggtcgcattgtccagtctcggggactctcatcagaatttcagataccaacagcctctgaggatcattccgggagttattggtgcgaggccgcaacagaggacaaccaagtctggaaacagagtccccaactagagatacgcgttcaaggcgccagtagttcagcggcccctcctacactcaacccagccccacagaagagcgcagcacctggcactgcacctgaagaagcccctggcccccttccacccccacccacaccctcgtctgaagatccaggattttcgagccctctcggtatgccagacccgcacctttaccaccaaatgggtttgctgctgaaacacatgcaagatgttagggtgcttctgggccacctgcttatggagttacgagaactgtctggtcacaggaagcctggtaccactaaagcaaccgcggaatag

SEQ ID NO: 71674 - DNA, 1098 bp, Artificial Sequence
  derived and/or modified sequence
atgaaactgggatgcgtgttaatggcatgggcactctacctgtccttgggcgttctctgggtggcacagatgctgcttgtggcctctagttttagtgcagcctcttttgagaccctccagtgtgaaggccccgtgtgtactgaggagtctagttgtcacaccgaggatgatctgactgatgctagagaagcaggatttcaggtgaaggcttatacattctcagaacctttccatttgatagtctcttacgattggttgatattgcaaggccctgcgaagccagtttttgagggggacctgttagtcctcagatgccaggcgtggcaagactggccactcacacaagtcacgttctacagggatggatccgcactggggcccccaggtcccaatagggaatttagcataacagtcgttcagaaagcggactctggacactatcactgtagcggtatctttcagtcgccaggccccggtattcccgaaactgcttcagtggttgcgattacagttcaggagttgttccccgctcctattctgcgtgcagttccatcagctgagccccaagctggcagccctatgaccctcagctgtcaaactaaactgcccttgcagagatccgccgctcgccttctgtttagcttctacaaagatggcaggatcgtacagtcaagaggattgagcagtgaatttcagattcccactgcgtccgaagatcacagcggctcctactggtgcgaagccgctaccgaggacaaccaagtttggaaacagtccccccaactggaaatcagggtccagggtgcctcgtcatctgccgctcctcctacgttgaacccagcccctcagaagtctgccgcccccggtacagcgcccgaagaggctccgggtccccttcctccgccgcctacaccatcctctgaggaccctggatttagttcccctctgggaatgccagacccccacttgtatcaccaaatgggattgctactgaagcatatgcaggacgttagagtgcttttaggtcaccttttaatggagttacgcgaactgtcaggccaccgtaaacccggtactaccaaggcaactgctgagtag

SEQ ID NO: 71675 - DNA, 2362 bp, Artificial Sequence
  derived and/or modified sequence
ggccagctggctatcagacaatgacatgctttgacaggcccctgagctctgtgagtaaattcttgaacagctgagagtgctaccattttgtcatagccctaagggtgcagatgatgctgaaagcgtgttggccaaatctgaatgatgaaagccaattacaaactagaaaatgaaaacagaccccagatgcaaggagatgagacagttaaatttacttcctcttttctaatctgagaggtttcatgttgaagaaaatcagtgttggggttgcaggagacctaaacacagtcaccatgaagctgggctgtgtcctcatggcctgggccctctacctttcccttggtgtgctctgggtggcccagatgctactggttgcatcatcattttctgctgccagttttgagacgctgcagtgtgagggacctgtctgcactgaggagagcagctgccacacggaggatgacttgactgatgcaagggaagctggcttccaggtcaaggcctacactttcagtgaacccttccacctgattgtgtcctatgactggctgatcctccaaggtccagccaagccagtttttgaaggggacctgctggttctgcgctgccaggcctggcaagactggccactgactcaggtgaccttctaccgagatggctcagctctgggtccccccgggcctaacagggaattctccatcaccgtggtacaaaaggcagacagcgggcactaccactgcagtggcatcttccagagccctggtcctgggatcccagaaacagcatctgttgtggctatcacagtccaagaactgtttccagcgccaattctcagagctgtaccctcagctgaaccccaagcaggaagccccatgaccctgagttgtcagacaaagttgcccctgcagaggtcagctgcccgcctcctcttctccttctacaaggatggaaggatagtgcaaagcagggggctctcctcagaattccagatccccacagcttcagaagatcactccgggtcatactggtgtgaggcagccactgaggacaaccaagtttggaaacagagcccccagctagagatcagagtgcagggtgcttccagctctgctgcacctcccacattgaatccagctcctcagaaatcagctgctccaggaactgctcctgaggaggcccctgggcctctgcctccgccgccaaccccatcttctgaggatccaggcttttcttctcctctggggatgccagatcctcatctgtatcaccagatgggccttcttctcaaacacatgcaggatgtgagagtcctcctcggtcacctgctcatggagttgagggaattatctggccaccggaagcctgggaccacaaaggctactgctgaatagaagtaaacagttcatccatgatctcacttaaccaccccaataaatctgattctttattttctcttcctgtcctgcacatatgcataagtacttttacaagttgtcccagtgttttgttagaataatgtagttaggtgagtgtaaataaatttatataaagtgagaattagagtttagctataattgtgtattctctcttaacacaacagaattctgctgtctagatcaggaatttctatctgttatatcgaccagaatgttgtgatttaaagagaactaatggaagtggattgaatacagcagtctcaactgggggcaattttgccccccagaggacattgggcaatgtttggagacattttggtcattatacttggggggttgggggatggtgggatgtgtgtgctactggcatccagtaaatagaagccaggggtgccgctaaacatcctataatgcacagggcagtaccccacaacgaaaaataatctggcccaaaatgtcagttgtactgagtttgagaaaccccagcctaatgaaaccctaggtgttgggctctggaatgggactttgtcccttctaattattatctctttccagcctcattcagctattcttactgacataccagtctttagctggtgctatggtctgttctttagttctagtttgtatcccctcaaaagccattatgttgaaatcctaatccccaaggtgatggcattaagaagtgggcctttgggaagtgattagatcaggagtgcagagccctcatgattaggattagtgcccttatttaaaaaggccccagagagctaactcacccttccaccatatgaggacgtggcaagaagatgacatgtatgagaaccaaaaaacagctgtcgccaaacaccgactctgtcgttgccttgatcttgaacttccagcctccagaactatgagaaataaaattctgttgtttgtaagct

SEQ ID NO: 71676 - DNA, 1098 bp, Artificial Sequence
  derived and/or modified sequence
atgaagctgggctgcgtgctgatggcctgggccctgtacctgagcctgggcgtgctgtgggtggcccagatgctgctggccgccggctgccacgccgccgccagcttcgagaccctgcagtgcgagggccccgtgtgcaccgaggagagcagctgccacaccgaggacgacctgaccgacgccagagaggccggcttccaggtgaaggcctacaccttcagcgagcccttccacctgatcgtgagctacgactggctgatcctgcagggccccgccaagcccgtgttcgagggcgacctgctggtgctgagatgccaggcctggcaggactggcccctgacccaggtgaccttctacagagacggcagcgccctgggcccccccggccccaacagagagttcagcatcaccgtggtgcagaaggccgacagcggccactaccactgcagcggcatcttccagagccccggccccggcatccccgagaccgccagcgtggtggccatcaccgtgcaggagctgttccccgcccccatcctgagagccgtgcccagcgccgagccccaggccggcagccccatgaccctgagctgccagaccaagctgcccctgcagagaagcgccgccagactgctgttcagcttctacaaggacggcagaatcgtgcagagcagaggcctgagcagcgagttccagatccccaccgccagcgaggaccacagcggcagctactggtgcgaggccgccaccgaggacaaccaggtgtggaagcagagcccccagctggagatcagagtgcagggcgccagcagcagcgccgccccccccaccctgaaccccgccccccagaagagcgccgcccccggcaccgcccccgaggaggcccccggccccctgccccccccccccacccccagcagcgaggaccccggcttcagcagccccctgggcatgcccgacccccacctgtaccaccagatgggcctgctgctgaagcacatgcaggacgtgagagtgctgctgggccacctgctgatggagctgagagagctgagcggccacagaaagcccggcaccaccaaggccaccgccgagtag

SEQ ID NO: 71677 - DNA, 1149 bp, Artificial Sequence
  derived and/or modified sequence
atgctgaagaagatcagcgtgggcgtggccggcgacctgaacaccgtgaccatgaagctgggctgcgtgctgatggcctgggccctgtacctgagcctgggcgtgctgtgggtggcccagatgctgctggccgccggctgccacgccgccgccagcttcgagaccctgcagtgcgagggccccgtgtgcaccgaggagagcagctgccacaccgaggacgacctgaccgacgccagagaggccggcttccaggtgaaggcctacaccttcagcgagcccttccacctgatcgtgagctacgactggctgatcctgcagggccccgccaagcccgtgttcgagggcgacctgctggtgctgagatgccaggcctggcaggactggcccctgacccaggtgaccttctacagagacggcagcgccctgggcccccccggccccaacagagagttcagcatcaccgtggtgcagaaggccgacagcggccactaccactgcagcggcatcttccagagccccggccccggcatccccgagaccgccagcgtggtggccatcaccgtgcaggagctgttccccgcccccatcctgagagccgtgcccagcgccgagccccaggccggcagccccatgaccctgagctgccagaccaagctgcccctgcagagaagcgccgccagactgctgttcagcttctacaaggacggcagaatcgtgcagagcagaggcctgagcagcgagttccagatccccaccgccagcgaggaccacagcggcagctactggtgcgaggccgccaccgaggacaaccaggtgtggaagcagagcccccagctggagatcagagtgcagggcgccagcagcagcgccgccccccccaccctgaaccccgccccccagaagagcgccgcccccggcaccgcccccgaggaggcccccggccccctgccccccccccccacccccagcagcgaggaccccggcttcagcagccccctgggcatgcccgacccccacctgtaccaccagatgggcctgctgctgaagcacatgcaggacgtgagagtgctgctgggccacctgctgatggagctgagagagctgagcggccacagaaagcccggcaccaccaaggccaccgccgagtag

SEQ ID NO: 71678 - DNA, 1098 bp, Artificial Sequence
  derived and/or modified sequence
atgaagctgggctgcgtgctgatggcctgggccctgtacctgagcctgggcgtgctgtgggtggcccagatgctgctggtggccagcagcttcagcgccgccagcttcgagaccctgcagtgcgagggccccgtgtgcaccgaggagagcagctgccacaccgaggacgacctgaccgacgccagagaggccggcttccaggtgaaggcctacaccttcagcgagcccttccacctgatcgtgagctacgactggctgatcctgcagggccccgccaagcccgtgttcgagggcgacctgctggtgctgagatgccaggcctggcaggactggcccctgacccaggtgaccttctacagagacggcagcgccctgggcccccccggccccaacagagagttcagcatcaccgtggtgcagaaggccgacagcggccactaccactgcagcggcatcttccagagccccggccccggcatccccgagaccgccagcgtggtggccatcaccgtgcaggagctgttccccgcccccatcctgagagccgtgcccagcgccgagccccaggccggcagccccatgaccctgagctgccagaccaagctgcccctgcagagaagcgccgccagactgctgttcagcttctacaaggacggcagaatcgtgcagagcagaggcctgagcagcgagttccagatccccaccgccagcgaggaccacagcggcagctactggtgcgaggccgccaccgaggacaaccaggtgtggaagcagagcccccagctggagatcagagtgcagggcgccagcagcagcgccgccccccccaccctgaaccccgccccccagaagagcgccgcccccggcaccgcccccgaggaggcccccggccccctgccccccccccccacccccagcagcgaggaccccggcttcagcagccccctgggcatgcccgacccccacctgtaccaccagatgggcctgctgctgaagcacatgcaggacgtgagagtgctgctgggccacctgctgatggagctgagagagctgagcggccacagaaagcccggcaccaccaaggccaccgccgagtag

SEQ ID NO: 71679 - DNA, 1098 bp, Artificial Sequence
  derived and/or modified sequence
atgaaactgggttgcgtgcttatggcatgggctctttacctgtctttgggggttctgtgggtggctcagatgctgctagcagctggctgtcacgctgcagctagctttgagacactccaatgtgagggtcccgtctgtactgaggagtcctcttgccacacagaagacgacctcacggatgctcgcgaagccggcttccaggtgaaggcatatacgttttccgaacccttccacctcatcgtatcctatgattggctgatcctgcaaggcccggccaagcccgtgtttgaaggagacctgttggtgctccgctgccaggcttggcaggattggccgctgacacaggtaaccttctatcgcgacggctctgcattggggccacccggccctaaccgagaattttcaattacagttgtccagaaggcggacagcgggcattaccattgcagtggcatcttccagagccctggacccgggatccccgaaacggccagcgtcgtcgcaatcaccgtccaggaactgtttcccgcacccatattgagggcagtcccaagcgccgagccacaagccggatcaccaatgaccctcagttgtcagaccaagctgccactccagcgctccgccgctaggctcctgttctctttctacaaggatgggcgcatcgtgcaatcccgcggactgagcagcgaattccagataccaacagcatcagaggaccatagcggcagctactggtgcgaagcggccaccgaggataaccaagtatggaaacagtctccccaactagagatccgcgtgcaaggagctagcagctcagccgccccacccacgcttaaccccgccccacagaaaagtgctgcccctggaactgccccagaggaggcaccgggacctctccctccgcccccaacaccctctagtgaagaccctggtttttccagtccgctcggaatgcccgatccccacctgtaccatcagatgggtctccttctgaagcacatgcaggatgttagagtcctgctgggccatcttttgatggaactcagggagctgtccgggcaccgaaaacccggtaccacaaaggccaccgcagagtag

SEQ ID NO: 71680 - DNA, 1149 bp, Artificial Sequence
  derived and/or modified sequence
atgctcaagaaaatatccgtgggcgtcgcaggagatttgaacacggtcacaatgaaacttggatgtgtgctcatggcatgggctctgtatctgtcactgggggtcctctgggtcgcccagatgctgctggccgcagggtgccacgccgccgccagttttgagaccttacagtgtgaaggacctgtctgcaccgaagagagttcttgccacacagaagatgacttaacagacgcgcgagaggccggattccaggttaaggcttacacattctccgaaccctttcaccttatcgtgtcctacgattggttaatactgcagggccccgccaaacctgtgtttgagggtgatcttctggtcctgcgctgccaggcatggcaggattggccgttaacccaagttacattctatcgtgatgggagcgcactgggccctcccggtccaaatagagagttctccatcacggtcgttcagaaagccgacagtggtcattaccattgtagcgggattttccagtcaccagggcccggtattccggagacggcaagcgtggtagctataaccgtccaggaactctttcctgcacctattctccgggccgtaccatccgccgaaccccaggccgggtcaccgatgacccttagttgccagacgaagctgccgctgcagcgttctgcagcccgtttgctgtttagtttctataaagacgggagaatcgtacagtccaggggattgtccagcgagtttcagataccaaccgcctccgaggatcactccgggtcctattggtgtgaagccgcgacagaggacaatcaggtgtggaaacagtcccctcagctagagatacgggtgcagggggcatcctcaagtgctgctcccccgaccttgaaccccgcgccccaaaaatcggcagcgccaggcacggccccagaagaggctccagggccactgcctccgccgcctaccccatcaagtgaagatccaggatttagtagccctctagggatgccagacccccacttgtatcatcagatgggcttactgctcaaacacatgcaggatgtacgcgtacttttggggcacctgctgatggagctacgggaactctctggacatcggaagccaggtaccactaaagcaacagctgaatag

SEQ ID NO: 71681 - DNA, 1098 bp, Artificial Sequence
  derived and/or modified sequence
atgaagttggggtgcgtgctcatggcttgggcactgtatttgagtctgggtgtcctgtgggtcgcacagatgctgttagtagcaagcagcttttcagcagcttctttcgaaaccctgcagtgcgaggggcccgtgtgtaccgaggaaagctcttgccacacggaagatgatctgacagacgccagagaagcggggtttcaagtgaaagcctatacattcagtgagccctttcatttaatcgtttcttacgactggctaattctgcaaggcccagcgaaaccagtgttcgagggcgacttgctggtgctccggtgtcaggcgtggcaggactggccactgacacaggttaccttttaccgggatgggagtgctctcggaccccctgggccaaacagagagttctcgatcacagttgtgcagaaggcggattctgggcactaccattgttcaggcatctttcagagtccaggccccgggatacccgaaaccgcgtctgttgtcgctattaccgtgcaggagttattccctgcacctattttgcgagcagtcccaagcgctgaacctcaagccggaagcccaatgaccctctcttgtcagactaaactgcctctgcagcggtccgccgcaaggcttttgttctccttttacaaggatgggaggattgtccagtctcggggactctcttccgagtttcagattcccacagcatctgaagatcactcaggatcgtactggtgtgaggctgccacagaagacaatcaggtatggaagcagagccctcagctggaaatcagagtgcagggcgcctcctccagcgctgccccccccaccctgaaccctgcaccccagaaatctgctgctccgggtactgcaccagaggaggccccaggacctttgcctccaccaccaaccccttcaagcgaggatccagggttttcatctccactcggaatgcccgacccccacttgtaccaccaaatgggtctgttgctgaagcatatgcaggacgtcagagtgctacttggccatttgttgatggagttgcgcgagttgagcggacacaggaaacctggaactacaaaggcaacagcggaatag

SEQ ID NO: 71682 - DNA, 2066 bp, Artificial Sequence
  derived and/or modified sequence
atgaagctgggctgtgtcctcatggcctgggccctctacctttcccttggtgtgctctgggtggcccagatgctactggcagctggatgtcatgccgctgccagttttgagacgctgcagtgtgagggacctgtctgcactgaggagagcagctgccacacggaggatgacttgactgatgcaagggaagctggcttccaggtcaaggcctacactttcagtgaacccttccacctgattgtgtcctatgactggctgatcctccaaggtccagccaagccagtttttgaaggggacctgctggttctgcgctgccaggcctggcaagactggccactgactcaggtgaccttctaccgagatggctcagctctgggtccccccgggcctaacagggaattctccatcaccgtggtacaaaaggcagacagcgggcactaccactgcagtggcatcttccagagccctggtcctgggatcccagaaacagcatctgttgtggctatcacagtccaagaactgtttccagcgccaattctcagagctgtaccctcagctgaaccccaagcaggaagccccatgaccctgagttgtcagacaaagttgcccctgcagaggtcagctgcccgcctcctcttctccttctacaaggatggaaggatagtgcaaagcagggggctctcctcagaattccagatccccacagcttcagaagatcactccgggtcatactggtgtgaggcagccactgaggacaaccaagtttggaaacagagcccccagctagagatcagagtgcagggtgcttccagctctgctgcacctcccacattgaatccagctcctcagaaatcagctgctccaggaactgctcctgaggaggcccctgggcctctgcctccgccgccaaccccatcttctgaggatccaggcttttcttctcctctggggatgccagatcctcatctgtatcaccagatgggccttcttctcaaacacatgcaggatgtgagagtcctcctcggtcacctgctcatggagttgagggaattatctggccaccggaagcctgggaccacaaaggctactgctgaatagaagtaaacagttcatccatgatctcacttaaccaccccaataaatctgattctttattttctcttcctgtcctgcacatatgcataagtacttttacaagttgtcccagtgttttgttagaataatgtagttaggtgagtgtaaataaatttatataaagtgagaattagagtttagctataattgtgtattctctcttaacacaacagaattctgctgtctagatcaggaatttctatctgttatatcgaccagaatgttgtgatttaaagagaactaatggaagtggattgaatacagcagtctcaactgggggcaattttgccccccagaggacattgggcaatgtttggagacattttggtcattatacttggggggttgggggatggtgggatgtgtgtgctactggcatccagtaaatagaagccaggggtgccgctaaacatcctataatgcacagggcagtaccccacaacgaaaaataatctggcccaaaatgtcagttgtactgagtttgagaaaccccagcctaatgaaaccctaggtgttgggctctggaatgggactttgtcccttctaattattatctctttccagcctcattcagctattcttactgacataccagtctttagctggtgctatggtctgttctttagttctagtttgtatcccctcaaaagccattatgttgaaatcctaatccccaaggtgatggcattaagaagtgggcctttgggaagtgattagatcaggagtgcagagccctcatgattaggattagtgcccttatttaaaaaggccccagagagctaactcacccttccaccatatgaggacgtggcaagaagatgacatgtatgagaaccaaaaaacagctgtcgccaaacaccgactctgtcgttgccttgatcttgaacttccagcctccagaactatgagaaataaaattctgttgtttgtaa

SEQ ID NO: 71683 - DNA, 2362 bp, Artificial Sequence
  derived and/or modified sequence
ggccagctggctatcagacaatgacatgctttgacaggcccctgagctctgtgagtaaattcttgaacagctgagagtgctaccattttgtcatagccctaagggtgcagatgatgctgaaagcgtgttggccaaatctgaatgatgaaagccaattacaaactagaaaatgaaaacagaccccagatgcaaggagatgagacagttaaatttacttcctcttttctaatctgagaggtttcatgttgaagaaaatcagtgttggggttgcaggagacctaaacacagtcaccatgaagctgggctgtgtcctcatggcctgggccctctacctttcccttggtgtgctctgggtggcccagatgctactggcagctggatgtcatgccgctgccagttttgagacgctgcagtgtgagggacctgtctgcactgaggagagcagctgccacacggaggatgacttgactgatgcaagggaagctggcttccaggtcaaggcctacactttcagtgaacccttccacctgattgtgtcctatgactggctgatcctccaaggtccagccaagccagtttttgaaggggacctgctggttctgcgctgccaggcctggcaagactggccactgactcaggtgaccttctaccgagatggctcagctctgggtccccccgggcctaacagggaattctccatcaccgtggtacaaaaggcagacagcgggcactaccactgcagtggcatcttccagagccctggtcctgggatcccagaaacagcatctgttgtggctatcacagtccaagaactgtttccagcgccaattctcagagctgtaccctcagctgaaccccaagcaggaagccccatgaccctgagttgtcagacaaagttgcccctgcagaggtcagctgcccgcctcctcttctccttctacaaggatggaaggatagtgcaaagcagggggctctcctcagaattccagatccccacagcttcagaagatcactccgggtcatactggtgtgaggcagccactgaggacaaccaagtttggaaacagagcccccagctagagatcagagtgcagggtgcttccagctctgctgcacctcccacattgaatccagctcctcagaaatcagctgctccaggaactgctcctgaggaggcccctgggcctctgcctccgccgccaaccccatcttctgaggatccaggcttttcttctcctctggggatgccagatcctcatctgtatcaccagatgggccttcttctcaaacacatgcaggatgtgagagtcctcctcggtcacctgctcatggagttgagggaattatctggccaccggaagcctgggaccacaaaggctactgctgaatagaagtaaacagttcatccatgatctcacttaaccaccccaataaatctgattctttattttctcttcctgtcctgcacatatgcataagtacttttacaagttgtcccagtgttttgttagaataatgtagttaggtgagtgtaaataaatttatataaagtgagaattagagtttagctataattgtgtattctctcttaacacaacagaattctgctgtctagatcaggaatttctatctgttatatcgaccagaatgttgtgatttaaagagaactaatggaagtggattgaatacagcagtctcaactgggggcaattttgccccccagaggacattgggcaatgtttggagacattttggtcattatacttggggggttgggggatggtgggatgtgtgtgctactggcatccagtaaatagaagccaggggtgccgctaaacatcctataatgcacagggcagtaccccacaacgaaaaataatctggcccaaaatgtcagttgtactgagtttgagaaaccccagcctaatgaaaccctaggtgttgggctctggaatgggactttgtcccttctaattattatctctttccagcctcattcagctattcttactgacataccagtctttagctggtgctatggtctgttctttagttctagtttgtatcccctcaaaagccattatgttgaaatcctaatccccaaggtgatggcattaagaagtgggcctttgggaagtgattagatcaggagtgcagagccctcatgattaggattagtgcccttatttaaaaaggccccagagagctaactcacccttccaccatatgaggacgtggcaagaagatgacatgtatgagaaccaaaaaacagctgtcgccaaacaccgactctgtcgttgccttgatcttgaacttccagcctccagaactatgagaaataaaattctgttgtttgtaagct

SEQ ID NO: 71684 - DNA, 1098 bp, Artificial Sequence
  derived and/or modified sequence
atgaagctgggctgtgtgctgatggcctgggccctgtacctgagcctgggcgtgctgtgggtggcccagatgctgctggccgccggctgccacgccgccgccagctttgagaccctgcagtgtgagggccctgtgtgcacagaggagagcagctgccacacagaagatgacctgacagatgcccgggaggccggcttccaggtgaaggcctacaccttcagcgagcccttccacctgattgtgtcctatgactggctgatcctgcagggccctgccaagcctgtgtttgaaggagacctgctggtgctgcgctgccaggcctggcaggactggcccctgacccaggtgaccttctacagagatggcagcgccctgggccccccaggccccaaccgggagttcagcatcaccgtggtgcagaaggctgacagcggccactaccactgcagcggcatcttccagagccctggccctggcatccctgagacagcctctgtggtggccatcaccgtgcaggagctgtttcctgcccccatcctgcgggctgtgcccagcgctgagccccaggccggcagccccatgaccctgagctgccagaccaagctgcccctgcagaggtctgctgcccggctgctcttctccttctacaaggatggaagaattgtgcagagccggggcctgagcagcgagttccagatccccacagccagcgaggaccacagcggcagctactggtgtgaggccgccacagaggacaaccaggtgtggaagcagagcccccagctggagatccgggtgcagggcgccagcagcagcgctgccccacccaccctgaacccagccccccagaagtctgctgcccctggaacagcccctgaggaggcccctggccccctgcccccaccacccacccccagcagcgaggaccccggcttcagcagccccctgggcatgccagacccccacctgtaccaccagatgggcctgctgctgaagcacatgcaggatgtgcgggtgctgctgggccacctgctgatggagctgcgggagctgagcggccacaggaagccaggcaccaccaaggccacagctgagtag

SEQ ID NO: 71685 - DNA, 1149 bp, Artificial Sequence
  derived and/or modified sequence
atgctgaagaagatctctgtgggcgtggccggggacctgaacacagtgaccatgaagctgggctgtgtgctgatggcctgggccctgtacctgagcctgggcgtgctgtgggtggcccagatgctgctggccgccggctgccacgccgccgccagctttgagaccctgcagtgtgagggccctgtgtgcacagaggagagcagctgccacacagaagatgacctgacagatgcccgggaggccggcttccaggtgaaggcctacaccttcagcgagcccttccacctgattgtgtcctatgactggctgatcctgcagggccctgccaagcctgtgtttgaaggagacctgctggtgctgcgctgccaggcctggcaggactggcccctgacccaggtgaccttctacagagatggcagcgccctgggccccccaggccccaaccgggagttcagcatcaccgtggtgcagaaggctgacagcggccactaccactgcagcggcatcttccagagccctggccctggcatccctgagacagcctctgtggtggccatcaccgtgcaggagctgtttcctgcccccatcctgcgggctgtgcccagcgctgagccccaggccggcagccccatgaccctgagctgccagaccaagctgcccctgcagaggtctgctgcccggctgctcttctccttctacaaggatggccgcatcgtgcagagccggggcctgagcagcgagttccagatccccacagccagcgaggaccacagcggcagctactggtgtgaggccgccacagaggacaaccaggtgtggaagcagagcccccagctggagatccgggtgcagggcgccagcagcagcgctgccccacccaccctgaacccagccccccagaagtctgctgcccctggaacagcccctgaggaggcccctggccccctgcccccaccacccacccccagcagtgaagatcctggcttcagcagccccctgggcatgccagacccccacctgtaccaccagatgggcctgctgctgaagcacatgcaggatgtgcgggtgctgctgggccacctgctgatggagctgcgggagctgagcggccacaggaagccaggcaccaccaaggccacagctgagtag

SEQ ID NO: 71686 - DNA, 1098 bp, Artificial Sequence
  derived and/or modified sequence
atgaagctgggctgtgtgctgatggcctgggccctgtacctgagcctgggcgtgctgtgggtggcccagatgctgctggtggccagcagcttctctgctgccagctttgagaccctgcagtgtgagggccctgtgtgcacagaggagagcagctgccacacagaagatgacctgacagatgcccgggaggccggcttccaggtgaaggcctacaccttcagcgagcccttccacctgattgtgtcctatgactggctgatcctgcagggccctgccaagcctgtgtttgaaggagacctgctggtgctgcgctgccaggcctggcaggactggcccctgacccaggtgaccttctacagagatggcagcgccctgggccccccaggccccaaccgggagttcagcatcaccgtggtgcagaaggctgacagcggccactaccactgcagcggcatcttccagagccctggccctggcatccctgagacagcctctgtggtggccatcaccgtgcaggagctgtttcctgcccccatcctgcgggctgtgcccagcgctgagccccaggccggcagccccatgaccctgagctgccagaccaagctgcccctgcagaggtctgctgcccggctgctcttctccttctacaaggatggaagaattgtgcagagccggggcctgagcagcgagttccagatccccacagccagcgaggaccacagcggcagctactggtgtgaggccgccacagaggacaaccaggtgtggaagcagagcccccagctggagatccgggtgcagggcgccagcagcagcgctgccccacccaccctgaacccagccccccagaagtctgctgcccctggaacagcccctgaggaggcccctggccccctgcccccaccacccacccccagcagcgaggaccccggcttcagcagccccctgggcatgccagacccccacctgtaccaccagatgggcctgctgctgaagcacatgcaggatgtgcgggtgctgctgggccacctgctgatggagctgcgggagctgagcggccacaggaagccaggcaccaccaaggccacagctgagtag

SEQ ID NO: 71687 - DNA, 1098 bp, Artificial Sequence
  derived and/or modified sequence
atgaagctgggctgcgtgctgatggcctgggccctgtacctgagcctgggggtgctctgggtcgcccagatgcttctggcagccggttgtcacgccgccgcatccttcgaaactctccaatgtgaaggacctgtgtgtaccgaagagtcatcctgccacactgaggatgacctgaccgatgcgagggaggcaggcttccaggtgaaagcatatacattctctgaaccctttcacctgatagtgagttatgattggctgatattgcagggtccagctaagccagtcttcgaaggggatctgctggtgctgaggtgtcaggcttggcaggactggcctttgacgcaggttaccttctatagggacggaagtgcccttggccctccaggtccaaacagggagttcagcataacggtggtccaaaaggctgattctggccactaccactgctccggaatctttcagagccccggcccgggaattcccgagacagcctctgtggtcgccatcacagtgcaggaactgtttccagccccaattctgagggccgtaccttcagctgagccgcaggcaggctcacccatgactctttcctgccagacaaaactcccgttgcaacggtcagccgctaggctcctcttttccttctacaaggacggacgcattgtccagagcagggggctttcttctgaatttcagattccgaccgctagtgaagatcattctggctcttactggtgtgaggctgcaactgaagacaatcaggtgtggaaacaaagtccacaattggagatccgggtgcaaggcgcaagttcgtcggccgcccctccaacgctgaatccggccccgcagaaaagcgccgccccgggcaccgcaccagaggaggcaccgggacccctcccacctcccccgacgccgtcatctgaggacccagggttctcttctcctttgggcatgcccgacccccatttgtatcaccagatgggtttgctgctcaagcatatgcaagatgtgagggtgctcctgggccacctgctaatggagctccgcgaactttctggacatagaaagcccggcactacaaaagcaacagccgagtag

SEQ ID NO: 71688 - DNA, 1149 bp, Artificial Sequence
  derived and/or modified sequence
atgctgaagaagatcagcgtgggcgtggccggcgacctgaacaccgtcacaatgaagctggggtgcgtgctcatggcatgggctctgtacttgtctttgggggtactctgggtcgcacagatgttgttggctgccggctgtcacgccgctgctagctttgaaacactgcagtgtgagggacccgtgtgcacagaagaatcatcttgtcacaccgaggatgacttaacagatgcccgcgaggccggtttccaagtcaaggcctacacattttcagagccattccatctaatcgtgtcctacgactggctgatcctccagggtcctgcaaaacccgtctttgagggtgatctgcttgtgctccgctgccaagcatggcaggattggccgctcactcaagtaacattttaccgcgacggatccgccttgggaccccctggacctaatagagaatttagcatcacagttgtccaaaaggcggatagtgggcattaccattgcagcggcatctttcaatctcccggtcccggaatacccgagaccgcatcggttgtagcaatcaccgtccaggagctcttcccagcgccaatactccgcgcggtgccctcggcagagccccaggcgggtagtccgatgaccctttcgtgtcagactaagctgccactgcagagaagtgctgctcgccttctattttctttttacaaggatggtaggattgtacagagtcgggggctgagttccgagttccagatccccaccgcctcagaagaccattcaggatcgtattggtgtgaagcggctacagaagacaatcaggtatggaagcagagcccacagcttgagatccgagtgcagggggcatcatcttccgctgccccacctactctgaatcctgcacctcaaaagtctgccgcccccggcaccgcacctgaagaagctcctgggccattgccaccaccaccaactccctccagtgaggaccctgggttctcctctccgctgggaatgccagatccccacctgtaccatcagatggggttgttactcaagcacatgcaggatgtacgagtgttgttggggcacctcctcatggaactgcgggaactcagcggtcatcgcaagccgggaaccactaaggcaactgcagagtag

SEQ ID NO: 71689 - RNA, 1098 nt, Artificial Sequence
  derived and/or modified sequence
augaagcuuggaugcguacucauggccugggcucuuuacuugucacucgguguccucuggguugcacagauguuacuggccgcaggaugccaugccgccgccucuuuugagacacuccagugugaaggccccguguguaccgaggaaaguucaugccauaccgaagacgaucuaacugacgcacgagaggccggcuuccaagugaaggccuacacuuucagugagccuuuccaccuuauugugaguuaugauuggcugauacugcagggaccugcgaaaccuguguucgaaggcgaccugcucguucugcguugccaggcguggcaggacuggccgcuuacacaggugacuuucuaccgagacgggucagcccugggaccaccuggaccaaaucgcgaguucucuaucacugucguacagaaagcugacagugggcacuaccacugcucaggaaucuuucaauccccagggccuggaaucccugaaaccgcauccguaguagcuauuaccguucaggaacucuuccccgcgcccauacuccgggcagugccgagugccgaaccccaggcuggcucccccaugaccuuaagcugucagaccaaacugccuuuacagagguccgccgcaagacuucucuucagcuuuuauaaagaugggcgcauuguccagagucggggccucagcuccgaguuccaaauccccacggccucugaggaucauucaggaaguuauuggugugaggccgcuacugaagacaaucaggucuggaaacaaucuccacagcuagagauccgcguacagggggccaguaguagcgccgcacccccaacccucaaucccgccccccaaaaaucugcugcuccuggcaccgcccccgaagaggccccuggcccccuuccccccccaccuacuccguccagcgaggaucccggauuuaguuccccucugggcaugccugacccacaucucuaucaccagaugggacuuuugcuuaagcacaugcaggaugugaggguccuccucggucauuuauugauggaguugagagaacugagcgggcaccguaaaccaggcacuaccaaggcgacggcugaauag

SEQ ID NO: 71690 - RNA, 1149 nt, Artificial Sequence
  derived and/or modified sequence
auguugaagaagauuagcguaggaguggcuggcgaucugaauacugugacaaugaaacuggguuguguguuaauggccugggcacuguaccugaguuuaggcgugcucuggguugcccagaugcuccuggccgcuggcugucacgcugccgcuuccuuugagacccuacaaugugaagggccuguuugcaccgaagagucaaguugucacacugaagacgauuuaacagacgcucgugaggcgggcuuccaggucaaggccuacacguuuuccgagccauuucaccuuaucgugaguuaugauuggcugauucugcaggguccagcuaaaccuguguuugagggggaucuguugguucuccgaugucaggccuggcaggacuggccucugacccaggugaccuucuauagggauggcagugcgcugggaccccccggaccgaaccgcgaauuuuccauuaccguagugcaaaaggccgauucaggccauuaccacuguucagggauuuuucagagcccaggcccagggauuccagaaaccgcauccgugguggcaauuaccguucaggaacuguuucccgcucccauacugcgcgccgugccgucugccgaaccucaggcuggaaguccuaugacccuuucuugccagacuaaacucccgcuccagcgcuccgcggcuagacuucucuucuccuuuuauaaggaugggcgcaucguccaaucccggggccuaucaucagaauuccaaaucccuaccgcgagcgaagaucacucuggaagcuacuggugcgaagcugcaacugaggacaaccaaguguggaagcagucuccucagcuugagauuagaguacagggugcuagcaguagcgcugcaccccccacccugaaccccgcaccgcagaaaagcgcugccccagggaccgcuccugaggaagcuccugguccucugccaccuccgccuacuccuuccucugaggacccagguuucucaagcccacuugggaugccugacccccaccuguaucaucagaugggauuguugcugaagcauaugcaggacguccggguccuacuaggccaucugcucauggagcuuagagaacucuccggacauagaaagccagggacaacaaaggccacagcugaguag

SEQ ID NO: 71691 - RNA, 1098 nt, Artificial Sequence
  derived and/or modified sequence
augaagcugggaugugugcugauggccugggcauuauaccuuucgcucggugugcucuggguggcucaaauguuauuggucgcauccuccuucucugcugccuccuucgaaacccuccagugugaaggccccgucugcacugaagaaaguucgugccacacugaggacgacuugaccgacgcccgagaagcgggcuuccaggucaaagccuacaccuuuucugagcccuuccaucugauuguguccuaugacuggcucauucuccagggcccugcgaagccuguguucgagggugaucuccuaguucuccggugccaagcuuggcaggauuggccuuuaacacaaguaacauuuuaccgggacggcucggccuuggggcccccaggaccaaacagagaguucagcauuaccguaguccagaaggccgauucuggccauuaucauugcucggggauuuuucagagucccggaccugggauacccgaaaccgcaucagugguugccauuacaguccaggagcuguucccugcuccaauucuacgcgcuguccccagcgccgaaccccaagcaggaagcccgaugacacugucaugccaaacuaaacuuccacugcagagaagugcggcccgccugcuguuuuccuuuuacaaggacggccguaucgugcaaucacgagggcugagcucugaauuucagaucccgacagccucugaggaucacucgggcucauacuggugcgaagccgcaacagaagauaaccaaguguggaagcagucuccucaguuagaaauccgaguucagggcgcuagcucuagugcggcucccccuacucuuaauccugcaccacagaaguccgccgccccagggaccgccccggaggaagccccuggcccucuuccaccaccucccacacccaguagcgaggacccuggcuucaguucaccccuuggcaugccagauccccacuuauaccaucaaauggggcuucuacugaaacauaugcaggacgucaggguacugcuuggacaccuccugauggagcuuagagaauuaucaggucaccggaagccugguaccacaaaagcuaccgcggaauag

SEQ ID NO: 71692 - RNA, 1098 nt, Artificial Sequence
  derived and/or modified sequence
augaagcuuggaugcguacucauggccugggcucuuuacuugucacucgguguccucuggguugcacagauguuacuggccgcaggaugccaugccgccgccucuuuugagacacuccagugugaaggccccguguguaccgaggaaaguucaugccauaccgaagacgaucuaacugacgcacgagaggccggcuuccaagugaaggccuacacuuucagugagccuuuccaccuuauugugaguuaugauuggcugauacugcagggaccugcgaaaccuguguucgaaggcgaccugcugguucugaggugucaggccuggcaggauuggccccuuacacaagucaccuucuaucgggacgguagcgcacuuggucccccugggccgaaucgggaguuuaguaucacgguaguccagaaagcugacucaggacacuaccacugcaguggcaucuuccagagccccggacccggaaucccugaaaccgccagugucguagccauuacaguccaggaacuguuuccagcacccauuuuacgugcugugccaagcgccgaaccacaggccgggagcccaaugacgcugaguugucagacaaaauuaccuuuacagagaucugccgccagacuccuguucucuuuuuacaaagacggaaggauuguacagucacgcggccugagcuccgaauuccagaucccuacagccagcgaagaccacaguggaagcuacuggugcgaagcagcaaccgaggauaaucagguguggaaacagagcccacaacuagagauucggguccagggcgccagcagcuccgcagccccccccacccuaaaucccgccccccagaaaucggcagcaccaggcacagcuccugaggaggccccaggaccucucccuccacccccaacuccauccucagaagaucccggauuuucuuccccucugggcaugccugacccucaucuuuaccaccaaauggggcuguugcugaaacacaugcaggacguuagaguccuucugggucaccuccucauggaguuacgagaacuaucuggacacagaaagcccggaaccaccaaggccaccgcagaguag

SEQ ID NO: 71693 - RNA, 1149 nt, Artificial Sequence
  derived and/or modified sequence
augcuuaagaaaaucuccguaggaguggccggggaucugaacacugugacaaugaagcugggcugcguccugauggcaugggcacuuuauuugucccuuggcgugcuguggguagcucagaugcuacucgcugcgggaugucacgcugcugccucauucgagacucugcagugugaaggacccguauguaccgaagaaaguuccugucauaccgaagaugacuugaccgacgcuagagaagccgguuuccagguuaaagcuuacacguucuccgaacccuuucauuuaaucgucaguuaugauuggcucauacuccagggucccgcaaaacccguguuugagggcgaccugcuugugcugcggugccaggcuuggcaggacuggcccuuaacccaggugacauucuacagagacggaagugcacucgggccaccaggcccaaaucgcgaauucucuaucacaguaguacagaaggccgauucaggccacuaccauuguuccggaauauuucagagcccaggacccggcauaccagaaaccgcaucuguugucgcuaucacaguccaggagcuguuuccugcuccaauccuucgcgcuguccccucugcagaaccccaagcuggaaguccaaugaccuuaagcugccaaacaaaacugccacugcaaagguccgcugcccgccugcuguuuucguuuuauaaggauggucgcauuguccagucucggggacucucaucagaauuucagauaccaacagccucugaggaucauuccgggaguuauuggugcgaggccgcaacagaggacaaccaagucuggaaacagaguccccaacuagagauacgcguucaaggcgccaguaguucagcggccccuccuacacucaacccagccccacagaagagcgcagcaccuggcacugcaccugaagaagccccuggcccccuuccacccccacccacacccucgucugaagauccaggauuuucgagcccucucgguaugccagacccgcaccuuuaccaccaaauggguuugcugcugaaacacaugcaagauguuagggugcuucugggccaccugcuuauggaguuacgagaacugucuggucacaggaagccugguaccacuaaagcaaccgcggaauag

SEQ ID NO: 71694 - RNA, 1098 nt, Artificial Sequence
  derived and/or modified sequence
augaaacugggaugcguguuaauggcaugggcacucuaccuguccuugggcguucucuggguggcacagaugcugcuuguggccucuaguuuuagugcagccucuuuugagacccuccagugugaaggccccguguguacugaggagucuaguugucacaccgaggaugaucugacugaugcuagagaagcaggauuucaggugaaggcuuauacauucucagaaccuuuccauuugauagucucuuacgauugguugauauugcaaggcccugcgaagccaguuuuugagggggaccuguuaguccucagaugccaggcguggcaagacuggccacucacacaagucacguucuacagggauggauccgcacuggggcccccaggucccaauagggaauuuagcauaacagucguucagaaagcggacucuggacacuaucacuguagcgguaucuuucagucgccaggccccgguauucccgaaacugcuucagugguugcgauuacaguucaggaguuguuccccgcuccuauucugcgugcaguuccaucagcugagccccaagcuggcagcccuaugacccucagcugucaaacuaaacugcccuugcagagauccgccgcucgccuucuguuuagcuucuacaaagauggcaggaucguacagucaagaggauugagcagugaauuucagauucccacugcguccgaagaucacagcggcuccuacuggugcgaagccgcuaccgaggacaaccaaguuuggaaacaguccccccaacuggaaaucaggguccagggugccucgucaucugccgcuccuccuacguugaacccagccccucagaagucugccgcccccgguacagcgcccgaagaggcuccggguccccuuccuccgccgccuacaccauccucugaggacccuggauuuaguuccccucugggaaugccagacccccacuuguaucaccaaaugggauugcuacugaagcauaugcaggacguuagagugcuuuuaggucaccuuuuaauggaguuacgcgaacugucaggccaccguaaacccgguacuaccaaggcaacugcugaguag

SEQ ID NO: 71695 - protein, 270 aa, Artificial Sequence
  derived and/or modified sequence
MKLGCVLMAWALYLSLGVLWVAQMLLAASFETLQCEGPVCTEESSCHTEDDLTDAREAGFQVKAYTFSEPFHLIVSYELFPAPILRAVPSAEPQAGSPMTLSCQTKLPLQRSAARLLFSFYKDGRIVQSRGLSSEFQIPTASEDHSGSYWCEAATEDNQVWKQSPQLEIRVQGASSSAAPPTLNPAPQKSAAPGTAPEEAPGPLPPPPTPSSEDPGFSSPLGMPDPHLYHQMGLLLKHMQDVRVLLGHLLMELRELSGHRKPGTTKATAE

SEQ ID NO: 71696 - protein, 287 aa, Artificial Sequence
  derived and/or modified sequence
MLKKISVGVAGDLNTVTMKLGCVLMAWALYLSLGVLWVAQMLLAASFETLQCEGPVCTEESSCHTEDDLTDAREAGFQVKAYTFSEPFHLIVSYELFPAPILRAVPSAEPQAGSPMTLSCQTKLPLQRSAARLLFSFYKDGRIVQSRGLSSEFQIPTASEDHSGSYWCEAATEDNQVWKQSPQLEIRVQGASSSAAPPTLNPAPQKSAAPGTAPEEAPGPLPPPPTPSSEDPGFSSPLGMPDPHLYHQMGLLLKHMQDVRVLLGHLLMELRELSGHRKPGTTKATAE

SEQ ID NO: 71697 - DNA, 864 bp, Artificial Sequence
  derived and/or modified sequence
atgctgaagaagatcagcgtgggcgtggccggcgacctgaacaccgtgactatgaagctcggctgtgttttgatggcttgggccctatacctgtccttgggagtcctgtgggtggcccagatgctactcgccgctagctttgagaccctgcagtgtgaagggcctgtgtgcaccgaggaatctagttgccacacagaagacgaccttactgacgcgcgtgaggcaggcttccaggttaaggcctatacatttagtgagccgtttcacctgatcgtcagttatgagttgttcccagcccccatcctgcgggcagttccttcggcagagcctcaggctggctctccgatgacactgtcctgccagactaagctgcccctccaacggtccgcagcccgactactgttttctttctacaaagatgggagaatcgtacagtccagaggtctttcatcagagttccagatcccgacggcttcggaggaccactctggatcatattggtgtgaggccgctacagaagataaccaggtctggaaacagagccctcagctggaaatcagggtgcaaggagctagctcatctgctgccccccctactctaaacccagctccgcagaaatccgccgccccggggaccgccccggaggaggctccaggaccgctgccaccacctcccacaccctccagcgaggatcccggtttcagttcacctcttggaatgcccgatccacacctataccatcaaatggggctgctgctgaaacacatgcaggatgtccgagtactactgggccatctcctcatggaactaagggagctctccggccatagaaaacctggcactaccaaagccactgccgagtag

SEQ ID NO: 71698 - DNA, 813 bp, Artificial Sequence
  derived and/or modified sequence
atgaagctgggctgcgttctaatggcctgggctctgtatttgtccttaggagtgctatgggtcgcccagatgcttctggccgcttcattcgagactctgcagtgtgaggggcctgtgtgtactgaagagtcctcatgccatacagaggacgaccttactgatgccagagaagctggattccaggttaaagcctacacgttttctgagccgttccacctgattgtttcttacgaactcttccccgcacctattctgcgcgcagttccttccgctgaaccacaagccggtagtcccatgaccttgagctgtcagaccaaacttcccctccagcggagcgccgcaagactgctgttcagcttctacaaagacggcaggattgtgcagagtagggggctgagcagcgaatttcaaatacccaccgctagcgaggatcactccgggagctattggtgtgaagctgccaccgaggacaaccaggtatggaagcagagtcctcagctggagattcgggtgcagggggcttcttcatccgcggcacctcccaccctcaaccctgctccccagaagtccgcagctccaggcactgcgcctgaagaggcgcctggccctttaccaccccctcctaccccctcctccgaggacccaggcttctcctctccgttaggcatgcctgacccgcacctttaccaccagatgggattactgctgaagcacatgcaggatgtgcgggtcctactcggacacctgcttatggagcttcgggaattgagcggtcacagaaagcccggtacaactaaggctacagctgagtag

SEQ ID NO: 71699 - DNA, 864 bp, Artificial Sequence
  derived and/or modified sequence
atgctgaagaaaatcagcgtgggcgtagcgggtgatcttaatactgtcactatgaagttggggtgtgtactgatggcttgggctttgtacctctcactcggcgtgttatgggtcgcccagatgctgttggctgcgagttttgaaactttacagtgcgagggaccagtctgcaccgaagagtcaagttgtcacacagaggatgatttgaccgacgctcgagaggctgggttccaggtaaaggcctacacattcagtgaacccttccaccttatcgttagttacgagctgttccccgcaccgattttgcgagccgtccctagcgcagagccccaagctggatcaccaatgacactgagctgtcaaaccaaactgccactccagagatctgccgcacgcctactatttagtttctacaaagatggccgtatcgtccagagccgtgggctgtcctccgaattccagatccctacagcaagcgaggatcatagtggaagctactggtgtgaggctgctacagaggataaccaggtgtggaagcagagtcctcagttggaaatccgggtgcagggcgcatcctcaagcgccgctcctcccacactgaaccccgctcctcagaagtccgccgctcccggaactgcaccagaagaagcgcctggacctttgcctccgcctcccacacccagttcagaagatccgggtttctcaagcccattaggcatgccagacccccatctgtaccaccaaatggggcttttactcaagcatatgcaggatgtccgagtgcttctcggacatttacttatggagcttagagaactgtcaggccatagaaaacctgggaccactaaggctaccgctgagtag

SEQ ID NO: 71700 - DNA, 813 bp, Artificial Sequence
  derived and/or modified sequence
atgaaactcggatgcgtgctgatggcctgggccctatatttgagcctaggagtactctgggtggcacagatgctactagctgcttctttcgagacattgcagtgtgagggtccagtttgcacagaggaaagttcgtgccacactgaggacgatctgaccgacgccagagaggccggattccaagtgaaggcctacacttttagtgagcctttccacctaatcgtgagttacgagttgtttcccgcaccaattctccgtgcagtgccatccgctgagcctcaggctggttctccaatgacactgtcctgccaaacaaagctccctcttcaacgaagtgccgcacgcttactgttttccttctataaagacggtaggatcgttcagtcaagaggcctgtcttctgaatttcagatcccgaccgctagcgaagaccactccggtagctactggtgtgaggccgcgaccgaagacaaccaggtatggaaacaatccccacagctggagatcagggtgcaaggtgcctccagttcagcggcaccacctacgttgaatcctgctccccagaagtctgctgctcccggaaccgcaccggaagaggccccgggtccccttcctccccctcctaccccatcttccgaggacccaggctttagctctccacttgggatgccagatccgcacctttatcaccaaatggggctgctgctgaaacatatgcaggatgtccgcgtcctgttgggacatctgctgatggaattaagagagctgtctggacatcgcaagcctggtacaaccaaagcgaccgccgaatag

SEQ ID NO: 71701 - DNA, 864 bp, Artificial Sequence
  derived and/or modified sequence
atgctcaagaagatatcagtgggcgtggctggggatctgaataccgtcactatgaaactcggctgcgttctgatggcatgggcactttatttaagtctgggtgtgttatgggtggcacagatgttgctggctgcttcttttgagaccttgcaatgtgaaggacccgtgtgcaccgaagaatcttcatgccacacggaggacgacctgactgatgcccgggaagcgggattccaggtgaaagcctacactttctccgagccgttccacctcattgtctcctacgagctattccctgccccaatattacgagctgttccaagtgccgaaccacaggcaggatcacctatgaccttgtcctgtcagaccaaactcccactgcagcgatccgcggcaaggttgctgttttccttctataaagatggcagaatcgttcaatcacgcggtctctcaagtgaattccagatcccgacagcgagtgaggatcactccggctcttactggtgtgaagcagccaccgaagataaccaggtgtggaaacagagcccgcagctggagatcagggtccagggagcatcctcctctgccgcacccccaactctgaaccctgccccacagaaatcagcagcccctggaaccgctcccgaagaagcccccggaccactacccccaccacccaccccctcttctgaagacccaggattctcttcacccctgggtatgccagatccacacctgtaccatcagatgggactgctgctgaaacatatgcaggacgtccgcgtcctgttgggacacctgcttatggagctgagagagttgagcggccaccgtaaaccgggaactaccaaagccaccgctgagtag

SEQ ID NO: 71702 - DNA, 813 bp, Artificial Sequence
  derived and/or modified sequence
atgaaactgggatgtgtactcatggcatgggccctgtacctgagtctcggagttttatgggtggcgcagatgctgctcgccgctagttttgagaccctccagtgtgagggaccggtgtgtaccgaggaaagctcctgtcacacggaagatgatttaaccgacgcccgagaggctggcttccaagttaaggcgtacacttttagtgaacccttccacctgattgtaagctacgaactcttccccgcacctatccttagagccgtgccctctgcggaaccacaagctggaagccccatgaccctctcatgccagaccaagttaccactgcagagaagtgccgcacgcctccttttcagcttctacaaagatggccgtattgtccagtctagaggattgagctctgagtttcagataccaacagcttcggaggaccattcaggctcatattggtgtgaggccgctactgaagacaaccaagtttggaaacagtcaccacagctcgagataagagtccagggggcctcaagctccgcggcccctccaaccctgaatcccgcaccacagaaatcagcagctccggggacagccccagaggaagctcccggcccacttccacccccacctaccccgtcatccgaagaccctggattctcctcccccctcggcatgccagatccacacttataccatcaaatgggtttgttattaaagcacatgcaagacgtccgtgtgctgctcgggcacctcctcatggaattgagggagcttagtggccacaggaagcctggaaccaccaaagctactgctgagtag

SEQ ID NO: 71703 - DNA, 864 bp, Artificial Sequence
  derived and/or modified sequence
atgctcaaaaaaatctctgtcggcgttgccggggatctcaacacagtgaccatgaaactcggctgcgtcctcatggcatgggccctttacttatctctgggggtcttatgggtagcgcagatgttgttagcagcctccttcgagacattgcagtgtgagggccctgtttgcaccgaagaaagctcttgtcacacagaggacgacctgaccgatgcccgggaggccgggttccaggtgaaagcatataccttcagtgagccattccacctaatcgtctcgtatgaactttttcccgcccctatcttgagagcagtcccttctgccgaaccccaggccgggagcccgatgaccctgagctgtcaaactaaactgcccctgcagagaagcgccgcccgcctacttttctctttctacaaagacggtcggattgtccaaagtcgcggactttcatcagagtttcagattcccacggcttccgaagatcacagtggtagttattggtgcgaagctgccaccgaagataatcaggtgtggaagcaatcgcctcaactggagatcagagtacagggcgcttcctccagcgccgcccccccgacactaaatcctgcaccccagaagtcagccgctcctggtactgcacctgaagaggcacccggacctttaccgcctccccccacgccaagtagtgaagatcccggttttagttctcccctcggaatgcccgaccctcatctttaccatcagatgggcctactgctgaagcacatgcaggacgtaagagtgctgctgggtcacctacttatggaactcagggaactcagtggacatcggaaacctggcactactaaagcaaccgcggagtag

SEQ ID NO: 71704 - DNA, 2077 bp, Artificial Sequence
  derived and/or modified sequence
ggccagctggctatcagacaatgacatgctttgacaggcccctgagctctgtgagtaaattcttgaacagctgagagtgctaccattttgtcatagccctaagggtgcagatgatgctgaaagcgtgttggccaaatctgaatgatgaaagccaattacaaactagaaaatgaaaacagaccccagatgcaaggagatgagacagttaaatttacttcctcttttctaatctgagaggtttcatgttgaagaaaatcagtgttggggttgcaggagacctaaacacagtcaccatgaagctgggctgtgtcctcatggcctgggccctctacctttcccttggtgtgctctgggtggcccagatgctactggctgccagttttgagacgctgcagtgtgagggacctgtctgcactgaggagagcagctgccacacggaggatgacttgactgatgcaagggaagctggcttccaggtcaaggcctacactttcagtgaacccttccacctgattgtgtcctatgaactgtttccagcgccaattctcagagctgtaccctcagctgaaccccaagcaggaagccccatgaccctgagttgtcagacaaagttgcccctgcagaggtcagctgcccgcctcctcttctccttctacaaggatggaaggatagtgcaaagcagggggctctcctcagaattccagatccccacagcttcagaagatcactccgggtcatactggtgtgaggcagccactgaggacaaccaagtttggaaacagagcccccagctagagatcagagtgcagggtgcttccagctctgctgcacctcccacattgaatccagctcctcagaaatcagctgctccaggaactgctcctgaggaggcccctgggcctctgcctccgccgccaaccccatcttctgaggatccaggcttttcttctcctctggggatgccagatcctcatctgtatcaccagatgggccttcttctcaaacacatgcaggatgtgagagtcctcctcggtcacctgctcatggagttgagggaattatctggccaccggaagcctgggaccacaaaggctactgctgaatagaagtaaacagttcatccatgatctcacttaaccaccccaataaatctgattctttattttctcttcctgtcctgcacatatgcataagtacttttacaagttgtcccagtgttttgttagaataatgtagttaggtgagtgtaaataaatttatataaagtgagaattagagtttagctataattgtgtattctctcttaacacaacagaattctgctgtctagatcaggaatttctatctgttatatcgaccagaatgttgtgatttaaagagaactaatggaagtggattgaatacagcagtctcaactgggggcaattttgccccccagaggacattgggcaatgtttggagacattttggtcattatacttggggggttgggggatggtgggatgtgtgtgctactggcatccagtaaatagaagccaggggtgccgctaaacatcctataatgcacagggcagtaccccacaacgaaaaataatctggcccaaaatgtcagttgtactgagtttgagaaaccccagcctaatgaaaccctaggtgttgggctctggaatgggactttgtcccttctaattattatctctttccagcctcattcagctattcttactgacataccagtctttagctggtgctatggtctgttctttagttctagtttgtatcccctcaaaagccattatgttgaaatcctaatccccaaggtgatggcattaagaagtgggcctttgggaagtgattagatcaggagtgcagagccctcatgattaggattagtgcccttatttaaaaaggccccagagagctaactcacccttccaccatatgaggacgtggcaagaagatgacatgtatgagaaccaaaaaacagctgtcgccaaacaccgactctgtcgttgccttgatcttgaacttccagcctccagaactatgagaaataaaattctgttgtttgtaagct

SEQ ID NO: 71705 - DNA, 813 bp, Artificial Sequence
  derived and/or modified sequence
atgaagctgggctgcgtgctgatggcctgggccctgtacctgagcctgggcgtgctgtgggtggcccagatgctgctggccgccagcttcgagaccctgcagtgcgagggccccgtgtgcaccgaggagagcagctgccacaccgaggacgacctgaccgacgccagagaggccggcttccaggtgaaggcctacaccttcagcgagcccttccacctgatcgtgagctacgagctgttccccgcccccatcctgagagccgtgcccagcgccgagccccaggccggcagccccatgaccctgagctgccagaccaagctgcccctgcagagaagcgccgccagactgctgttcagcttctacaaggacggcagaatcgtgcagagcagaggcctgagcagcgagttccagatccccaccgccagcgaggaccacagcggcagctactggtgcgaggccgccaccgaggacaaccaggtgtggaagcagagcccccagctggagatcagagtgcagggcgccagcagcagcgccgccccccccaccctgaaccccgccccccagaagagcgccgcccccggcaccgcccccgaggaggcccccggccccctgccccccccccccacccccagcagcgaggaccccggcttcagcagccccctgggcatgcccgacccccacctgtaccaccagatgggcctgctgctgaagcacatgcaggacgtgagagtgctgctgggccacctgctgatggagctgagagagctgagcggccacagaaagcccggcaccaccaaggccaccgccgagtag

SEQ ID NO: 71706 - DNA, 901 bp, Artificial Sequence
  derived and/or modified sequence
atgaagctgggctgtgtcctcatggcctgggccctctacctttcccttggtgtgctctgggtggcccagatgctactggctgccagttttgagacgctgcagtgtgagggacctgtctgcactgaggagagcagctgccacacggaggatgacttgactgatgcaagggaagctggcttccaggtcaaggcctacactttcagtgaacccttccacctgattgtgtcctatgaactgtttccagcgccaattctcagagctgtaccctcagctgaaccccaagcaggaagccccatgaccctgagttgtcagacaaagttgcccctgcagaggtcagctgcccgcctcctcttctccttctacaaggatggaaggatagtgcaaagcagggggctctcctcagaattccagatccccacagcttcagaagatcactccgggtcatactggtgtgaggcagccactgaggacaaccaagtttggaaacagagcccccagctagagatcagagtgcagggtgcttccagctctgctgcacctcccacattgaatccagctcctcagaaatcagctgctccaggaactgctcctgaggaggcccctgggcctctgcctccgccgccaaccccatcttctgaggatccaggcttttcttctcctctggggatgccagatcctcatctgtatcaccagatgggccttcttctcaaacacatgcaggatgtgagagtcctcctcggtcacctgctcatggagttgagggaattatctggccaccggaagcctgggaccacaaaggctactgctgaatagaagtaaacagttcatccatgatctcacttaaccaccccaataaatctgattctttattttctcttcctgtcctgcacatatgcataag

SEQ ID NO: 71707 - DNA, 864 bp, Artificial Sequence
  derived and/or modified sequence
atgctgaagaagatcagcgtgggcgtggccggcgacctgaacaccgtgaccatgaagctgggctgcgtgctgatggcctgggccctgtacctgagcctgggcgtgctgtgggtggcccagatgctgctggccgccagcttcgagaccctgcagtgcgagggccccgtgtgcaccgaggagagcagctgccacaccgaggacgacctgaccgacgccagagaggccggcttccaggtgaaggcctacaccttcagcgagcccttccacctgatcgtgagctacgagctgttccccgcccccatcctgagagccgtgcccagcgccgagccccaggccggcagccccatgaccctgagctgccagaccaagctgcccctgcagagaagcgccgccagactgctgttcagcttctacaaggacggcagaatcgtgcagagcagaggcctgagcagcgagttccagatccccaccgccagcgaggaccacagcggcagctactggtgcgaggccgccaccgaggacaaccaggtgtggaagcagagcccccagctggagatcagagtgcagggcgccagcagcagcgccgccccccccaccctgaaccccgccccccagaagagcgccgcccccggcaccgcccccgaggaggcccccggccccctgccccccccccccacccccagcagcgaggaccccggcttcagcagccccctgggcatgcccgacccccacctgtaccaccagatgggcctgctgctgaagcacatgcaggacgtgagagtgctgctgggccacctgctgatggagctgagagagctgagcggccacagaaagcccggcaccaccaaggccaccgccgagtag

SEQ ID NO: 71708 - DNA, 813 bp, Artificial Sequence
  derived and/or modified sequence
atgaagttaggttgcgttctcatggcttgggccctttacctgtcgctcggcgttctgtgggttgcacagatgctgttagcagccagtttcgagacacttcagtgcgaggggcccgtctgcacggaggagtcaagctgtcatactgaggacgatctaacagacgcacgcgaggctggcttccaagtaaaggcttataccttcagcgaaccctttcaccttattgtatcttacgagctgtttcccgcgccaattttaagggcagtcccaagtgccgaacctcaggctggctcaccgatgacccttagttgtcagacgaagctgcccctccagaggtccgctgcccgtctcctgttcagcttttacaaagatgggcgcattgtgcagagtaggggactgagctccgagttccagatacctacagcctctgaggatcactctggctcatactggtgtgaagcggccacagaggataaccaagtgtggaaacagtcacctcaactggagataagagtacagggtgccagcagctctgctgccccacctactctgaaccccgccccccagaaaagcgccgcccccggaacagccccagaagaggctcccggacctctgccacccccacccactccctctagtgaggatccagggttcagctctccacttggcatgcctgatccacacctgtaccatcagatgggactgctgctgaaacatatgcaggacgtgagagtgctcctcgggcacctactgatggaacttagagagctttcaggccaccgtaagcctggcactaccaaagccaccgctgagtag

SEQ ID NO: 71709 - DNA, 864 bp, Artificial Sequence
  derived and/or modified sequence
atgctgaagaaaatttcagtgggagtcgcaggcgatcttaatacagttacaatgaagctgggttgcgtcctgatggcttgggctctttacctgtcactgggagtgctctgggtggcgcagatgcttctcgccgcatcattcgaaaccctgcagtgcgagggacccgtctgtacggaggaaagcagttgccacaccgaagacgacttaaccgatgcccgtgaagcaggcttccaggtcaaggcatacacgttctccgagccttttcatctgatcgtttcgtatgagttgttccccgctccgattcttagagccgtgccgtctgccgagccccaggccggctcaccgatgacactctcatgccagacaaagcttcctctgcagcgaagcgcagcaagactgctgttttccttctacaaggacggccgaattgtccaatctcgcgggttgagttctgaattccaaattcccacggcatctgaggaccactctggatcttactggtgcgaggccgccacagaggacaaccaggtttggaagcaatcaccgcagctcgaaatcagagtacagggcgcctctagttcagcggctccacccactctgaacccggcccctcagaagagcgctgcacctggaacagcacctgaagaggcccccgggcccctgcctccccctccaacacccagtagcgaggatccaggtttttcatctcccctcgggatgccagacccacatctgtatcatcagatgggactgctcctgaagcatatgcaggacgtgagagtgttgctgggtcacctgctgatggaattgcgagaacttagcggccaccgcaaacccggcaccaccaaggccactgccgagtag

SEQ ID NO: 71710 - DNA, 813 bp, Artificial Sequence
  derived and/or modified sequence
atgaagctgggctgtgtgctgatggcctgggccctgtacctgagcctgggcgtgctgtgggtggcccagatgctgctggccgccagctttgagaccctgcagtgtgagggccctgtgtgcacagaggagagcagctgccacacagaagatgacctgacagatgcccgggaggccggcttccaggtgaaggcctacaccttcagcgagcccttccacctgattgtgtcctatgagctgtttcctgcccccatcctgcgggctgtgcccagcgctgagccccaggccggcagccccatgaccctgagctgccagaccaagctgcccctgcagaggtctgctgcccggctgctcttctccttctacaaggatggccgcatcgtgcagagccggggcctgagcagcgagttccagatccccacagccagcgaggaccacagcggcagctactggtgtgaggccgccacagaggacaaccaggtgtggaagcagagcccccagctggagatccgggtgcagggcgccagcagcagcgctgccccacccaccctgaacccagccccccagaagtctgctgcccctggaacagcccctgaggaggcccctggccccctgcccccaccacccacccccagcagtgaagatcctggcttcagcagccccctgggcatgccagacccccacctgtaccaccagatgggcctgctgctgaagcacatgcaggatgtgcgggtgctgctgggccacctgctgatggagctgcgggagctgagcggccacaggaagccaggcaccaccaaggccacagctgagtag

SEQ ID NO: 71711 - DNA, 864 bp, Artificial Sequence
  derived and/or modified sequence
atgctgaagaagatctctgtgggcgtggccggggacctgaacacagtgaccatgaagctgggctgtgtgctgatggcctgggccctgtacctgagcctgggcgtgctgtgggtggcccagatgctgctggccgccagctttgagaccctgcagtgtgagggccctgtgtgcacagaggagagcagctgccacacagaagatgacctgacagatgcccgggaggccggcttccaggtgaaggcctacaccttcagcgagcccttccacctgattgtgtcctatgagctgtttcctgcccccatcctgcgggctgtgcccagcgctgagccccaggccggcagccccatgaccctgagctgccagaccaagctgcccctgcagaggtctgctgcccggctgctcttctccttctacaaggatggaagaattgtgcagagccggggcctgagcagcgagttccagatccccacagccagcgaggaccacagcggcagctactggtgtgaggccgccacagaggacaaccaggtgtggaagcagagcccccagctggagatccgggtgcagggcgccagcagcagcgctgccccacccaccctgaacccagccccccagaagtctgctgcccctggaacagcccctgaggaggcccctggccccctgcccccaccacccacccccagcagcgaggaccccggcttcagcagccccctgggcatgccagacccccacctgtaccaccagatgggcctgctgctgaagcacatgcaggatgtgcgggtgctgctgggccacctgctgatggagctgcgggagctgagcggccacaggaagccaggcaccaccaaggccacagctgagtag

SEQ ID NO: 71712 - DNA, 813 bp, Artificial Sequence
  derived and/or modified sequence
atgaagctgggctgcgtgctgatggcctgggccctgtacctgagcctgggggtcctctgggtggctcagatgctcctcgccgctagctttgagaccctgcagtgcgaaggccctgtgtgtacagaggagagcagttgtcacactgaggatgatctaaccgacgccagagaggccgggtttcaggtcaaggcgtacactttcagcgagccatttcatctgatcgtgtcttacgagctgtttcctgcgcctatccttagggccgtcccctccgcagaaccccaagccggctctcccatgaccctgtcttgtcaaacaaaattaccactccagcgctctgccgcccgcctcctgttcagtttctataaggacggcaggattgtccagtctcgaggtcttagtagtgagttccaaatcccaactgcctctgaggatcacagcggaagctattggtgtgaagcagccactgaggacaatcaggtatggaagcagagcccacagttagagatcagagttcaaggtgcgtcatctagcgctgcgccccccaccctgaatcccgctcctcagaaaagcgctgcccccgggacggcccccgaggaggcgccgggacctctgcctccaccacctacaccatcctcagaggatccaggattttccagccccctgggcatgccagacccccacttgtaccatcaaatgggtctgctcttgaaacatatgcaagacgtgcgggtattgctgggccatctattgatggagttacgcgagctgagtggacacagaaaacctggcactaccaaagcaaccgccgaatag

SEQ ID NO: 71713 - RNA, 813 nt, Artificial Sequence
  derived and/or modified sequence
augaaacucggaugcgugcugauggccugggcccuauauuugagccuaggaguacucuggguggcacagaugcuacuagcugcuucuuucgagacauugcagugugaggguccaguuugcacagaggaaaguucgugccacacugaggacgaucugaccgacgccagagaggccggauuccaagugaaggccuacacuuuuagugagccuuuccaccuaaucgugaguuacgaguuguuucccgcaccaauucuccgugcagugccauccgcugagccucaggcugguucuccaaugacacuguccugccaaacaaagcucccucuucaacgaagugccgcacgcuuacuguuuuccuucuauaaagacgguaggaucguucagucaagaggccugucuucugaauuucagaucccgaccgcuagcgaagaccacuccgguagcuacuggugugaggccgcgaccgaagacaaccagguauggaaacaauccccacagcuggagaucagggugcaaggugccuccaguucagcggcaccaccuacguugaauccugcuccccagaagucugcugcucccggaaccgcaccggaagaggccccggguccccuuccucccccuccuaccccaucuuccgaggacccaggcuuuagcucuccacuugggaugccagauccgcaccuuuaucaccaaauggggcugcugcugaaacauaugcaggauguccgcguccuguugggacaucugcugauggaauuaagagagcugucuggacaucgcaagccugguacaaccaaagcgaccgccgaauag

SEQ ID NO: 71714 - RNA, 864 nt, Artificial Sequence
  derived and/or modified sequence
augcucaagaagauaucagugggcguggcuggggaucugaauaccgucacuaugaaacucggcugcguucugauggcaugggcacuuuauuuaagucuggguguguuauggguggcacagauguugcuggcugcuucuuuugagaccuugcaaugugaaggacccgugugcaccgaagaaucuucaugccacacggaggacgaccugacugaugcccgggaagcgggauuccaggugaaagccuacacuuucuccgagccguuccaccucauugucuccuacgagcuauucccugccccaauauuacgagcuguuccaagugccgaaccacaggcaggaucaccuaugaccuuguccugucagaccaaacucccacugcagcgauccgcggcaagguugcuguuuuccuucuauaaagauggcagaaucguucaaucacgcggucucucaagugaauuccagaucccgacagcgagugaggaucacuccggcucuuacuggugugaagcagccaccgaagauaaccagguguggaaacagagcccgcagcuggagaucaggguccagggagcauccuccucugccgcacccccaacucugaacccugccccacagaaaucagcagccccuggaaccgcucccgaagaagcccccggaccacuacccccaccacccacccccucuucugaagacccaggauucucuucaccccuggguaugccagauccacaccuguaccaucagaugggacugcugcugaaacauaugcaggacguccgcguccuguugggacaccugcuuauggagcugagagaguugagcggccaccguaaaccgggaacuaccaaagccaccgcugaguag

SEQ ID NO: 71715 - RNA, 813 nt, Artificial Sequence
  derived and/or modified sequence
augaaacugggauguguacucauggcaugggcccuguaccugagucucggaguuuuauggguggcgcagaugcugcucgccgcuaguuuugagacccuccagugugagggaccgguguguaccgaggaaagcuccugucacacggaagaugauuuaaccgacgcccgagaggcuggcuuccaaguuaaggcguacacuuuuagugaacccuuccaccugauuguaagcuacgaacucuuccccgcaccuauccuuagagccgugcccucugcggaaccacaagcuggaagccccaugacccucucaugccagaccaaguuaccacugcagagaagugccgcacgccuccuuuucagcuucuacaaagauggccguauuguccagucuagaggauugagcucugaguuucagauaccaacagcuucggaggaccauucaggcucauauuggugugaggccgcuacugaagacaaccaaguuuggaaacagucaccacagcucgagauaagaguccagggggccucaagcuccgcggccccuccaacccugaaucccgcaccacagaaaucagcagcuccggggacagccccagaggaagcucccggcccacuuccacccccaccuaccccgucauccgaagacccuggauucuccuccccccucggcaugccagauccacacuuauaccaucaaauggguuuguuauuaaagcacaugcaagacguccgugugcugcucgggcaccuccucauggaauugagggagcuuaguggccacaggaagccuggaaccaccaaagcuacugcugaguag

SEQ ID NO: 71716 - RNA, 864 nt, Artificial Sequence
  derived and/or modified sequence
augcucaaaaaaaucucugucggcguugccggggaucucaacacagugaccaugaaacucggcugcguccucauggcaugggcccuuuacuuaucucugggggucuuauggguagcgcagauguuguuagcagccuccuucgagacauugcagugugagggcccuguuugcaccgaagaaagcucuugucacacagaggacgaccugaccgaugcccgggaggccggguuccaggugaaagcauauaccuucagugagccauuccaccuaaucgucucguaugaacuuuuucccgccccuaucuugagagcagucccuucugccgaaccccaggccgggagcccgaugacccugagcugucaaacuaaacugccccugcagagaagcgccgcccgccuacuuuucucuuucuacaaagacggucggauuguccaaagucgcggacuuucaucagaguuucagauucccacggcuuccgaagaucacagugguaguuauuggugcgaagcugccaccgaagauaaucagguguggaagcaaucgccucaacuggagaucagaguacagggcgcuuccuccagcgccgcccccccgacacuaaauccugcaccccagaagucagccgcuccugguacugcaccugaagaggcacccggaccuuuaccgccuccccccacgccaaguagugaagaucccgguuuuaguucuccccucggaaugcccgacccucaucuuuaccaucagaugggccuacugcugaagcacaugcaggacguaagagugcugcugggucaccuacuuauggaacucagggaacucaguggacaucggaaaccuggcacuacuaaagcaaccgcggaguag

SEQ ID NO: 71717 - protein, 225 aa, Artificial Sequence
  derived and/or modified sequence
MKLGCVLMAWALYLSLGVLWVAQMLLAAGCHAELFPAPILRAVPSAEPQAGSPMTLSCQTKLPLQRSAARLLFSFYKDGRIVQSRGLSSEFQIPTASEDHSGSYWCEAATEDNQVWKQSPQLEIRVQGASSSAAPPTLNPAPQKSAAPGTAPEEAPGPLPPPPTPSSEDPGFSSPLGMPDPHLYHQMGLLLKHMQDVRVLLGHLLMELRELSGHRKPGTTKATAE

SEQ ID NO: 71718 - protein, 242 aa, Artificial Sequence
  derived and/or modified sequence
MLKKISVGVAGDLNTVTMKLGCVLMAWALYLSLGVLWVAQMLLAAGCHAELFPAPILRAVPSAEPQAGSPMTLSCQTKLPLQRSAARLLFSFYKDGRIVQSRGLSSEFQIPTASEDHSGSYWCEAATEDNQVWKQSPQLEIRVQGASSSAAPPTLNPAPQKSAAPGTAPEEAPGPLPPPPTPSSEDPGFSSPLGMPDPHLYHQMGLLLKHMQDVRVLLGHLLMELRELSGHRKPGTTKATAE

SEQ ID NO: 71719 - DNA, 729 bp, Artificial Sequence
  derived and/or modified sequence
atgctgaagaagatcagcgtgggcgtggccggcgacctgaacaccgttactatgaaattggggtgcgtgctgatggcttgggccctctatctgtccttgggcgtgctctgggtggcacagatgctgttggccgccggatgccacgctgaattgttcccagctccaatacttagagctgtgccctccgctgaaccacaggctggctctccaatgacacttagttgtcagaccaagctgcccctgcagcggagtgccgccagactgcttttttcattctataaagatggcaggatcgtacagtcaagggggttaagttcagagttccagatcccaacggcttccgaggatcactcaggctcttattggtgcgaggctgctacagaggacaatcaggtatggaagcagagcccccaactggagattagggtgcagggcgcttcttcaagtgcagctccgcccaccctaaaccctgccccccaaaagtcggctgcccccggcacagcgcccgaggaagcgcccggccctctccccccgccacctacaccctcgtccgaggaccctggattcagttcgccacttggtatgccagaccctcatctgtaccatcagatgggcctcctgcttaaacatatgcaggacgtcagagttttactgggacacttactgatggagctgcgagaacttagtggccataggaaacctgggactaccaaagcaactgccgagtag

SEQ ID NO: 71720 - DNA, 678 bp, Artificial Sequence
  derived and/or modified sequence
atgaagctgggctgcgtgctgatggcatgggcgttgtacctgtctctcggtgtgctgtgggtagcccaaatgttgctcgccgctggctgtcatgctgagctgttccccgcacccatactccgggcagtgccctcagccgaacctcaagcagggtcacccatgacactctcatgtcagaccaaacttccgttgcagcgaagcgccgctcgtctgctgttcagtttctataaggacgggaggattgtccagtcacgcggactgagctctgaattccagattcctacagcctccgaagaccattctggctcttactggtgcgaagcggctacagaagacaatcaggtctggaaacagagtccccaattggaaatcagagttcaaggagcaagctccagtgctgctcccccaaccctgaatccggcaccccaaaaatctgcggcaccaggtacagcacccgaggaagcaccaggacctttaccaccaccccctacccccagctctgaggaccctggtttcagctcaccactcggcatgccggacccgcacttgtaccaccagatgggtctactcctgaagcacatgcaggacgtgcgggtgctcctggggcacttactgatggaactgcgagagctttccggtcataggaagcccggtactacaaaggctaccgccgaatag

SEQ ID NO: 71721 - DNA, 729 bp, Artificial Sequence
  derived and/or modified sequence
atgctcaagaaaatatctgttggagtagcaggggatctcaacaccgtgactatgaagctcggatgtgtcctgatggcctgggccctgtacctttctttgggggtgttgtgggtggcacaaatgctcctagcggctgggtgccacgcagaactgttcccggcaccaatactgcgagccgtgcccagcgcagaaccgcaagctgggagcccaatgacgctcagttgccaaaccaagctgcctctgcaaagatcggccgcaaggctgctcttttctttctataaagacggcaggatagttcaatctagaggactgagttctgagttccagattccgactgcctccgaagatcactccggcagctactggtgcgaggccgcaactgaggacaaccaggtttggaaacagtctccacaacttgagatccgcgtgcaaggagcatcaagtagtgcagcacctccgacattaaatcctgcccctcaaaagagtgcagcacctggaactgctcctgaagaggcacccggacccttaccacccccacctacaccctcaagtgaggacccaggcttcagtagtcctctggggatgcccgatccccatctctatcatcaaatgggcctcctccttaaacatatgcaagacgtgagggtcctgctgggccatttgctaatggaattgagggaattgtctgggcatagaaagcctggtaccactaaagcaaccgctgaatag

SEQ ID NO: 71722 - DNA, 678 bp, Artificial Sequence
  derived and/or modified sequence
atgaagctggggtgcgtgttgatggcttgggcgctatacctgtctttgggcgtgctctgggtggcccaaatgctgttggctgcaggatgtcatgccgaattatttcctgcccccatcctgcgcgctgtcccgtctgccgagcctcaagccggatccccaatgacactgagctgccaaactaaactgccattgcaacggtctgccgcaaggctgttgtttagcttttataaagacggccgaattgttcaaagccgaggtcttagtagcgaatttcaaatccctactgctagtgaggatcatagcggtagctactggtgtgaggcagctactgaggataatcaggtctggaaacagagtcctcagctcgaaattagagtgcaaggagcgtcatcaagcgccgcaccacccaccttaaacccagctccccagaagtccgcagctcccggaactgcacctgaagaagctcccggaccccttccacctccaccaaccccaagctcagaagaccccggattcagtagcccattgggaatgcctgatccacacctataccaccaaatgggcttgttactgaagcatatgcaggatgtgcgggtgctgcttggccacctgttgatggagctaagagaattatccggacaccggaaaccagggactaccaaggcaaccgccgagtag

SEQ ID NO: 71723 - DNA, 729 bp, Artificial Sequence
  derived and/or modified sequence
atgttgaaaaagatatcagtgggggtggccggcgatctgaatacagtcactatgaaacttggttgtgtgctcatggcgtgggcactgtatctgagcttaggggttctctgggtagcccagatgcttttagccgcaggctgtcacgccgaactttttccggcacctattctgagagcagtacctagcgctgagccacaggccggaagccctatgactctcagttgccagacaaaactacccctacagagatccgccgcgagactgctgttttctttttataaagacggccggatagttcaatcccgaggactgagttctgagttccaaatccccaccgcctccgaggatcactcaggctcttattggtgtgaggccgccacggaagataatcaagtgtggaagcaatctccccagttggagatccgggtccagggtgcatcttccagcgccgcgcctcccactctcaatccagccccacagaagtccgccgcccccggtacagctcccgaggaagcgccaggcccgctgcccccacctccgacaccctcctcagaagatcccggatttagcagtccgctcggaatgccagacccacacctctaccatcagatggggctgctgcttaaacacatgcaggacgttcgcgttcttctaggtcacctgttgatggaactcagagaacttagcgggcaccgcaagccaggcacgaccaaggctaccgcagagtag

SEQ ID NO: 71724 - DNA, 678 bp, Artificial Sequence
  derived and/or modified sequence
atgaaattaggatgcgtgttaatggcatgggctctctacttgtccctcggagtgttgtgggttgctcagatgctgcttgcggcagggtgtcacgcagaactgttcccagcaccgattctcagggccgtgccatcagcagaaccacaagccgggtccccaatgacgttatcttgccaaactaaactgcctctgcaacgctcagcagcaagactcctgttttctttttacaaggatggacgcattgtgcagtctagaggcttgtcatctgaattccagatcccaacagcctccgaggaccattccggaagttactggtgcgaggccgccaccgaagacaatcaggtgtggaaacagagtccccagctagagatccgagtgcaaggtgcaagctcaagcgccgctccacctacactgaatcctgccccacagaagagtgcagcccctggcaccgctcccgaagaggccccgggccccctgccgcccccgcctactccttcatccgaagatcctggattctcttctccactcgggatgcccgatcctcacctgtaccaccaaatgggactcctactgaaacatatgcaggatgtgagagtgctgttagggcacctgttaatggaactcagagagttaagtgggcatagaaagcctggaactacaaaagctaccgcagagtag

SEQ ID NO: 71725 - DNA, 729 bp, Artificial Sequence
  derived and/or modified sequence
atgttaaaaaagatctctgtcggagtggccggagacctcaacactgtgaccatgaaactgggatgcgtacttatggcttgggctctctatctcagtctgggagtcctgtgggtcgcccaaatgctcctggccgccgggtgtcacgcagagctgtttcctgcgcctattctgagggcagtccctagcgcagaacctcaggctggatcacccatgaccttgagctgtcagaccaaattgcctttgcagcggtccgccgcacggctcttattcagtttttataaggatggaagaattgtgcagtcaagagggctgtcctcagaattccagattcccacagcctccgaggaccacagtggaagttactggtgcgaagcagcgacagaagataatcaggtctggaagcagtcaccgcagcttgagattcgtgtgcagggagcaagtagctcagcggcaccaccaacattgaacccagccccacagaagtcagccgcccccggaactgcacccgaagaagcacccggccctctcccccctccccccaccccaagttccgaagatcctggattcagtagcccacttgggatgcccgacccacacctgtaccaccaaatgggtctccttctgaaacacatgcaggatgtgcgagtgcttttaggacatcttctcatggaacttagagaactctccggccaccggaaaccgggaacgaccaaggcaaccgcagagtag

SEQ ID NO: 71726 - DNA, 1942 bp, Artificial Sequence
  derived and/or modified sequence
ggccagctggctatcagacaatgacatgctttgacaggcccctgagctctgtgagtaaattcttgaacagctgagagtgctaccattttgtcatagccctaagggtgcagatgatgctgaaagcgtgttggccaaatctgaatgatgaaagccaattacaaactagaaaatgaaaacagaccccagatgcaaggagatgagacagttaaatttacttcctcttttctaatctgagaggtttcatgttgaagaaaatcagtgttggggttgcaggagacctaaacacagtcaccatgaagctgggctgtgtcctcatggcctgggccctctacctttcccttggtgtgctctgggtggcccagatgctactggcagctggatgtcatgccgaactgtttccagcgccaattctcagagctgtaccctcagctgaaccccaagcaggaagccccatgaccctgagttgtcagacaaagttgcccctgcagaggtcagctgcccgcctcctcttctccttctacaaggatggaaggatagtgcaaagcagggggctctcctcagaattccagatccccacagcttcagaagatcactccgggtcatactggtgtgaggcagccactgaggacaaccaagtttggaaacagagcccccagctagagatcagagtgcagggtgcttccagctctgctgcacctcccacattgaatccagctcctcagaaatcagctgctccaggaactgctcctgaggaggcccctgggcctctgcctccgccgccaaccccatcttctgaggatccaggcttttcttctcctctggggatgccagatcctcatctgtatcaccagatgggccttcttctcaaacacatgcaggatgtgagagtcctcctcggtcacctgctcatggagttgagggaattatctggccaccggaagcctgggaccacaaaggctactgctgaatagaagtaaacagttcatccatgatctcacttaaccaccccaataaatctgattctttattttctcttcctgtcctgcacatatgcataagtacttttacaagttgtcccagtgttttgttagaataatgtagttaggtgagtgtaaataaatttatataaagtgagaattagagtttagctataattgtgtattctctcttaacacaacagaattctgctgtctagatcaggaatttctatctgttatatcgaccagaatgttgtgatttaaagagaactaatggaagtggattgaatacagcagtctcaactgggggcaattttgccccccagaggacattgggcaatgtttggagacattttggtcattatacttggggggttgggggatggtgggatgtgtgtgctactggcatccagtaaatagaagccaggggtgccgctaaacatcctataatgcacagggcagtaccccacaacgaaaaataatctggcccaaaatgtcagttgtactgagtttgagaaaccccagcctaatgaaaccctaggtgttgggctctggaatgggactttgtcccttctaattattatctctttccagcctcattcagctattcttactgacataccagtctttagctggtgctatggtctgttctttagttctagtttgtatcccctcaaaagccattatgttgaaatcctaatccccaaggtgatggcattaagaagtgggcctttgggaagtgattagatcaggagtgcagagccctcatgattaggattagtgcccttatttaaaaaggccccagagagctaactcacccttccaccatatgaggacgtggcaagaagatgacatgtatgagaaccaaaaaacagctgtcgccaaacaccgactctgtcgttgccttgatcttgaacttccagcctccagaactatgagaaataaaattctgttgtttgtaagct

SEQ ID NO: 71727 - DNA, 766 bp, Artificial Sequence
  derived and/or modified sequence
atgaagctgggctgtgtcctcatggcctgggccctctacctttcccttggtgtgctctgggtggcccagatgctactggcagctggatgtcatgccgaactgtttccagcgccaattctcagagctgtaccctcagctgaaccccaagcaggaagccccatgaccctgagttgtcagacaaagttgcccctgcagaggtcagctgcccgcctcctcttctccttctacaaggatggaaggatagtgcaaagcagggggctctcctcagaattccagatccccacagcttcagaagatcactccgggtcatactggtgtgaggcagccactgaggacaaccaagtttggaaacagagcccccagctagagatcagagtgcagggtgcttccagctctgctgcacctcccacattgaatccagctcctcagaaatcagctgctccaggaactgctcctgaggaggcccctgggcctctgcctccgccgccaaccccatcttctgaggatccaggcttttcttctcctctggggatgccagatcctcatctgtatcaccagatgggccttcttctcaaacacatgcaggatgtgagagtcctcctcggtcacctgctcatggagttgagggaattatctggccaccggaagcctgggaccacaaaggctactgctgaatagaagtaaacagttcatccatgatctcacttaaccaccccaataaatctgattctttattttctcttcctgtcctgcacatatgcataag

SEQ ID NO: 71728 - DNA, 678 bp, Artificial Sequence
  derived and/or modified sequence
atgaagctgggctgcgtgctgatggcctgggccctgtacctgagcctgggcgtgctgtgggtggcccagatgctgctggccgccggctgccacgccgagctgttccccgcccccatcctgagagccgtgcccagcgccgagccccaggccggcagccccatgaccctgagctgccagaccaagctgcccctgcagagaagcgccgccagactgctgttcagcttctacaaggacggcagaatcgtgcagagcagaggcctgagcagcgagttccagatccccaccgccagcgaggaccacagcggcagctactggtgcgaggccgccaccgaggacaaccaggtgtggaagcagagcccccagctggagatcagagtgcagggcgccagcagcagcgccgccccccccaccctgaaccccgccccccagaagagcgccgcccccggcaccgcccccgaggaggcccccggccccctgccccccccccccacccccagcagcgaggaccccggcttcagcagccccctgggcatgcccgacccccacctgtaccaccagatgggcctgctgctgaagcacatgcaggacgtgagagtgctgctgggccacctgctgatggagctgagagagctgagcggccacagaaagcccggcaccaccaaggccaccgccgagtag

SEQ ID NO: 71729 - DNA, 729 bp, Artificial Sequence
  derived and/or modified sequence
atgctgaagaagatcagcgtgggcgtggccggcgacctgaacaccgtgaccatgaagctgggctgcgtgctgatggcctgggccctgtacctgagcctgggcgtgctgtgggtggcccagatgctgctggccgccggctgccacgccgagctgttccccgcccccatcctgagagccgtgcccagcgccgagccccaggccggcagccccatgaccctgagctgccagaccaagctgcccctgcagagaagcgccgccagactgctgttcagcttctacaaggacggcagaatcgtgcagagcagaggcctgagcagcgagttccagatccccaccgccagcgaggaccacagcggcagctactggtgcgaggccgccaccgaggacaaccaggtgtggaagcagagcccccagctggagatcagagtgcagggcgccagcagcagcgccgccccccccaccctgaaccccgccccccagaagagcgccgcccccggcaccgcccccgaggaggcccccggccccctgccccccccccccacccccagcagcgaggaccccggcttcagcagccccctgggcatgcccgacccccacctgtaccaccagatgggcctgctgctgaagcacatgcaggacgtgagagtgctgctgggccacctgctgatggagctgagagagctgagcggccacagaaagcccggcaccaccaaggccaccgccgagtag

SEQ ID NO: 71730 - DNA, 678 bp, Artificial Sequence
  derived and/or modified sequence
atgaaacttggctgcgtgctcatggcttgggccttgtatctttctctgggggtgctgtgggtggcccagatgcttctggccgcaggctgtcatgccgagctgttcccagccccgatacttcgggcggtgcctagtgccgaacctcaggcaggatcacctatgaccttgagttgccagaccaagctgccgctacagcgatcagcagctcgacttcttttttctttctataaggacgggagaatcgtgcagtcgcgcggcctctcgtcagagttccagatcccgaccgctagcgaggaccactctggttcttactggtgtgaagctgccacagaggataatcaggtgtggaaacagtcaccacagctggagatacgcgtgcaaggtgcttctagctccgcagccccaccaaccctgaaccccgccccccagaagtctgcagcaccgggcacagccccggaggaggccccaggtcccctgccgcctccccccaccccctcttccgaggaccccgggttttcctcccccctgggaatgcccgaccctcatctttatcaccagatggggctcttattaaagcatatgcaggatgtcagggtgctgttagggcacctgctgatggagctgagggaactgtcaggtcaccggaaacctgggaccacaaaggccacagccgagtag

SEQ ID NO: 71731 - DNA, 729 bp, Artificial Sequence
  derived and/or modified sequence
atgctgaagaagatctctgtcggcgtggccggagacctcaacaccgttaccatgaagctgggatgtgtgctgatggcatgggccctctacctgtccctgggcgttttatgggtcgcccagatgcttctggcggccgggtgtcatgctgagttgtttccagcacctatactccgggctgtaccttctgccgaacctcaggccggctccccaatgaccctctcttgtcaaaccaagctgccactgcaaaggtccgcggctcgtctcctcttctccttctacaaggacggccggatcgtgcaatccagaggtttgtccagcgagtttcagatcccaaccgcttccgaggaccattcaggctcttattggtgtgaagcggccaccgaggacaaccaagtttggaaacaaagccctcagctggagatcagagtgcaaggcgcaagctcctctgctgctccgccaactttgaatcccgctccacaaaaatcggcagctcctggcacggcaccggaggaggccccaggccctcttccaccgccacctaccccttcatcagaagatccaggtttctctagcccccttggaatgcctgaccctcatctataccaccaaatgggcctgctgcttaagcatatgcaggatgtgagagtgctgctgggccacttgctgatggagctccgagaactcagcggccaccggaaacctgggaccacaaaggccactgctgagtag

SEQ ID NO: 71732 - DNA, 678 bp, Artificial Sequence
  derived and/or modified sequence
atgaagctgggctgtgtgctgatggcctgggccctgtacctgagcctgggcgtgctgtgggtggcccagatgctgctggccgccggctgccacgccgagctgtttcctgcccccatcctgcgggctgtgcccagcgctgagccccaggccggcagccccatgaccctgagctgccagaccaagctgcccctgcagaggtctgctgcccggctgctcttctccttctacaaggatggaagaattgtgcagagccggggcctgagcagcgagttccagatccccacagccagcgaggaccacagcggcagctactggtgtgaggccgccacagaggacaaccaggtgtggaagcagagcccccagctggagatccgggtgcagggcgccagcagcagcgctgccccacccaccctgaacccagccccccagaagtctgctgcccctggaacagcccctgaggaggcccctggccccctgcccccaccacccacccccagcagcgaggaccccggcttcagcagccccctgggcatgccagacccccacctgtaccaccagatgggcctgctgctgaagcacatgcaggatgtgcgggtgctgctgggccacctgctgatggagctgcgggagctgagcggccacaggaagccaggcaccaccaaggccacagctgagtag

SEQ ID NO: 71733 - DNA, 729 bp, Artificial Sequence
  derived and/or modified sequence
atgctgaagaagatctctgtgggcgtggccggggacctgaacacagtgaccatgaagctgggctgtgtgctgatggcctgggccctgtacctgagcctgggcgtgctgtgggtggcccagatgctgctggccgccggctgccacgccgagctgtttcctgcccccatcctgcgggctgtgcccagcgctgagccccaggccggcagccccatgaccctgagctgccagaccaagctgcccctgcagaggtctgctgcccggctgctcttctccttctacaaggatggccgcatcgtgcagagccggggcctgagcagcgagttccagatccccacagccagcgaggaccacagcggcagctactggtgtgaggccgccacagaggacaaccaggtgtggaagcagagcccccagctggagatccgggtgcagggcgccagcagcagcgctgccccacccaccctgaacccagccccccagaagtctgctgcccctggaacagcccctgaggaggcccctggccccctgcccccaccacccacccccagcagtgaagatcctggcttcagcagccccctgggcatgccagacccccacctgtaccaccagatgggcctgctgctgaagcacatgcaggatgtgcgggtgctgctgggccacctgctgatggagctgcgggagctgagcggccacaggaagccaggcaccaccaaggccacagctgagtag

SEQ ID NO: 71734 - DNA, 678 bp, Artificial Sequence
  derived and/or modified sequence
atgaagctgggctgcgtgctgatggcctgggccctgtacctgagcctcggtgtgctgtgggtcgctcagatgctcctagcggctggctgtcacgccgaactgttccctgcaccgattctgcgcgccgtgcctagtgccgagccacaggctgggtcacctatgactctaagctgccagaccaaacttcccctgcagagatccgccgcacgattgctttttagcttctataaggatgggagaatcgtgcagtcacgaggactctctagtgagttccaaatcccaacagcaagcgaagaccactccggatcatactggtgcgaagccgccaccgaggacaaccaggtgtggaaacaatcccctcagttggagattcgtgttcaaggtgcctcctcttcagccgccccccccacacttaacccggctcctcaaaaatccgccgccccaggtacagcccccgaggaggctccagggcccttaccacccccccccaccccaagttccgaggatccgggcttttcttccccgctcgggatgccggacccccacttatatcaccagatgggattgttactgaagcacatgcaggatgtgcgagtcctgttaggccatctgctaatggagcttcgcgaactgtccggccataggaagccgggcacgacaaaggccacagccgaatag

SEQ ID NO: 71735 - RNA, 678 nt, Artificial Sequence
  derived and/or modified sequence
augaagcuggggugcguguugauggcuugggcgcuauaccugucuuugggcgugcucuggguggcccaaaugcuguuggcugcaggaugucaugccgaauuauuuccugcccccauccugcgcgcugucccgucugccgagccucaagccggauccccaaugacacugagcugccaaacuaaacugccauugcaacggucugccgcaaggcuguuguuuagcuuuuauaaagacggccgaauuguucaaagccgaggucuuaguagcgaauuucaaaucccuacugcuagugaggaucauagcgguagcuacuggugugaggcagcuacugaggauaaucaggucuggaaacagaguccucagcucgaaauuagagugcaaggagcgucaucaagcgccgcaccacccaccuuaaacccagcuccccagaaguccgcagcucccggaacugcaccugaagaagcucccggaccccuuccaccuccaccaaccccaagcucagaagaccccggauucaguagcccauugggaaugccugauccacaccuauaccaccaaaugggcuuguuacugaagcauaugcaggaugugcgggugcugcuuggccaccuguugauggagcuaagagaauuauccggacaccggaaaccagggacuaccaaggcaaccgccgaguag

SEQ ID NO: 71736 - RNA, 729 nt, Artificial Sequence
  derived and/or modified sequence
auguugaaaaagauaucaguggggguggccggcgaucugaauacagucacuaugaaacuugguugugugcucauggcgugggcacuguaucugagcuuagggguucucuggguagcccagaugcuuuuagccgcaggcugucacgccgaacuuuuuccggcaccuauucugagagcaguaccuagcgcugagccacaggccggaagcccuaugacucucaguugccagacaaaacuaccccuacagagauccgccgcgagacugcuguuuucuuuuuauaaagacggccggauaguucaaucccgaggacugaguucugaguuccaaauccccaccgccuccgaggaucacucaggcucuuauuggugugaggccgccacggaagauaaucaaguguggaagcaaucuccccaguuggagauccggguccagggugcaucuuccagcgccgcgccucccacucucaauccagccccacagaaguccgccgcccccgguacagcucccgaggaagcgccaggcccgcugcccccaccuccgacacccuccucagaagaucccggauuuagcaguccgcucggaaugccagacccacaccucuaccaucagauggggcugcugcuuaaacacaugcaggacguucgcguucuucuaggucaccuguugauggaacucagagaacuuagcgggcaccgcaagccaggcacgaccaaggcuaccgcagaguag

SEQ ID NO: 71737 - RNA, 678 nt, Artificial Sequence
  derived and/or modified sequence
augaaauuaggaugcguguuaauggcaugggcucucuacuugucccucggaguguuguggguugcucagaugcugcuugcggcagggugucacgcagaacuguucccagcaccgauucucagggccgugccaucagcagaaccacaagccggguccccaaugacguuaucuugccaaacuaaacugccucugcaacgcucagcagcaagacuccuguuuucuuuuuacaaggauggacgcauugugcagucuagaggcuugucaucugaauuccagaucccaacagccuccgaggaccauuccggaaguuacuggugcgaggccgccaccgaagacaaucagguguggaaacagaguccccagcuagagauccgagugcaaggugcaagcucaagcgccgcuccaccuacacugaauccugccccacagaagagugcagccccuggcaccgcucccgaagaggccccgggcccccugccgcccccgccuacuccuucauccgaagauccuggauucucuucuccacucgggaugcccgauccucaccuguaccaccaaaugggacuccuacugaaacauaugcaggaugugagagugcuguuagggcaccuguuaauggaacucagagaguuaagugggcauagaaagccuggaacuacaaaagcuaccgcagaguag

SEQ ID NO: 71738 - RNA, 729 nt, Artificial Sequence
  derived and/or modified sequence
auguuaaaaaagaucucugucggaguggccggagaccucaacacugugaccaugaaacugggaugcguacuuauggcuugggcucucuaucucagucugggaguccugugggucgcccaaaugcuccuggccgccgggugucacgcagagcuguuuccugcgccuauucugagggcagucccuagcgcagaaccucaggcuggaucacccaugaccuugagcugucagaccaaauugccuuugcagcgguccgccgcacggcucuuauucaguuuuuauaaggauggaagaauugugcagucaagagggcuguccucagaauuccagauucccacagccuccgaggaccacaguggaaguuacuggugcgaagcagcgacagaagauaaucaggucuggaagcagucaccgcagcuugagauucgugugcagggagcaaguagcucagcggcaccaccaacauugaacccagccccacagaagucagccgcccccggaacugcacccgaagaagcacccggcccucuccccccuccccccaccccaaguuccgaagauccuggauucaguagcccacuugggaugcccgacccacaccuguaccaccaaaugggucuccuucugaaacacaugcaggaugugcgagugcuuuuaggacaucuucucauggaacuuagagaacucuccggccaccggaaaccgggaacgaccaaggcaaccgcagaguag

SEQ ID NO: 71739 - protein, 141 aa, Artificial Sequence
  derived and/or modified sequence
MLKKISVGVAGDLNTVTMKLGCVLMAWALYLSLGVLWVAQMLLGASSSAAPPTLNPAPQKSAAPGTAPEEAPGPLPPPPTPSSEDPGFSSPLGMPDPHLYHQMGLLLKHMQDVRVLLGHLLMELRELSGHRKPGTTKATAE

SEQ ID NO: 71740 - DNA, 426 bp, Artificial Sequence
  derived and/or modified sequence
atgttgaagaaaatctctgtcggggttgccggagacctgaataccgtcactatgaaactcgggtgtgtgctcatggcgtgggctctatatctgtctttaggagtgctttgggtggcccagatgctgttgggagcttcttcatcggctgctccaccaaccctcaaccccgctcctcagaagtcagcagcccctggcactgctccagaggaggccccaggcccattgcctcctccccctacgcctagttccgaggaccctggattcagcagccctctcggcatgccggacccccatctgtaccaccaaatgggcttgctgctgaaacatatgcaagacgtgcgagtgttgctaggccacttgctcatggaactgcgcgagctttcaggccatagaaagccaggtacaacaaaagccaccgctgagtag

SEQ ID NO: 71741 - DNA, 426 bp, Artificial Sequence
  derived and/or modified sequence
atgctgaaaaaaatttctgttggggtagccggtgacttaaacactgtcaccatgaagcttggctgcgtgctcatggcctgggctctgtatctttccctaggtgtcttatgggtcgctcaaatgttgctcggcgcctcatccagtgctgctcctcccactctaaatccagccccccaaaaatccgcagcacctggcacggctccagaggaagcacctggcccactgccacccccgcctacaccttcttcagaagaccccgggtttagttcaccacttgggatgccagaccctcatctctaccatcagatgggcctgctactcaagcacatgcaagacgtgcgtgtgttattaggccacttgctaatggaattacgggaactgtcaggacatcgcaaacctggtactacgaaggccacagctgagtag

SEQ ID NO: 71742 - DNA, 426 bp, Artificial Sequence
  derived and/or modified sequence
atgctgaaaaaaatttctgttggggtagccggtgacttaaacactgtcaccatgaagcttggctgcgtgctcatggcctgggctctgtatctttccctaggtgtcttatgggtcgctcaaatgttgctcggcgcctcatccagtgctgctcctcccactctaaatccagccccccaaaaatccgcagcacctggcacggctccagaggaagcacctggcccactgccacccccgcctacaccttcttcagaagaccccgggtttagttcaccacttgggatgccagaccctcatctctaccatcagatgggactgctgttgaagcatatgcaggacgtgagagttttactgggtcatctgcttatggaacttcgcgagctgagcggccaccggaagccaggaacaactaaagctactgccgaatag

SEQ ID NO: 71743 - DNA, 426 bp, Artificial Sequence
  derived and/or modified sequence
atgctgaagaagatcagcgtgggcgtggccggcgacctgaacaccgtgaccatgaagctgggctgcgtgctgatggcctgggccctgtacctgagcctgggcgtgctgtgggtggcccagatgctgctgggcgccagcagcagcgccgccccccccaccctgaaccccgccccccagaagagcgccgcccccggcaccgcccccgaggaggcccccggccccctgccccccccccccacccccagcagcgaggaccccggcttcagcagccccctgggcatgcccgacccccacctgtaccaccagatgggcctgctgctgaagcacatgcaggacgtgagagtgctgctgggccacctgctgatggagctgagagagctgagcggccacagaaagcccggcaccaccaaggccaccgccgagtag

SEQ ID NO: 71744 - DNA, 426 bp, Artificial Sequence
  derived and/or modified sequence
atgctgaagaaaatttccgtgggagtggcgggcgacctcaatacagtgaccatgaagctggggtgcgttctgatggcatgggccttgtatttgagcttgggggtcctgtgggtggctcagatgcttctcggtgcatcgtcaagtgccgcaccccctactctgaatcctgccccacaaaaatcagccgctccaggcacagcaccagaagaagctccgggccccctgccaccccccccaactccctcaagtgaggatccaggattctctagtcccctaggaatgcctgaccctcacctctaccaccagatgggactgctcttaaagcacatgcaggacgtccgagtgctgctggggcacttactgatggagcttagggaactgtccggacacagaaaacctggaactaccaaggccacagccgagtag

SEQ ID NO: 71745 - DNA, 1639 bp, Artificial Sequence
  derived and/or modified sequence
ggccagctggctatcagacaatgacatgctttgacaggcccctgagctctgtgagtaaattcttgaacagctgagagtgctaccattttgtcatagccctaagggtgcagatgatgctgaaagcgtgttggccaaatctgaatgatgaaagccaattacaaactagaaaatgaaaacagaccccagatgcaaggagatgagacagttaaatttacttcctcttttctaatctgagaggtttcatgttgaagaaaatcagtgttggggttgcaggagacctaaacacagtcaccatgaagctgggctgtgtcctcatggcctgggccctctacctttcccttggtgtgctctgggtggcccagatgctactgggtgcttccagctctgctgcacctcccacattgaatccagctcctcagaaatcagctgctccaggaactgctcctgaggaggcccctgggcctctgcctccgccgccaaccccatcttctgaggatccaggcttttcttctcctctggggatgccagatcctcatctgtatcaccagatgggccttcttctcaaacacatgcaggatgtgagagtcctcctcggtcacctgctcatggagttgagggaattatctggccaccggaagcctgggaccacaaaggctactgctgaatagaagtaaacagttcatccatgatctcacttaaccaccccaataaatctgattctttattttctcttcctgtcctgcacatatgcataagtacttttacaagttgtcccagtgttttgttagaataatgtagttaggtgagtgtaaataaatttatataaagtgagaattagagtttagctataattgtgtattctctcttaacacaacagaattctgctgtctagatcaggaatttctatctgttatatcgaccagaatgttgtgatttaaagagaactaatggaagtggattgaatacagcagtctcaactgggggcaattttgccccccagaggacattgggcaatgtttggagacattttggtcattatacttggggggttgggggatggtgggatgtgtgtgctactggcatccagtaaatagaagccaggggtgccgctaaacatcctataatgcacagggcagtaccccacaacgaaaaataatctggcccaaaatgtcagttgtactgagtttgagaaaccccagcctaatgaaaccctaggtgttgggctctggaatgggactttgtcccttctaattattatctctttccagcctcattcagctattcttactgacataccagtctttagctggtgctatggtctgttctttagttctagtttgtatcccctcaaaagccattatgttgaaatcctaatccccaaggtgatggcattaagaagtgggcctttgggaagtgattagatcaggagtgcagagccctcatgattaggattagtgcccttatttaaaaaggccccagagagctaactcacccttccaccatatgaggacgtggcaagaagatgacatgtatgagaaccaaaaaacagctgtcgccaaacaccgactctgtcgttgccttgatcttgaacttccagcctccagaactatgagaaataaaattctgttgtttgtaagct

SEQ ID NO: 71746 - DNA, 426 bp, Artificial Sequence
  derived and/or modified sequence
atgctgaagaagatctctgtgggcgtggccggggacctgaacacagtgaccatgaagctgggctgtgtgctgatggcctgggccctgtacctgagcctgggcgtgctgtgggtggcccagatgctgctgggcgccagcagcagcgctgccccacccaccctgaacccagccccccagaagtctgctgcccctggaacagcccctgaggaggcccctggccccctgcccccaccacccacccccagcagcgaggaccccggcttcagcagccccctgggcatgccagacccccacctgtaccaccagatgggcctgctgctgaagcacatgcaggatgtgcgggtgctgctgggccacctgctgatggagctgcgggagctgagcggccacaggaagccaggcaccaccaaggccacagctgagtag

SEQ ID NO: 71747 - DNA, 426 bp, Artificial Sequence
  derived and/or modified sequence
atgctgaagaagatcagcgtgggcgtggccggcgacctgaacaccgtgacgatgaagctcggttgcgtgctaatggcctgggcgctatacctctccctgggtgtactctgggtggcccagatgttgctcggggcttcatcctccgccgcaccgccaacactgaatcctgcacctcagaaaagtgcggctcctggcacggcccctgaggaagcgcccggcccattacctccaccccccactccatctagcgaggatcctggcttttcaagccctctggggatgccagaccctcacctgtatcaccaaatggggctcctgctgaagcacatgcaggacgtcagagtgctattaggacatttgctgatggagctgagggaactctcgggccaccggaagccgggaaccacaaaagccacagcagagtag

SEQ ID NO: 71748 - DNA, 219 bp, Artificial Sequence
  derived and/or modified sequence
atgagctaccagcagcagcagtgcaagcagccctgccagccccccccggtgtgccctacgccaaaatgtcccgagccttgtcctccacctaagtgtcccgagccctgtccccctccaaaatgtcctcagccttgcccccctcagcaatgccaacagaaatacccacccgttaccccgagccccccttgccagcccaagtatccccccaaaagtaagtag

SEQ ID NO: 71749 - RNA, 426 nt, Artificial Sequence
  derived and/or modified sequence
augcugaaaaaaauuucuguugggguagccggugacuuaaacacugucaccaugaagcuuggcugcgugcucauggccugggcucuguaucuuucccuaggugucuuaugggucgcucaaauguugcucggcgccucauccagugcugcuccucccacucuaaauccagccccccaaaaauccgcagcaccuggcacggcuccagaggaagcaccuggcccacugccacccccgccuacaccuucuucagaagaccccggguuuaguucaccacuugggaugccagacccucaucucuaccaucagaugggccugcuacucaagcacaugcaagacgugcguguguuauuaggccacuugcuaauggaauuacgggaacugucaggacaucgcaaaccugguacuacgaaggccacagcugaguag

SEQ ID NO: 71750 - RNA, 426 nt, Artificial Sequence
  derived and/or modified sequence
augcugaaaaaaauuucuguugggguagccggugacuuaaacacugucaccaugaagcuuggcugcgugcucauggccugggcucuguaucuuucccuaggugucuuaugggucgcucaaauguugcucggcgccucauccagugcugcuccucccacucuaaauccagccccccaaaaauccgcagcaccuggcacggcuccagaggaagcaccuggcccacugccacccccgccuacaccuucuucagaagaccccggguuuaguucaccacuugggaugccagacccucaucucuaccaucagaugggacugcuguugaagcauaugcaggacgugagaguuuuacugggucaucugcuuauggaacuucgcgagcugagcggccaccggaagccaggaacaacuaaagcuacugccgaauag

SEQ ID NO: 71751 - protein, 236 aa, Artificial Sequence
  derived and/or modified sequence
MLKKISVGVAGDLNTVTMKLGCVLMAWALYLSLGVLWVAQMLLELFPAPILRAVPSAEPQAGSPMTLSCQTKLPLQRSAARLLFSFYKDGRIVQSRGLSSEFQIPTASEDHSGSYWCEAATEDNQVWKQSPQLEIRVQGASSSAAPPTLNPAPQKSAAPGTAPEEAPGPLPPPPTPSSEDPGFSSPLGMPDPHLYHQMGLLLKHMQDVRVLLGHLLMELRELSGHRKPGTTKATAE

SEQ ID NO: 71752 - DNA, 711 bp, Artificial Sequence
  derived and/or modified sequence
atgctgaagaagatatccgtgggcgtagccggagatttaaataccgtcactatgaaactgggctgcgtcctcatggcctgggctctgtacctgagtctgggcgtgctgtgggtggcgcagatgctgctggagctctttcccgctcccatcctcagggcggtcccttcagccgagccccaggccggtagccccatgacccttagttgccagacaaagcttccactccagcgcagcgccgcaagactgctcttctcattctataaagacggccgaatagtacagtcccggggattatcttctgaattccagataccaactgcatcagaagaccactctgggtcatactggtgcgaagccgcaacagaggataatcaggtgtggaagcagagcccccagcttgaaattcgtgtgcagggtgctagcagctctgcagcgccaccaaccttgaacccagcacctcagaagagcgctgcccctggaacagcccctgaggaggccccaggcccactgccccctccgcctactccctcatctgaggacccagggttctcttcaccgctgggcatgcccgacccccacctgtaccatcagatggggttactcctaaaacatatgcaggatgtgcgggtgcttttggggcatctactgatggagttgcgcgaactgtctggtcacagaaaacccggaacaacaaaagccacagccgaatag

SEQ ID NO: 71753 - DNA, 711 bp, Artificial Sequence
  derived and/or modified sequence
atgcttaaaaagatctctgtcggagttgccggggatctcaacaccgtgactatgaaacttggatgcgttcttatggcctgggccttgtatctgtctcttggggtactgtgggtcgcccagatgttgttagagctgttccctgcccccatacttcgcgccgtcccgtccgccgagcctcaagcagggagtcccatgactctttcatgtcagaccaaactgcccctccaacgctctgccgcacggctgctgttctccttctataaagacggacgcatcgtccaatcaagaggacttagctcagagttccagatccctaccgcatctgaagatcacagtggcagctactggtgtgaagctgcaaccgaggacaaccaggtgtggaaacagagcccccaattggagattcgggttcagggggcttcatctagtgcagcgcctcctacattgaatcctgccccccaaaagtctgccgcacctggcactgcccctgaggaggcccctggaccactacccccgccccctactccctcgtctgaagatccaggcttttccagcccactcggaatgcccgatccccacttgtatcaccaaatgggccttctgttgaagcatatgcaagacgtcagagtgttgctgggccacctgcttatggagctgcgggagctgtccggccacaggaagccaggaacaacaaaagcaactgctgagtag

SEQ ID NO: 71754 - DNA, 711 bp, Artificial Sequence
  derived and/or modified sequence
atgcttaaaaagatctctgtcggagttgccggggatctcaacaccgtgactatgaaacttggatgcgttcttatggcctgggccttgtatctgtctcttggggtactgtgggtcgcccagatgttgttagagctgttccctgcccccatacttcgcgccgtcccgtccgccgagcctcaagcagggagtcccatgactctttcatgtcagaccaaactgcccctccaacgctctgccgcacggctgctgttctccttctataaagacggacgcatcgtccaatcaagaggacttagctcagaatttcaaattcctactgccagtgaggaccattcagggagttactggtgcgaggccgcaactgaagataatcaggtgtggaaacagtcccctcagctcgaaatcagagtgcaaggcgcgtcatccagcgccgctccacctactctcaaccccgccccccaaaaaagcgctgccccgggaacagctccagaggaagcccccggtccacttccccccccacctacaccatcatcagaggatccaggattctctagccctcttggaatgcccgacccacatttataccatcagatgggcctgcttttgaaacatatgcaagacgttagggtcctattgggacaccttctgatggaactgcgcgagttgagcggtcataggaaaccaggaactacaaaggccactgcggagtag

SEQ ID NO: 71755 - DNA, 711 bp, Artificial Sequence
  derived and/or modified sequence
atgctgaagaagatcagcgtgggcgtggccggcgacctgaacaccgtgaccatgaagctgggctgcgtgctgatggcctgggccctgtacctgagcctgggcgtgctgtgggtggcccagatgctgctggagctgttccccgcccccatcctgagagccgtgcccagcgccgagccccaggccggcagccccatgaccctgagctgccagaccaagctgcccctgcagagaagcgccgccagactgctgttcagcttctacaaggacggcagaatcgtgcagagcagaggcctgagcagcgagttccagatccccaccgccagcgaggaccacagcggcagctactggtgcgaggccgccaccgaggacaaccaggtgtggaagcagagcccccagctggagatcagagtgcagggcgccagcagcagcgccgccccccccaccctgaaccccgccccccagaagagcgccgcccccggcaccgcccccgaggaggcccccggccccctgccccccccccccacccccagcagcgaggaccccggcttcagcagccccctgggcatgcccgacccccacctgtaccaccagatgggcctgctgctgaagcacatgcaggacgtgagagtgctgctgggccacctgctgatggagctgagagagctgagcggccacagaaagcccggcaccaccaaggccaccgccgagtag

SEQ ID NO: 71756 - DNA, 711 bp, Artificial Sequence
  derived and/or modified sequence
atgctaaaaaaaatcagcgtgggcgtagccggagatctgaacaccgtgacaatgaagctgggatgtgtcctgatggcctgggcactttacctgagcttaggagtcctctgggtggcgcagatgttgcttgagttgtttcccgcccccatcctgcgtgcagtgccctccgccgagccacaggcgggctcccctatgacactgtcttgccagactaaactccctctccagcgatcagccgcgagactactgttctctttctataaggacgggaggatcgtccaaagcagaggcctgtctagcgaatttcagatccccacagcctccgaggatcatagcggcagctattggtgcgaggcggccacggaggacaaccaggtatggaaacagtctcctcagctggaaatacgcgtacagggtgcaagtagcagtgcggccccgcctaccttgaatcccgctcctcagaagagcgctgcccccggcacagccccagaggaggctcctggcccccttccccctccccctactccaagttccgaggaccctggatttagtagcccactggggatgccagaccctcatttgtatcaccaaatgggacttctgctgaagcatatgcaagatgtcagagtgctgctgggccatctgctgatggaactgcgggaactgtcaggacaccgcaagcctggaactacaaaagcaaccgccgaatag

SEQ ID NO: 71757 - DNA, 1684 bp, Artificial Sequence
  derived and/or modified sequence
gtttcatgttgaagaaaatcagtgttggggttgcaggagacctaaacacagtcaccatgaagctgggctgtgtcctcatggcctgggccctctacctttcccttggtgtgctctgggtggcccagatgctactggaactgtttccagcgccaattctcagagctgtaccctcagctgaaccccaagcaggaagccccatgaccctgagttgtcagacaaagttgcccctgcagaggtcagctgcccgcctcctcttctccttctacaaggatggaaggatagtgcaaagcagggggctctcctcagaattccagatccccacagcttcagaagatcactccgggtcatactggtgtgaggcagccactgaggacaaccaagtttggaaacagagcccccagctagagatcagagtgcagggtgcttccagctctgctgcacctcccacattgaatccagctcctcagaaatcagctgctccaggaactgctcctgaggaggcccctgggcctctgcctccgccgccaaccccatcttctgaggatccaggcttttcttctcctctggggatgccagatcctcatctgtatcaccagatgggccttcttctcaaacacatgcaggatgtgagagtcctcctcggtcacctgctcatggagttgagggaattatctggccaccggaagcctgggaccacaaaggctactgctgaatagaagtaaacagttcatccatgatctcacttaaccaccccaataaatctgattctttattttctcttcctgtcctgcacatatgcataagtacttttacaagttgtcccagtgttttgttagaataatgtagttaggtgagtgtaaataaatttatataaagtgagaattagagtttagctataattgtgtattctctcttaacacaacagaattctgctgtctagatcaggaatttctatctgttatatcgaccagaatgttgtgatttaaagagaactaatggaagtggattgaatacagcagtctcaactgggggcaattttgccccccagaggacattgggcaatgtttggagacattttggtcattatacttggggggttgggggatggtgggatgtgtgtgctactggcatccagtaaatagaagccaggggtgccgctaaacatcctataatgcacagggcagtaccccacaacgaaaaataatctggcccaaaatgtcagttgtactgagtttgagaaaccccagcctaatgaaaccctaggtgttgggctctggaatgggactttgtcccttctaattattatctctttccagcctcattcagctattcttactgacataccagtctttagctggtgctatggtctgttctttagttctagtttgtatcccctcaaaagccattatgttgaaatcctaatccccaaggtgatggcattaagaagtgggcctttgggaagtgattagatcaggagtgcagagccctcatgattaggattagtgcccttatttaaaaaggccccagagagctaactcacccttccaccatatgaggacgtggcaagaagatgacatgtatgagaaccaaaaaacagctgtcgccaaacaccgactctgtcgttgccttgatcttgaacttccagcctccagaactatgagaaataaaattctgttgtttgtaa

SEQ ID NO: 71758 - DNA, 711 bp, Artificial Sequence
  derived and/or modified sequence
atgctgaagaagatctctgtgggcgtggccggggacctgaacacagtgaccatgaagctgggctgtgtgctgatggcctgggccctgtacctgagcctgggcgtgctgtgggtggcccagatgctgctggagctgtttcctgcccccatcctgcgggctgtgcccagcgctgagccccaggccggcagccccatgaccctgagctgccagaccaagctgcccctgcagaggtctgctgcccggctgctcttctccttctacaaggatggccgcatcgtgcagagccggggcctgagcagcgagttccagatccccacagccagcgaggaccacagcggcagctactggtgtgaggccgccacagaggacaaccaggtgtggaagcagagcccccagctggagatccgggtgcagggcgccagcagcagcgctgccccacccaccctgaacccagccccccagaagtctgctgcccctggaacagcccctgaggaggcccctggccccctgcccccaccacccacccccagcagtgaagatcctggcttcagcagccccctgggcatgccagacccccacctgtaccaccagatgggcctgctgctgaagcacatgcaggatgtgcgggtgctgctgggccacctgctgatggagctgcgggagctgagcggccacaggaagccaggcaccaccaaggccacagctgagtag

SEQ ID NO: 71759 - DNA, 711 bp, Artificial Sequence
  derived and/or modified sequence
atgctgaagaagatcagcgtgggcgtggccggcgacctgaacaccgtgaccatgaaacttggatgcgttctgatggcttgggccctgtatttatctctgggtgtgctctgggtggcccaaatgctgctggagctgttccccgcccctatcctccgcgctgtgccttccgcagagcctcaagccggttcgcccatgacactgagctgtcagaccaaactccctctgcagcggagtgctgccaggctgctgttcagcttctacaaggacgggcgcattgtccagagcaggggactgagcagtgagtttcagattcccacagcctcggaggatcacagcgggtcgtactggtgcgaggccgcaaccgaggacaaccaggtctggaaacagtccccacagttggagatccgggtacagggtgcgagctccagcgctgctccacctactctaaatcccgcgcctcaaaagtctgccgctccaggcacagcccctgaagaagcacccggtcccctccccccccctccaacccccagctctgaagaccctgggttctctagtccgttgggaatgcccgatccacacctttaccatcagatgggcctgcttttgaaacatatgcaggatgtgcgagtgttacttggccatttactcatggagcttagggagctatccggtcatcgaaaaccggggacgaccaaagccactgccgagtag

SEQ ID NO: 71760 - RNA, 711 nt, Artificial Sequence
  derived and/or modified sequence
augcuuaaaaagaucucugucggaguugccggggaucucaacaccgugacuaugaaacuuggaugcguucuuauggccugggccuuguaucugucucuugggguacugugggucgcccagauguuguuagagcuguucccugcccccauacuucgcgccgucccguccgccgagccucaagcagggagucccaugacucuuucaugucagaccaaacugccccuccaacgcucugccgcacggcugcuguucuccuucuauaaagacggacgcaucguccaaucaagaggacuuagcucagaguuccagaucccuaccgcaucugaagaucacaguggcagcuacuggugugaagcugcaaccgaggacaaccagguguggaaacagagcccccaauuggagauucggguucagggggcuucaucuagugcagcgccuccuacauugaauccugccccccaaaagucugccgcaccuggcacugccccugaggaggccccuggaccacuacccccgcccccuacucccucgucugaagauccaggcuuuuccagcccacucggaaugcccgauccccacuuguaucaccaaaugggccuucuguugaagcauaugcaagacgucagaguguugcugggccaccugcuuauggagcugcgggagcuguccggccacaggaagccaggaacaacaaaagcaacugcugaguag

SEQ ID NO: 71761 - RNA, 711 nt, Artificial Sequence
  derived and/or modified sequence
augcuuaaaaagaucucugucggaguugccggggaucucaacaccgugacuaugaaacuuggaugcguucuuauggccugggccuuguaucugucucuugggguacugugggucgcccagauguuguuagagcuguucccugcccccauacuucgcgccgucccguccgccgagccucaagcagggagucccaugacucuuucaugucagaccaaacugccccuccaacgcucugccgcacggcugcuguucuccuucuauaaagacggacgcaucguccaaucaagaggacuuagcucagaauuucaaauuccuacugccagugaggaccauucagggaguuacuggugcgaggccgcaacugaagauaaucagguguggaaacaguccccucagcucgaaaucagagugcaaggcgcgucauccagcgccgcuccaccuacucucaaccccgccccccaaaaaagcgcugccccgggaacagcuccagaggaagcccccgguccacuuccccccccaccuacaccaucaucagaggauccaggauucucuagcccucuuggaaugcccgacccacauuuauaccaucagaugggccugcuuuugaaacauaugcaagacguuaggguccuauugggacaccuucugauggaacugcgcgaguugagcggucauaggaaaccaggaacuacaaaggccacugcggaguag

SEQ ID NO: 71762 - protein, 192 aa, Artificial Sequence
  derived and/or modified sequence
MLKKISVGVAGDLNTVTMKLGCVLMAWALYLSLGVLWVAQMLLAASFETLQCEGPVCTEESSCHTEDDLTDAREAGFQVKAYTFSEPFHLIVSYGASSSAAPPTLNPAPQKSAAPGTAPEEAPGPLPPPPTPSSEDPGFSSPLGMPDPHLYHQMGLLLKHMQDVRVLLGHLLMELRELSGHRKPGTTKATAE

SEQ ID NO: 71763 - protein, 152 aa, Artificial Sequence
  derived and/or modified sequence
MLLAASFETLQCEGPVCTEESSCHTEDDLTDAREAGFQVKAYTFSEPFHLIVSYGASSSAAPPTLNPAPQKSAAPGTAPEEAPGPLPPPPTPSSEDPGFSSPLGMPDPHLYHQMGLLLKHMQDVRVLLGHLLMELRELSGHRKPGTTKATAE

SEQ ID NO: 71764 - DNA, 579 bp, Artificial Sequence
  derived and/or modified sequence
atgcttaaaaagatctctgtgggtgtggcaggtgatctgaataccgtcacaatgaagctcggttgtgtcctgatggcctgggccctgtacctcagtttgggagtgctgtgggtcgcgcaaatgctgctggcggcttctttcgagacccttcaatgcgagggccctgtctgcacagaagaatccagttgtcatacagaggatgacttaaccgacgccagggaagccggttttcaagtcaaggcctatacattcagcgagccctttcaccttatagtttcttacggcgcttcttccagcgcagccccaccaacgctgaacccagccccacagaaatcggcagcccctggcactgcccctgaggaagctcctgggccactgcctcccccacccaccccttcctccgaggaccctgggttttcctcgcctctcgggatgccagacccgcacctgtaccaccaaatgggactgctgctgaaacatatgcaggacgtacgcgtcctcctgggccatctgctgatggaactccgcgagctgagtggacatagaaaaccgggtactactaaggccacggctgagtag

SEQ ID NO: 71765 - DNA, 459 bp, Artificial Sequence
  derived and/or modified sequence
atgctgctggctgcctcctttgagaccctacaatgcgaaggacccgtgtgcacagaagagtcttcttgtcacacagaagacgacctgacagacgcccgagaggctggattccaagtaaaagcttatacattctccgaacctttccatttaattgtcagctatggagctagctcttccgcagcgccacccaccctgaaccctgcaccccagaagtctgcagcacccggtacagcccctgaggaggcgcctggccctttgccgcctcccccaacaccttcatccgaggatccaggcttttcttcacctttaggaatgcccgatcctcacctgtaccatcagatgggactgctccttaagcacatgcaggacgtacgggttctgctcggccacctgttgatggagctgagagagctcagcgggcaccggaaacctggaactactaaagccaccgcagaatag

SEQ ID NO: 71766 - DNA, 579 bp, Artificial Sequence
  derived and/or modified sequence
atgttgaagaaaatatccgtaggcgttgcaggcgatctaaacaccgttacaatgaagttgggatgcgtactcatggcctgggccctttacttatcacttggcgtcctgtgggtggcccaaatgctgctggctgcttcctttgaaactctgcagtgcgaggggcccgtctgtaccgaggagagtagctgtcacacggaggacgacttaaccgatgccagggaagcaggttttcaggtgaaagcttatacgttctccgaaccattccacctgatcgtctcctatggcgcctccagttccgcagccccaccgaccctgaatccggcaccccaaaagtccgccgctcccggaacagcgcccgaggaagccccaggccccctgcctccacctcctactccctcctccgaggacccaggcttttcatcccccctcggcatgccagacccacatttataccaccagatgggtctactgctcaagcatatgcaggatgttcgggtgttactaggacatctcctgatggaactcagagaactgtctggccacagaaaacccggcactactaaggccactgctgagtag

SEQ ID NO: 71767 - DNA, 459 bp, Artificial Sequence
  derived and/or modified sequence
atgttactggctgcatcctttgaaaccctgcaatgcgaggggcccgtgtgcaccgaggaatcatcatgtcataccgaagacgacctaacagatgcacgtgaggctggtttccaagtgaaggcatacaccttctccgaaccctttcacctgattgtgagctatggcgccagctcatcagcagcccctcctacgctcaatcctgctccccaaaaatcagccgcacccgggacagctccagaagaggctccagggccgctcccgcccccaccgaccccaagtagcgaggacccaggcttttcttcgcctctcgggatgcctgatccccatctttatcatcagatgggcctgctgctcaagcacatgcaagatgtgagagtgctattgggccatttactcatggagttacgagaactctccggacaccggaagcctggaaccacaaaggcgaccgctgaatag

SEQ ID NO: 71768 - DNA, 579 bp, Artificial Sequence
  derived and/or modified sequence
atgctaaaaaaaatcagtgtcggagttgctggagacctcaacaccgttacaatgaagctagggtgtgtattgatggcatgggccctgtacctgtctttaggcgtattgtgggtcgctcagatgcttctcgccgccagtttcgaaacccttcaatgtgagggtcccgtgtgcaccgaagagtcttcttgccatacagaggatgaccttacggacgccagagaggctggctttcaggttaaagcgtatacttttagcgaaccttttcatctcatagtttcttacggagcaagtagtagtgcagcacctccaactctcaaccccgcgcctcaaaaatctgcggcccccggaaccgccccagaagaagctccgggccccctaccaccccctcccactccatctagtgaagatcccgggttttcatctccactcggcatgcccgatcctcacctgtatcaccagatgggcttactgctgaagcacatgcaagatgtcagagtcctgcttggacacctgctgatggagttaagagaattatcgggacatcggaaacctggtaccacaaaggcgacagccgaatag

SEQ ID NO: 71769 - DNA, 459 bp, Artificial Sequence
  derived and/or modified sequence
atgctgcttgccgctagcttcgaaacactgcaatgcgagggtccagtctgcaccgaagagtcctcatgtcacaccgaagacgacttgaccgacgcaagagaggcaggctttcaggttaaagcgtacaccttctccgagccttttcatcttatcgtatcctacggagccagcagtagtgcagcacctccaactctcaatcccgctccccagaagagcgcagcaccaggcaccgcccccgaagaagccccaggaccccttccgccccctccaactccaagttccgaagatccaggattttcctcaccactgggcatgccagatcctcacttataccaccagatggggctgctgctgaaacacatgcaagacgttagggtgcttctaggacatctgctcatggagttgagagagcttagtggccacagaaaaccaggcactactaaggccacggcagaatag

SEQ ID NO: 71770 - DNA, 579 bp, Artificial Sequence
  derived and/or modified sequence
atgctgaagaagatcagcgtgggcgtggccggcgacctgaacaccgtgaccatgaagctgggctgcgtgctgatggcctgggccctgtacctgagcctgggcgtgctgtgggtggcccagatgctgctggccgccagcttcgagaccctgcagtgcgagggccccgtgtgcaccgaggagagcagctgccacaccgaggacgacctgaccgacgccagagaggccggcttccaggtgaaggcctacaccttcagcgagcccttccacctgatcgtgagctacggcgccagcagcagcgccgccccccccaccctgaaccccgccccccagaagagcgccgcccccggcaccgcccccgaggaggcccccggccccctgccccccccccccacccccagcagcgaggaccccggcttcagcagccccctgggcatgcccgacccccacctgtaccaccagatgggcctgctgctgaagcacatgcaggacgtgagagtgctgctgggccacctgctgatggagctgagagagctgagcggccacagaaagcccggcaccaccaaggccaccgccgagtag

SEQ ID NO: 71771 - DNA, 459 bp, Artificial Sequence
  derived and/or modified sequence
atgctgctggccgccagcttcgagaccctgcagtgcgagggccccgtgtgcaccgaggagagcagctgccacaccgaggacgacctgaccgacgccagagaggccggcttccaggtgaaggcctacaccttcagcgagcccttccacctgatcgtgagctacggcgccagcagcagcgccgccccccccaccctgaaccccgccccccagaagagcgccgcccccggcaccgcccccgaggaggcccccggccccctgccccccccccccacccccagcagcgaggaccccggcttcagcagccccctgggcatgcccgacccccacctgtaccaccagatgggcctgctgctgaagcacatgcaggacgtgagagtgctgctgggccacctgctgatggagctgagagagctgagcggccacagaaagcccggcaccaccaaggccaccgccgagtag

SEQ ID NO: 71772 - DNA, 579 bp, Artificial Sequence
  derived and/or modified sequence
atgttgaaaaagattagtgtgggagttgcaggggaccttaacaccgtgaccatgaaactcggctgtgtgctaatggcctgggcactatacctctccttgggggttctttgggttgcccaaatgctcttggcggccagctttgagactctccagtgtgagggccccgtgtgcacggaggagtcttcttgtcatacagaagacgatttaacggatgctcgagaggccggatttcaggtcaaagcttacaccttctctgagccgttccacctgatagtttcatacggggcaagctcttccgccgctccccctaccctgaatcctgcaccgcagaagagcgcagctcccggaacagcacccgaggaggctcctgggcccctaccgcccccccccacaccctccagcgaagatcctggcttcagcagccccttgggtatgcccgacccccacctttatcatcagatgggtcttctactgaagcacatgcaagatgtgagagttttattaggtcacttgttgatggagctgagggaattgtcaggccaccgtaaacctgggacgacaaaggcaactgccgagtag

SEQ ID NO: 71773 - DNA, 459 bp, Artificial Sequence
  derived and/or modified sequence
atgctgctggctgcctccttcgaaactttgcagtgcgaaggccccgtgtgtacagaggagtcttcctgtcacaccgaggacgacctgaccgacgcccgggaggcagggttccaggtaaaggcttacacgttttccgaaccgttccacttgatcgtgtcttacggagcatccagctccgctgcgccccctacattgaaccctgcccctcagaagtcagcagccccaggcacagcaccagaagaagcacccggccctctgcctccacctcccactccgtcaagcgaggatccaggattcagttctccactcggaatgcctgatccacatctgtatcaccaaatggggctgctcttgaagcatatgcaggacgtaagggtgcttctcggccatctcctgatggaactgcgcgaactgagtggccaccggaagccaggcaccacgaaagctactgccgaatag

SEQ ID NO: 71774 - DNA, 1792 bp, Artificial Sequence
  derived and/or modified sequence
ggccagctggctatcagacaatgacatgctttgacaggcccctgagctctgtgagtaaattcttgaacagctgagagtgctaccattttgtcatagccctaagggtgcagatgatgctgaaagcgtgttggccaaatctgaatgatgaaagccaattacaaactagaaaatgaaaacagaccccagatgcaaggagatgagacagttaaatttacttcctcttttctaatctgagaggtttcatgttgaagaaaatcagtgttggggttgcaggagacctaaacacagtcaccatgaagctgggctgtgtcctcatggcctgggccctctacctttcccttggtgtgctctgggtggcccagatgctactggctgccagttttgagacgctgcagtgtgagggacctgtctgcactgaggagagcagctgccacacggaggatgacttgactgatgcaagggaagctggcttccaggtcaaggcctacactttcagtgaacccttccacctgattgtgtcctatggtgcttccagctctgctgcacctcccacattgaatccagctcctcagaaatcagctgctccaggaactgctcctgaggaggcccctgggcctctgcctccgccgccaaccccatcttctgaggatccaggcttttcttctcctctggggatgccagatcctcatctgtatcaccagatgggccttcttctcaaacacatgcaggatgtgagagtcctcctcggtcacctgctcatggagttgagggaattatctggccaccggaagcctgggaccacaaaggctactgctgaatagaagtaaacagttcatccatgatctcacttaaccaccccaataaatctgattctttattttctcttcctgtcctgcacatatgcataagtacttttacaagttgtcccagtgttttgttagaataatgtagttaggtgagtgtaaataaatttatataaagtgagaattagagtttagctataattgtgtattctctcttaacacaacagaattctgctgtctagatcaggaatttctatctgttatatcgaccagaatgttgtgatttaaagagaactaatggaagtggattgaatacagcagtctcaactgggggcaattttgccccccagaggacattgggcaatgtttggagacattttggtcattatacttggggggttgggggatggtgggatgtgtgtgctactggcatccagtaaatagaagccaggggtgccgctaaacatcctataatgcacagggcagtaccccacaacgaaaaataatctggcccaaaatgtcagttgtactgagtttgagaaaccccagcctaatgaaaccctaggtgttgggctctggaatgggactttgtcccttctaattattatctctttccagcctcattcagctattcttactgacataccagtctttagctggtgctatggtctgttctttagttctagtttgtatcccctcaaaagccattatgttgaaatcctaatccccaaggtgatggcattaagaagtgggcctttgggaagtgattagatcaggagtgcagagccctcatgattaggattagtgcccttatttaaaaaggccccagagagctaactcacccttccaccatatgaggacgtggcaagaagatgacatgtatgagaaccaaaaaacagctgtcgccaaacaccgactctgtcgttgccttgatcttgaacttccagcctccagaactatgagaaataaaattctgttgtttgtaagct

SEQ ID NO: 71775 - DNA, 823 bp, Artificial Sequence
  derived and/or modified sequence
gccctctacctttcccttggtgtgctctgggtggcccagatgctactggctgccagttttgagacgctgcagtgtgagggacctgtctgcactgaggagagcagctgccacacggaggatgacttgactgatgcaagggaagctggcttccaggtcaaggcctacactttcagtgaacccttccacctgattgtgtcctatggtgcttccagctctgctgcacctcccacattgaatccagctcctcagaaatcagctgctccaggaactgctcctgaggaggcccctgggcctctgcctccgccgccaaccccatcttctgaggatccaggcttttcttctcctctggggatgccagatcctcatctgtatcaccagatgggccttcttctcaaacacatgcaggatgtgagagtcctcctcggtcacctgctcatggagttgagggaattatctggccaccggaagcctgggaccacaaaggctactgctgaatagaagtaaacagttcatccatgatctcacttaaccaccccaataaatctgattctttattttctcttcctgtcctgcacatatgcataagtacttttacaagttgtcccagtgttttgttagaataatgtagttaggtgagtgtaaataaatttatataaagtgagaattagagtttagctataattgtgtattctctcttaacacaacagaattctgctgtctagatcaggaatttctatctgttatatcgaccagaatgttgtgatttaaagagaactaatggaagtggattgaatacagcagtctcaactgggggcaattttgc

SEQ ID NO: 71776 - DNA, 579 bp, Artificial Sequence
  derived and/or modified sequence
atgctgaagaagatctctgtgggcgtggccggggacctgaacacagtgaccatgaagctgggctgtgtgctgatggcctgggccctgtacctgagcctgggcgtgctgtgggtggcccagatgctgctggccgccagctttgagaccctgcagtgtgagggccctgtgtgcacagaggagagcagctgccacacagaagatgacctgacagatgcccgggaggccggcttccaggtgaaggcctacaccttcagcgagcccttccacctgattgtgtcctatggagccagcagcagcgctgccccacccaccctgaacccagccccccagaagtctgctgcccctggaacagcccctgaggaggcccctggccccctgcccccaccacccacccccagcagtgaagatcctggcttcagcagccccctgggcatgccagacccccacctgtaccaccagatgggcctgctgctgaagcacatgcaggatgtgcgggtgctgctgggccacctgctgatggagctgcgggagctgagcggccacaggaagccaggcaccaccaaggccacagctgagtag

SEQ ID NO: 71777 - DNA, 459 bp, Artificial Sequence
  derived and/or modified sequence
atgctgctggccgccagctttgagaccctgcagtgtgagggccctgtgtgcacagaggagagcagctgccacacagaagatgacctgacagatgcccgggaggccggcttccaggtgaaggcctacaccttcagcgagcccttccacctgattgtgtcctatggagccagcagcagcgctgccccacccaccctgaacccagccccccagaagtctgctgcccctggaacagcccctgaggaggcccctggccccctgcccccaccacccacccccagcagtgaagatcctggcttcagcagccccctgggcatgccagacccccacctgtaccaccagatgggcctgctgctgaagcacatgcaggatgtgcgggtgctgctgggccacctgctgatggagctgcgggagctgagcggccacaggaagccaggcaccaccaaggccacagctgagtag

SEQ ID NO: 71778 - DNA, 579 bp, Artificial Sequence
  derived and/or modified sequence
atgctgaagaagatcagcgtgggcgtggccggcgacctgaacaccgtcactatgaaactgggctgcgttctaatggcctgggcattatatctctctcttggcgttctgtgggttgcacagatgttgctggctgccagctttgaaactctgcagtgtgaaggaccggtgtgtacagaagagtcgagctgccacaccgaagatgacctgaccgacgctcgcgaagccggtttccaggtcaaggcctatacttttagtgagccatttcatctcatcgtgagctacggcgctagcagctccgccgcaccacctaccttgaatcctgcccctcagaagagcgcagctccaggaaccgccccagaagaggcccctgggcccctgcccccccccccgaccccatcaagcgaagatcccggtttctcatctcctctcgggatgccagatccacatctttaccatcagatggggctcctcttaaagcatatgcaggatgtgcgtgtcttactaggacacctgctcatggaattgagggaactgtcaggtcaccgcaaacccggaacaacaaaggccacagcagaatag

SEQ ID NO: 71779 - DNA, 459 bp, Artificial Sequence
  derived and/or modified sequence
atgctgctggccgccagcttcgagaccctgcagtgcgagggccccgtgtgcacagaggagagtagttgtcacaccgaagatgacttgaccgatgcccgcgaagcagggtttcaggtgaaagcctataccttttctgagccctttcacctgattgtcagctatggcgcaagctcttccgcggccccacccacgttgaaccccgcccctcagaagtccgcagctccaggaacagccccggaggaagctcccggtcctttacctccacctcctacgcctagctccgaagaccctgggtttagttcgccattgggcatgcccgatccacatctctaccaccaaatggggttgttgctgaagcacatgcaggatgtgcgggtcctcctggggcatctcctgatggaattgagggagctttccgggcatagaaaacctggcacaaccaaagccactgccgaatag

SEQ ID NO: 71780 - RNA, 579 nt, Artificial Sequence
  derived and/or modified sequence
auguugaagaaaauauccguaggcguugcaggcgaucuaaacaccguuacaaugaaguugggaugcguacucauggccugggcccuuuacuuaucacuuggcguccuguggguggcccaaaugcugcuggcugcuuccuuugaaacucugcagugcgaggggcccgucuguaccgaggagaguagcugucacacggaggacgacuuaaccgaugccagggaagcagguuuucaggugaaagcuuauacguucuccgaaccauuccaccugaucgucuccuauggcgccuccaguuccgcagccccaccgacccugaauccggcaccccaaaaguccgccgcucccggaacagcgcccgaggaagccccaggcccccugccuccaccuccuacucccuccuccgaggacccaggcuuuucauccccccucggcaugccagacccacauuuauaccaccagaugggucuacugcucaagcauaugcaggauguucggguguuacuaggacaucuccugauggaacucagagaacugucuggccacagaaaacccggcacuacuaaggccacugcugaguag

SEQ ID NO: 71781 - RNA, 459 nt, Artificial Sequence
  derived and/or modified sequence
auguuacuggcugcauccuuugaaacccugcaaugcgaggggcccgugugcaccgaggaaucaucaugucauaccgaagacgaccuaacagaugcacgugaggcugguuuccaagugaaggcauacaccuucuccgaacccuuucaccugauugugagcuauggcgccagcucaucagcagccccuccuacgcucaauccugcuccccaaaaaucagccgcacccgggacagcuccagaagaggcuccagggccgcucccgcccccaccgaccccaaguagcgaggacccaggcuuuucuucgccucucgggaugccugauccccaucuuuaucaucagaugggccugcugcucaagcacaugcaagaugugagagugcuauugggccauuuacucauggaguuacgagaacucuccggacaccggaagccuggaaccacaaaggcgaccgcugaauag

SEQ ID NO: 71782 - RNA, 579 nt, Artificial Sequence
  derived and/or modified sequence
augcuaaaaaaaaucagugucggaguugcuggagaccucaacaccguuacaaugaagcuaggguguguauugauggcaugggcccuguaccugucuuuaggcguauugugggucgcucagaugcuucucgccgccaguuucgaaacccuucaaugugagggucccgugugcaccgaagagucuucuugccauacagaggaugaccuuacggacgccagagaggcuggcuuucagguuaaagcguauacuuuuagcgaaccuuuucaucucauaguuucuuacggagcaaguaguagugcagcaccuccaacucucaaccccgcgccucaaaaaucugcggcccccggaaccgccccagaagaagcuccgggcccccuaccacccccucccacuccaucuagugaagaucccggguuuucaucuccacucggcaugcccgauccucaccuguaucaccagaugggcuuacugcugaagcacaugcaagaugucagaguccugcuuggacaccugcugauggaguuaagagaauuaucgggacaucggaaaccugguaccacaaaggcgacagccgaauag

SEQ ID NO: 71783 - RNA, 459 nt, Artificial Sequence
  derived and/or modified sequence
augcugcuugccgcuagcuucgaaacacugcaaugcgaggguccagucugcaccgaagaguccucaugucacaccgaagacgacuugaccgacgcaagagaggcaggcuuucagguuaaagcguacaccuucuccgagccuuuucaucuuaucguauccuacggagccagcaguagugcagcaccuccaacucucaaucccgcuccccagaagagcgcagcaccaggcaccgcccccgaagaagccccaggaccccuuccgcccccuccaacuccaaguuccgaagauccaggauuuuccucaccacugggcaugccagauccucacuuauaccaccagauggggcugcugcugaaacacaugcaagacguuagggugcuucuaggacaucugcucauggaguugagagagcuuaguggccacagaaaaccaggcacuacuaaggccacggcagaauag

SEQ ID NO: 71784 - protein, 345 aa, Artificial Sequence
  derived and/or modified sequence
MAQHHLWILLLCLQTWPEAAGKDSEIFTVNGILGESVTFPVNIQEPRQVKIIAWTSKTSVAYVTPGDSETAPVVTVTHRNYYERIHALGPNYNLVISDLRMEDAGDYKADINTQADPYTTTKRYNLQIYRRLGKPKITQSLMASVNSTCNVTLTCSVEKEEKNVTYNWSPLGEEGNVLQIFQTPEDQELTYTCTAQNPVSNNSDSISARQLCADIAMGFRTHHTGLLSVLAMFFLLVLILSSVFLFRLFKRRQGRIFPEGSCLNTFTKNPYAASKKTIYTYIMASRNTQPAESRIYDEILQSKVLPSKEEPVNTVYSEVQFADKMGKASTQDSKPPGTSSYEIVI

SEQ ID NO: 71785 - protein, 280 aa, Artificial Sequence
  derived and/or modified sequence
MAQHHLWILLLCLQTWPEAAGKDSEIFTVNGILGESVTFPVNIQEPRQVKIIAWTSKTSVAYVTPGDSETAPVVTVTHRNYYERIHALGPNYNLVISDLRMEDAGDYKADINTQADPYTTTKRYNLQIYRRLGKPKITQSLMASVNSTCNVTLTCSVEKEEKNVTYNWSPLGEEGNVLQIFQTPEDQELTYTCTAQNPVSNNSDSISARQLCADIAMGFRTHHTGLLSVLAMFFLLVLILSSVFLFRLFKRRQGRIFPEGKMWKLTFSPPGTEAIYPRFS

SEQ ID NO: 71786 - DNA, 1038 bp, Artificial Sequence
  derived and/or modified sequence
atggcccagcaccacctgtggatcctgctgctgtgcctgcagacctggcccgaggccgccggcaaggacagcgagatcttcaccgtgaacggcatcctgggcgagagcgtgaccttccccgtgaacatccaggagcccagacaggtgaagatcatcgcctggaccagcaagaccagcgtggcctacgtgacccccggcgacagcgagaccgcccccgtggtgaccgtgacccacagaaactactacgagagaatccacgccctgggccccaactacaacctggtgatcagcgacctgagaatggaggacgccggcgactacaaggccgacatcaacacccaggccgacccctacaccaccaccaagagatacaacctgcagatctacagaagactgggcaagcccaagatcacccagagcctgatggccagcgtgaacagcacctgcaacgtgaccctgacctgcagcgtggagaaggaggagaagaacgtgacctacaactggagccccctgggcgaggagggcaacgtgctgcagatcttccagacccccgaggaccaggagctgacctacacctgcaccgcccagaaccccgtgagcaacaacagcgacagcatcagcgccagacagctgtgcgccgacatcgccatgggcttcagaacccaccacaccggcctgctgagcgtgctggccatgttcttcctgctggtgctgatcctgagcagcgtgttcctgttcagactgttcaagagaagacagggcagaatcttccccgagggcagctgcctgaacaccttcaccaagaacccctacgccgccagcaagaagaccatctacacctacatcatggccagcagaaacacccagcccgccgagagcagaatctacgacgagatcctgcagagcaaggtgctgcccagcaaggaggagcccgtgaacaccgtgtacagcgaggtgcagttcgccgacaagatgggcaaggccagcacccaggacagcaagccccccggcaccagcagctacgagatcgtgatctag

SEQ ID NO: 71787 - DNA, 843 bp, Artificial Sequence
  derived and/or modified sequence
atggcccagcaccacctgtggatcctgctgctgtgcctgcagacctggcccgaggccgccggcaaggacagcgagatcttcaccgtgaacggcatcctgggcgagagcgtgaccttccccgtgaacatccaggagcccagacaggtgaagatcatcgcctggaccagcaagaccagcgtggcctacgtgacccccggcgacagcgagaccgcccccgtggtgaccgtgacccacagaaactactacgagagaatccacgccctgggccccaactacaacctggtgatcagcgacctgagaatggaggacgccggcgactacaaggccgacatcaacacccaggccgacccctacaccaccaccaagagatacaacctgcagatctacagaagactgggcaagcccaagatcacccagagcctgatggccagcgtgaacagcacctgcaacgtgaccctgacctgcagcgtggagaaggaggagaagaacgtgacctacaactggagccccctgggcgaggagggcaacgtgctgcagatcttccagacccccgaggaccaggagctgacctacacctgcaccgcccagaaccccgtgagcaacaacagcgacagcatcagcgccagacagctgtgcgccgacatcgccatgggcttcagaacccaccacaccggcctgctgagcgtgctggccatgttcttcctgctggtgctgatcctgagcagcgtgttcctgttcagactgttcaagagaagacagggcagaatcttccccgagggcaagatgtggaagctgaccttcagcccccccggcaccgaggccatctaccccagattcagctag

SEQ ID NO: 71788 - DNA, 1038 bp, Artificial Sequence
  derived and/or modified sequence
atggcacagcaccacctgtggatactgctcctctgcctacagacatggcctgaagccgccggcaaggactcagaaatctttacagtgaacggcatactgggagaatccgtcacatttccggttaatatccaggagccccgtcaggttaagatcattgcctggacgtcgaagactagcgtggcttacgtcacacccggagattctgagactgccccagtagtgaccgtcacccatcgaaactactacgaaagaatccacgccctggggccgaactataacctggttatctccgatctccggatggaagatgcaggagactacaaagccgacatcaatacccaggccgatccctacacgactaccaaaagatataatcttcaaatctatcggcgcttagggaaacctaagatcactcagagcttgatggctagtgtgaacagtacttgcaacgtaaccctcacgtgctcggtggaaaaggaagagaagaacgtcacgtacaattggagccccctgggtgaggagggaaatgtgctgcaaattttccaaacaccggaggaccaggagcttacatatacctgcaccgcccagaatcccgtgagtaacaatagcgactccatttcggctaggcagctctgtgcggatattgccatggggtttcggacacaccacactggattgcttagtgtgctcgctatgtttttccttctcgtactgatcctgtcttcagtttttctctttcggctgttcaaaagaaggcagggcagaattttccccgaggggtcctgcctgaatacgttcactaagaacccatatgccgctagtaaaaagaccatctatacctatatcatggcatccagaaacacccagcccgccgagagccgcatctatgatgagattctgcaaagcaaggtgttgccctcgaaagaagagcctgttaacacagtgtatagcgaggtccaattcgccgataaaatgggaaaggcgtctacccaggacagcaaacctcccggcacatctagttacgagatcgtaatttag

SEQ ID NO: 71789 - DNA, 843 bp, Artificial Sequence
  derived and/or modified sequence
atggcccagcaccacctatggatcctgctgctgtgtctccagacatggccagaggccgctggaaaagactccgagatctttacagtgaatggtatcttgggagaatctgtgacttttcccgtaaacatccaggaacctcgccaggttaaaataatcgcgtggacgagcaagacctctgtcgcttatgtgacaccgggggatagcgaaacagcacccgttgtaaccgtgacccacagaaactattatgagcgcatacatgcccttggccccaattacaacctggtaattagtgatctccggatggaggacgccggcgattataaggccgatattaacacccaggcggacccttacactacaaccaaaaggtacaatctgcagatttacagaagactcggaaagccaaagatcacgcagagcctgatggcgagtgtaaattccacttgcaacgtcacccttacttgctcagtggagaaagaggaaaagaatgtgacttacaactggagcccccttggtgaggagggaaacgtgttgcaaatctttcaaacacctgaagaccaggaacttacctacacttgcaccgctcagaatcccgtgagtaacaattccgactctatttctgcaaggcagctgtgtgctgacattgccatgggctttcgaacccatcacacaggactgctcagtgtgctggctatgttcttcttgctcgttctcatcctgagttctgtgttcctcttccggctgttcaagagacggcaggggagaatattccccgaagggaagatgtggaaactgacgttcagtcctcctggaactgaggccatctaccccagattttcatag

SEQ ID NO: 71790 - DNA, 1038 bp, Artificial Sequence
  derived and/or modified sequence
atggcccagcaccacctgtggatcctgctgctgtgcctgcagacctggccagaggccgccggcaaggacagcgagatcttcaccgtgaatggcatcctgggggagagcgtgaccttccctgtgaacatccaggagccccggcaggtgaagatcatcgcctggaccagcaagacctctgtggcctacgtgacccctggggacagcgagacagcccctgtggtgacagtgacccacaggaactactatgaaagaatccacgccctgggccccaactacaacctggtgatcagtgacctgaggatggaggatgctggggactacaaggctgacatcaacacccaggccgacccctacaccaccaccaagcgctacaacctgcagatctaccgccgcctgggcaagcccaagatcacccagagcctgatggcctctgtgaacagcacctgcaatgtgaccctgacctgcagcgtggagaaggaggagaagaatgtgacctacaactggagccccctgggggaggagggcaatgtgctgcagatcttccagaccccagaggaccaggagctgacctacacctgcacagcccagaaccctgtgagcaacaacagcgacagcatcagcgcccggcagctgtgtgccgacatcgccatgggcttccgcacccaccacacaggcctgctgtctgtgctggccatgttcttcctgctggtgctgatcctgagcagcgtcttcctgttccgcctcttcaagaggcggcagggccgcatcttccctgagggcagctgcctgaacaccttcaccaagaacccctatgctgccagcaagaagaccatctacacctacatcatggccagcaggaacacccagcctgctgagagccgcatctatgatgagatcctgcagagcaaggtgctgcccagcaaggaggagcctgtgaacacagtgtacagcgaggtgcagtttgctgacaagatgggcaaggccagcacccaggacagcaagcccccaggcaccagcagctatgaaattgtcatctag

SEQ ID NO: 71791 - DNA, 843 bp, Artificial Sequence
  derived and/or modified sequence
atggcccagcaccacctgtggatcctgctgctgtgcctgcagacctggccagaggccgccggcaaggacagcgagatcttcaccgtgaatggcatcctgggggagagcgtgaccttccctgtgaacatccaggagccccggcaggtgaagatcatcgcctggaccagcaagacctctgtggcctacgtgacccctggggacagcgagacagcccctgtggtgacagtgacccacaggaactactatgaaagaatccacgccctgggccccaactacaacctggtgatcagtgacctgaggatggaggatgctggggactacaaggctgacatcaacacccaggccgacccctacaccaccaccaagcgctacaacctgcagatctaccgccgcctgggcaagcccaagatcacccagagcctgatggcctctgtgaacagcacctgcaatgtgaccctgacctgcagcgtggagaaggaggagaagaatgtgacctacaactggagccccctgggggaggagggcaatgtgctgcagatcttccagaccccagaggaccaggagctgacctacacctgcacagcccagaaccctgtgagcaacaacagcgacagcatcagcgcccggcagctgtgtgccgacatcgccatgggcttccgcacccaccacacaggcctgctgtctgtgctggccatgttcttcctgctggtgctgatcctgagcagcgtcttcctgttccgcctcttcaagaggcggcagggccgcatcttccctgagggcaagatgtggaagctgaccttcagccccccaggcacagaggccatctacccccgcttctcctag

SEQ ID NO: 71792 - DNA, 1038 bp, Artificial Sequence
  derived and/or modified sequence
atggcccagcaccacctgtggatcctgctgctgtgcctgcagacctggccagaggcggctggtaaggatagtgaaatcttcaccgtgaacggaatcctgggggaatcagtgacctttcccgtgaacatacaggaacccaggcaggtgaagattattgcctggacaagcaaaacttcggtggcctatgttactcctggggactctgaaacagctccggtggtcactgtcacacaccggaattactacgagagaatacacgccctcggaccaaactataatttagtcatttctgacctccgcatggaggacgcgggggactacaaagcagatatcaacacccaggccgacccttacaccaccacgaaaaggtataacttgcagatttaccgaagactggggaagcctaagattacccagagcctgatggcctccgtgaactccacttgtaacgtcaccctcacttgctcagtagaaaaagaggagaagaatgtgacgtacaactggagcccgctgggcgaggaaggcaacgtgctgcagatctttcagacccctgaggatcaggagctgacttatacctgcaccgcccagaatccagtcagcaacaacagtgactcaatttccgctcgacagctgtgcgcagacatcgctatgggtttccgaacacatcatacagggctgctaagcgtgctggccatgttctttctccttgtcctgattctgtccagcgtcttcctctttcgcttattcaaacgtcgtcagggccgcatattccccgagggttcctgtctgaatacgtttactaagaacccttatgctgcctccaagaagaccatttacacctatatcatggcctcgcgcaacacccagccagctgagtctagaatttatgacgagatcttacaatccaaggtgctgcccagcaaagaagagccagtaaacacagtgtacagtgaagtccagttcgccgacaaaatgggtaaagcatcaacacaggactctaagcctccaggcacatccagctatgaaattgtgatctag

SEQ ID NO: 71793 - DNA, 843 bp, Artificial Sequence
  derived and/or modified sequence
atggcccagcaccacctgtggatcctgctgctgtgcctgcagacctggcctgaggctgcaggcaaggattctgaaatcttcaccgtgaatggcatcctcggggaaagtgtgacgttcccggtgaatattcaggaaccacggcaggttaagattatagcctggacaagcaaaaccagtgtcgcctacgtgaccccaggtgattcagagacagcaccagtggtgactgtgactcacagaaattactatgagcgaatacacgcactgggacccaattataatctcgtgatttccgatcttcgcatggaggatgccggtgactataaggcagatatcaatacgcaggccgacccatatacaaccacgaagaggtataacctgcagatctataggcggctcgggaaaccaaaaatcactcagtccctgatggcttcagttaacagcacatgcaatgtaacccttacctgcagcgttgagaaggaagaaaagaacgtcacatataattggagtccgctaggggaggagggcaatgtcctgcagatttttcagaccccagaagaccaggagctgacgtatacgtgcacagcacaaaaccctgtctccaacaattcggactccatttccgcacggcagctgtgtgcagacatcgcaatggggtttcggactcaccacactggtctcctctctgtcctagcgatgttcttcttactggtactgatcctgtcgtctgtgtttttatttcgcttgttcaagagacgacagggtcggatattccctgaaggcaaaatgtggaagctgacgttctcacctcctggcacggaagccatttaccctcgctttagctag

SEQ ID NO: 71794 - DNA, 1038 bp, Artificial Sequence
  derived and/or modified sequence
atggcccagcatcacctttggattctgctgctgtgcctgcaaacctggcccgaagcggcaggtaaggatagcgagatattcaccgtgaatggaatactgggagagtcagtgacattcccagtcaatatccaggagccccgacaagtgaaaatcattgcatggactagcaagactagcgtggcctacgtcacaccaggagattccgaaaccgcacccgttgttactgttacacatcgtaattattacgagcgaattcacgctttaggccctaactacaacctcgtaattagcgatctgagaatggaggacgcgggtgattacaaggctgatataaacacacaagcagacccatacacaactacaaaaaggtacaacctgcagatatataggagactgggaaagccaaaaattacgcagtccctgatggcctctgtcaatagcacttgcaacgtcacactgacctgcagcgtggaaaaggaagagaagaatgtgacttataattggtccccacttggcgaggagggtaatgtcctccagatttttcagacacccgaggatcaggaactcacctacacatgtactgcacagaacccagtttctaacaactccgactctatcagcgcaagacagttgtgcgccgatatcgcgatgggattcagaacacatcataccgggctgctgtccgtcttggccatgttcttcttgctcgtgctgattctcagttctgtttttctctttcgccttttcaagaggagacaaggtcgcattttccccgagggcagctgtctgaacaccttcaccaagaacccctatgcagcttccaaaaagaccatctacacttatatcatggctagccggaatacacaaccggctgagtcccggatctatgacgaaatcttgcagtcgaaagtgcttccatcaaaggaagagcccgtgaacacggtttacagtgaagtgcaattcgcagacaagatgggcaaagcctcaactcaggacagcaagccacccggtacgtcaagttatgaaatcgtgatttag

SEQ ID NO: 71795 - DNA, 843 bp, Artificial Sequence
  derived and/or modified sequence
atggctcaacaccacctgtggatcttgttgctatgcctgcagacttggcccgaggcggcagggaaggacagtgaaatctttacggtaaatggtattttgggggaaagcgtgacctttccagtaaacattcaagaaccaagacaggtaaaaatcattgcttggaccagcaagacgagtgtagcatacgtaacacccggagacagcgagactgccccagtggttaccgtgacacataggaattattacgagaggatccatgcgttgggcccaaactataatctcgtgatctctgacctacggatggaagacgctggagactataaagccgacattaacacccaggctgacccctacaccaccaccaagcgctacaacctacagatctatcgaagacttgggaaaccaaaaattacacaatccctgatggccagcgttaactcgacctgtaatgttacactgacctgttctgttgagaaggaagagaagaacgtcacctacaactggtctcccctgggcgaggaagggaacgtcctacagatttttcagacgcctgaggaccaggaactgacgtacacttgcacggctcagaatcctgtcagcaataactccgatagcatctccgcgagacagctgtgcgcagatatcgccatgggatttcgcacccaccacactgggttgcttagcgtgctggccatgttctttctcctggtccttatcctgtcttccgtgtttcttttccgcctgtttaaacggagacaaggccgaatcttcccagagggaaagatgtggaagctcacattctctccgcctggcaccgaggcaatatatccacggttcagctag

SEQ ID NO: 71796 - DNA, 1116 bp, Artificial Sequence
  derived and/or modified sequence
ctcaagtgaaactgactctgctagaacagtgccgtgcttttccacagaaggttagaccctgaaagagatggctcagcaccacctatggatcttgctcctttgcctgcaaacctggccggaagcagctggaaaagactcagaaatcttcacagtgaatgggattctgggagagtcagtcactttccctgtaaatatccaagaaccacggcaagttaaaatcattgcttggacttctaaaacatctgttgcttatgtaacaccaggagactcagaaacagcacccgtagttactgtgacccacagaaattattatgaacggatacatgccttaggtccgaactacaatctggtcattagcgatctgaggatggaagacgcaggagactacaaagcagacataaatacacaggctgatccctacaccaccaccaagcgctacaacctgcaaatctatcgtcggcttgggaaaccaaaaattacacagagtttaatggcatctgtgaacagcacctgtaatgtcacactgacatgctctgtagagaaagaagaaaagaatgtgacatacaattggagtcccctgggagaagagggtaatgtccttcaaatcttccagactcctgaggaccaagagctgacttacacgtgtacagcccagaaccctgtcagcaacaattctgactccatctctgcccggcagctctgtgcagacatcgcaatgggcttccgtactcaccacaccgggttgctgagcgtgctggctatgttctttctgcttgttctcattctgtcttcagtgtttttgttccgtttgttcaagagaagacaaggtaggattttcccagaaggttcctgcttgaacaccttcactaagaacccttatgctgcctcaaagaaaaccatatacacatatatcatggcttcaaggaacacccagccagcagagtccagaatctatgatgaaatcctgcagtccaaggtgcttccctccaaggaagagccagtgaacacagtttattccgaagtgcagtttgctgataagatggggaaagccagcacacaggacagtaaacctcctgggacttcaagctatgaaattgtgatctaggctgctgggct

SEQ ID NO: 71797 - DNA, 1298 bp, Artificial Sequence
  derived and/or modified sequence
ctcaagtgaaactgactctgctagaacagtgccgtgcttttccacagaaggttagaccctgaaagagatggctcagcaccacctatggatcttgctcctttgcctgcaaacctggccggaagcagctggaaaagactcagaaatcttcacagtgaatgggattctgggagagtcagtcactttccctgtaaatatccaagaaccacggcaagttaaaatcattgcttggacttctaaaacatctgttgcttatgtaacaccaggagactcagaaacagcacccgtagttactgtgacccacagaaattattatgaacggatacatgccttaggtccgaactacaatctggtcattagcgatctgaggatggaagacgcaggagactacaaagcagacataaatacacaggctgatccctacaccaccaccaagcgctacaacctgcaaatctatcgtcggcttgggaaaccaaaaattacacagagtttaatggcatctgtgaacagcacctgtaatgtcacactgacatgctctgtagagaaagaagaaaagaatgtgacatacaattggagtcccctgggagaagagggtaatgtccttcaaatcttccagactcctgaggaccaagagctgacttacacgtgtacagcccagaaccctgtcagcaacaattctgactccatctctgcccggcagctctgtgcagacatcgcaatgggcttccgtactcaccacaccgggttgctgagcgtgctggctatgttctttctgcttgttctcattctgtcttcagtgtttttgttccgtttgttcaagagaagacaaggtaggattttcccagaaggtaaaatgtggaaactcaccttctctcctcctgggactgaagccatttatccaaggtttagctgaaaggcccattgttccagggaatctgcctttttccgatctccaccccaccacctcccagaatgatggctctgaggatggtatgacattaccctgaatggtcttcagaatccattcctgagatcaccagtagctggtgggcccagaacatgggttcgagcttagtacatacatgaacaagctgtgcttcactgtacgagtgtgttcacctttccagctcagggccctcacatgtgaaatgtttggactagaggatctccagggtcacttccaatttcattgtattttgattatgactattggagagtcattgagaaacatatactaatcctgtactccatggttgtcactatgtccctctgaatccctctggatcattctgtagttgtgc

SEQ ID NO: 71798 - protein, 1148 aa, Artificial Sequence
  derived and/or modified sequence
MESLLLPVLLLLAILWTQAAALINLKYSVEEEQRAGTVIANVAKDAREAGFALDPRQASAFRVVSNSAPHLVDINPSSGLLVTKQKIDRDLLCRQSPKCIISLEVMSSSMEICVIKVEIKDLNDNAPSFPAAQIELEISEAASPGTRIPLDSAYDPDSGSFGVQTYELTPNELFGLEIKTRGDGSRFAELVVEKSLDRETQSHYSFRITALDGGDPPRLGTVGLSIKVTDSNDNNPVFSESTYAVSVPENSPPNTPVIRLNASDPDEGTNGQVVYSFYGYVNDRTRELFQIDPHSGLVTVTGALDYEEGHVYELDVQAKDLGPNSIPAHCKVTVSVLDTNDNPPVINLLSVNSELVEVSESAPPGYVIALVRVSDRDSGLNGRVQCRLLGNVPFRLQEYESFSTILVDGRLDREQHDQYNLTIQARDGGVPMLQSAKSFTVLITDENDNHPHFSKPYYQVIVQENNTPGAYLLSVSARDPDLGLNGSVSYQIVPSQVRDMPVFTYVSINPNSGDIYALRSFNHEQTKAFEFKVLAKDGGLPSLQSNATVRVIILDVNDNTPVITAPPLINGTAEVYIPRNSGIGYLVTVVKAEDYDEGENGRVTYDMTEGDRGFFEIDQVNGEVRTTRTFGESSKSSYELIVVAHDHGKTSLSASALVLIYLSPALDAQESMGSVNLSLIFIIALGSIAGILFVTMIFVAIKCKRDNKEIRTYNCSNCLTITCLLGCFIKGQNSKCLHCISVSPISEEQDKKTEEKVSLRGKRIAEYSYGHQKKSSKKKKISKNDIRLVPRDVEETDKMNVVSCSSLTSSLNYFDYHQQTLPLGCRRSESTFLNVENQNTRNTSANHIYHHSFNSQGPQQPDLIINGVPLPETENYSFDSNYVNSRAHLIKSSSTFKDLEGNSLKDSGHEESDQTDSEHDVQRSLYCDTAVNDVLNTSVTSMGSQMPDHDQNEGFHCREECRILGHSDRCWMPRNPMPIRSKSPEHVRNIIALSIEATAADVEAYDDCGPTKRTFATFGKDVSDHPAEERPTLKGKRTVDVTICSPKVNSVIREAGNGCEAISPVTSPLHLKSSLPTKPSVSYTIALAPPARDLEQYVNNVNNGPTRPSEAEPRGADSEKVMHEVSPILKEGRNKESPGVKRLKDIVL

SEQ ID NO: 71799 - DNA, 3447 bp, Artificial Sequence
  derived and/or modified sequence
atggaatccctgttgctacctgtgttattgcttctagctatcctgtggacacaggctgctgccctgatcaatctgaagtatagtgtggaggaggagcaacgcgccgggaccgtgatcgccaatgttgccaaggatgcacgcgaggccggctttgccttggatccaaggcaggcctcagcatttagggtagtgtcaaattccgctcctcacttggttgacataaacccttcttcagggcttctggtaaccaaacagaaaattgacagggacctgctgtgtcgtcagagcccaaaatgcatcattagcttagaggtgatgtcatcatccatggaaatctgcgtgattaaagtggagattaaggacctgaacgataacgccccctcttttcccgcagcccagatagagcttgagatcagtgaagcggcctctcctggtactaggataccgttggactccgcctatgaccccgatagcggaagtttcggagtacagacgtacgaattgacacccaacgaattgtttggactcgagataaagaccagaggcgatggaagtcgctttgcagagttggtggtcgaaaagagcctcgatcgcgagacccagagccattactcatttcgtattacagccttagatggaggcgatcctcccagactgggcacagttggtctcagcataaaagttacagattctaacgacaataatccagtgtttagcgagtccacatacgcagtgtcggtaccagaaaattctccgcctaacacgccagtgatccgtctgaacgcttccgatccagatgaggggactaacgggcaggtggtttactccttctatggatacgtaaacgaccggacacgcgagctgtttcagattgaccctcactccgggctcgtgacagtcaccggggccttggattacgaggaggggcatgtctacgaactcgatgtccaagctaaagacctggggcctaattcaattcccgctcattgcaaggtcactgtatccgtgctggacaccaatgataatcctcccgtgattaacctcctctcagtcaactccgagctcgtggaagtgtctgaaagtgccccacccgggtacgtcatagctctggtcagagtcagtgaccgagactcaggtttaaatggaagagtgcagtgcagactcctcggaaacgtcccttttaggttgcaagagtatgaatcattctctaccatcctagtggacggccgcctagatagagagcagcatgaccaatacaacctcacaatccaagccagggacggcggggtgccaatgctccagtctgccaagtcattcaccgtgttgattacagacgaaaatgataaccacccccacttttcaaagccctattaccaagttatcgtgcaggagaataatacgccgggcgcctatcttttgtcagtgtcagcaagggaccccgacctcggcctgaacggttcagtcagttatcagatcgtccccagccaagtccgagatatgcccgttttcacttacgtatctattaaccccaacagcggcgacatttacgctctacgctcctttaaccatgagcagactaaagccttcgagtttaaagttttggctaaagatggggggcttccatcgttgcaatcaaacgccactgttcgggtcatcattctggacgtgaacgataacacacctgtgattacggcccccccccttatcaatggcacggctgaggtatatatcccacgcaactcaggcataggatacctggtcacggtggtgaaagctgaggattacgatgaaggagagaatggacgtgtgacctacgacatgacagagggcgaccgtgggttcttcgagattgaccaagtcaatggggaggtcagaacgaccaggaccttcggggagtccagcaaaagctcttatgaactgatcgtagtggctcatgaccacgggaagacctctctcagcgccagtgccctggttctgatctacttatcgcctgctctggacgcacaagaaagcatgggctccgttaatctcagcttgattttcatcattgcactaggcagtatagccggtatcctgtttgtcactatgatcttcgtggccataaaatgtaaacgagacaacaaagagataagaacctacaactgttctaactgcttaacaattacctgtctgctcggttgtttcataaaagggcagaactccaagtgtctacactgcatttctgtatccccaattagcgaagaacaagacaagaaaacagaggaaaaagtgtcactccggggtaaaagaatcgcagagtattcctatggccaccaaaagaagtcatcgaaaaagaagaagatatcaaaaaacgacattcgactggtgccccgggacgtggaggagacagacaaaatgaatgttgtgtcttgttccagcttaacatcctcattaaactacttcgattaccatcaacagaccctgcccctcggctgccggcgtagcgagagcacgtttcttaacgtggaaaaccagaacacacgcaatactagtgccaaccatatttaccatcattcattcaactcccagggaccacagcagcccgatctgataattaacggtgtccctctccccgagactgagaactattcctttgatagcaattacgtgaatagccgggcccatctcattaaatcttctagtacattcaaggatcttgagggaaatagcctgaaggattctggacatgaggaatccgaccagactgatagtgagcatgacgtccagcgctccctgtactgcgatactgctgtcaatgatgtcctcaatacctctgtgactagcatgggatcacaaatgcctgatcacgaccagaacgaaggatttcactgcagggaagagtgccggattctgggacatagcgacaggtgttggatgccccggaacccaatgccaatccggtccaagagccctgagcatgttaggaatatcattgcactgtccatcgaagcgaccgccgcagatgttgaagcgtacgatgactgcgggcccaccaagcggacgtttgcaacattcggaaaggacgtctccgaccaccccgcagaggaaaggcctacgctgaaggggaagaggacagtcgacgtgactatctgcagccccaaagtgaattccgtgatccgggaggccggcaatggatgtgaagcaatatctcccgttacctccccacttcatctgaagagcagtcttcctacgaagccaagtgtctcgtacactatcgccttggccccccccgctcgagaccttgaacaatatgtgaataatgtaaacaacgggccaacccgcccttccgaagctgaaccgaggggcgcagatagcgaaaaggttatgcatgaagtcagtcctattttgaaggagggaaggaacaaagagagtccaggcgtgaaaagactgaaggatatcgtcctttag

SEQ ID NO: 71800 - DNA, 3447 bp, Artificial Sequence
  derived and/or modified sequence
atggagagcctgctgctgcctgtgctgctgctgctggccatcctgtggacccaggccgccgccctgatcaacctgaagtacagcgtggaggaggagcagagagctggcaccgtgattgccaacgtggccaaggatgcccgggaggccggctttgccctggacccccggcaggccagcgccttccgggtggtgagcaacagcgccccccacctggtggacatcaaccccagcagcggcctgctggtgaccaagcagaagattgaccgggacctgctgtgccggcagagccccaagtgcatcatcagcctggaggtgatgagcagctccatggagatctgtgtgatcaaggtggagatcaaggacctgaatgacaatgcccccagcttccctgctgcccagatcgagctggagatcagcgaggccgccagccctggcacccgcatccccctggacagcgcctatgaccctgacagcggcagctttggagtgcagacctatgagctgaccccaaatgagctgtttggcctggagatcaagaccagaggagatggcagcagatttgctgagctggtggtggagaagagcctggaccgggagacccagagccactacagcttccgcatcacagccctggatggaggagaccccccccggctgggcaccgtgggcctgagcatcaaggtgacagacagcaatgacaacaaccctgtgttttctgagagcacctatgctgtgtctgtgcctgagaacagcccccccaacacccctgtgatccggctgaatgccagtgaccctgatgagggcaccaacggccaggtggtgtacagcttctacggctacgtgaatgacaggacccgggagctgttccagattgacccccacagcggcctggtgacagtgactggagccctggactatgaggagggccacgtgtatgagctggatgtgcaggccaaggacctgggccccaacagcatcccagcccactgcaaggtgacagtgtctgtgctggacaccaatgacaacccccctgtgatcaacctgctgtctgtgaacagcgagctggtggaggtgtctgagagcgcccctcctggctacgtgattgccctggtgcgggtgtctgaccgggacagcggcctgaatggccgggtgcagtgccgcctgctgggcaatgtgcccttccggctgcaggagtatgagagcttcagcaccatcctggtggatggccgcctggaccgggagcagcacgaccagtacaacctgaccatccaggccagagatggaggagtgcccatgctgcagagcgccaagagcttcaccgtgctgatcacagatgaaaatgacaaccacccccacttcagcaagccctactaccaggtgattgtgcaggagaacaacacccctggggcctacctgctgtctgtgtctgcccgggaccctgacctgggcctgaatggatctgtgtcctaccagatcgtgcccagccaggtgcgggacatgcctgtgttcacctacgtgtccatcaaccccaacagcggggacatctatgccctgcggagcttcaaccacgagcagaccaaggcctttgagttcaaggtgctggccaaggatggcggcctgcccagcctgcagagcaatgccaccgtgcgggtcatcatcctggatgtgaatgacaacacccctgtgatcacagccccacccctcatcaatggaacagctgaggtgtacatccccagaaattctggaattggctacctggtgacagtggtgaaggcagaagattatgatgaaggagaaaatggccgggtgacctatgacatgacagaaggagaccggggcttctttgaaattgaccaggtgaatggagaggtgaggaccaccaggaccttcggggagagcagcaagagcagctatgagctgattgtggtggcccatgaccacggcaagaccagcctgagcgccagcgccctggtgctgatctacctgagccctgccctggatgcccaggagagcatgggctctgtgaacctgagcctcatcttcatcatcgccctgggcagcattgctggcatcctgtttgtgaccatgatctttgtggccatcaagtgcaagagggacaacaaggagatccgcacctacaactgcagcaactgcctgaccatcacctgcctgctgggctgcttcatcaagggccagaacagcaagtgcctgcactgcatctctgtgagccccatcagcgaggagcaggacaagaagacagaggagaaggtgtccctgcggggcaagagaattgctgagtacagctatggccaccagaagaagagcagcaagaagaagaagatcagcaagaatgacatccggctggtgcccagagatgtggaggagacagacaagatgaatgtggtgtcctgcagcagcctgaccagcagcctgaactactttgactaccaccagcagaccctgcccctgggctgccgccgctctgagagcaccttcctgaatgtggagaaccagaacaccaggaacaccagcgccaaccacatctaccaccacagcttcaacagccagggcccccagcagcctgacctgatcatcaacggggtgcccctgcctgagacagagaactacagctttgacagcaactacgtgaacagccgggcccacctgatcaagagcagcagcaccttcaaggacctggagggcaacagcctgaaggacagcggccacgaggagagtgaccagacagattctgaacatgatgtgcagaggagcctgtactgtgacacagctgtgaatgatgtgctgaacacctctgtgacctccatgggcagccagatgccagaccatgaccagaatgaaggcttccactgccgggaggagtgccgcatcctgggccacagcgaccgctgctggatgcccaggaaccccatgcccatccgcagcaagagccctgagcacgtgaggaacatcatcgccctgagcattgaggccacagctgctgatgtggaggcctatgatgactgtggccccaccaagaggacctttgccaccttcggcaaggatgtgtctgaccaccctgctgaggagcggcccaccctgaagggcaagaggacagtggatgtgaccatctgcagccccaaggtgaacagcgtcatccgggaggccggaaatggctgtgaggccatcagccctgtgaccagccccctgcacctgaagagcagcctgcccaccaagcccagcgtgtcctacaccatcgccctggcccccccagcccgggacctggagcagtatgtgaacaacgtgaacaacggccccacccggcccagcgaggccgagcccagaggagctgacagcgagaaggtgatgcatgaggtgagccccatcctgaaggagggcaggaacaaggagagccctggggtgaagaggctgaaggacatcgtgctgtag

SEQ ID NO: 71801 - DNA, 3447 bp, Artificial Sequence
  derived and/or modified sequence
atggagagcctgctgctgcccgtgctgctgctgctggccatcctgtggacccaggcggctgcattaatcaatctcaagtactccgtggaggaggagcagcgtgctggaaccgtcattgcaaacgtggctaaagatgccagggaggctggatttgccctggaccctcgacaggctagtgcctttagagtagtctcaaactctgccccacatctggtggatatcaatccttcgagtggcctcctagtgaccaagcagaagatcgatagggacctgctttgtaggcagagtcccaagtgcattatctcgctggaggtgatgtccagctccatggaaatctgtgtgattaaggtcgagattaaagatctgaacgacaatgcccctagcttccccgctgctcaaattgagcttgaaataagcgaagctgcatcccccgggactcgcattcctctcgactccgcatatgatccagattccggatcttttggcgtgcaaacctacgaactgactccaaacgagctctttggactcgagattaaaaccagaggcgatgggtctagatttgcagaactcgtggtggaaaagtcactggatagggaaactcagtctcactactcgtttcgaattaccgcccttgatggcggcgacccgccacgcctggggacggtgggattaagtatcaaagttactgacagcaatgacaacaatcctgtctttagtgaaagcacatatgctgtcagcgtgcccgaaaactctccccccaacactcctgttatcaggctgaacgcctctgacccagacgaaggaaccaatggacaggtcgtgtactcattttacggatacgtgaatgacaggactcgagagctcttccagatagacccccacagcgggctggtaaccgtcaccggagccctcgattatgaggaaggccacgtgtacgagttggacgtgcaggctaaagacctgggaccgaacagcattcctgcgcattgcaaggtgaccgtcagcgtgctggacacaaatgataatccaccagtgataaacctcttgagcgtgaacagcgaattggtcgaagtgtccgaatctgcaccacccggctatgtaatcgccctggtccgggtttccgatcgagattccggtctgaacggccgagtccaatgtagactgctgggcaatgtgccgtttagacttcaagaatacgaatccttttccaccatcctggtggacggccgcttggaccgcgagcagcatgaccagtataacctgactatacaagcacgcgatggaggggtacccatgttgcagtccgccaaaagcttcactgttctgataaccgatgagaacgacaatcaccctcattttagtaaaccttattatcaggtcatcgtccaggaaaacaatactcctggcgcctacctcctatccgtatccgcccgtgacccagacctgggattaaacggcagcgtgagttaccaaatcgtgccttcccaggtgcgggatatgcccgtgtttacatatgtcagtattaacccgaactctggagacatctatgctctgaggtcattcaatcatgaacagacaaaggctttcgagttcaaggtgcttgccaaggatggtgggctgcccagtctgcaatctaacgcaacagtccgtgtgatcatcttggatgtcaatgataacacccctgtgatcacagcacctccacttataaacggcacagctgaggtttatattcccagaaactcagggatcggctatctggtcaccgtggttaaggccgaggattatgatgaaggagagaatggaagagtgacctacgacatgacagaaggtgatcggggctttttcgaaatagatcaggtcaacggtgaggtacgcacaacccggacatttggggagtcctctaagagctcctacgaactaatcgtggtcgcccatgaccacggaaaaacttcactgtctgcctccgcactggtgctgatctatctgagtccagctttggatgcccaggaatctatggggagcgtgaacctttcattgatctttatcattgctttggggagcatcgccggtatactgttcgtgactatgattttcgtcgccatcaagtgtaagcgtgacaacaaggagatccggacttacaactgctcgaactgcctcacaattacctgtcttttagggtgtttcattaaaggacagaattcgaaatgtctgcattgcatttccgtgtcccctatctctgaagagcaggataagaagactgaggaaaaggttagtcttcgtgggaagagaatagcggagtattcatacgggcaccaaaagaagtcgtcgaagaagaaaaaaatcagcaagaatgacatcaggctggtgcctcgcgacgtggaggaaaccgacaaaatgaacgtggttagttgttcctccctgacatcttcactaaactactttgattaccaccagcagacactgcctttggggtgtaggcggtctgaatccactttcctgaatgttgagaaccagaacactaggaatacctcagcaaaccacatataccaccactccttcaactcccaaggcccccagcaaccagacttgatcatcaacggcgtgcccctgccagagacagagaactactcttttgattctaactacgttaactcacgcgcgcacttgatcaagagctcttctacgttcaaggacttagagggtaacagcttgaaggatagtgggcacgaggaatccgatcagacagactccgagcacgacgttcagagaagtttgtattgtgatacagctgtcaatgatgtgcttaacacctcggtcacctcaatgggttcccaaatgcctgaccacgatcagaacgaaggctttcactgcagagaagagtgtcgcatcctcggccactccgaccggtgctggatgccccgcaaccctatgcctatccgcagcaagtcgccagagcacgtaagaaatatcatcgcgctgagcattgaggcaaccgcggccgatgtggaggcctatgatgactgtggccccacaaaacgtacattcgcgactttcgggaaggacgtgagcgatcatccagccgaggagcgcccaaccctgaagggaaagagaactgtcgatgttaccatatgcagccctaaagtgaattccgtcatacgggaggccgggaacggctgcgaggccatctctcctgtgaccagcccactccacctgaaaagttcactccctacaaagccatctgtgtcttacaccatcgccttagcgcctcctgcaagggatttggagcaatacgttaacaatgtcaataacggcccaacaaggccatcggaagccgagcctcgaggggctgacagcgaaaaggtgatgcatgaagtaagtcccattctgaaggagggacggaacaaagaatcaccgggagtgaagaggcttaaggacattgtcctctag

SEQ ID NO: 71802 - DNA, 3447 bp, Artificial Sequence
  derived and/or modified sequence
atggagtccctgctgttgcctgtgttgttgttgttggccatcctatggacacaggctgctgccttaattaacctgaaatactcagttgaggaggaacaaagggcaggcacagtgattgccaacgtggcaaaagacgccagggaagccggattcgcattggatcctcggcaggcaagcgcctttagggtagtgagtaactcagctccccacctggtggacattaatccaagttcgggactcctggttaccaaacagaagatcgatcgtgaccttctgtgccgccagtctcccaagtgcatcattagcctggaggtgatgagcagctcaatggagatttgcgtgatcaaagtggagatcaaagatctcaacgacaatgccccttccttccctgctgcccagatcgaacttgagatttctgaggctgcctcccctgggactcgaatcccactggattctgcttatgacccagactcgggatcattcggcgtccagacatacgaattaactccaaatgaattattcgggctcgaaattaagaccaggggggacgggtcgcggttcgctgagttagtcgttgagaaatcgttagaccgagaaacccagtctcactactcgttcagaattacagccctggacgggggtgatccacctagacttggcaccgtgggcttaagcatcaaagtgacagactccaacgacaataaccccgtgttttcagaatccacttacgccgtcagtgtgccagagaatagccccccaaacacgcccgtcatcagattgaatgcatctgaccccgacgagggaaccaacgggcaggtggtgtattcgttctacggatacgtgaatgaccgcactagggaattattccagatagacccccacagtgggctcgttactgtgactggtgcgcttgactacgaggagggccatgtctacgagcttgacgtccaggcaaaggatctgggcccaaactcgatccccgcacactgtaaggtgaccgtgagcgtcctggatacaaacgacaatccccctgtgattaaccttttgagcgttaattctgagttggttgaggtgtcagaaagtgcaccaccgggatacgtgattgcactggtgcgagtgagcgatagggattcgggcttgaatggccgagtgcagtgccgactattgggaaacgtcccctttcgtctgcaggaatacgaatcgttctccacaatactagttgatggcagactcgacagggaacagcacgaccagtataaccttactatccaggcacgcgacggaggcgtgccaatgctgcagtcggcgaagagttttactgttctcatcactgatgagaatgacaaccacccacacttctcaaaaccatactatcaggttattgtccaggagaacaatacgccgggagcttatctgctgagcgtatcagcgagggacccagacctgggcttgaatggatccgtgagttatcagatcgtgccctcccaagtgagggacatgcccgtcttcacatacgtatctattaatcccaattcgggggatatatacgcattgcgaagttttaatcacgaacaaactaaggcctttgagtttaaggtgctggccaaagatggcggactgccttctttgcaatctaacgcgaccgtaagagtcattattttagacgtaaatgacaatacccccgttattactgcacccccacttattaacgggaccgctgaagtgtacatccctcgaaacagcggtataggatatttggttactgtagtcaaagcagaggactacgacgagggggaaaacggcagggtgacttatgacatgaccgagggcgacaggggtttttttgagattgaccaggtgaacggtgaagtgagaaccacccgtaccttcggcgagtccagtaaaagcagctatgagctgatcgtggtagcccatgatcatggtaagacttcactttccgcaagcgccctcgtgttgatctacctgagtcctgctctggacgcacaggagtccatgggttccgtgaacctcagcttaatctttatcattgccttgggatctatcgctgggattctgtttgtgaccatgatttttgtagccatcaaatgcaagcgtgataataaggaaatccggacctacaactgttctaactgtctaacaattacatgcttattgggttgttttatcaaaggccagaattctaaatgtctccactgtatctctgtgtcccctatatccgaagaacaggataagaaaaccgaagaaaaagtgtctttgcggggaaagcgaattgctgagtatagctacggacaccagaagaagtcttctaagaagaagaagatatctaagaatgacattcggctggtgcctcgagatgtcgaggagactgataaaatgaacgtggtttcctgtagctctctgacctcctctctaaactattttgactaccaccagcagacattgcctctgggatgtcggaggtccgaatctacgttcttgaatgttgagaaccagaacacacgcaacacctccgccaatcatatctatcaccactctttcaacagccaggggcctcagcagcccgacctgataataaatggtgtgccactgcccgagacagaaaattatagttttgactccaattatgtgaatagtcgcgcacatctgatcaaatcatcctccacctttaaggatttagaaggcaatagcctgaaggattctggccacgaagagagtgatcagacggatagcgagcatgacgtacaacgttcgctttattgtgataccgcagttaatgacgttcttaacacatcggtaacctctatgggatcccagatgcctgatcacgatcagaacgagggcttccactgccgggaagagtgccgcatcttagggcacagcgacagatgttggatgcccagaaaccccatgccgattcgcagtaagagcccagaacacgtgaggaacatcatcgccctgtcaatagaagctaccgctgctgatgtcgaagcatatgatgactgtggccctacgaaaaggactttcgcgacatttggtaaagatgtgtctgatcaccccgctgaagagcgtccaaccctgaaagggaagagaaccgtggacgtgacgatttgtagcccaaaagtgaattcagtgatcagggaggcaggcaacggttgtgaggccatctcccccgtaacctctccgctgcacctgaagtccagcttgccaaccaagcctagcgtgtcatacacgatcgcccttgctccccctgctcgagatttagaacagtatgtgaataacgtgaacaacggcccaacacgcccttcggaagctgagcctcgcggtgcggacagtgagaaggtcatgcatgaagtgagtcccatcctgaaggagggtcgaaacaaagagagcccgggtgtgaaacggctgaaggacatagtcctgtag

SEQ ID NO: 71803 - DNA, 9756 bp, Artificial Sequence
  derived and/or modified sequence
agtagtttgcggcatccggaggagcagcagcagcagtagcggcggcggctggcgcagcgcggagacggacgagcgggcacagacggcagcacagctcccgtgcaccatgcctggcttgcccgggaggcactggcacccgcgtccctagcccggcgctggcccttggcgcgttgcgctccgcagcattccggctgagcgatttcatccgaaatcctaaacctcctaccccaaacccattgcctcctgcttgctcatactccacactcacactccccacaccacacactcactcttcctctctctctcacacattcacacacagcccgagacagacagagaaagcgagacagacctcccgagtgcgcgagcgcccgggaggaagggagcccaacgcagcgcggccagcgcctctccgggaagatgaaatcaagacgctcctgcaagtaaacttcggcggcgacaaaatcgtcgactgtggcagctgctgaggcggaccccagcgacgtgcaactgagctaggagggcttcctcccgcggcggcggcggcggcggcggcggcggcggaccttggagcgacaccccagcccaaacggagagaagagaagcacccggtacccacggcggcggccccgcctctcctggccggtactgttgttgcctccccttccctcttccccattccccgccacccccggccattagaaagaccggggctttgattttcttggacaaattgccatctccccgtttccacaaacttgacgtggagggtcggactgcgttgttaactttgatttcctagacgaaaacgcccgcagaccctcaactgctctgtggggggaactccgctcccacctcggatcctggacagacgcgcccccaagcccttcgaagccagccttagcgcgagggagcgcgctcaagctctggcagcctctctcccctcccccttcctctgctggccccgggaccgccatccgactcaaccctataaccgggtgcccgcggcgcttgccagtaactgactcccgtctgcgacaccccctttctcccgaacaggcctcgaagaggccagtgtggcccccccagaccccggagggcgcattccaagcgggtactctctccgcagtgaactgggagcgctggggggaggtctttgcgcatgccaggtgcacagacagcgagttcgccagcctcagtgccggtgcaccgcggcgggccgggcagtgcctgaaaggctgcgcctcctccgccctctttaccttcgcctcaagtactgtccggactcagcggtgcgtcctccaggccgcgcagacgccgcccgacccgcagccctgggcggctgccgacagtcgcgcccggctaactttgaaggggtaaaactgagtagccgggctggagggagggggctcggggccgcgcggcgctcccttggcccctcggagcccccggggcccccgcgagcccccgccgcgtccgccgcaacctcagcattggagccgccgcgggtgtcccccgcgcgccgccgggccgccctgggcgggacttctcccgcggcctccggggccacggggcgcgcgcaacaggcggcccgagccggcgggaagctggagcgccgacggcgtcggtctcggaggggtgtggagaggcgaggccaggcagagccccgtgcagccatggagtcgctcctgctgccggtgctgctgctgctggccatactgtggacgcaggctgccgccctcattaatctcaagtactcggtagaagaggagcagcgcgccgggacggtgattgccaacgtggccaaagacgcgcgagaggcgggcttcgcgctggacccccggcaggcttcagcctttcgcgtggtgtccaactcggctccacacctagtggacatcaatcccagctctggcctgctggtcaccaagcagaagattgaccgtgatctgctgtgccgccagagccccaagtgcatcatctcgctcgaggtcatgtccagctcaatggaaatctgcgtgataaaggtggagatcaaggacctgaacgacaatgcgcccagtttcccggcagcacagatcgagctggagatctcggaggcagccagccctggcacgcgcatcccgctggacagcgcttacgatccagactcaggaagctttggcgtgcagacttacgagctcacgcccaacgagctgttcggcctggagatcaagacgcgcggcgacggctcccgctttgccgaactcgtggtggaaaagagcctggaccgcgagacgcagtcgcactacagcttccgaatcactgcgctagacggtggcgacccgccgcgcctgggcaccgttggccttagtatcaaggtgaccgactccaatgacaacaacccggtgtttagcgagtccacctacgcggtgagcgtgccagaaaactcgcctcccaacacacccgtcatccgcctcaacgccagcgatccagacgagggcaccaacggccaggtggtctactccttctatggctacgtcaacgaccgcacgcgcgagctctttcagatcgacccgcacagtggcctggtcactgtcactggcgctttagactacgaagaggggcacgtgtacgaactggacgtgcaggctaaggacttggggcccaattccatcccggcacactgcaaggtcaccgtcagcgtgctggacaccaatgacaatccgccggtcatcaacctgctgtcagtcaacagtgagcttgtggaggtcagcgagagcgcccccccgggctacgtgatcgccttggtgcgggtgtctgatcgcgactcaggcctcaatggacgtgtgcagtgccgtttgctgggcaatgtgccctttcgactgcaggaatatgagagcttctccactattctggtggacggacggctggaccgcgagcagcacgaccaatacaacctcacaattcaggcacgcgacggcggcgtgcccatgctgcagagtgccaagtcctttaccgtgctcatcactgacgaaaatgacaaccacccgcacttttccaagccctactaccaggtcattgtgcaggagaacaacacgcctggcgcctatctgctctctgtgtctgctcgcgaccccgacctgggtctcaacggcagtgtctcctaccagatcgtgccgtcgcaggtgcgggacatgcctgtcttcacctatgtctccatcaatcccaactcaggcgacatctacgcgctgcgatcctttaaccacgagcagaccaaggcgttcgaattcaaggtgctggccaaggacggcggccttccctcactgcaaagcaacgctacggtgcgggtcatcatcctcgacgtcaacgacaacaccccggtcatcacagccccacctctgattaacggcactgccgaggtctacataccccgcaactctggcataggctacctggtgactgttgtcaaggcagaagactacgatgagggcgaaaatggccgagtcacctacgacatgaccgagggcgaccgcggcttctttgaaatagaccaggtcaatggcgaagtcagaaccacccgcaccttcggggagagctccaagtcctcctatgagcttatcgtggtggctcacgaccacggcaagacatctctctctgcctctgctctcgtcctaatctacttgtcccctgctctcgatgcccaagagtcaatgggctctgtgaacttgtccttgattttcattattgccctgggctccattgcgggcatcctctttgtaactatgatcttcgtggcaatcaagtgcaagcgagacaacaaagagatccggacctacaactgcagtaattgtttaaccatcacttgtctcctcggctgttttataaaaggacaaaacagcaagtgtctgcattgcatctcggtttctcccattagcgaggagcaagacaaaaagacagaggagaaagtgagcctaaggggaaagagaattgctgagtactcctatgggcatcaaaagaaatcaagcaagaagaaaaaaatcagtaagaatgacatccgcctggtaccccgggatgtggaggagacagacaagatgaacgttgtcagttgctcttccctgacctcctccctcaactattttgactaccaccagcagacgctgcccctgggctgccgccgctctgagagcactttcctgaatgtggagaaccagaatacccgcaacaccagtgctaaccacatctaccatcactctttcaacagccaggggccccagcagcctgacctgattatcaacggtgtgcctctgcctgagactgaaaactattcttttgactccaactacgtgaatagccgagcccatttaatcaagagcagctccaccttcaaggacttagagggcaacagcctgaaggatagtggacatgaggagagtgaccaaactgacagtgagcatgatgtccagcggagcctgtattgtgatactgctgtcaacgatgtgctgaacaccagtgtgacctccatgggatctcagatgcctgatcatgatcagaatgaaggatttcattgccgggaagaatgccggattcttggccactctgacaggtgctggatgccccggaaccccatgcccatccgttccaagtcccctgagcatgtgaggaacatcatcgcgctgtctattgaagctactgctgctgatgtcgaggcttatgacgactgcggccccaccaaacggactttcgcaacctttgggaaagatgtcagcgaccacccggctgaggagaggcctaccctgaaaggcaagaggactgtcgatgtgaccatctgcagccccaaggtcaacagcgttatccgggaggcaggcaatggctgtgaggcgattagccctgtcacctcccccctccacctcaagagctctctgcccaccaagccttccgtgtcttacaccattgccctggctcccccagcccgtgatctggagcagtatgtcaacaatgtcaacaatggccctactcgtccctctgaagctgagccccgtggagctgatagcgagaaagtcatgcatgaggtcagccccattctgaaggaaggtcgcaacaaagagtcccctggtgtgaagcgtctgaaggatatcgttctctaaaccagtctccaggaagaagagaaagaaaccacactggctagtgaagaagcaggagcttcttgttttaattgctcaccaatggttggttcttgagtggctatatttcagagcttttcctaaatgtattgtttataggtgattatcattctgtgacagtcccttgtttcaacaggcagcaggggtgttcagttggagcaaattagctttggcttgagttgttcatggggccttgatgttggggaaacagagacaaattcagttgtgaaaagtattatgtattaagtgtttgaatttatatatttttctatgtcaaaattataatataaattaccattgtttgtggaggattacatttaaaaaagcaaaaagtgaaaaaaaaaagctctggacacctttaataagctcgccactgttttttgtagtgtagacaagttaatggtcatttattgtgtactattcattgattcagtgatgtgaaattgagcccccaaaaggttgtttctgaagctcgagtacttcccaatgccgctactttgctgtggacacccctgctttaaaaacccttttgctagctgtgctattgttgtatttgatattgcaaattgctatgtgtgtggtgatggcaaaaggcttttaaaagttggtgttttctttttcttaaaaaaataataaaactacagacaaaaacaaagtgcaaacaactgagacagcaaatgaatgagcaacaccatgcatatagattgagtacttggagaatactcacgttttttaactcatgtagtgattgctcaccactttgcaaagtatttttcctgcctttcagtggtctgcccaggtccatgatagatcattgcagaaagtcatttttggataggctgctatctaatttgcagttgtcagaaatactgtgctgaaagttttatgacatccatcttttaaattttcaggccctgaacaggaaagttgctcctgaagttatgtttccaggcttagaaattccctctctccaatcatctaaaattgaagatgactgaatctattttaagatctaaattagcatctcttcagacacacacttcctgattcagtgtttcccaatcatgattagaattagactgcaaagcacgtcatgggctgggattgagaactccatgttgctctgtatcttaggcttatatacgtagggatagagtaagcagtacaaagtgtatattttggaaaagacaggtaacaggtaacagcatcgctaatccaattactgtgccttctaaacggagacactcagacacttgaactcatctttttatgactaatagttttttgattaaaaatgtgaacaagaaaatactaaaataaaaatcctttcgatttagccaactctttttgctgtaggctaggaatacaccctttttaaattaacacactgtagatcctttttttctgttttaacattcctctaactcccccatttatcttttgtctattaatattcactagccaacatagtatttttgcagcctaagagttcattatttaaaaataaactaaagaaatatgtcacctttgttctgccttggtcttaagagagttgtttctagagaaacaagttttatggttctgttttcatttgtttcattttttgaaattcaggaatacacagagagaaggcctagaggttagagcactagaatgcaaaagaggatttattttcttaagtttaggtagataagtcagctcttttgaatgttttacttatttttgcctgagttcctagctttacgcattactaggaatattttcttttacaggagggagaagggttttgagggagggggtgggtaaggcagtagggatggggttaggtaggggagaacatttctgaaaaagaacttataatgaagctacaaatccatccttatttcttattcagtgctgaatactacctcatgcaaaatattggtgtggctgcaaatttccctctgaagctgacacaattaaggatgaattaccataacatcttcatttttcctcatttcattgcctctcatacagttttctccctctgatttatttcattttggtagtggattttgaattaagtatttatttctctttgcaagtgactatttgattaacacattaaaaattttttaaaaatttcccctttaagttatgatggctgcctatagaatttagactgtttctcaccctgatccatcctgatattatgttattagctacgatttcaaggtcactttgaagtcagacttcacagttttctacaggtgtatttcttgctatgctcagtgggaaccagggagcagaaaagattgtggaaagtgggaacattaattgtcacgtggctgttgagccagagaggccactggctgccatgcctcttaccagccaagttttaaatggttagagtggcattggcattgattttgcttttctcttgggttttcttcatttcttttcataattcatcttcaagctatagatccatccttcttccctatccaaatactttgttctcagtgggcagtcagatttttttggcttccaaacctcactgagcatgttcagagaattcctctcattaaggaaatatttttccccacaattgtctgatgtatgagtcctctcagaagcacaagtgcatactaggaaggctttgtaaactggttttgtaggcaggctgtacctgcaaataggcattctgagcaaggatcctaaatttccctttggctcatgtcccccccgccccaccccaccttctcctttttggcatgtctggtgaaaagctacaaggttcacagggccaaatattctcccttttgttctctaaacatgttgcacacataaactcaagggagtgatttcggttcctaagtcctagggagttctattccatttattctgatgtcccttttaaggaggagttggtgttgaagtgtgacatgctttaatgataactgctttggcaattccccagacaggtatacttcttcatccaaaattgcacctaaggtgttcatttagacaaaattgttcgcttagtgatccactgatctctaatcagaaatatttttaaaaaatacaatttagatctctgaaaattggaaccactcaagagtatcatcttgatagtgttacttcagcatatgactgactgattttatgaagggagtttagctgacttttccctgtagccctatcatattaaaaacaaaaagtggtccacttgaagcagcaaggacaaagggcagtttagggagaggcagggtgaaggggatagctcgattgggcatccagagtggaaaaggattattattgtacataatagcagttctggctggaattccaatccactttctggggatcattttgatgttgaatgttcccccaaagcattctgacaagtttggtccacttggctctttaccccgggtaataagacccttattgactttgaaaaactggcataaatgagcttaagaaatccattgtatacagtcctagtgtttgccttcttggtaaaattacatttaaggatgtcatttcatgagtcaaattgtatctgctgacactgaagtgtattgagatgttgttctttagtttaagtatgtaacaaagtaatattcaaaggggatgtttgggggtggggctgggaccgggtggctttatattgataatgaaatattccagagcaaaacacattgtcctaatgaagttgttgcagctctcttcgttttcttgtgccgctggaattggcttgtgggtcacttgttgtgcaaaagtgaattaatttcaaataggaatcatattgcttttgtgaaacaaagaaaatttaccaccttgtctgatacatagattggaaggcgctcttggtaaagaataacccacaaacacctgatcttgattggaaagcattgtaggtcattagggaaaactgatgatgctgactgttgctccagctgtgttggcaattcaagatgaccttgttactaactgaaagttgctgtcaaccttagcaaacaaaccagctaacaccattacagcactggttaagtagatttttactggcactggctggcgttcagctgaggaaggctaggatacagactttaatgaccaagagccagactagctcgagctagaaatcagcaacaaatacctccttgtgctatttgaatgctaaggtattagttgcaataggcttacgccttcgctcctctagtgaggggaatgagcctgatgacactattactgtttacctgtcaaaccagggtggaaatttagagggatgcaagtacagtatgtctcattaagcagtctctgttgctgattatatgaagataaaattgttgtatatgctgatctgtatgttatgtacattttcacagtgattgaatcattgtaaaaagaaaaaagacaaaaaagaatcaccactgtctattttatgaagatgataaagcagctttattaaattattacagttatgtttcaaatggtgttatctgccacattgtttccttttatctggtggttctctgtttccccctttaaatgtgttttctctgcttcaaaaatttaatgcattttagtattaaaggctattatggaaaaagta

SEQ ID NO: 71804 - DNA, 3447 bp, Artificial Sequence
  derived and/or modified sequence
atggagagcctgctgctgcccgtgctgctgctgctggccatcctgtggacccaggccgccgccctgatcaacctgaagtacagcgtggaggaggagcagagagccggcaccgtgatcgccaacgtggccaaggacgccagagaggccggcttcgccctggaccccagacaggccagcgccttcagagtggtgagcaacagcgccccccacctggtggacatcaaccccagcagcggcctgctggtgaccaagcagaagatcgacagagacctgctgtgcagacagagccccaagtgcatcatcagcctggaggtgatgagcagcagcatggagatctgcgtgatcaaggtggagatcaaggacctgaacgacaacgcccccagcttccccgccgcccagatcgagctggagatcagcgaggccgccagccccggcaccagaatccccctggacagcgcctacgaccccgacagcggcagcttcggcgtgcagacctacgagctgacccccaacgagctgttcggcctggagatcaagaccagaggcgacggcagcagattcgccgagctggtggtggagaagagcctggacagagagacccagagccactacagcttcagaatcaccgccctggacggcggcgacccccccagactgggcaccgtgggcctgagcatcaaggtgaccgacagcaacgacaacaaccccgtgttcagcgagagcacctacgccgtgagcgtgcccgagaacagcccccccaacacccccgtgatcagactgaacgccagcgaccccgacgagggcaccaacggccaggtggtgtacagcttctacggctacgtgaacgacagaaccagagagctgttccagatcgacccccacagcggcctggtgaccgtgaccggcgccctggactacgaggagggccacgtgtacgagctggacgtgcaggccaaggacctgggccccaacagcatccccgcccactgcaaggtgaccgtgagcgtgctggacaccaacgacaacccccccgtgatcaacctgctgagcgtgaacagcgagctggtggaggtgagcgagagcgccccccccggctacgtgatcgccctggtgagagtgagcgacagagacagcggcctgaacggcagagtgcagtgcagactgctgggcaacgtgcccttcagactgcaggagtacgagagcttcagcaccatcctggtggacggcagactggacagagagcagcacgaccagtacaacctgaccatccaggccagagacggcggcgtgcccatgctgcagagcgccaagagcttcaccgtgctgatcaccgacgagaacgacaaccacccccacttcagcaagccctactaccaggtgatcgtgcaggagaacaacacccccggcgcctacctgctgagcgtgagcgccagagaccccgacctgggcctgaacggcagcgtgagctaccagatcgtgcccagccaggtgagagacatgcccgtgttcacctacgtgagcatcaaccccaacagcggcgacatctacgccctgagaagcttcaaccacgagcagaccaaggccttcgagttcaaggtgctggccaaggacggcggcctgcccagcctgcagagcaacgccaccgtgagagtgatcatcctggacgtgaacgacaacacccccgtgatcaccgccccccccctgatcaacggcaccgccgaggtgtacatccccagaaacagcggcatcggctacctggtgaccgtggtgaaggccgaggactacgacgagggcgagaacggcagagtgacctacgacatgaccgagggcgacagaggcttcttcgagatcgaccaggtgaacggcgaggtgagaaccaccagaaccttcggcgagagcagcaagagcagctacgagctgatcgtggtggcccacgaccacggcaagaccagcctgagcgccagcgccctggtgctgatctacctgagccccgccctggacgcccaggagagcatgggcagcgtgaacctgagcctgatcttcatcatcgccctgggcagcatcgccggcatcctgttcgtgaccatgatcttcgtggccatcaagtgcaagagagacaacaaggagatcagaacctacaactgcagcaactgcctgaccatcacctgcctgctgggctgcttcatcaagggccagaacagcaagtgcctgcactgcatcagcgtgagccccatcagcgaggagcaggacaagaagaccgaggagaaggtgagcctgagaggcaagagaatcgccgagtacagctacggccaccagaagaagagcagcaagaagaagaagatcagcaagaacgacatcagactggtgcccagagacgtggaggagaccgacaagatgaacgtggtgagctgcagcagcctgaccagcagcctgaactacttcgactaccaccagcagaccctgcccctgggctgcagaagaagcgagagcaccttcctgaacgtggagaaccagaacaccagaaacaccagcgccaaccacatctaccaccacagcttcaacagccagggcccccagcagcccgacctgatcatcaacggcgtgcccctgcccgagaccgagaactacagcttcgacagcaactacgtgaacagcagagcccacctgatcaagagcagcagcaccttcaaggacctggagggcaacagcctgaaggacagcggccacgaggagagcgaccagaccgacagcgagcacgacgtgcagagaagcctgtactgcgacaccgccgtgaacgacgtgctgaacaccagcgtgaccagcatgggcagccagatgcccgaccacgaccagaacgagggcttccactgcagagaggagtgcagaatcctgggccacagcgacagatgctggatgcccagaaaccccatgcccatcagaagcaagagccccgagcacgtgagaaacatcatcgccctgagcatcgaggccaccgccgccgacgtggaggcctacgacgactgcggccccaccaagagaaccttcgccaccttcggcaaggacgtgagcgaccaccccgccgaggagagacccaccctgaagggcaagagaaccgtggacgtgaccatctgcagccccaaggtgaacagcgtgatcagagaggccggcaacggctgcgaggccatcagccccgtgaccagccccctgcacctgaagagcagcctgcccaccaagcccagcgtgagctacaccatcgccctggccccccccgccagagacctggagcagtacgtgaacaacgtgaacaacggccccaccagacccagcgaggccgagcccagaggcgccgacagcgagaaggtgatgcacgaggtgagccccatcctgaaggagggcagaaacaaggagagccccggcgtgaagagactgaaggacatcgtgctgtag

SEQ ID NO: 71805 - protein, 272 aa, Artificial Sequence
  derived and/or modified sequence
MAQHHLWILLLCLQTWPEAAGKDSEIFTVNGILGESVTFPVNIQEPRQVKIIAWTSKTSVAYVTPGDSETAPVVTVTHRNYYERIHALGPNYNLVISDLRMEDAGDYKADINTQADPYTTTKRYNLQIYRRLGKPKITQSLMASVNSTCNVTLTCSVEKEEKNVTYNWSPLGEEGNVLQIFQTPEDQELTYTCTAQNPVSNNSDSISARQLCADIAMGFRTHHTGLLSVLAMFFLLVLILSSVFLFRLFKRRQGASLQGRASEHSLFRSAVC

SEQ ID NO: 71806 - DNA, 726 bp, Artificial Sequence
  derived and/or modified sequence
atggcccagcaccacctgtggatcctgctgctgtgcctgcagacctggcccgaggccgccggcaaggacagcgagatcttcaccgtgaacggcatcctgggcgagagcgtgaccttccccgtgaacatccaggagcccagacaggtgaagatcatcgcctggaccagcaagaccagcgtggcctacgtgacccccggcgacagcgagaccgcccccgtggtgaccgtgacccacagaaactactacgagagaatccacgccctgggccccaactacaacctggtgatcagcgacctgagaatggaggacgccggcgactacaaggccgacatcaacacccaggccgacccctacaccaccaccaagagatacaacctgcagatctacagaagactgggcaagcccaagatcacccagagcctgatggccagcgtgaacagcacctgcaacgtgaccctgacctgcagcgtggagaaggaggagaagaacgtgacctacaactggagccccctgggcgaggagggcaacgtgctgcagatcttccagacccccgaggaccaggagctgacctacacctgcaccgcccagaaccccgtgagcaacaacagcgacagcatcagcgccagacagctgtgcgccggcaaccagctgtgccccagcctgctggtgagcctgagagaccacagcgaggagctgcagggcctgaacgtgggccacatcctgtag

SEQ ID NO: 71807 - DNA, 819 bp, Artificial Sequence
  derived and/or modified sequence
atggcccagcaccacctgtggatcctgctgctgtgcctgcagacctggcccgaggccgccggcaaggacagcgagatcttcaccgtgaacggcatcctgggcgagagcgtgaccttccccgtgaacatccaggagcccagacaggtgaagatcatcgcctggaccagcaagaccagcgtggcctacgtgacccccggcgacagcgagaccgcccccgtggtgaccgtgacccacagaaactactacgagagaatccacgccctgggccccaactacaacctggtgatcagcgacctgagaatggaggacgccggcgactacaaggccgacatcaacacccaggccgacccctacaccaccaccaagagatacaacctgcagatctacagaagactgggcaagcccaagatcacccagagcctgatggccagcgtgaacagcacctgcaacgtgaccctgacctgcagcgtggagaaggaggagaagaacgtgacctacaactggagccccctgggcgaggagggcaacgtgctgcagatcttccagacccccgaggaccaggagctgacctacacctgcaccgcccagaaccccgtgagcaacaacagcgacagcatcagcgccagacagctgtgcgccgacatcgccatgggcttcagaacccaccacaccggcctgctgagcgtgctggccatgttcttcctgctggtgctgatcctgagcagcgtgttcctgttcagactgttcaagagaagacagggcgccagcctgcagggcagagccagcgagcacagcctgttcagaagcgccgtgtgctag

SEQ ID NO: 71808 - DNA, 726 bp, Artificial Sequence
  derived and/or modified sequence
atggcgcagcatcatctgtggattctgctcctctgcctgcagacatggccagaggcagccggcaaggatagcgaaatttttaccgtcaatggcatccttggggagagtgttacatttcccgtgaatattcaagaaccacgtcaggtgaagatcattgcatggacctctaagacttcagttgcctatgtgactcctggggactccgaaacagctcctgtggtgaccgtgactcacagaaattattacgagcgtatacatgccctcggtcccaattacaacctggtgatttcagacctgagaatggaagatgcaggcgattataaagcggacatcaatacgcaggccgacccctataccacaactaaaagatacaatttacagatttatcggagactgggaaaaccaaagatcacacaaagtctcatggccagtgtgaactcaacttgcaacgtcaccctgacctgcagtgtggaaaaagaagagaagaatgttacgtataattggagtcccctcggggaggaggggaacgtccttcagatttttcagaccccagaagaccaggagctcacatacacgtgcacggcccagaacccagttagcaataattccgactcaatatccgcacgccaactgtgtgcagggaatcagctatgtccctcacttcttgttagcttgagagatcactccgaggaactgcagggcctgaatgttgggcacatcctttag

SEQ ID NO: 71809 - DNA, 819 bp, Artificial Sequence
  derived and/or modified sequence
atggcacagcatcatctgtggatacttctcctgtgcctgcagacctggcccgaagccgcaggcaaagatagtgaaattttcaccgtgaacggcatcttgggggagagcgtcacttttcccgtgaacatacaggaaccacggcaggtgaaaataattgcttggacatcaaagacgtctgtagcctacgtcactcccggcgatagcgagactgcccctgtggttacagtgacacaccggaactattatgaacgaatccacgccctggggccgaactataatctggtgatctctgacctgcgcatggaggacgcaggcgactataaggccgatataaacacacaggccgatccctataccaccactaagaggtataatctccagatatatcgcaggctgggcaagccaaagatcactcagtcactgatggcaagtgtaaatagcacttgtaacgtcaccctgacgtgctcggttgagaaggaggaaaaaaatgtgacatataactggagcccactcggagaggaaggcaatgtgctacaaatctttcagacccccgaggaccaggagctgacctacacatgcactgcccagaatccggtgtctaacaactctgattcaatctccgcgagacagctctgtgccgacattgccatgggcttccgaacccatcacacaggccttttatccgtactggcaatgttttttcttttagttctcattttgagttctgtcttcctgttcagactgtttaaacgccgtcagggggccagcctgcaggggcgggcctccgaacactctttgtttagatctgctgtctgctag

SEQ ID NO: 71810 - DNA, 726 bp, Artificial Sequence
  derived and/or modified sequence
atggcccagcaccacctgtggatcctgctgctgtgcctgcagacctggccagaggccgccggcaaggacagcgagatcttcaccgtgaatggcatcctgggggagagcgtgaccttccctgtgaacatccaggagccccggcaggtgaagatcatcgcctggaccagcaagacctctgtggcctacgtgacccctggggacagcgagacagcccctgtggtgacagtgacccacaggaactactatgaaagaatccacgccctgggccccaactacaacctggtgatcagtgacctgaggatggaggatgctggggactacaaggctgacatcaacacccaggccgacccctacaccaccaccaagcgctacaacctgcagatctaccgccgcctgggcaagcccaagatcacccagagcctgatggcctctgtgaacagcacctgcaatgtgaccctgacctgcagcgtggagaaggaggagaagaatgtgacctacaactggagccccctgggggaggagggcaatgtgctgcagatcttccagaccccagaggaccaggagctgacctacacctgcacagcccagaaccctgtgagcaacaacagcgacagcatcagcgcccggcagctgtgtgccggcaaccagctgtgccccagcctgctggtgtccctgcgggaccacagcgaggagctgcagggcctgaatgtgggccacatcctgtag

SEQ ID NO: 71811 - DNA, 819 bp, Artificial Sequence
  derived and/or modified sequence
atggcccagcaccacctgtggatcctgctgctgtgcctgcagacctggccagaggccgccggcaaggacagcgagatcttcaccgtgaatggcatcctgggggagagcgtgaccttccctgtgaacatccaggagccccggcaggtgaagatcatcgcctggaccagcaagacctctgtggcctacgtgacccctggggacagcgagacagcccctgtggtgacagtgacccacaggaactactatgaaagaatccacgccctgggccccaactacaacctggtgatcagtgacctgaggatggaggatgctggggactacaaggctgacatcaacacccaggccgacccctacaccaccaccaagcgctacaacctgcagatctaccgccgcctgggcaagcccaagatcacccagagcctgatggcctctgtgaacagcacctgcaatgtgaccctgacctgcagcgtggagaaggaggagaagaatgtgacctacaactggagccccctgggggaggagggcaatgtgctgcagatcttccagaccccagaggaccaggagctgacctacacctgcacagcccagaaccctgtgagcaacaacagcgacagcatcagcgcccggcagctgtgtgccgacatcgccatgggcttccgcacccaccacacaggcctgctgtctgtgctggccatgttcttcctgctggtgctgatcctgagcagcgtcttcctgttccgcctcttcaagaggcggcagggcgccagcctgcagggccgggccagcgagcacagcctcttccgctctgctgtgtgctag

SEQ ID NO: 71812 - DNA, 726 bp, Artificial Sequence
  derived and/or modified sequence
atggcccagcaccacctgtggatcctgctgctgtgcctgcagacctggcccgaagcagcgggaaaagatagcgagatatttacggttaacggaattcttggagagtccgtgactttcccagtgaacattcaggagcctagacaggtcaagattatagcctggacctcaaagactagcgtcgcctatgtgacgcctggcgacagcgagaccgctccagtcgtgacagtgacacataggaattactacgaacggatccacgcacttggccctaactacaacttagtgatttccgatttacggatggaagatgctggagattacaaggcagatattaacacccaggcagacccatacaccacaactaaaagatataatctccaaatatacaggcggctgggaaagccaaagatcacacagtccttgatggcttcagtaaactcaacttgtaacgtaactttgacttgttccgtggagaaagaagagaaaaatgtgacgtacaactggagtccactaggagaagaaggcaatgttctacagatctttcagacgcctgaggaccaagaactgacttacacttgtaccgcacagaatcccgtcagtaacaactccgactctatcagcgctaggcagctgtgtgcgggaaatcagctctgccctagcctgctagtctcactcagagaccactccgaggaactccaggggctcaacgttgggcacatcctgtag

SEQ ID NO: 71813 - DNA, 819 bp, Artificial Sequence
  derived and/or modified sequence
atggcccagcaccacctgtggatcctgctgctgtgcctgcagacctggccagaagctgccgggaaagatagcgagatattcacggtcaatggaattttgggagagagcgtcacctttcctgtgaacattcaagaaccccgccaggtgaaaatcatagcttggacgagtaagacctccgtggcttatgtcactcccggggattcagagaccgcccctgtggttactgtcactcatcggaattattacgaaaggatccatgccctaggtcctaattacaacctcgtgatctccgatctgcgtatggaggatgccggagactataaagctgatatcaacacacaggcggacccatacaccacgaccaaacgttataatctccaaatctacaggaggctgggcaagcctaagatcacgcagtcactgatggcaagtgtgaacagcacttgcaacgtcaccttgacttgctcagttgagaaagaggaaaaaaacgtgacatacaattggtccccactcggagaagagggcaatgttcttcagattttccaaactccggaagatcaagaactcacttatacctgcaccgcccagaatcccgtgagtaataatagtgactccatctcagctagacagctttgcgccgatatcgcaatggggtttcggactcaccataccggcctgctttctgtgcttgcaatgttctttttactagtactaatcctttcttccgtctttctattccggctcttcaagaggcgacaaggggcgagtcttcagggtcgggcttccgaacattccttgttcaggtctgcagtatgttag

SEQ ID NO: 71814 - DNA, 726 bp, Artificial Sequence
  derived and/or modified sequence
atggcccaacaccatctctggatactgctgctctgccttcagacctggcccgaggccgcagggaaggatagcgaaatcttcactgtgaatggcatcctgggagagagtgttactttccccgttaacattcaggagccgagacaggtaaagatcattgcctggacaagcaaaactagcgtggcctatgtgacacccggtgactctgaaactgcaccagttgtgaccgtgacccaccgcaattactacgaacggatccacgctctggggcctaactacaacctggtgatttccgacctgcggatggaggatgcaggagactacaaagcagacattaatacgcaggctgatccctacaccactaccaagcgatataatctgcagatctaccgcaggttgggaaaaccgaagatcacgcagagtctcatggcttcagttaactccacgtgcaatgtcacacttacttgcagcgtggaaaaggaagaaaagaatgtaacatataactggtcgcccctgggggaagagggaaatgtgttacaaattttccaaacgcccgaagatcaggaactcacatatacatgtaccgcccaaaatcctgtgtccaataactccgattccatcagcgctagacagctgtgcgctgggaaccaactgtgtcctagcctgctagtatcgctgagagatcactctgaggaactgcagggactaaacgtggggcatatcctgtag

SEQ ID NO: 71815 - DNA, 819 bp, Artificial Sequence
  derived and/or modified sequence
atggcacaacaccatctgtggattctgctcttgtgtctgcaaacctggccagaggcggctggcaaagattcagagatattcacagtcaatgggattttgggagagagcgtgactttcccggttaatatccaggaaccacgacaagttaagattatcgcatggaccagcaagacgtcggtggcatacgtaaccccaggcgattcagaaaccgctccagtcgtgaccgttacccatcgcaattactacgagagaattcatgctctcggccctaattacaatctggtgatcagcgatctgcgcatggaggacgcaggcgactacaaagctgatataaatacccaggctgatccatatacaaccactaaacggtacaatctccagatctaccgcagattgggaaaacctaagatcacgcagtccctgatggcctcagtgaattccacatgtaatgtgactttgacctgcagcgtcgaaaaagaagaaaaaaacgttacctacaattggtccccattaggcgaggagggaaacgtgcttcagatttttcaaactccagaagatcaggagcttacctatacatgtactgcccagaacccagttagtaacaattctgactccattagcgccaggcagttatgtgccgacattgcaatgggctttcggacacatcacacggggctgttgagtgtgcttgctatgtttttcctgctggtgctgattctgtcctccgtcttcctgtttcgtctgtttaagcggagacagggggcttcactccagggcagagcatccgagcatagcctgttccgaagtgccgtatgctag

SEQ ID NO: 71816 - DNA, 856 bp, Artificial Sequence
  derived and/or modified sequence
ctcaagtgaaactgactctgctagaacagtgccgtgcttttccacagaaggttagaccctgaaagagatggctcagcaccacctatggatcttgctcctttgcctgcaaacctggccggaagcagctggaaaagactcagaaatcttcacagtgaatgggattctgggagagtcagtcactttccctgtaaatatccaagaaccacggcaagttaaaatcattgcttggacttctaaaacatctgttgcttatgtaacaccaggagactcagaaacagcacccgtagttactgtgacccacagaaattattatgaacggatacatgccttaggtccgaactacaatctggtcattagcgatctgaggatggaagacgcaggagactacaaagcagacataaatacacaggctgatccctacaccaccaccaagcgctacaacctgcaaatctatcgtcggcttgggaaaccaaaaattacacagagtttaatggcatctgtgaacagcacctgtaatgtcacactgacatgctctgtagagaaagaagaaaagaatgtgacatacaattggagtcccctgggagaagagggtaatgtccttcaaatcttccagactcctgaggaccaagagctgacttacacgtgtacagcccagaaccctgtcagcaacaattctgactccatctctgcccggcagctctgtgcaggtaaccagctctgcccatctctcctggtgagtctcagagatcactctgaggagctgcaaggtctgaacgtgggccacattctctagggagatgtgcttcctttatctttggcctggtcactgagggcatcacctcccaagaagcctact

SEQ ID NO: 71817 - DNA, 965 bp, Artificial Sequence
  derived and/or modified sequence
ctcaagtgaaactgactctgctagaacagtgccgtgcttttccacagaaggttagaccctgaaagagatggctcagcaccacctatggatcttgctcctttgcctgcaaacctggccggaagcagctggaaaagactcagaaatcttcacagtgaatgggattctgggagagtcagtcactttccctgtaaatatccaagaaccacggcaagttaaaatcattgcttggacttctaaaacatctgttgcttatgtaacaccaggagactcagaaacagcacccgtagttactgtgacccacagaaattattatgaacggatacatgccttaggtccgaactacaatctggtcattagcgatctgaggatggaagacgcaggagactacaaagcagacataaatacacaggctgatccctacaccaccaccaagcgctacaacctgcaaatctatcgtcggcttgggaaaccaaaaattacacagagtttaatggcatctgtgaacagcacctgtaatgtcacactgacatgctctgtagagaaagaagaaaagaatgtgacatacaattggagtcccctgggagaagagggtaatgtccttcaaatcttccagactcctgaggaccaagagctgacttacacgtgtacagcccagaaccctgtcagcaacaattctgactccatctctgcccggcagctctgtgcagacatcgcaatgggcttccgtactcaccacaccgggttgctgagcgtgctggctatgttctttctgcttgttctcattctgtcttcagtgtttttgttccgtttgttcaagagaagacaaggtgcttccctccaaggaagagccagtgaacacagtttattccgaagtgcagtttgctgataagatggggaaagccagcacacaggacagtaaacctcctgggacttcaagctatgaaattgtgatctaggctgctggg

SEQ ID NO: 71818 - protein, 214 aa, Artificial Sequence
  derived and/or modified sequence
MAQHHLWILLLCLQTCRLGKPKITQSLMASVNSTCNVTLTCSVEKEEKNVTYNWSPLGEEGNVLQIFQTPEDQELTYTCTAQNPVSNNSDSISARQLCADIAMGFRTHHTGLLSVLAMFFLLVLILSSVFLFRLFKRRQDAASKKTIYTYIMASRNTQPAESRIYDEILQSKVLPSKEEPVNTVYSEVQFADKMGKASTQDSKPPGTSSYEIVI

SEQ ID NO: 71819 - DNA, 645 bp, Artificial Sequence
  derived and/or modified sequence
atggcccagcaccacctgtggatcctgctgctgtgcctgcagacctgcagactgggcaagcccaagatcacccagagcctgatggccagcgtgaacagcacctgcaacgtgaccctgacctgcagcgtggagaaggaggagaagaacgtgacctacaactggagccccctgggcgaggagggcaacgtgctgcagatcttccagacccccgaggaccaggagctgacctacacctgcaccgcccagaaccccgtgagcaacaacagcgacagcatcagcgccagacagctgtgcgccgacatcgccatgggcttcagaacccaccacaccggcctgctgagcgtgctggccatgttcttcctgctggtgctgatcctgagcagcgtgttcctgttcagactgttcaagagaagacaggacgccgccagcaagaagaccatctacacctacatcatggccagcagaaacacccagcccgccgagagcagaatctacgacgagatcctgcagagcaaggtgctgcccagcaaggaggagcccgtgaacaccgtgtacagcgaggtgcagttcgccgacaagatgggcaaggccagcacccaggacagcaagccccccggcaccagcagctacgagatcgtgatctag

SEQ ID NO: 71820 - DNA, 645 bp, Artificial Sequence
  derived and/or modified sequence
atggctcaacatcacctgtggatccttctgctatgcctacaaacctgtagactgggcaagccaaagatcactcagagcctgatggcaagcgtgaactccacttgcaatgtgaccctcacgtgttccgttgaaaaagaggagaaaaacgtgacatacaactggtcgccgctcggagaggagggtaacgttctgcagatcttccaaaccccggaggaccaggagctgacatacacgtgtacagcgcagaaccccgtaagcaacaacagcgacagcatcagcgccagacagctttgtgcagacatcgctatgggcttccgcacacaccataccggcctgctttctgtactagccatgttctttcttctggtactcatcttatcaagcgtatttttatttcgtctctttaagaggcggcaggatgcggcatccaaaaagactatctatacatacattatggctagtagaaatacccagccagctgagtcccgtatttatgacgagatcctgcagtcaaaggtcttaccttcgaaggaggagccagtgaatactgtctactctgaggttcagtttgccgataaaatgggcaaggcctctacacaggattccaaacccccaggtacatctagctacgagatcgtcatttag

SEQ ID NO: 71821 - DNA, 645 bp, Artificial Sequence
  derived and/or modified sequence
atggcccagcaccacctgtggatcctgctgctgtgcctgcagacctgccgcctgggcaagcccaagatcacccagagcctgatggcctctgtgaacagcacctgcaatgtgaccctgacctgcagcgtggagaaggaggagaagaatgtgacctacaactggagccccctgggggaggagggcaatgtgctgcagatcttccagaccccagaggaccaggagctgacctacacctgcacagcccagaaccctgtgagcaacaacagcgacagcatcagcgcccggcagctgtgtgccgacatcgccatgggcttccgcacccaccacacaggcctgctgtctgtgctggccatgttcttcctgctggtgctgatcctgagcagcgtcttcctgttccgcctcttcaagaggcggcaggatgctgccagcaagaagaccatctacacctacatcatggccagcaggaacacccagcctgctgagagccgcatctatgatgagatcctgcagagcaaggtgctgcccagcaaggaggagcctgtgaacacagtgtacagcgaggtgcagtttgctgacaagatgggcaaggccagcacccaggacagcaagcccccaggcaccagcagctatgagatcgtcatctag

SEQ ID NO: 71822 - DNA, 645 bp, Artificial Sequence
  derived and/or modified sequence
atggcccagcaccacctgtggatcctgctgctgtgcctgcagacctgcagactgggcaagccaaagatcacacagtcactgatggccagtgtaaactctacctgtaacgtgacgttaacctgttctgtggagaaagaagagaagaatgtaacctataattggtccccactaggggaggagggcaacgtgctacagatttttcagacaccagaagaccaggagctaacatatacatgcacggctcagaaccctgtcagtaataactccgattccatttccgcccggcagctctgcgctgacatcgctatgggctttcgcactcatcatacaggtcttctttctgtgctcgctatgttttttctcctggtgctgatcttgtccagtgtattcctatttcgactctttaagcggcggcaggatgctgcaagcaagaagaccatctacacgtacatcatggcgtcacggaatacccaaccagccgaatcgagaatctatgacgaaattctccagagtaaagtgctgccgtccaaggaggagccagtcaatactgtgtactctgaagtacagtttgcagataagatgggaaaggcctcaacccaggattccaaaccacctggcacgtctagttatgaaattgtgatttag

SEQ ID NO: 71823 - DNA, 645 bp, Artificial Sequence
  derived and/or modified sequence
atggcgcagcatcacctctggatccttctgctgtgtttgcagacctgtcgtctggggaaacccaagatcacccagagcctgatggcttcggtgaatagcacctgtaacgtgacactgacatgcagcgtcgagaaggaggaaaaaaacgtgacttacaactggagccctctcggggaagagggtaacgtattacagatttttcagaccccagaggaccaggagctgacatatacatgtacggcccagaatcctgtgagtaacaattccgacagtattagcgcccgtcagctctgtgctgacattgcgatgggtttcaggactcaccatacaggcttgttgtccgtgctggccatgttctttctgttggttctgatactgtcctcagtttttcttttccgcctgttcaagcgcaggcaggacgccgctagtaaaaaaactatttacacatacatcatggcgtccaggaacacacaacccgcagaaagccggatttacgacgagatcttgcagagcaaagtactcccctccaaagaagaaccggtaaataccgtttattctgaagtgcagtttgctgataaaatgggaaaggcatctacgcaggactctaagcccccaggcaccagctcatacgagattgtcatctag

SEQ ID NO: 71824 - DNA, 7885 bp, Artificial Sequence
  derived and/or modified sequence
ggaggaagaaaactcaagtgaaactgactctgctagaacagtgccgtgcttttccacagaaggttagaccctgaaagagatggctcagcaccacctatggatcttgctcctttgcctgcaaacctgtcggcttgggaaaccaaaaattacacagagtttaatggcatctgtgaacagcacctgtaatgtcacactgacatgctctgtagagaaagaagaaaagaatgtgacatacaattggagtcccctgggagaagagggtaatgtccttcaaatcttccagactcctgaggaccaagagctgacttacacgtgtacagcccagaaccctgtcagcaacaattctgactccatctctgcccggcagctctgtgcagacatcgcaatgggcttccgtactcaccacaccgggttgctgagcgtgctggctatgttctttctgcttgttctcattctgtcttcagtgtttttgttccgtttgttcaagagaagacaagatgctgcctcaaagaaaaccatatacacatatatcatggcttcaaggaacacccagccagcagagtccagaatctatgatgaaatcctgcagtccaaggtgcttccctccaaggaagagccagtgaacacagtttattccgaagtgcagtttgctgataagatggggaaagccagcacacaggacagtaaacctcctgggacttcaagctatgaaattgtgatctaggctgctgggctgaattctccctctggaaactgagttacaaccaccaatactggcaggttccctggatccagatcttctctgcccaactcttactgggagattgcaaactgccacatctcagcctgtaagcaaagcaggaaaccttctgctgggcatagcttgtgcctaaatggacaaatggatgcatacccttcctgaaatgactcccttctgaatgaatgacaaagcaggttacctagtatagttttcccaaacttcttcccatcatagcacatgtagaaaataatatttttatggcacactgggataaacaagcaagattgctcacttctggaagctgcatatgactagaggcctcttgtgactggaggtaacaaccctgcccagtaactgtgggagaaggggatcaatattttgcacacctgtaataggccatggcacaccagccaagatgctctgctcacagtcagtatgtgtgaagatccctggtgcgtggccttcaccacgcatcttgagcaaattaggaaaatgtacccttcgcttgaggcagatgcagcccttcccccgagtgcatggcttggagagcagaatgtgggctgcatataagcacactcatccctttgtctgggaatctttgtgcagggcataacaggcttagtaagtccaaacacagatgacagtgctgtgtgggtctctgtcagagttgtggctctcagccatgtagacacactctccaaatggagtgttggaaaatgttctttctgcagggtctagagactgctgggacacttttcttggagtgctacttcagaagccttataggattttctttctggccaagatttccttctgtatcactccaagcagcctcagcagaagaagcagccatgcccagtattcccactctccaaaaggaactgaccagcttatatttctcacacttctggggaactgggtataatccaaccatcaaaatagaagaccttgcaagaagcagagtcattctccagaaggaacttgggagatgatggtgcagatgatgaaactgggttcatcccagttccaaagactcagagaactagagtttaagctgaggcagagtgccgccaccctggcatgccccacaaacagatcaccagccagcttacacaggcattaactctcctcaatgaggaagaatcattcacaactgagcaagacattcatatgatcatttaaggaagtgtttcccttatgtgttagcaagtataatcggctaactcctaaatcccaatgaatagtcctaggctggacagcaatgggctgcaattaggcagataaagacatcagtcccagtaaatgaatccatagactcatctagcaccaactaccattagcactatgttaggagctgcaaggccccaaagtagaagatgtgcataatgtctgctcttgtgtagctcaggagacaattccagcacagacactacagttaacgctgaactgcagctgcaagtaatagcatgaacagtcagaaaaataccttatgagggggcagggctgaagctgggccttgaaggatggatgaaatttggatagagaatgaggaagacagagggcctccaagtgagagaagcatgaaaaatgagcaggggcctggatcagtggggtgtattcagagcacctctccagatgcaccatgcatgctcacagtcccttgcctatgtgtggcagagtgtcccagccagatgtgtgccctcaccccatgtccatttacatgtccttcaatgcccacctcaaaaggtacctcttctgtaaagctttccctggtatcaggaatcaaaattaatcagggatcttttcacactgctgttttttcctctttggtccttctatcactaaaactcatctcattcagccttacagcataactaattatttgttttcctcactacattgtacatgtgggaattacagataaacggaagccggctggggtggtggctcacgcctgtaatcccaacactttgggaggccaaggcaggcggatcacctgaggtcaggagttcgagattagtctggccaacatggtgaaaccccatctctactaaaaatacgaaattagccaggtgtggtggcacacatctgtagtcccagctactctggaggctgagacaggagaatcgcttgaacccaggaagtggaggttgcagtgagctgagatcacaccactgcactccagcctgggagagacagagtgagactccatctcgaaaaaaaaaaaaagatagaagccaataagcatggtgcaatcaaattctggcaagcattaaatatcaggatgcagctgggcacggtggctcacgcctgtaatcccagcactttgggaggccaaggtgggcggatcacttgaggtcaggaatttgagaggatcctggccagcatggcaaaaccccatctgtacttaaaatacaaaaaaattagctgggcgtggtggtgcacacctgtaatcccagctacttgggaggctgaggtgggagaattgcttgaacctgggaggtggaggttgcagtgagctgagatcctgccactgcactccaggctgggcaacagagtgagaccatgtctcaaaaaataaaaataaaataaaataatatcaggatgcatacatcagaggctgttcctagtgtaaaggcactttggagggagaagactttcagagttaggcagaccaactaagaggtcagctgaagcacctaaccagttgtaaggaggtgaaagacagcaccccaagaagagacgtgcaggaaggaggaaagaggcttggtcataaaggatggaggaattccaaagtgacactgaacaggctgcgtttatcctaaaataaaaccactcctcactctgtggatgcgttgaagactcattcccaaacatctttattctctaacttgccctcttcctcttcctaatatgctcactcaagtaaaattactagtgtcctaatgcccctatgcatattgtcaaaaataaaaatcagaagcaggttagatctgttaggtcttccagaagagcaaacctgggatgaagccagagcccaggaattctgaaggtagcctttggactcaggacaccctactcttgtctctcctctcagtttctctgctatgaatctcctgattcatgaacacgttatctgttcacccttctctctaggtcttagttcttagattttccttctgtaaaatgcatgtgatcttattttcccctccacaactttccagatgaactagactgtgaccaagaggtctataaaatcaaagcatcatggaacaggatcttgtatcagaccaaagtgtgccagtttttaaaaatgtgcatcaaaatggaagtctcagagacagagccctctggtggaaagttctagtaggttaggacagtcctgcctgcagacaccttgggctttactgagggactcaactgagaaaatgaggaatgttgcagctcatgattcttagaagaagaaagtgaagcttgtttaaaatatgatttaaaaaatctgtagaacactgtaaactacacaggctatgagggaatagcctggttgggccagcttggaaatcgggcacaggcaggaaggggcctgtctggtttgggccgtgtccacagagagcacttcttaggtcctgcctggagagaaggaatggctgggctatattttcttccagactcattatttttcttctgtttgacttttctctgaatttcccttgatttgtataaattttctcaataattagtgacagtgtctactgattgtaaaatgaagcttgaaggccaggcgcagtggctcatgcctgtaatcctagaattttgggaggccaaggtgggtggatcacaaggagttcgagaccagcctggccaaggttgtgaaaccgcgtctctactaaaaatacaaaaaaattagccgggcatggtggcacgtgcctgtagtcccagctactcaggaagctgaggcaacagaatcacttgaacctgggaggtggaggttgcagtgagccgagatcacgccactgcactccagcctgggcgagagagtgagactccgtctcaaaaaaaaaaaaaaaaaaaaaagtttgaagaacaaagacaataagaggaaatataatgagtggtcataaatgtgggctctgacagtagagtgcctgggtctgcatcctggtttcttagtcatgtgaccttaggcaagttactttaacctcgctgtacctcaggttgtccatctgtaaaatggggataataatagtgcctaccttttaaggttgatgtggggattaaatgaggtgttgctcatacaggaatgtgcctgtgcatggcaaagttcgggaaattttttataagctgttctaggcctgaaatcttcagaagatgctaatctaaattcatgaaataagcttcttacaacagaaatgctgctagtattatgcaaaattaatgttgtatatcaaacttttaactctcatccctccttattcagatatattttgttataagcaatgtttgttcccctcgttattataccacagtctacttacctgatgctatatctgcctccccagttagactgagagaacaggggatatacctaaataataataataataataataataataaataataatggagagctccttgaagatagggagcctgtaagaatcattgagggcttattttgtataccaactgctaaactagatgcttcatacattgttgtcaatactcatgacagccttgtaaagtagaaattaattcttccagttaacactaaggctgacatatgaataccttggcaaatctggaaagctgggaagacagtatttgaattcaagacttcttgtcaccaagggccatgcacttgtactctgccatgtggcccttttttacctcctgtggattctccctacctggtacttggccttaggtgtacacacacctggcactttgcttgacacataataggtggaccacaaatatctactaaatgaatatttgcatatagtaatattttaaggtactaaaagcagctcaaagtaaatatattaatatattaattccattgctatctggataaccactcaactttcctgctgaaaatgcccatttaattaaagaaggttggatagagctctctatatgcattttggacaggcaggggtttcaggtcataaacattctgatgagttaatataaaataagagaaactgtaaatttccactactaaaaatcacaaaaataacagaaacaaaagaagagataagaatttggggaattgtgctgaacaatttagtggttaaaaaaaacaactgtgcatgtttagacttaaataagcccccatccaagtgtgaggggtccagtaatttttcaaaacatatgaaagtgttaatacatttcgacaaaggaccattaaaaaagtcctgaattctgacttgagggaggaaagtaatgactaatacattctctagagacttgcagactttgggaattcataaaggaatggatgataattattaactgttgctggctgattgcccagacagttctcaacagccctgtacaagtctctgggtttgggatggatcaattctgagactggaaaatggccaaatctttgcaaatgagaaatatttttcttataagttcttattgtaggcaaataattacatagattattcatcagagaatttttaaatgctcataatctcaactctttcatttacaacttgtatttccaatagtttatgggtcatctctgcatagatgtcagaagtcacctcaagtttagcgtgtccaaaatctaactcacaggtctgtttctgacctcccaacttgctttccttgtgtttttcctatgctaatgatccaccataatcaaaataattaacatttatccagtgcctactatgtactattccctgtcctgttttacatttactcatttaaagtccataagaaacattaaatctcatctgccttctgaagaagatacaaccatgctctcttttacaaagtaggaaactgggtcacagaaaggtgaagtctttaaggctgaatcacagtagctcatcctagtaaatagaaaagccaggattcaactccaggggctgggtgcagaactgctattcttcactgcttcaccaatcagcagctacccaaggcagaaaactttttcatccttggctccttcattctccctgtcaccccagatcccctctacatctagtcagagaataggtcctgtcaattccaacttctctatatggctcctctcaggcatgtgcccttaattggcctaattctctaatacaccttccctctacatgctcactccctcagatcattgctttatcacgtgttacctgggttgctattacataaagagcaatctttctaaaatgaggatcttatcacttcacttccacactaaaatgtttttcctggggaaccacactccttagcaatctgacccatcagaccttccaggctgtctcctgcctgctccctaaggctccagccacacagaattatcatgggcccacacacccaccaaatcctcccatgcctttgcccatgttgtctgggatgcccttctctcccttctgtctacatcaagcatcagactgaatatccctcttgtgcggccttctaaaacctcccgtccaaagcgaaatatattgccctctatttatacttttacagcatttggcacacaagtacagagtagtagctttttatcacattctctgataattatatagatatggtatttcttagctctctctccaactggctaataagttgctttttgtctgagtgcctaattttgtgttttgtgtctgagtgcctcagttcctcaaaaaaaggttttttgattagttcattattcatttgaacatggaaattatgctcactagtggcaaatgccactaaccgtattccagaagctaggtgtcatgtttgcaataagatatattatcccttctacaagtcaccttttatttcaggcatttgtaaatgcccattaataaagtatggttcataaattttaccttgtaagtgcctaagaaatgagactacaagctccatttcagcaggacacaataaatattattttataatgcatct

SEQ ID NO: 71825 - protein, 1167 aa, Artificial Sequence
  derived and/or modified sequence
MAGAQPGVHALQLEPPTVVETLRRGSKFIKWDEEKLMTVVSGPDPVNTVFLNFMAVQDDTAKVWSEELFKLAMNILAQNASRNTFLRKAYTKLKLQVNQDGRIPVKNILKMFSADKKRVETALESCGLKFNRSESIRPDEFSLEIFERFLNKLCLRPDIDKILLEIGAKGKPYLTLEQLMDFINQKQRDPRLNEVLYPPLRPSQARLLIEKYEPNQQFLERDQMSMEGFSRYLGGEENGILPLEALDLSTDMTQPLSAYFINSSHNTYLTAGQLAGTSSVEMYRQALLWGCRCVELDVWKGRPPEEEPFITHGFTMTTEVPLRDVLEAIAETAFKTSPYPVILSFENHVDSAKQQAKMAEYCRSIFGDALLIEPLDKYPLAPGVPLPSPQDLMGRILVKNKKRHRPSAGGPDSAGRKRPLEQSNSALSESSAATEPSSPQLGSPSSDSCPGLSNGEEVGLEKPSLEPQKSLGDEGLNRGPYVLGPADREDEEEDEEEEEQTDPKKPTTDEGTASSEVNATEEMSTLVNYIEPVKFKSFEAARKRNKCFEMSSFVETKAMEQLTKSPMEFVEYNKQQLSRIYPKGTRVDSSNYMPQLFWNVGCQLVALNFQTLDVAMQLNAGVFEYNGRSGYLLKPEFMRRPDKSFDPFTEVIVDGIVANALRVKVISGQFLSDRKVGIYVEVDMFGLPVDTRRKYRTRTSQGNSFNPVWDEEPFDFPKVVLPTLASLRIAAFEEGGKFVGHRILPVSAIRSGYHYVCLRNEANQPLCLPALLIYTEASDYIPDDHQDYAEALINPIKHVSLMDQRARQLAALIGESEAQAGQETCQDTQSQQLGSQPSSNPTPSPLDASPRRPPGPTTSPASTSLSSPGQRDDLIASILSEVAPTPLDELRGHKALVKLRSRQERDLRELRKKHQRKAVTLTRRLLDGLAQAQAEGRCRLRPGALGGAADVEDTKEGEDEAKRYQEFQNRQVQSLLELREAQVDAEAQRRLEHLRQALQRLREVVLDANTTQFKRLKEMNEREKKELQKILDRKRHNSISEAKMRDKHKKEAELTEINRRHITESVNSIRRLEEAQKQRHDRLVAGQQQVLQQLAEEEPKLLAQLAQECQEQRARLPQEIRRSLLGEMPEGLGDGPLVACASNGHAPGSSGHLSGADSESQEENTQL

SEQ ID NO: 71826 - DNA, 3504 bp, Artificial Sequence
  derived and/or modified sequence
atggccggcgcccagcctggcgtgcacgccctccaactcgagccccctacggttgttgaaactcttaggcgcggtagtaaatttatcaaatgggacgaagagaaattaatgacagtggttagcggtcctgaccctgtaaacacagtctttctcaactttatggctgttcaggacgacactgcaaaggtctggtctgaggaactctttaagcttgccatgaatatcttagcacagaacgcatcaagaaatacttttctacgtaaggcttatacgaagctgaagctgcaggtgaaccaggacggtaggatccccgtgaaaaatatcttgaaaatgttttctgccgacaaaaaacgcgtagaaaccgctctcgaatcttgtggactgaaatttaacagaagtgagtccattaggcctgacgaattctctctggagattttcgaaagatttctcaacaaactgtgcttgcggcccgatatcgacaaaatactcctggaaatcggagccaaaggaaagccatatcttacattagagcagctgatggactttatcaaccagaaacagcgtgatccccgcttaaatgaggtcctgtacccacctttgaggccctcgcaggcaaggctccttatcgagaaatacgagcccaaccagcagttcctggagagagaccagatgtccatggagggattctccagatatctgggtggggaggagaacggcatcctgccattagaagccctcgatctgtccactgatatgactcagccactttccgcttacttcatcaattcgagccacaatacctacttaacagccggccaactggcgggcacctcttcggtggagatgtaccggcaggctctgctatggggctgccgctgcgttgaactcgacgtatggaaagggcgaccccctgaagaggaaccgtttattacccacgggtttaccatgacgaccgaggtacccttacgagacgtactcgaggctatcgcagaaaccgcctttaagaccagcccctaccctgtgatacttagtttcgaaaaccacgtcgactctgcgaaacaacaggctaagatggctgaatattgcagatccattttcggagacgccctcttgatcgaacccctagataagtatcctctggcccccggagtgccactgccgagtccgcaagacctgatgggtagaatccttgtgaagaacaagaagagacatagaccctccgctggcggtccagacagcgccggacgcaagaggcctcttgagcaatcgaactccgcactgtcagagtcatcagcagctacggagccctcctctccccagctcggcagcccatccagcgactcttgtccgggactatcgaatggtgaagaagtgggattggagaagcctagcttggaaccacagaaatctcttggagatgaagggcttaacagaggcccatatgttctgggacctgcagatcgggaggatgaagaagaggacgaggaggaggaggagcagacggaccctaaaaaacccacaacggatgaaggcactgctagtagtgaggtgaacgccaccgaagagatgagtaccctggtgaactacattgagcccgtgaaattcaaatccttcgaggcagcccgcaagaggaataagtgttttgaaatgtcttccttcgtggaaacaaaagcaatggagcaactgacaaagtctcccatggagtttgtggagtataacaagcaacaacttagtcggatttacccaaaaggcactagggtcgactcctcgaattacatgccacagctcttctggaatgtgggatgtcagttagtggctctaaacttccaaacactggatgtggctatgcagttgaacgccggcgtttttgagtataacggccgttctggatatttactgaagcctgagttcatgcggcggcccgataaaagtttcgaccctttcaccgaagtcatcgtcgacggaattgtcgccaatgccttgcgggtgaaagtgatatccggccagtttctgtcggaccgcaaagtggggatttatgtcgaggtggacatgtttggactgcccgtggacaccaggcggaagtatagaacccgcacctcacagggaaacagcttcaacccagtatgggatgaagagcccttcgactttccaaaggttgtacttccaacactggcgtcactccggatcgcggcctttgaggagggcggcaaatttgtcggtcaccgaatactcccagtaagtgctatcagatcaggttatcactatgtatgtctacgtaacgaggccaaccagccactttgcctccccgcacttctcatctacacagaggcctccgattacataccagacgatcaccaggactatgcggaggccctcatcaacccgattaaacacgtgtcgctaatggaccagagggccaggcaattggctgcgctgattggggagtccgaggcccaagcagggcaggagacgtgccaagatacccagagtcagcagctcgggtcccagccatcaagtaacccgacgcctagcccactagatgcctcccctagaagacccccaggacctaccaccagtccagcttctacttctctgtcctcaccagggcagagagacgacttgattgcgagcatcctgtcagaggtggcccccacaccactggacgaattgcgcggccataaagctctggtgaaactcaggtcacgccaggagcgggatctgcgcgaactgaggaagaagcaccagcgtaaagccgtgactctgaccaggcgtctcctggacggactcgcgcaggcgcaagcagaagggcgatgccggctaagaccaggcgccctgggaggcgcagccgatgtggaagacaccaaggaaggtgaggatgaagctaaacgctatcaagagtttcagaataggcaggtgcaatcccttcttgagttgcgtgaagctcaggtcgatgctgaggcccagcgaaggctggaacatttgagacaggcgttgcagagactgcgagaggttgtcctggacgcgaataccacccagttcaaacggttgaaagaaatgaacgagagagagaagaaggagctgcagaagatcttggatcgcaaacgccacaacagtataagtgaggcaaagatgagagataaacacaaaaaagaggccgaacttaccgagatcaatcggcgacacatcaccgaatccgtcaatagcatccgacgactagaggaagcccagaaacaaaggcatgatcgcctggtggctggccagcagcaggtcctgcagcaactggctgaagaagagccgaagctgttggcccaactcgcgcaggagtgtcaggagcagagagctcggttaccccaggaaatccgtcgttcattgctcggcgaaatgcctgaaggcctgggcgatggccctcttgtcgcctgcgcaagcaacgggcacgcccccggatctagtggtcacctatccggtgctgactccgaatctcaggaagagaacactcaactgtag

SEQ ID NO: 71827 - DNA, 3504 bp, Artificial Sequence
  derived and/or modified sequence
atggccggggcccagcccggggtgcacgccctgcagctggagcccccaacagtggtggagaccctgcggcggggcagcaagttcatcaagtgggatgaggagaagctgatgacagtggtgtctggccctgaccctgtgaacacagtgttcctgaacttcatggctgtgcaggatgacacagccaaggtgtggagcgaggagctgttcaagctggccatgaacatcctggcccagaatgccagcaggaacaccttcctgaggaaggcctacaccaagctgaagctgcaggtgaaccaggacggccgcatccctgtgaagaacatcctgaagatgttttctgctgacaagaagagggtggagacagccctggagagctgtggcctgaagttcaacagaagtgagagcatccggccagatgagttcagcctggagatctttgagcgcttcctgaacaagctgtgcctgcggccagacatcgacaagatcctgctggagatcggggccaagggcaagccctacctgaccctggagcagctgatggacttcatcaaccagaagcagagggacccccggctgaatgaggtgctgtacccacccctgcggcccagccaggcccggctgctgattgagaagtatgagcccaaccagcagttcctggagcgggaccagatgtccatggagggcttcagccgctacctgggcggggaggagaatggcatcctgcccctggaggccctggacctgagcacagacatgacccagcccctgagcgcctacttcatcaacagcagccacaacacctacctgacagctggccagctggccggcaccagctctgtggagatgtaccggcaggccctgctgtggggctgccgctgtgtggagctggatgtgtggaagggccggcccccagaggaggagcccttcatcacccacggcttcaccatgaccacagaggtgcccctgagagatgtgctggaggccatcgccgagacagccttcaagaccagcccctaccctgtgatcctgagctttgagaaccacgtggacagcgccaagcagcaggccaagatggccgagtactgccgcagcatctttggagatgccctgctgattgagcccctggacaagtaccccctggcccctggggtgcccctgcccagcccccaggacctgatgggccgcatcctggtgaagaacaagaagaggcaccggcccagcgctgggggcccagattctgctggcaggaagaggcccctggagcagagcaacagcgccctgtctgagagcagcgctgccacagagcccagcagcccccagctgggcagccccagcagtgacagctgccccggcctgagcaatggagaggaggtgggcctggagaagcccagcctggagccccagaagagcctgggagatgagggcctgaacagaggcccctacgtgctgggccctgctgacagagaagatgaggaggaggatgaggaggaggaggagcagacagaccccaagaagcccaccacagatgagggcacagccagcagcgaggtgaatgccacagaggagatgagcaccctggtgaactacatcgagcctgtgaagttcaagagctttgaggccgccaggaagaggaacaagtgctttgagatgagcagctttgtggagaccaaggccatggagcagctgaccaagagccccatggagtttgtggagtacaacaagcagcagctgagccgcatctaccccaagggcaccagggtggacagcagcaactacatgccccagctgttctggaatgtgggctgccagctggtggccctgaacttccagaccctggatgtggccatgcagctgaatgctggggtgtttgagtacaacggccgcagcggctacctgctgaagccagagttcatgagaagaccagacaagagctttgaccccttcacagaggtgattgtggatggcatcgtggccaatgccctgcgggtgaaggtgatcagcggccagttcctgagtgacaggaaggtgggcatctacgtggaggtggacatgtttggcctgcctgtggacaccaggaggaagtaccgcaccaggaccagccagggcaacagcttcaaccctgtgtgggatgaggagccctttgacttccccaaggtggtgctgcccaccctggccagcctgagaattgctgcctttgaggagggcggcaagtttgtgggccaccgcatcctgcctgtgtctgccatccgcagcggctaccactacgtgtgcctgagaaatgaggccaaccagcccctgtgcctgcctgccctgctgatctacacagaggccagtgactacatcccagatgaccaccaggactatgcagaggccctgatcaaccccatcaagcacgtgtccctgatggaccagagggcccggcagctggccgccctgattggagagagcgaggcccaggccggccaggagacctgccaggacacccagagccagcagctgggcagccagcccagcagcaaccccacccccagccccctggatgccagccccaggaggcctcctggccccaccaccagccctgccagcaccagcctgagcagccctggccagagagatgacctgattgccagcatcctgtctgaggtggcccccacccccctggatgagctgcggggccacaaggccctggtgaagctgcggagccggcaggagcgggacctgcgggagctgaggaagaagcaccagaggaaggctgtgaccctgacccggcggctgctggatggcctggcccaggcccaggccgagggccgctgccgcctgcggcctggggccctgggcggcgctgctgatgtggaggacaccaaggagggggaggatgaggccaagcgctaccaggagttccagaaccggcaggtgcagagcctgctggagctgcgggaggcccaggtggatgctgaggcccagaggcggctggagcacctgcggcaggccctgcagaggctgcgggaggtggtgctggatgccaacaccacccagttcaagaggctgaaggagatgaatgaaagagagaagaaggagctgcagaagatcctggacaggaagaggcacaacagcatcagcgaggccaagatgagggacaagcacaagaaggaggccgagctgacagagatcaacagaagacacatcacagaatctgtgaacagcatccggcggctggaggaggcccagaagcagagacatgaccggctggtggccggccagcagcaggtgctgcagcagctggccgaggaggagcccaagctgctggcccagctggcccaggagtgccaggagcagagggcccggctgccccaggagatcagaagaagcctgctgggggagatgcctgagggcctgggagatggccccctggtggcctgtgccagcaatggacatgcccctggcagcagcggccacctgagcggggctgacagcgagagccaggaggagaacacccagctgtag

SEQ ID NO: 71828 - DNA, 3504 bp, Artificial Sequence
  derived and/or modified sequence
atggccggcgcccagcccggcgtgcacgccctgcagctggagcccccgacagttgtcgagactctgaggcggggatcaaaatttattaagtgggacgaagaaaaactgatgactgtggtcagcgggcctgacccagtgaataccgtattcctgaatttcatggctgtgcaggacgataccgctaaagtgtggtctgaggaattgttcaagctcgccatgaatatcctggcccagaatgcgagtcggaacactttcctaagaaaggcttacactaagctgaagttacaagtgaatcaggatgggcgcatccctgttaagaatatcctgaaaatgttctcagctgataagaaacgagtcgagactgccttggagagctgcggcttgaagttcaaccgaagtgaaagcatcaggcccgatgagtttagcctggagatctttgagcggttcttaaacaagttgtgcctccgacccgacatcgataaaatactgttggagatcggggcaaagggtaaaccctatttaaccttagagcagcttatggactttataaaccagaaacagcgcgaccctcgcctcaatgaagttctataccctccgttacggccaagtcaggcacggctcctaattgagaaatacgagcctaatcaacagtttctagagagggaccagatgtccatggaaggattttccagatacctcggcggagaggagaacgggatcctgcctcttgaagcgctggatctctccaccgacatgactcagcccctctctgcctacttcataaattcctcacacaacacttatctgacagctgggcagttagctggcacatcatccgtggaaatgtatcggcaagccctattatgggggtgccgatgcgtcgaattagacgtgtggaagggacgacctccagaggaggagccattcatcactcacggctttaccatgaccaccgaagtcccactgagggatgtcctggaagcgatcgccgaaaccgcattcaaaacctcaccataccccgtgatcctctccttcgaaaaccatgtggacagcgcgaagcagcaggctaagatggccgagtactgtcggagcattttcggcgacgctctgcttatcgaacccctagacaaatacccgttagctcccggcgtgcccctccctagtccccaagatcttatgggacggattctggtcaagaataagaagagacatcgaccttccgctggaggccctgactccgcaggtcggaagaggccgctcgaacagtcaaatagcgccctctcggagagttccgccgccaccgaacccagctcccctcagctgggtagtccaagttccgattcctgccctggactgtctaatggggaggaagttggcctggaaaaaccaagtctggagcctcagaagtcattaggcgacgaaggtcttaaccgcggaccttatgttctgggcccagctgatcgggaggacgaggaagaggacgaggaggaggaggagcagaccgatcccaaaaaacctactactgacgagggcacagcgtcatccgaagtgaacgccacggaagaaatgagcaccctggtaaattacattgaacctgtgaaattcaagagcttcgaagcagcaaggaagcgcaataaatgttttgaaatgagcagtttcgtagaaactaaggccatggaacagctgacaaagtcccccatggagttcgtcgagtataacaagcagcaacttagccggatataccccaagggcactagggtcgactcgtccaattacatgcctcagctcttttggaacgtcgggtgccagctggtagccctgaacttccagactctcgatgtggcaatgcaattgaacgccggtgtattcgagtacaacggcaggtctggctatctgctgaaacccgagttcatgcgccgtccggataagtcatttgacccgtttaccgaagtaatcgtcgatggcatagtggccaatgcactcagagttaaagtgatttctgggcagttcctcagcgatagaaaggtcggcatctacgtggaggtggacatgtttggcctgcccgtggacacaaggaggaaataccgtactaggaccagccagggaaactcctttaaccccgtatgggacgaagagccctttgatttccctaaggttgtcctacccactcttgcaagcttgcgcatagccgccttcgaagaggggggtaagtttgtaggccatcgcatactgcctgtttccgccattagatctggctatcactacgtctgtctccgaaacgaagccaaccaaccactgtgtctgccagctctgcttatctacaccgaagccagcgactatatcccggacgaccatcaggattacgcggaggcattaattaatcccattaagcacgtgagtttgatggatcagcgcgcaagacaacttgcagcccttattggagaatctgaagcccaagccggccaagaaacctgtcaggacacccagtcccaacagctcggatcgcagccttcctctaatcctacacccagtcccctagacgccagccccagacgtccaccgggaccaacaaccagccccgccagcacttctctgagctcccccggccaaagggatgatttgatcgcatcaatactcagcgaagttgcccctaccccacttgatgagttgcgtggccacaaggcgctagtaaaactcagaagcagacaggagcgtgaccttcgagagctgagaaaaaagcaccagcggaaggcagtcacattgacgaggaggctgctcgatggcctcgcccaggcgcaagcagagggccgctgtcgcctacgcccgggagcactcgggggagccgctgacgttgaggataccaaggaaggagaggatgaagctaagaggtatcaagaattccagaaccgtcaagtgcagtctctactggaactccgagaggcccaggttgatgctgaggctcaacgaaggcttgagcatctcagacaggccctgcagagacttcgcgaggtggtcctggacgcaaacacaacccagttcaaaagactgaaggaaatgaacgaaagggaaaaaaaggagctacagaaaatcctcgaccggaaacggcacaatagcatttccgaagccaagatgagggacaagcacaagaaagaagccgaattgacggagatcaacagaagacatattaccgagagtgttaatagcattagacgtctcgaagaagcgcagaagcagaggcacgatcgcctggtcgccgggcaacagcaggtgcttcagcagcttgccgaggaggagccaaagctactggcccaactggctcaggaatgccaggaacaacgcgcgcgtctgcctcaagagatcagaaggtctctcttaggcgagatgcctgaaggcttgggagatggcccccttgtcgcttgcgccagtaatggacatgcccccggatcaagtggccatctgtcaggcgctgacagcgagagccaggaggagaatacccagctgtag

SEQ ID NO: 71829 - DNA, 3946 bp, Artificial Sequence
  derived and/or modified sequence
ccgcgcggtgggagcagcggcgccgtcggtccccgtcagggctccgtgggtccccgacccgcccctggccgggccatggcgggcgcccagcccggcgtccacgcgctgcagttggagccgcccaccgtggtggagaccctgcggcgcgggagtaagttcatcaaatgggacgaggagaagctgatgacggtggtgtctgggccagacccagtgaacacagtgttcttgaacttcatggccgtgcaggatgacacagccaaggtctggtctgaggagctattcaagctggctatgaacatcctggctcagaacgcctcccggaacaccttcctgcgcaaagcatacacgaagctgaagctgcaggtgaaccaggatggtcggatccccgtcaagaacatcctgaagatgttctcagcagacaagaagcgggtggagactgcgctggaatcctgtggcctcaaattcaaccggagtgagtccatccggcctgatgagttttccttggaaatctttgagcggttcctgaacaagctgtgtctgcggccggacattgacaagatcctgctggagataggcgccaagggcaagccatacctgacgctggagcagctcatggacttcatcaaccagaagcaacgcgacccgagactcaacgaagtgctgtacccgcccctgcggccctcccaggcccggctgctcatcgaaaagtatgagcccaaccagcagtttctggagcgagaccagatgtccatggagggctttagccgctacctgggaggcgaggagaatggcatcctgcccctggaagccctggatctgagcacggacatgacccagccactgagtgcctacttcatcaactcctcgcataacacctatctcactgcggggcagctggctgggacctcgtcggtggagatgtaccgccaggcactactatggggctgccgctgcgtggagctggacgtgtggaagggacggccgcctgaggaggaacccttcattacccacggcttcaccatgaccacagaggtgcctctgcgcgacgtgctggaggccattgccgagactgccttcaagacctcgccctaccccgtcatcctctccttcgagaaccatgtggactcggcaaagcaacaggcaaagatggctgagtactgccgctccatctttggagacgcgctactcatcgagcctctggacaagtacccgctggccccaggcgttcccctgcccagcccccaggacctgatgggccgtatcctggtgaagaacaagaagcggcaccgacccagcgcaggtggcccagacagcgccgggcgcaagcggcccctggagcagagcaattctgccctgagcgagagctccgcggccaccgagccctcctccccgcagctggggtctcccagctctgacagctgcccaggcctgagcaatggggaggaggtagggcttgagaagcccagcctggagcctcagaagtctctgggtgacgagggcctgaaccgaggcccctatgttcttggacctgctgaccgtgaggatgaggaggaagatgaggaagaggaggaacagacagaccccaaaaagccaactacagatgagggcacagccagcagcgaggtgaatgccactgaggagatgtccacgcttgtcaactacatcgaacctgtcaagttcaagtcctttgaggctgctcgaaagaggaacaaatgcttcgagatgtcgtcctttgtggagaccaaggccatggagcaactgaccaagagccccatggagtttgtggaatacaacaagcagcagctcagccgcatctaccccaagggcacccgcgtggactcctccaactacatgccccagctcttctggaacgtagggtgccagcttgttgcgctcaacttccagaccctcgatgtggcgatgcagctcaacgcgggcgtttttgagtacaacgggcgcagcgggtacctgctcaagccggagttcatgcggcggccggacaagtccttcgaccccttcactgaggtcatcgtggatggcatcgtggccaatgccttgcgggtcaaggtgatctcagggcagttcctgtccgacaggaaggtgggcatctacgtggaggtggacatgtttggcctccctgttgatacgcggcgcaagtaccgcacccggacctctcaggggaactcgttcaaccccgtgtgggacgaagagcccttcgacttccccaaggtggtgctgcccacgctggcttcacttcgcattgcagcctttgaggaggggggtaaattcgtagggcaccggatcctgcctgtctctgccatccgctccggataccactacgtctgcctgcggaacgaggccaaccaaccgctgtgcctgccggccctgctcatctacaccgaagcctcggactacattcctgacgaccaccaggactatgcggaggccctgatcaaccccattaagcacgtcagcctgatggaccagagggcccggcagctggccgccctcattggggagagtgaggctcaggctggccaagagacgtgccaggacacccagtctcagcagctggggtctcagccgtcctcaaaccccacccccagcccactggatgcctccccccgccggccccctggccccaccacctcccctgccagcacctccctcagcagcccagggcagcgtgatgatctcatcgccagcatcctctcagaggtggcccccaccccgctggatgagctccgaggtcacaaggctctggtcaagctccggagccggcaagagcgagacctgcgggagctgcgcaagaagcatcagcggaaggcagtcaccctcacccgccgcctgctggatggcctggctcaggcacaggctgagggcaggtgccggctgcggccaggtgccctaggtggggccgctgatgtggaggacacgaaggagggggaggacgaggcaaagcggtatcaggagttccagaacagacaggtgcagagcctgctggagctgcgggaggcccaggtggacgcagaggcccagcggaggctggaacacctgagacaggctctgcagcggctcagggaggtcgtccttgatgcaaacacaactcagttcaagaggctgaaagagatgaacgagagggagaagaaggagctgcagaagatcctggacagaaagcgccataacagcatctcggaggccaagatgagggacaagcataagaaggaggcggaactgacggagattaaccgtcggcacatcactgagtcagtcaactccatccgtcggctggaggaggcccagaagcagcggcatgaccgtcttgtggctgggcagcagcaggtcctgcaacagctggcagaagaggagcccaagctgctggcccagctggcccaggagtgtcaggagcagcgggcgaggctcccccaggagatccgccggagcctgctgggcgagatgccggaggggctgggggacgggcctctggtggcctgtgccagcaacggtcacgcacccgggagcagcgggcacctgtcgggcgctgactcggagagccaggaggagaacacgcagctctgaactggctgagcgaggtggccacagggccagggcgggcgctgggtggagggcaggaggcaatgacactaatgctttttttttttttttttaactttttatctagaaattttatttttttaaacccggggcaagtacctcagctaactcccttcatcctcctggggcccctccttcctgccctcagtcttaggttagggccttggtcagggctttgctccctgtgacacccacaccctcgagctagcagcgtctcctcccttccccgggagagctggctggagacttggagctccgggaagtaggagtcacatttttttctctattctttggggattttttttacatgaataaaagtggatttcaggga

SEQ ID NO: 71830 - DNA, 3504 bp, Artificial Sequence
  derived and/or modified sequence
atggcgggtgctcagcctggcgtgcacgcattacagctggagccacccacagtggtcgagacacttcgccgaggtagcaagtttatcaagtgggatgaagaaaaactgatgacagtagtctctggcccagaccctgtgaacacggtgtttctaaactttatggccgtccaagatgataccgctaaagtttggtcagaagaactgtttaaactggctatgaatatactagcccagaacgcctcccgcaatacatttctgagaaaagcttatacgaagctgaaattacaggtcaaccaagacggtcggatccccgtgaaaaacatactcaaaatgttttctgctgacaagaagcgagttgaaacagctttagagtcttgtgggctgaagttcaataggagcgagagtatccgcccagacgaattcagtctggagatttttgagagattcttaaacaaactctgcttacggccagatatcgataaaatcttactggaaattggtgctaagggaaagccctacttaactctggaacaactcatggactttataaatcagaaacagcgggaccctcgcctgaacgaagtcctttatccccctcttcgaccgagtcaggcacggctgctcatcgagaagtacgaaccgaaccaacagtttttggagcgtgatcagatgagcatggagggctttagcagatatctcggcggtgaggaaaacggcatcctgccccttgaagccctggatttgtctacagatatgacccaacctctgtctgcatattttatcaactcttctcacaacacgtaccttacggcaggtcaactggctgggacttcttccgtggagatgtatcgacaagccttactgtggggttgtcggtgtgttgagctggacgtctggaaaggacgtccgcctgaagaagaaccgttcattacgcacggtttcacaatgaccaccgaggtcccacttagggacgtgctggaggctatcgcggagacagcatttaaaaccagtccttaccctgtgattctatcctttgagaaccacgtggactcagcaaagcagcaggctaagatggcagagtactgtcgttctattttcggagacgcattactaattgagcccctggataagtaccccttggctcctggagttccactgccttccccccaagatctgatgggacggatactggtcaagaataagaagcgccatcgtccatccgctggagggcctgattctgccggacggaaacggcctttggaacaaagcaactcggcgttgtctgaaagttctgccgctaccgaaccgtcaagtccccagctaggctcaccaagttccgatagttgcccaggtctgtcaaatggagaagaagtgggtcttgagaaacctagtctggagccacaaaaaagtctaggcgacgaaggactgaaccgtggcccttacgttctgggcccagcagatagagaagatgaagaagaggacgaggaagaggaagagcaaactgatccaaaaaaaccaacgaccgatgaaggaaccgccagtagcgaggtgaacgccactgaggaaatgagtacgctcgtgaattacattgagccagtcaagtttaaatccttcgaagctgcacgcaagcgcaataagtgttttgagatgagctcttttgtcgagacgaaggcgatggaacaactgacaaagtctcctatggaattcgtcgagtacaataagcagcagctatccagaatttatcccaaaggcacaagagttgattccagcaactatatgccccagctgttttggaacgtcgggtgccagttggtagctcttaactttcaaactcttgacgtggcgatgcagttgaacgcaggagtgttcgagtataatggcagatcagggtacctgctgaagccggaatttatgcgacgtccggacaagtccttcgaccccttcacagaggtgatcgtcgacggcattgtggctaacgctctgagagtgaaagtgatcagtggccagttcctgtcagacagaaaagtcggcatctacgtagaggtcgacatgttcgggcttccagttgatactcggaggaagtatcgtacccgcacttcacaggggaactccttcaatccggtttgggatgaagagccgtttgacttccccaaggtcgtgctccctactcttgcgagcctgaggattgccgcttttgaagaagggggtaagtttgtggggcatcgaatcctccccgttagtgctattaggtcaggttaccattacgtctgcctccgcaatgaggcaaaccagcctctgtgcctgcctgcccttctgatctacaccgaagccagtgattacatacctgacgatcatcaggattatgcagaggcgttaatcaatcccattaagcatgttagcctgatggaccagagagcacgtcaactggcggctctgattggtgaatccgaggctcaggcagggcaggaaacgtgtcaggacacccagtctcagcagctagggagtcaacctagcagcaaccccacccctagccctctcgacgcctctccccgtcggccacccggacctacgacctcacctgcttcaacaagcttgagttccccaggccagcgagacgacctcattgcatccatcttaagcgaagttgctcctacccccttagacgaactacgtggccacaaggcccttgttaaactgaggagtcgacaggagcgggacctgcgcgagctgcgtaaaaaacatcagcggaaggcagtgactttgacaaggcggctgttggacggactcgctcaggctcaagccgaaggtcggtgtagacttcgcccaggagcgctaggaggagccgctgatgttgaggataccaaggaaggcgaagatgaagccaaaaggtatcaagaatttcaaaatcggcaggtgcagtccctgttagagctccgcgaggcccaggtggatgccgaggctcagcggaggctcgaacacctgcggcaggccttgcagaggctgagagaggtggttcttgatgcaaatacaacgcagtttaaacgcctgaaagaaatgaacgaacgagagaagaaagagctgcagaagatactcgaccgaaagcggcacaattccatatcggaggctaagatgagggacaagcacaaaaaggaggctgagctgactgaaataaacaggaggcacattacagagtccgtcaactcaattcgaagattggaggaagctcagaagcagcgccatgatcgactcgtcgcaggtcaacagcaggtgctgcagcaattggccgaggaagagccaaagctgctggcccagctggcccaggaatgccaagagcagcgagcaaggctaccccaggagattcggaggtcgctcctgggagaaatgccagaggggttaggagatggacctttggtcgcatgtgctagtaatggacatgctcccggatcgagtggccacctcagcggggcagacagcgagagccaggaagagaacactcagttatag

SEQ ID NO: 71831 - DNA, 3504 bp, Artificial Sequence
  derived and/or modified sequence
atggccggcgcccagcccggcgtgcacgccctgcagctggagccccccaccgtggtggagaccctgagaagaggcagcaagttcatcaagtgggacgaggagaagctgatgaccgtggtgagcggccccgaccccgtgaacaccgtgttcctgaacttcatggccgtgcaggacgacaccgccaaggtgtggagcgaggagctgttcaagctggccatgaacatcctggcccagaacgccagcagaaacaccttcctgagaaaggcctacaccaagctgaagctgcaggtgaaccaggacggcagaatccccgtgaagaacatcctgaagatgttcagcgccgacaagaagagagtggagaccgccctggagagctgcggcctgaagttcaacagaagcgagagcatcagacccgacgagttcagcctggagatcttcgagagattcctgaacaagctgtgcctgagacccgacatcgacaagatcctgctggagatcggcgccaagggcaagccctacctgaccctggagcagctgatggacttcatcaaccagaagcagagagaccccagactgaacgaggtgctgtacccccccctgagacccagccaggccagactgctgatcgagaagtacgagcccaaccagcagttcctggagagagaccagatgagcatggagggcttcagcagatacctgggcggcgaggagaacggcatcctgcccctggaggccctggacctgagcaccgacatgacccagcccctgagcgcctacttcatcaacagcagccacaacacctacctgaccgccggccagctggccggcaccagcagcgtggagatgtacagacaggccctgctgtggggctgcagatgcgtggagctggacgtgtggaagggcagaccccccgaggaggagcccttcatcacccacggcttcaccatgaccaccgaggtgcccctgagagacgtgctggaggccatcgccgagaccgccttcaagaccagcccctaccccgtgatcctgagcttcgagaaccacgtggacagcgccaagcagcaggccaagatggccgagtactgcagaagcatcttcggcgacgccctgctgatcgagcccctggacaagtaccccctggcccccggcgtgcccctgcccagcccccaggacctgatgggcagaatcctggtgaagaacaagaagagacacagacccagcgccggcggccccgacagcgccggcagaaagagacccctggagcagagcaacagcgccctgagcgagagcagcgccgccaccgagcccagcagcccccagctgggcagccccagcagcgacagctgccccggcctgagcaacggcgaggaggtgggcctggagaagcccagcctggagccccagaagagcctgggcgacgagggcctgaacagaggcccctacgtgctgggccccgccgacagagaggacgaggaggaggacgaggaggaggaggagcagaccgaccccaagaagcccaccaccgacgagggcaccgccagcagcgaggtgaacgccaccgaggagatgagcaccctggtgaactacatcgagcccgtgaagttcaagagcttcgaggccgccagaaagagaaacaagtgcttcgagatgagcagcttcgtggagaccaaggccatggagcagctgaccaagagccccatggagttcgtggagtacaacaagcagcagctgagcagaatctaccccaagggcaccagagtggacagcagcaactacatgccccagctgttctggaacgtgggctgccagctggtggccctgaacttccagaccctggacgtggccatgcagctgaacgccggcgtgttcgagtacaacggcagaagcggctacctgctgaagcccgagttcatgagaagacccgacaagagcttcgaccccttcaccgaggtgatcgtggacggcatcgtggccaacgccctgagagtgaaggtgatcagcggccagttcctgagcgacagaaaggtgggcatctacgtggaggtggacatgttcggcctgcccgtggacaccagaagaaagtacagaaccagaaccagccagggcaacagcttcaaccccgtgtgggacgaggagcccttcgacttccccaaggtggtgctgcccaccctggccagcctgagaatcgccgccttcgaggagggcggcaagttcgtgggccacagaatcctgcccgtgagcgccatcagaagcggctaccactacgtgtgcctgagaaacgaggccaaccagcccctgtgcctgcccgccctgctgatctacaccgaggccagcgactacatccccgacgaccaccaggactacgccgaggccctgatcaaccccatcaagcacgtgagcctgatggaccagagagccagacagctggccgccctgatcggcgagagcgaggcccaggccggccaggagacctgccaggacacccagagccagcagctgggcagccagcccagcagcaaccccacccccagccccctggacgccagccccagaagaccccccggccccaccaccagccccgccagcaccagcctgagcagccccggccagagagacgacctgatcgccagcatcctgagcgaggtggcccccacccccctggacgagctgagaggccacaaggccctggtgaagctgagaagcagacaggagagagacctgagagagctgagaaagaagcaccagagaaaggccgtgaccctgaccagaagactgctggacggcctggcccaggcccaggccgagggcagatgcagactgagacccggcgccctgggcggcgccgccgacgtggaggacaccaaggagggcgaggacgaggccaagagataccaggagttccagaacagacaggtgcagagcctgctggagctgagagaggcccaggtggacgccgaggcccagagaagactggagcacctgagacaggccctgcagagactgagagaggtggtgctggacgccaacaccacccagttcaagagactgaaggagatgaacgagagagagaagaaggagctgcagaagatcctggacagaaagagacacaacagcatcagcgaggccaagatgagagacaagcacaagaaggaggccgagctgaccgagatcaacagaagacacatcaccgagagcgtgaacagcatcagaagactggaggaggcccagaagcagagacacgacagactggtggccggccagcagcaggtgctgcagcagctggccgaggaggagcccaagctgctggcccagctggcccaggagtgccaggagcagagagccagactgccccaggagatcagaagaagcctgctgggcgagatgcccgagggcctgggcgacggccccctggtggcctgcgccagcaacggccacgcccccggcagcagcggccacctgagcggcgccgacagcgagagccaggaggagaacacccagctgtag

SEQ ID NO: 71832 - protein, 341 aa, Artificial Sequence
  derived and/or modified sequence
MSQGRGKYDFYIGLGLAMSSSIFIGGSFILKKKGLLRLARKGSMRAVGAGEVANFAAYAFAPATLVTPLGALSVLVSAILSSYFLNERLNLHGKIGCLLSILGSTVMVIHAPKEEEIETLNEMSHKLGDPGFVVFATLVVIVALILIFVVGPRHGQTNILVYITICSVIGAFSVSCVKGLGIAIKELFAGKPVLRHPLAWILLLSLIVCVSTQINYLNRALDIFNTSIVTPIYYVFFTTSVLTCSAILFKEWQDMPVDDVIGTLSGFFTIIVGIFLLHAFKDVSFSLASLPVSFRKDEKAMNGNLSNMYEVLNNNEESLTCGIEQHTGENVSRRNGNLTAF

SEQ ID NO: 71833 - DNA, 1026 bp, Artificial Sequence
  derived and/or modified sequence
atgagtcagggacgaggcaagtatgacttctatatcggacttggccttgctatgtcgtccagcattttcattggcggcagcttcatcctcaaaaagaaaggccttttacgccttgcccgaaaagggtctatgcgcgccgtcggggctggtgaggttgctaattttgccgcctacgcctttgcccctgcaactctcgtaacacctctgggtgcgctgtcagtactcgtctctgccattctgtccagctacttcctcaacgaaagacttaacctgcatgggaaaataggttgccttctttccatactcggaagcaccgtgatggttatccatgccccgaaggaggaggaaatcgaaacacttaacgagatgagccacaagctgggtgatcccgggttcgtggtctttgcaacactcgtggtgattgtcgcactgatcctgatattcgttgtgggccctaggcacggacagacgaatatccttgtgtacatcaccatctgctcagtaattggtgcattctccgtgtcttgtgtaaaagggcttgggattgcgattaaagagctgttcgccggaaaacctgtgctccggcacccactcgcttggatcctgctgctgtctctaattgtctgtgtctctactcagatcaattacttgaaccgcgcgttggatatctttaacacgagtattgtgacccctatatattacgtcttctttaccacatctgttttgacatgctcagccatactctttaaggaatggcaggatatgccggtggacgacgtgatcgggaccttatcaggcttctttactattatcgttggtatattcctcctgcacgccttcaaggacgtgtccttttccctggcctccttgcctgtcagttttcggaaagatgagaaggccatgaacggcaacctctccaacatgtacgaggtcctgaataataacgaggagtcactcacatgtgggatcgaacagcataccggagagaatgtctcccgcaggaacgggaacttaacagccttttag

SEQ ID NO: 71834 - DNA, 1026 bp, Artificial Sequence
  derived and/or modified sequence
atgagccaggggcggggaaaatatgacttctacatcggtctcggccttgccatgtcgtcttccatcttcattggcgggtcattcatcctaaagaaaaaaggactgttacggctggccagaaaaggctcgatgcgggcagttggcgccggagaggttgctaactttgctgcctatgccttcgcaccagcaacgcttgtgacccctttgggggcactgtccgtgctggtgagcgcgatcctgtcatcttacttccttaacgagagacttaatctccacggtaaaatcggttgcctgctgagtattctcgggagcacagtcatggtcattcacgcccctaaagaagaagaaattgaaactctaaatgagatgtcacacaagctcggtgacccgggttttgtggttttcgccacgttagtagtgatcgtagcgctgattctgatctttgtggtgggtcccagacacggacagaccaatattctggtgtatattaccatatgttccgtaatcggagccttctcagtgtcatgtgtgaaagggctgggcatcgccatcaaggaactcttcgctggaaaacccgtgctgcgccaccctctagcctggatcctgttgttgagcctcattgtgtgtgtatctacacagatcaattacctgaatcgagccctagacatattcaatacatcaatcgtaactcccatctattatgtgttcttcaccacttcagtgttgacatgtagtgctatcttgttcaaggagtggcaagacatgcccgtggacgacgtaatcggcacactgagcgggtttttcactatcattgtcggcatcttcctgctccatgccttcaaagacgtgtccttctcactggcatccctgccagtatctttccgcaaagatgaaaaagccatgaatggaaacctcagcaacatgtatgaggttctcaataataacgaagagagtctgacatgcggtatcgaacagcacacgggtgagaacgtgagccgccgcaatggcaaccttacagcattttag

SEQ ID NO: 71835 - DNA, 1026 bp, Artificial Sequence
  derived and/or modified sequence
atgagccagggccggggcaagtatgacttctacatcggcctgggcctggccatgagcagcagcatcttcatcggcggcagcttcatcctgaagaagaagggcctgctgcggctggccaggaagggctccatgagagctgtgggcgctggggaggtggccaactttgctgcctatgcctttgccccagccaccctggtgacccccctgggcgccctgtctgtgctggtgtctgccatcctgagcagctacttcctgaatgaaaggctgaacctgcacggcaagattggctgcctgctgagcatcctgggcagcacagtgatggtgatccacgcccccaaggaggaggagattgagaccctgaatgagatgagccacaagctgggggaccccggctttgtggtgtttgccaccctggtggtgattgtggccctgatcctgatctttgtggtgggccccaggcatggccagaccaacatcctggtgtacatcaccatctgcagcgtgattggagccttctctgtgtcctgtgtgaagggcctgggcatcgccatcaaggagctgtttgctgggaagcctgtgctgcggcaccccctggcctggatcctgctgctgagcctgattgtgtgtgtgtccacccagatcaactacctgaacagagccctggacatcttcaacaccagcatcgtgacccccatctactacgtgttcttcaccacctctgtgctgacctgcagcgccatcctcttcaaggagtggcaggacatgcctgtggatgatgtgattggcaccctgagcggcttcttcaccatcatcgtgggcatcttcctgctgcacgccttcaaggatgtgtccttcagcctggccagcctgcctgtgtccttcaggaaggatgagaaggccatgaatggaaacctgagcaacatgtatgaggtgctgaacaacaatgaggagagcctgacctgtggcatcgagcagcacactggagaaaatgtgtccagaagaaatggaaacctgacagccttctag

SEQ ID NO: 71836 - DNA, 1026 bp, Artificial Sequence
  derived and/or modified sequence
atgagccagggccggggcaagtacgacttctacatcggcctgggcctagccatgtccagctcaatattcattggcggctcatttatactgaaaaaaaagggactgcttcggcttgccaggaaggggagcatgcgcgccgtcggggctggggaggtcgctaacttcgccgcatacgccttcgctcccgccactctggttaccccgctgggggccttgtcggtgctcgtcagcgccatcctgtcttcctacttccttaatgagcggctcaacctacacggcaaaataggctgtttgctgtctatcctggggtctaccgtgatggtcattcacgcacctaaggaggaggaaatcgagaccctcaatgaaatgtcccataagctaggggacccggggtttgtggtctttgctacgcttgtggttattgtggccttaattctgattttcgtagttgggcccagacatggccagaccaacattctcgtgtatattacgatttgctcagtgatcggcgcattttcggtaagttgcgtcaagggccttggtattgctatcaaagagctgttcgctgggaagccagtgctgcgccaccccctggcttggattctgctgctgagcctgatcgtctgtgtgagcacacagatcaactacctgaacagggcactggacattttcaatacctcaatcgtcacccccatctattacgttttttttacaacgtcggtgttgacatgttcagccatactctttaaggagtggcaggatatgccggtggacgacgtgataggtacgttgtctggcttctttacaattatagtcggaattttcttactccacgcattcaaagacgtgagctttagcctcgcgtccctgccagtgagcttccgcaaggatgagaaagctatgaacggaaacctgtcaaacatgtacgaagtcttgaacaacaacgaagaaagcttgacttgtggcattgagcagcacactggcgaaaatgtgagccgccgtaacgggaacctgaccgcattctag

SEQ ID NO: 71837 - DNA, 1026 bp, Artificial Sequence
  derived and/or modified sequence
atgagccagggccggggcaagtacgacttctacatcggcctgggcctcgcaatgagcagctcaatctttatcggcgggtcctttattctgaagaagaaggggttgctccggttggcgaggaaaggatctatgcgtgccgttggcgctggggaagtggccaacttcgccgcctatgcctttgctcctgctacactcgtcacgccattgggtgccctctcagttctcgtttctgccatcttatcttcatacttcctgaatgaaagactgaacctacacggaaaaattggatgcctgctgagcattctggggtccacagtcatggttattcatgctcctaaagaagaggaaatcgagacactcaacgaaatgagtcacaaactaggtgatcccggttttgtcgtctttgcaaccctggttgtgattgttgctctgattctgatctttgtggtgggacctcgccacggccagacaaatatacttgtgtacatcactatatgcagcgttatcggcgcattttccgtctcctgtgtgaagggcctgggcatcgcaattaaggagctctttgccggcaagccagtgctgcggcacccccttgcatggatccttcttctgagcttgattgtttgcgtaagtacccaaattaactatctgaacagggctctggatattttcaatacaagtatcgtgacacccatttattacgtcttcttcacaactagcgtgctgacatgcagcgccatcctgtttaaggaatggcaggatatgcccgttgacgacgtgatcggaacactgtctggcttttttacgatcatcgttggcatattcctgctccacgccttcaaggacgtatcctttagtcttgcttccctgcccgtgagcttccgcaaggatgaaaaggccatgaacggaaatctatccaatatgtatgaagtcctgaataataacgaagagagcctgacatgtgggatagagcaacatacgggggagaacgtcagcagacgaaacggaaacctgaccgctttctag

SEQ ID NO: 71838 - DNA, 1531 bp, Artificial Sequence
  derived and/or modified sequence
aggttttccggcgccggccctaggtcccggcagcggtggtgacggcggtgccggaggttgtccttggcaggttttcctcggcgcttctccatggaggaggcggtgcgaacggcttcagccccgaatgctcgcatctcccactggacggcgacgaaggcggtggccgtgcgagcgcaggactgggcggcctgtgtgggggtgtgagccgcggtgcccaaggctgcgccggcgaggggaagccgcgcggccggccggccgactagggtgaggtcgccactccttcctttcaggctctcccggctgtgatagaccttcagttacagagagagggagcagagtgggaccaggtctgagaatagtgaagcaactcattcctttcaggacattccctctgatgtcctattttcaaactgtttgaagactgcttcattctgcctctagtaccagcggtttctctgttctgtgatcaatgtgattcacaggaactccttaagtaacaaacgaaatgagccaggggcgtggaaaatatgacttctatattggtctgggattggctatgagctccagcattttcattggaggaagtttcattttgaaaaaaaagggcctccttcgacttgccaggaaaggctctatgagagcagtgggagctggtgaggtggccaacttcgctgcgtatgcgtttgcaccagccactctagtgactccactaggagctctcagcgtgctagtaagtgccattctttcttcatactttctcaatgaaagacttaatcttcatgggaaaattgggtgtttgctaagtattctaggatctacagttatggtcattcatgctccaaaggaagaggagattgagactttaaatgaaatgtctcacaagctaggtgatccaggttttgtggtctttgcaacccttgtggtcattgtggccttgatattaatcttcgtggtgggtcctcgccatggacagacaaacattcttgtgtacataacaatctgctctgtaatcggcgcgttttcagtctcctgtgtgaagggcctgggcattgctatcaaggagctgtttgcagggaagcctgtgctgcggcatcccctggcttggattctgctgctgagcctcatcgtctgtgtgagcacacagattaattacctaaatagggccctggatatattcaacacttccattgtgactccaatatattatgtattctttacaacatcagttttaacttgttcagctattctttttaaggagtggcaagatatgcctgttgacgatgtcattggtactttgagtggcttctttacaatcattgtggggatattcttgttgcatgcctttaaagacgtcagctttagtctagcaagtctgcctgtgtcttttcgaaaagacgagaaagcaatgaatggcaatctctctaatatgtatgaagttcttaataataatgaagaaagcttaacctgtggaatcgaacaacacactggtgaaaatgtctcccgaagaaatggaaatctgacagctttttaa

SEQ ID NO: 71839 - DNA, 1412 bp, Artificial Sequence
  derived and/or modified sequence
gacggcggtgccggaggttgtccttggcaggttttcctcggcgcttctccatggaggaggcggtgcgaacggcttcagccccgaatgctcgcatctcccactggacggcgacgaaggcggtggccgtgcgagcgcaggactgggcggcctgtgtgggggtgtgagccgcggtgcccaaggctgcgccggcgaggggaagccgcgcggccggccggccgactagggtttgaagactgcttcattctgcctctagtaccagcggtttctctgttctgtgatcaatgtgattcacaggaactccttaagtaacaaacgaaatgagccaggggcgtggaaaatatgacttctatattggtctgggattggctatgagctccagcattttcattggaggaagtttcattttgaaaaaaaagggcctccttcgacttgccaggaaaggctctatgagagcagtgggagctggtgaggtggccaacttcgctgcgtatgcgtttgcaccagccactctagtgactccactaggagctctcagcgtgctagtaagtgccattctttcttcatactttctcaatgaaagacttaatcttcatgggaaaattgggtgtttgctaagtattctaggatctacagttatggtcattcatgctccaaaggaagaggagattgagactttaaatgaaatgtctcacaagctaggtgatccaggttttgtggtctttgcaacccttgtggtcattgtggccttgatattaatcttcgtggtgggtcctcgccatggacagacaaacattcttgtgtacataacaatctgctctgtaatcggcgcgttttcagtctcctgtgtgaagggcctgggcattgctatcaaggagctgtttgcagggaagcctgtgctgcggcatcccctggcttggattctgctgctgagcctcatcgtctgtgtgagcacacagattaattacctaaatagggccctggatatattcaacacttccattgtgactccaatatattatgtattctttacaacatcagttttaacttgttcagctattctttttaaggagtggcaagatatgcctgttgacgatgtcattggtactttgagtggcttctttacaatcattgtggggatattcttgttgcatgcctttaaagacgtcagctttagtctagcaagtctgcctgtgtcttttcgaaaagacgagaaagcaatgaatggcaatctctctaatatgtatgaagttcttaataataatgaagaaagcttaacctgtggaatcgaacaacacactggtgaaaatgtctcccgaagaaatggaaatctgacagctttttaagaaaggtgtaattaaaggttaatctgtgattgttatgaagtgaatttgaatatcatcagaatgtgtctg

SEQ ID NO: 71840 - DNA, 1026 bp, Artificial Sequence
  derived and/or modified sequence
atgtcgcaaggccgtgggaagtatgatttctacatcggactggggcttgctatgtcaagctcgatattcatcggaggatcatttatcttaaaaaagaagggccttctaaggctggccagaaagggcagtatgcgtgccgttggcgctggagaagtggcgaacttcgccgcttacgcctttgccccagccaccttagttactcctctaggagccttaagcgtgttggtgagcgcaatcctgtcttcctatttcctaaacgagcgtctgaacctccatggaaagattgggtgtctgcttagcatcttaggaagtactgtgatggttattcatgcccctaaagaagaagaaatcgagacactcaatgaaatgtcgcataaactgggggaccctggattcgtggtctttgccacgctggtggtaatcgtcgcgctgatcttaatatttgttgtgggccctcggcatggccaaacaaatattctggtctatattaccatatgttcggtgatcggagcattcagcgtgtcatgtgtcaagggtctgggcatcgctataaaggagctgttcgctggcaagcccgtactccgccatccattggcctggatcctgctgctgagcctaatcgtttgcgtctccactcagatcaactacttaaatagagccctggacatcttcaatacaagcattgtaactccaatctactatgtatttttcaccaccagcgttctgacatgctccgccatccttttcaaagagtggcaggatatgcccgtcgacgatgtgatcgggaccctgtctgggttttttaccataatcgtggggatctttctccttcacgcctttaaggatgtgtccttttccctggcatccctgcctgtctcgtttaggaaggacgagaaggccatgaatggaaatctctcaaatatgtatgaagtactgaacaataatgaggagtcactgacgtgtggaattgaacagcatacaggagaaaacgtgtccagaaggaatggcaacttaactgcgttctag

SEQ ID NO: 71841 - DNA, 1026 bp, Artificial Sequence
  derived and/or modified sequence
atgtcgcagggccgaggtaagtacgacttttatatcggcttgggcttagcaatgtcatctagcatcttcatcggtgggtcctttattcttaagaagaagggcctgctgcggctggccagaaaagggtctatgcgagccgtgggggctggggaggtggctaacttcgctgcgtacgcattcgctcctgctaccctggtgactccgctgggtgctctgagtgtccttgtatcagctatcctgtcgtcctactttctgaacgaacgtttgaatttgcacgggaaaatcggttgcctcctaagtattctgggcagcacagtgatggtaattcacgcaccaaaagaagaggaaattgaaactctcaatgagatgtcacataaacttggtgaccctggcttcgttgtgtttgccaccctagtcgtcatcgtggctctgattctgatcttcgttgtggggccacgacatgggcagaccaacatactcgtctacatcaccatctgcagtgtcataggcgctttttctgtttcctgcgttaaaggtctggggatcgccataaaagaactatttgcgggaaagccagtactacgtcacccccttgcctggattctgctcttgagccttatcgtttgcgtgagcactcagatcaactacctcaatcgagcactggatatcttcaatacttccattgtaaccccaatatattacgtcttctttactacttccgtgttgacatgctcagcaatcctgtttaaggaatggcaggacatgcctgtagatgatgttatcggcacattatctgggttctttaccattatcgtcggaattttcctcttgcatgcctttaaggatgtaagctttagcttagcctccctgccagtgtcgtttcggaaagatgagaaggcgatgaacggaaacctgagtaatatgtacgaagtcttgaataacaacgaggagtcactgacatgcggtatcgagcagcatacgggcgaaaatgtgtctcgtcggaacggaaacctgacggcattctag

SEQ ID NO: 71842 - DNA, 1026 bp, Artificial Sequence
  derived and/or modified sequence
atgagccagggcagaggcaagtacgacttctacatcggcctgggcctggccatgagcagcagcatcttcatcggcggcagcttcatcctgaagaagaagggcctgctgagactggccagaaagggcagcatgagagccgtgggcgccggcgaggtggccaacttcgccgcctacgccttcgcccccgccaccctggtgacccccctgggcgccctgagcgtgctggtgagcgccatcctgagcagctacttcctgaacgagagactgaacctgcacggcaagatcggctgcctgctgagcatcctgggcagcaccgtgatggtgatccacgcccccaaggaggaggagatcgagaccctgaacgagatgagccacaagctgggcgaccccggcttcgtggtgttcgccaccctggtggtgatcgtggccctgatcctgatcttcgtggtgggccccagacacggccagaccaacatcctggtgtacatcaccatctgcagcgtgatcggcgccttcagcgtgagctgcgtgaagggcctgggcatcgccatcaaggagctgttcgccggcaagcccgtgctgagacaccccctggcctggatcctgctgctgagcctgatcgtgtgcgtgagcacccagatcaactacctgaacagagccctggacatcttcaacaccagcatcgtgacccccatctactacgtgttcttcaccaccagcgtgctgacctgcagcgccatcctgttcaaggagtggcaggacatgcccgtggacgacgtgatcggcaccctgagcggcttcttcaccatcatcgtgggcatcttcctgctgcacgccttcaaggacgtgagcttcagcctggccagcctgcccgtgagcttcagaaaggacgagaaggccatgaacggcaacctgagcaacatgtacgaggtgctgaacaacaacgaggagagcctgacctgcggcatcgagcagcacaccggcgagaacgtgagcagaagaaacggcaacctgaccgccttctag

SEQ ID NO: 71843 - DNA, 1341 bp, Artificial Sequence
  derived and/or modified sequence
atgacctccagggctagcgaattgtcccctggccggtccgtgactgccgggataatcattgtaggggacgagatcctgaaggggcacacacaggatacgaacacctttttcctatgtcggacactgcggtccctgggtgtccaggtgtgccgcgtgagcgtagtgccagacgaagtcgccaccatcgctgccgaagtcaccagcttttccaacaggttcacacacgtgctgactgctggtggcatcggccccacccacgacgatgtgacttttgaagccgtggcccaggcatttggcgatgagctcaagcctcacccaaaattggaagccgctacgaaagccttaggcggagagggatgggaaaagctgagcctggtgccttcgagcgcgcggctccattacggaaccgatccgtgcacgggccagcctttccgctttcctctggtgtctgtcagaaatgtatacctcttccctggaattcctgaactcttgagaagggtgctagaaggcatgaaaggtctttttcaaaatcctgccgtgcagttccactccaaagagttgtacgtggcagctgatgaggcttctatcgcccctattcttgccgaggcccaggcccacttcgggcgtaggctgggcctagggagttacccagactgggggagcaactattaccaggtcaagctgaccctggacagcgaggaggaaggccctttggaggaatgccttgcttatttaactgctcgtctgccacaaggtagcttagtgccctatatgccgaatgctgttgaacaggcctctgaggcggtgtacaagctggcagaatctggttctagccttggcaaaaaagtggctggagctttgcaaaccatagagaccagcctagcccagtatagcctaacgcagctttgcgtcgggtttaatggcgggaaggattgcacagccctactgcacctgtttcatgccgcggtccagcggaaactccccgatgtacccaatccattgcaaattctgtacattcggtcaatctccccgtttcctgagctggaacagttcctccaggacacgattaaacggtacaatctgcagatgctggaagccgagggtagcatgaagcaagctcttggggaactgcaggcaagacatccacaattggaagccgtcctaatggggaccagaagaactgatccttatagttgctctctgtgcccattctctcctacagaccctggctggccagctttcatgcggattaatccactgctggactggacctacagagatatttgggattttctccgtcagctatttgttccttactgcatcttgtacgacagggggtag

SEQ ID NO: 71844 - DNA, 1341 bp, Artificial Sequence
  derived and/or modified sequence
atgaccagccgggccagcgagctgagccctggccgctctgtgacagctggcatcatcatcgtgggagatgagatcctgaagggccacacccaggacaccaacaccttcttcctgtgcaggaccctgcggagcctgggcgtgcaggtgtgccgggtgtctgtggtgcctgatgaggtggccaccatcgctgctgaggtgaccagcttcagcaaccgcttcacccacgtgctgacagctgggggcatcggccccacccatgatgatgtgacctttgaagctgtggcccaggcctttggagatgagctgaagccccaccccaagctggaggccgccaccaaggccctgggcggggagggctgggagaagctgagcctggtgcccagcagcgcccggctgcactacggcacagacccctgcaccggccagcccttccgcttccccctggtgtctgtgagaaatgtgtacctgtttcctggcatccctgagctgctgcggcgggtgctggagggcatgaagggcctcttccagaacccagctgtgcagttccacagcaaggagctgtatgtggccgcagatgaggccagcatcgcccccatcctggccgaggcccaggcccactttggaagaaggctgggcctgggcagctacccagactggggcagcaactactaccaggtgaagctgaccctggacagcgaggaggagggccccctggaggagtgcctggcctacctgacagcccggctgccccagggcagcctggtgccctacatgcccaatgctgtggagcaggccagcgaggccgtgtacaagctggccgagagcggcagcagcctgggcaagaaggtggccggggccctgcagaccatcgagaccagcctggcccagtacagcctgacccagctgtgtgtgggcttcaatggaggcaaggactgcacagccctgctgcacctgttccacgccgctgtgcagaggaagctgcctgatgtgcccaaccccctgcagatcctgtacatccgcagcatcagccccttccctgagctggagcagttcctgcaggacaccatcaagcgctacaacctgcagatgctggaggccgagggctccatgaagcaggccctgggggagctgcaggcccggcacccccagctggaggccgtgctgatgggcaccaggagaacagacccctacagctgcagcctgtgccccttcagccccacagatcctggctggccagccttcatgaggatcaaccccctgctggactggacctacagagacatctgggacttcctgcggcagctgtttgtgccctactgcatcctgtatgaccggggctag

SEQ ID NO: 71845 - DNA, 1341 bp, Artificial Sequence
  derived and/or modified sequence
atgaccagccgggccagcgagctgagccccggccggagcgtgaccgccggcatcatcattgttggggatgagattctaaaggggcacacccaggataccaacaccttttttctgtgtcgtacacttaggtctctcggcgtccaggtgtgcagagtctcagtggtgccagacgaagtcgctactatagctgcagaagtgacgagctttagtaacaggttcacccatgtgcttactgcgggcggcattggcccaacgcacgacgacgtaacgttcgaggcggtagctcaggcatttggggacgaactgaaacctcatccaaagttggaggcggccaccaaggccttgggcggagagggctgggaaaagctcagcctcgtcccaagttctgcaagactccattacgggacagatccttgtactggccagccattcaggtttcccctagtgtctgtccgtaatgtctatctattccccggaatccccgagctactgagaagagtcctcgagggcatgaagggcttgttccagaatcccgcagttcaatttcactcaaaagagctgtatgtggcagcggatgaggcgagtattgctcccattctggctgaagcccaagcgcactttggccggcgcctgggactcggcagctaccccgactggggaagcaattattaccaggtcaaactgactttagattctgaggaggaaggacctctggaagagtgccttgcgtatctaaccgcaagactgcctcagggctctctggtaccatatatgccaaatgctgtcgagcaggcttccgaagcggtgtataagctggcagaatccggttcttctctcggaaagaaagtcgctggggctctccagacaatcgaaacctctctggctcagtacagcctcacgcagctctgcgtaggctttaacgggggtaaagattgtactgccttacttcatctgtttcacgctgcagtccagagaaaactcccagatgtgcccaatcctttacagattctgtacatcagatctatttcccccttccctgaattggagcaatttctgcaggatactattaagcggtataatctgcagatgctggaggcagagggttctatgaaacaagcactaggcgagctccaagcccgacatccacagctcgaagcggtccttatggggactcgacgaactgatccatactcatgtagcctgtgtccattctcacctacagatcccggctggccagccttcatgagaattaacccactcttagactggacatatcgggacatatgggatttcttgcggcaactgttcgtgccttactgtatcctgtatgaccgaggctag

SEQ ID NO: 71846 - DNA, 1341 bp, Artificial Sequence
  derived and/or modified sequence
atgacatctagagcctccgagctgtcccccggtaggagcgtgaccgctggcataattatagttggtgatgagatcctgaaaggccacactcaggacacaaacactttcttcctttgcagaacgcttcgcagtttaggcgtccaagtgtgtcgtgtttcagtggtcccagatgaagtggccacgatcgctgcggaagtcacctcattctctaatcgcttcacacatgtgctgacagccggtgggattggaccaactcacgatgatgtgaccttcgaggcggtggcccaggcattcggcgacgagctgaagccgcaccccaaactcgaggccgctacaaaagcgctcggcggtgagggatgggaaaaactgtcgctggtgccgagctccgcacggctgcattatggaaccgacccgtgtacaggacaacccttccggtttccgttagtaagcgttcgaaacgtctacctgttccctgggatccccgaacttctccggagggtcctcgaaggtatgaagggactttttcaaaacccagccgtccagttccattctaaggagctgtacgtggcagctgacgaagcttcaatcgccccaatcctggccgaggcccaggcgcactttggcagacgtctcggtctggggtcttaccctgactggggcagtaattactaccaggttaagctgactctcgatagcgaagaagagggaccactggaggagtgtttggcctatctgaccgccagactccctcaggggagccttgtgccctatatgcctaatgctgtggaacaagccagcgaagcagtatacaaactggccgagagtggcagtagcctcggcaaaaaagttgcaggggcactccaaacgattgagaccagtttggcccaatactcccttacccaactctgtgttggattcaacggtgggaaggactgtacagcactcttgcacctgttccatgctgcagtgcagcgcaaacttccagacgtcccaaaccctctgcagatcctgtatatcaggtctattagtcctttccctgagctcgagcagtttctccaagatactataaaaagatacaacctgcagatgttggaagctgagggttctatgaagcaagccttaggggagcttcaggctcggcaccctcagctggaggccgtcctcatggggactcgccgaacggatccgtacagctgttcactttgtccattctcccctacagaccccggatggccagcgttcatgcgaatcaacccactcctagactggacttatagagacatttgggactttctgaggcagcttttcgtaccttactgtattctgtatgatagggggtag

SEQ ID NO: 71847 - DNA, 1341 bp, Artificial Sequence
  derived and/or modified sequence
atgaccagcagagccagcgagctgagccccggcagaagcgtgaccgccggcatcatcatcgtgggcgacgagatcctgaagggccacacccaggacaccaacaccttcttcctgtgcagaaccctgagaagcctgggcgtgcaggtgtgcagagtgagcgtggtgcccgacgaggtggccaccatcgccgccgaggtgaccagcttcagcaacagattcacccacgtgctgaccgccggcggcatcggccccacccacgacgacgtgaccttcgaggccgtggcccaggccttcggcgacgagctgaagccccaccccaagctggaggccgccaccaaggccctgggcggcgagggctgggagaagctgagcctggtgcccagcagcgccagactgcactacggcaccgacccctgcaccggccagcccttcagattccccctggtgagcgtgagaaacgtgtacctgttccccggcatccccgagctgctgagaagagtgctggagggcatgaagggcctgttccagaaccccgccgtgcagttccacagcaaggagctgtacgtggccgccgacgaggccagcatcgcccccatcctggccgaggcccaggcccacttcggcagaagactgggcctgggcagctaccccgactggggcagcaactactaccaggtgaagctgaccctggacagcgaggaggagggccccctggaggagtgcctggcctacctgaccgccagactgccccagggcagcctggtgccctacatgcccaacgccgtggagcaggccagcgaggccgtgtacaagctggccgagagcggcagcagcctgggcaagaaggtggccggcgccctgcagaccatcgagaccagcctggcccagtacagcctgacccagctgtgcgtgggcttcaacggcggcaaggactgcaccgccctgctgcacctgttccacgccgccgtgcagagaaagctgcccgacgtgcccaaccccctgcagatcctgtacatcagaagcatcagccccttccccgagctggagcagttcctgcaggacaccatcaagagatacaacctgcagatgctggaggccgagggcagcatgaagcaggccctgggcgagctgcaggccagacacccccagctggaggccgtgctgatgggcaccagaagaaccgacccctacagctgcagcctgtgccccttcagccccaccgaccccggctggcccgccttcatgagaatcaaccccctgctggactggacctacagagacatctgggacttcctgagacagctgttcgtgccctactgcatcctgtacgacagaggctag

SEQ ID NO: 71848 - protein, 294 aa, Artificial Sequence
  derived and/or modified sequence
MQPSSSTPPLHPYSTDGLIFPFNPQGHTQDTNTFFLCRTLRSLGVQVCRVSVVPDEVATIAAEVTSFSNRFTHVLTAGGIGPTHDDVTFEAVAQAFGDELKPHPKLEAATKALGGEGWEKLSLVPSSARLHYGTDPCTGQPFRFPLVSVRNVYLFPGIPELLRRVLEGMKGLFQNPAVQFHSKELYVAADEASIAPILAEAQAHFGRRLGLGSYPDWGSNYYQVKLTLDSEEEGPLEECLAYLTARLPQGSLVPYMPNAVEQASEAVYKLAESGRDLMEEGHYAQSHWWHPRSQ

SEQ ID NO: 71849 - protein, 338 aa, Artificial Sequence
  derived and/or modified sequence
MQPSSSTPPLHPYSTDGLIFPFNPQGHTQDTNTFFLCRTLRSLGVQVCRVSVVPDEVATIAAEVTSFSNRFTHVLTAGGIGPTHDDVTFEAVAQAFGDELKPHPKLEAATKALGGEGWEKLSLVPSSARLHYGTDPCTGQPFRFPLVSVRNVYLFPGIPELLRRVLEGMKGLFQNPAVQFHSKELYVAADEASIAPILAEAQAHFGRRLGLGSYPDWGSNYYQVKLTLDSEEEGPLEECLAYLTARLPQGSLVPYMPNAVEQASEAVYKLAESGNYLMFQTPSRSCISAASPLSLSWNSFYRTLSREQAIPENQIASPPSEAKGAEEPWMGPFPGQQG

SEQ ID NO: 71850 - DNA, 1211 bp, Artificial Sequence
  derived and/or modified sequence
cttcatccctacagtactgatggcctcatcttccccttcaacccccagggacacactcaggacaccaacaccttctttctgtgccggacactgcgctccctaggggtccaggtttgccgagtctcagttgtacctgatgaggtagccaccattgcagctgaggtcacttctttctccaaccgcttcacccatgtcctcacagcagggggcatcggccccactcatgatgatgtgacctttgaggcagtggcacaggcctttggagatgagctgaagccacaccccaagttggaagcagccaccaaagccctaggaggggaaggctgggagaagctatcattggtgccctcctctgcccgcctgcattatggcacagatccttgcactggtcaacctttcagattccctctggtctccgtccgaaacgtctacctcttcccaggcattccagagctgctgcggcgggtgctggaggggatgaagggactattccaaaacccagctgttcagttccactcaaaggagctatatgtggctgctgatgaagcctccatcgcccccattctggctgaggcccaggcccactttggacgtaggcttggcctgggttcctaccctgactggggcagcaactactatcaggtgaagctgactctagactcagaggaagaaggacccctggaggaatgcttggcctacctgactgcccgtttgccccagggatcgctggtcccctacatgcccaacgctgtggagcaggccagtgaggctgtatacaaactcgctgaatcaggaaattacctgatgttccaaaccccctccagatcctgtatatccgcagcatctcccctttccctgagctggaacagtttctacaggacactatcaagagagcaagctataccagagaatcagatagcaagccctccctcagaggccaagggagcagaagagccatggatgggccccttcccaggacagcaggggtagaagtgggaaagatacacatcactggggagtcgggagaataccgtgcggaacccggccctgaagtgcctgagcccaggaggacaccccacataccgtccagcctatctactggagaacgaagaagaggagcggaactcccgcacatgacctcccaccctaggagggagggaaggacaccgtcctagggtataacctggcaataaaccgtgcctctcactgtg

SEQ ID NO: 71851 - DNA, 1803 bp, Artificial Sequence
  derived and/or modified sequence
gaaagagccggtgaaggggcagaacaggcaggttccctcgacccaggaccccctgttcccaggctatggcccccagtgccctgtagacctggcaggccccccgtgcttgcgacccctatttgggggtctgggtggctactggagggccttgcagaggggcagagaaggcaggaccatgacatctagggcctctgaactttctccggggcgcagcgtgacggctggcatcatcattgttggagatgagatccttaagttggaaacaacaaatggcttttgagtccaagagtgatgcaatcacagtgacgcattaaaacggttactccggagacatcagagcactgtggctggaggctgggagcctggccaggaagctgtcgccattgtccaggtgaaaggtgctaaggacctgcttggtggcagtggggacagaaagaagaaagcaggccaggcgtggtggctcacacctataattccagcactttgggaggctgaggcaggaggatcacttgagaccaggaattcaacaccagcctgggcaacatggcaagaccccatttctacaaaaaaaatttaaaatgagctgaatgtggtggcacgcgcctgtagtcccagctactcggaaggctggggtggcccttgaagccaggaggttgaggctgcagtgaactgtgactgagccactatactccagcctgggtgacagagacccagctttaaaaccaaacaaatggattttcccactcttgtgtccagtccaggcccctcagcagcctgaggtggtgtccttcaaagagcagagcactgcatcatcaggtggatgcagccatcatcttcaacccctccccttcatccctacagtactgatggcctcatcttccccttcaacccccagggacacactcaggacaccaacaccttctttctgtgccggacactgcgctccctaggggtccaggtttgccgagtctcagttgtacctgatgaggtagccaccattgcagctgaggtcacttctttctccaaccgcttcacccatgtcctcacagcagggggcatcggccccactcatgatgatgtgacctttgaggcagtggcacaggcctttggagatgagctgaagccacaccccaagttggaagcagccaccaaagccctaggaggggaaggctgggagaagctatcattggtgccctcctctgcccgcctgcattatggcacagatccttgcactggtcaacctttcagattccctctggtctccgtccgaaacgtctacctcttcccaggcattccagagctgctgcggcgggtgctggaggggatgaagggactattccaaaacccagctgttcagttccactcaaaggagctatatgtggctgctgatgaagcctccatcgcccccattctggctgaggcccaggcccactttggacgtaggcttggcctgggttcctaccctgactggggcagcaactactatcaggtgaagctgactctagactcagaggaagaaggacccctggaggaatgcttggcctacctgactgcccgtttgccccagggatcgctggtcccctacatgcccaacgctgtggagcaggccagtgaggctgtatacaaactcgctgaatcaggtagggaccttatggaggaggggcattatgcccaaagccattggtggcaccccagatctcagtaatgcaggggctgttgggtgcttcctgcaaatccctgagagggcagaagatagcttctgttaattcattattcttccaataaatgttgattgagtaccta

SEQ ID NO: 71852 - DNA, 1238 bp, Artificial Sequence
  derived and/or modified sequence
atgcagccatcatcttcaacccctccccttcatccctacagtactgatggcctcatcttccccttcaacccccagggacacactcaggacaccaacaccttctttctgtgccggacactgcgctccctaggggtccaggtttgccgagtctcagttgtacctgatgaggtagccaccattgcagctgaggtcacttctttctccaaccgcttcacccatgtcctcacagcagggggcatcggccccactcatgatgatgtgacctttgaggcagtggcacaggcctttggagatgagctgaagccacaccccaagttggaagcagccaccaaagccctaggaggggaaggctgggagaagctatcattggtgccctcctctgcccgcctgcattatggcacagatccttgcactggtcaacctttcagattccctctggtctccgtccgaaacgtctacctcttcccaggcattccagagctgctgcggcgggtgctggaggggatgaagggactattccaaaacccagctgttcagttccactcaaaggagctatatgtggctgctgatgaagcctccatcgcccccattctggctgaggcccaggcccactttggacgtaggcttggcctgggttcctaccctgactggggcagcaactactatcaggtgaagctgactctagactcagaggaagaaggacccctggaggaatgcttggcctacctgactgcccgtttgccccagggatcgctggtcccctacatgcccaacgctgtggagcaggccagtgaggctgtatacaaactcgctgaatcaggaaattacctgatgttccaaaccccctccagatcctgtatatccgcagcatctcccctttccctgagctggaacagtttctacaggacactatcaagagagcaagctataccagagaatcagatagcaagccctccctcagaggccaagggagcagaagagccatggatgggccccttcccaggacagcaggggtagaagtgggaaagatacacatcactggggagtcgggagaataccgtgcggaacccggccctgaagtgcctgagcccaggaggacaccccacataccgtccagcctatctactggagaacgaagaagaggagcggaactcccgcacatgacctcccaccctaggagggagggaaggacaccgtcctagggtataacctggcaataaaccgtgcctctcactgtg

SEQ ID NO: 71853 - DNA, 513 bp, Artificial Sequence
  derived and/or modified sequence
atgaagggtctgtttcagaatccagccgtgcaatttcattccaaggagttatatgtggctgcggacgaggccagtatagcccctatccttgccgaagcacaggcccacttcggacggcggctagggctaggctcatatcccgactggggatccaactattaccaggtgaagctcacgctcgatagtgaggaagaagggcccctggaggagtgtctggcctacctgactgcaagactaccccagggctcactcgtgccgtatatgccaaatgccgtggaacaggcctccgaggcagtgtacaagctggccgaatcagggaattacttgatgttccagacgccttcccgaagttgcatcagtgctgcttcaccactcagcctcagctggaacagcttctaccgaactctatctcgcgaacaggctattcctgaaaaccagatcgcctccccacccagtgaggctaaaggcgcagaagagccctggatgggcccttttccaggccaacaagggtag

SEQ ID NO: 71854 - DNA, 885 bp, Artificial Sequence
  derived and/or modified sequence
atgcaacctagctcctccactcccccactccacccttacagcacagacggactcatctttcccttcaatcctcaaggtcacactcaagacactaatacgttcttcctttgtaggaccctcagatcgttaggtgtacaggtctgcagagttagtgtggtcccagatgaggtggccaccatcgccgccgaggtaacaagtttttcgaatagatttactcacgtactgacagctggcgggattggacccacccacgatgacgtgactttcgaggcagtggcccaggcctttggcgatgagttgaagccacatcccaaactggaggccgcgacaaaagctcttggaggggaaggctgggaaaaactatccttggtacccagctcggctaggctgcactacgggaccgacccatgtactggccagcctttcaggttccctctggtttccgtccgcaacgtctacctgtttcctggcatccccgaactgctgagaagggtgttagagggcatgaaaggattgttccaaaaccctgccgtccagttccattctaaggagctgtatgtggccgccgacgaagccagtatcgcacctattctggcagaagctcaagcccactttggtaggagacttgggctcggctcctaccccgactggggtagcaactactatcaagtcaaactaactctggactccgaggaagagggtccccttgaagagtgcctggcttatctgactgctcgcctgccgcagggcagtctggtcccgtatatgccaaatgctgtggaacaagcctctgaggctgtatataagctggctgagtctggacgcgatctgatggaggaaggacattatgcccaaagccattggtggcaccctcggagccagtag

SEQ ID NO: 71855 - DNA, 1017 bp, Artificial Sequence
  derived and/or modified sequence
atgcaacccagctcttcaaccccaccactccacccatatagtacagatggactcattttcccatttaacccccagggccatacacaggacacaaataccttcttcctgtgtcgtactcttaggtcactgggcgttcaggtatgcagagtctccgtcgtgccagacgaggttgcgactatcgcagcagaggttacttcgttttcgaataggtttacccacgtgctcaccgctgggggaataggccccacccacgacgacgttacgtttgaggcagtggcccaggcattcggcgacgagctgaagccacaccccaagctggaggcagccaccaaggcactcggtggcgaaggttgggagaagctcagtctagtcccaagcagcgccagactccattatggtaccgacccgtgtaccggccagccctttagatttcccctcgtctccgtgcgcaacgtgtacctctttcccggcatccccgaactcctgaggagggtgttagaaggcatgaagggtttatttcagaaccctgctgttcaatttcacagcaaggagctgtacgttgctgcagacgaggcctcaattgctcctatacttgctgaagcacaggcccatttcggccgacgcttaggtctgggttcctatccagactggggatcaaattattaccaggtgaagcttacactcgacagcgaagaagagggccctctggaggagtgcttagcctacttgacagcccggctgccccaaggcagtctggtgccctatatgccgaacgccgtggagcaggccagtgaggctgtatacaagctggccgagtccgggaattacctgatgtttcagactccatctagaagttgcatctccgccgcctctcccctgtcgctgtcctggaattcattctatcgcaccttgtcgcgcgaacaagcaattccagagaaccagatagcaagcccgcccagtgaggccaagggggcagaagaaccgtggatggggccattccccggacagcaggggtag

SEQ ID NO: 71856 - DNA, 513 bp, Artificial Sequence
  derived and/or modified sequence
atgaagggcctcttccagaacccagctgtgcagttccacagcaaggagctgtatgtggccgcagatgaggccagcatcgcccccatcctggccgaggcccaggcccactttggaagaaggctgggcctgggcagctacccagactggggcagcaactactaccaggtgaagctgaccctggacagcgaggaggagggccccctggaggagtgcctggcctacctgacagcccggctgccccagggcagcctggtgccctacatgcccaatgctgtggagcaggccagcgaggccgtgtacaagctggccgagagcggcaactacctgatgttccagacccccagccgcagctgcatctctgctgccagccccctgagcctgtcctggaacagcttctaccgcaccctgagccgggagcaggccatccctgagaaccagatcgccagcccccccagcgaggccaagggagctgaggagccctggatgggccccttccctggccagcagggctag

SEQ ID NO: 71857 - DNA, 885 bp, Artificial Sequence
  derived and/or modified sequence
atgcagcccagcagcagcaccccacccctgcacccctacagcacagatggcctcatcttccccttcaacccccagggccacacccaggacaccaacaccttcttcctgtgcaggaccctgcggagcctgggcgtgcaggtgtgccgggtgtctgtggtgcctgatgaggtggccaccatcgctgctgaggtgaccagcttcagcaaccgcttcacccacgtgctgacagctgggggcatcggccccacccatgatgatgtgacctttgaagctgtggcccaggcctttggagatgagctgaagccccaccccaagctggaggccgccaccaaggccctgggcggggagggctgggagaagctgagcctggtgcccagcagcgcccggctgcactacggcacagacccctgcaccggccagcccttccgcttccccctggtgtctgtgagaaatgtgtacctgtttcctggcatccctgagctgctgcggcgggtgctggagggcatgaagggcctcttccagaacccagctgtgcagttccacagcaaggagctgtatgtggccgcagatgaggccagcatcgcccccatcctggccgaggcccaggcccactttggaagaaggctgggcctgggcagctacccagactggggcagcaactactaccaggtgaagctgaccctggacagcgaggaggagggccccctggaggagtgcctggcctacctgacagcccggctgccccagggcagcctggtgccctacatgcccaatgctgtggagcaggccagcgaggccgtgtacaagctggccgagagcggccgggacctgatggaggagggccactacgcccagagccactggtggcaccccaggagccagtag

SEQ ID NO: 71858 - DNA, 1017 bp, Artificial Sequence
  derived and/or modified sequence
atgcagcccagcagcagcaccccacccctgcacccctacagcacagatggcctcatcttccccttcaacccccagggccacacccaggacaccaacaccttcttcctgtgcaggaccctgcggagcctgggcgtgcaggtgtgccgggtgtctgtggtgcctgatgaggtggccaccatcgctgctgaggtgaccagcttcagcaaccgcttcacccacgtgctgacagctgggggcatcggccccacccatgatgatgtgacctttgaagctgtggcccaggcctttggagatgagctgaagccccaccccaagctggaggccgccaccaaggccctgggcggggagggctgggagaagctgagcctggtgcccagcagcgcccggctgcactacggcacagacccctgcaccggccagcccttccgcttccccctggtgtctgtgagaaatgtgtacctgtttcctggcatccctgagctgctgcggcgggtgctggagggcatgaagggcctcttccagaacccagctgtgcagttccacagcaaggagctgtatgtggccgcagatgaggccagcatcgcccccatcctggccgaggcccaggcccactttggaagaaggctgggcctgggcagctacccagactggggcagcaactactaccaggtgaagctgaccctggacagcgaggaggagggccccctggaggagtgcctggcctacctgacagcccggctgccccagggcagcctggtgccctacatgcccaatgctgtggagcaggccagcgaggccgtgtacaagctggccgagagcggcaactacctgatgttccagacccccagccgcagctgcatctctgctgccagccccctgagcctgtcctggaacagcttctaccgcaccctgagccgggagcaggccatccctgagaaccagatcgccagcccccccagcgaggccaagggagctgaggagccctggatgggccccttccctggccagcagggctag

SEQ ID NO: 71859 - DNA, 513 bp, Artificial Sequence
  derived and/or modified sequence
atgaagggcctgttccagaaccccgccgtgcagttccacagcaaggaactctatgtggccgcagacgaagcatcgattgcgcctattctagcagaggcacaggcccattttgggaggcggctaggactgggcagctaccccgattggggttcaaattactaccaagttaaattaaccctggactccgaggaggagggtcccctggaggagtgtctggcctacctaacagcccgcctacctcaaggctctttagtgccatacatgccaaatgcggtcgaacaagccagcgaggcggtgtataaactcgcagaatcggggaattacctgatgtttcagacaccatctagaagctgcatcagtgccgcttctcctctcagcctttcctggaattccttctaccgcacgctgtctcgagagcaagccatcccggaaaaccaaattgccagccctccctctgaggccaagggcgccgaggagccatggatggggccttttccagggcagcagggttag

SEQ ID NO: 71860 - DNA, 885 bp, Artificial Sequence
  derived and/or modified sequence
atgcagcccagcagcagcaccccccccctgcacccctacagcaccgatggattgatatttccctttaatcctcagggccacactcaggatactaacacgtttttcttatgtcgaacactccgttcactcggcgtgcaagtttgtcgcgttagcgtcgtccctgatgaagtcgctaccatcgccgccgaggtgacttctttctccaacaggttcactcacgtccttactgcagggggcataggtcccacacacgacgacgtgactttcgaggctgtggcccaggcattcggggacgagcttaagccgcatccaaaactggaggcggccaccaaagcattggggggggaaggctgggagaagctgtcgctggttcccagtagtgctcgcctgcactatggaacggatccttgtacagggcagcccttccggttcccccttgtctctgtcaggaacgtctacttgtttcctggaattcctgagctgctccgccgggtgttggagggcatgaagggactgtttcagaatccagcagtgcagttccacagcaaagagctgtatgtcgctgccgatgaggcgtctatagcccctatcctcgcagaagcacaagctcatttcggcaggaggttgggcctggggagctatcctgactgggggtccaactattatcaggtgaagcttactctggacagcgaggaggagggtcctctggaggagtgtctcgcttacctgaccgctaggctgccccaaggctctcttgtgccatatatgccaaacgccgtggaacaggcttcagaagcggtctacaagctggcagagagtggcagagacctgatggaggaggggcactacgcccagtcccactggtggcatcccaggtcacaatag

SEQ ID NO: 71861 - DNA, 1017 bp, Artificial Sequence
  derived and/or modified sequence
atgcagcccagcagcagcaccccccccctgcacccctacagcaccgacggactgatattccccttcaacccccagggtcacacccaagacaccaacacctttttcctatgtagaacgttgcggtccctgggcgtgcaggtgtgtcgagtgagtgtggtgcctgacgaagttgctactatagccgcagaggtaacgtctttctcgaatcggttcactcacgtgttgacagcaggtggcatcggccccacacacgatgatgtgacatttgaggccgttgcacaagcgttcggggacgaactgaagcctcatcccaaactcgaagcagctaccaaggcgctcgggggggaagggtgggagaagttatcattggtgccctccagcgcaaggttacattatggaactgacccttgcacgggccagcccttccgattcccacttgtgtctgttcggaatgtgtatctgttccccggcatccccgagctccttagacgggtcctcgagggaatgaagggtttgttccaaaatcctgctgttcagttccatagtaaggagctctacgtggccgctgacgaggcctcaattgctcctatcctggcagaagcccaggcccacttcgggaggcggctcggtctgggtagctacccagattgggggtccaattattatcaggtgaagctcactttagactccgaagaggagggcccactggaagaatgcctggcctacctgacggcccggttaccccaaggctctttagtgccctacatgcccaatgctgtcgaacaggccagcgaagcggtctataagctcgccgagtctggcaactatctgatgttccagacccccagcaggtcctgtatttccgccgcgagccccctaagtctgtcttggaattccttctataggacactgtccagggagcaggccatcccggagaatcaaattgcgtccccccccagcgaagctaagggggccgaggagccttggatggggcccttccccggccagcagggctag

SEQ ID NO: 71862 - DNA, 513 bp, Artificial Sequence
  derived and/or modified sequence
atgaagggactgtttcagaatccagccgtgcagttccactcgaaggaactctacgtggccgctgatgaggctagcatcgcccctattctggccgaggctcaggctcactttgggagacgcctcggattagggagttatccggattggggctctaactattatcaagtgaaactgacactggacagtgaagaagaaggcccacttgaggaatgtttggcttatctgacagcccgactaccccaggggtccctggtgccttacatgccgaacgccgtcgaacaagcgtctgaggcggtgtacaaacttgccgaatccgggaattacttaatgttccaaacaccttcccggtcctgtattagtgccgcatctcccttgtctctgtcttggaattccttctacagaacattgagtagagagcaggccattccagagaatcagatcgccagccctccatcagaggcaaagggcgcagaggaaccctggatgggaccgtttcctggccagcaagggtag

SEQ ID NO: 71863 - DNA, 885 bp, Artificial Sequence
  derived and/or modified sequence
atgcagccctcatcctccacaccccctctccacccatactccactgacggccttatcttccctttcaatcctcagggacacacgcaggacactaacacctttttcctgtgcagaacactgcggtcccttggagtgcaggtctgtcgcgtgagcgtggtgccggacgaggtggctaccattgccgctgaagtcacttccttctccaatagattcactcacgtccttactgctggaggaatcggaccaacacacgacgacgtgacttttgaagccgtcgcccaggcgtttggtgatgaactgaagccccatcctaaactcgaggctgccacaaaggcgttagggggagaagggtgggagaaactctccctggtgccctcaagcgcaaggcttcactatggtaccgatccatgcacaggccagccatttaggtttccccttgtgagcgtgagaaacgtgtatctctttcctggcatacccgagctcctacgacgggtcctcgagggcatgaagggtctcttccagaatccagccgttcaattccattctaaggaattgtacgtggcggcagacgaggccagcattgccccaatcctggcagaagcccaggcccactttggacgcaggcttgggctaggcagttatcctgattggggaagtaactattaccaagtcaagctgacactggacagcgaggaagaaggtccactggaggaatgtttggcctacctgacagcacgacttcctcagggatcattagttccttatatgccaaatgctgtagagcaggcttctgaggctgtatataaattggcggagtccggcagagacctgatggaagagggccattacgcccagtcacattggtggcaccctcgaagccagtag

SEQ ID NO: 71864 - DNA, 1017 bp, Artificial Sequence
  derived and/or modified sequence
atgcagccctccagcagtacccccccactgcatccttattctaccgacgggcttatatttcctttcaatccgcagggacacactcaggatacaaataccttctttctgtgccgaaccctgagatcgttgggcgtacaggtgtgccgggtgagtgtggtaccggatgaggtggcaacaatcgcggcagaggtcacctcctttagtaatagattcactcatgtcttgactgccggtggcatcggaccgacccatgatgacgtgaccttcgaggccgtcgcccaagctttcggtgatgaactgaagccacatcccaaacttgaagccgctaccaaggcgctcggcggagagggttgggagaaactctccctggtaccaagctccgcaagactccattacggtaccgatccatgtaccggccagccattccgtttcccactggtcagtgtgaggaacgtgtacttattcccaggcatacctgaactcctgcgtagggtactggaggggatgaaaggactgtttcagaatccagcagtacagtttcattctaaggagctgtatgttgctgcggatgaagcgtcaatcgctccaatactcgcagaggcacaggcgcacttcggacgacgcttagggctgggcagttatcccgactggggtagcaattactaccaggttaagctgacgctggattcggaggaggagggcccactagaagaatgtctcgcttacctcacagctaggttgccccaaggcagtctggtcccgtacatgcccaacgcagtggaacaggcatccgaggcagtatataagctcgctgagtctggaaattacctaatgtttcagacaccgagcaggtcctgcattagtgccgcatcaccactgagcctgtcctggaattctttttaccggacactctctagagagcaagccatcccggagaatcagattgcctcacctccatctgaagccaagggtgccgaagaaccctggatgggtcccttccccggtcaacagggatag

SEQ ID NO: 71865 - DNA, 513 bp, Artificial Sequence
  derived and/or modified sequence
atgaagggcctgttccagaaccccgccgtgcagttccacagcaaggagctgtacgtggccgccgacgaggccagcatcgcccccatcctggccgaggcccaggcccacttcggcagaagactgggcctgggcagctaccccgactggggcagcaactactaccaggtgaagctgaccctggacagcgaggaggagggccccctggaggagtgcctggcctacctgaccgccagactgccccagggcagcctggtgccctacatgcccaacgccgtggagcaggccagcgaggccgtgtacaagctggccgagagcggcaactacctgatgttccagacccccagcagaagctgcatcagcgccgccagccccctgagcctgagctggaacagcttctacagaaccctgagcagagagcaggccatccccgagaaccagatcgccagcccccccagcgaggccaagggcgccgaggagccctggatgggccccttccccggccagcagggctag

SEQ ID NO: 71866 - DNA, 885 bp, Artificial Sequence
  derived and/or modified sequence
atgcagcccagcagcagcaccccccccctgcacccctacagcaccgacggcctgatcttccccttcaacccccagggccacacccaggacaccaacaccttcttcctgtgcagaaccctgagaagcctgggcgtgcaggtgtgcagagtgagcgtggtgcccgacgaggtggccaccatcgccgccgaggtgaccagcttcagcaacagattcacccacgtgctgaccgccggcggcatcggccccacccacgacgacgtgaccttcgaggccgtggcccaggccttcggcgacgagctgaagccccaccccaagctggaggccgccaccaaggccctgggcggcgagggctgggagaagctgagcctggtgcccagcagcgccagactgcactacggcaccgacccctgcaccggccagcccttcagattccccctggtgagcgtgagaaacgtgtacctgttccccggcatccccgagctgctgagaagagtgctggagggcatgaagggcctgttccagaaccccgccgtgcagttccacagcaaggagctgtacgtggccgccgacgaggccagcatcgcccccatcctggccgaggcccaggcccacttcggcagaagactgggcctgggcagctaccccgactggggcagcaactactaccaggtgaagctgaccctggacagcgaggaggagggccccctggaggagtgcctggcctacctgaccgccagactgccccagggcagcctggtgccctacatgcccaacgccgtggagcaggccagcgaggccgtgtacaagctggccgagagcggcagagacctgatggaggagggccactacgcccagagccactggtggcaccccagaagccagtag

SEQ ID NO: 71867 - DNA, 1017 bp, Artificial Sequence
  derived and/or modified sequence
atgcagcccagcagcagcaccccccccctgcacccctacagcaccgacggcctgatcttccccttcaacccccagggccacacccaggacaccaacaccttcttcctgtgcagaaccctgagaagcctgggcgtgcaggtgtgcagagtgagcgtggtgcccgacgaggtggccaccatcgccgccgaggtgaccagcttcagcaacagattcacccacgtgctgaccgccggcggcatcggccccacccacgacgacgtgaccttcgaggccgtggcccaggccttcggcgacgagctgaagccccaccccaagctggaggccgccaccaaggccctgggcggcgagggctgggagaagctgagcctggtgcccagcagcgccagactgcactacggcaccgacccctgcaccggccagcccttcagattccccctggtgagcgtgagaaacgtgtacctgttccccggcatccccgagctgctgagaagagtgctggagggcatgaagggcctgttccagaaccccgccgtgcagttccacagcaaggagctgtacgtggccgccgacgaggccagcatcgcccccatcctggccgaggcccaggcccacttcggcagaagactgggcctgggcagctaccccgactggggcagcaactactaccaggtgaagctgaccctggacagcgaggaggagggccccctggaggagtgcctggcctacctgaccgccagactgccccagggcagcctggtgccctacatgcccaacgccgtggagcaggccagcgaggccgtgtacaagctggccgagagcggcaactacctgatgttccagacccccagcagaagctgcatcagcgccgccagccccctgagcctgagctggaacagcttctacagaaccctgagcagagagcaggccatccccgagaaccagatcgccagcccccccagcgaggccaagggcgccgaggagccctggatgggccccttccccggccagcagggctag

SEQ ID NO: 71868 - protein, 1024 aa, Artificial Sequence
  derived and/or modified sequence
MASVPVYCLCRLPYDVTRFMIECDMCQDWFHGSCVGVEEEKAADIDLYHCPNCEVLHGPSIMKKRRGSSKGHDTHKGKPVKTGSPTFVRELRSRTFDSSDEVILKPTGNQLTVEFLEENSFSVPILVLKKDGLGMTLPSPSFTVRDVEHYVGSDKEIDVIDVTRQADCKMKLGDFVKYYYSGKREKVLNVISLEFSDTRLSNLVETPKIVRKLSWVENLWPEECVFERPNVQKYCLMSVRDSYTDFHIDFGGTSVWYHVLKGEKIFYLIRPTNANLTLFECWSSSSNQNEMFFGDQVDKCYKCSVKQGQTLFIPTGWIHAVLTPVDCLAFGGNFLHSLNIEMQLKAYEIEKRLSTADLFRFPNFETICWYVGKHILDIFRGLRENRRHPASYLVHGGKALNLAFRAWTRKEALPDHEDEIPETVRTVQLIKDLAREIRLVEDIFQQNVGKTSNIFGLQRIFPAGSIPLTRPAHSTSVSMSRLSLPSKNGSKKKGLKPKELFKKAERKGKESSALGPAGQLSYNLMDTYSHQALKTGSFQKAKFNITGACLNDSDDDSPDLDLDGNESPLALLMSNGSTKRVKSLSKSRRTKIAKKVDKARLMAEQVMEDEFDLDSDDELQIDERLGKEKATLIIRPKFPRKLPRAKPCSDPNRVREPGEVEFDIEEDYTTDEDMVEGVEGKLGNGSGAGGILDLLKASRQVGGPDYAALTEAPASPSTQEAIQGMLCMANLQSSSSSPATSSLQAWWTGGQDRSSGSSSSGLGTVSNSPASQRTPGKRPIKRPAYWRTESEEEEENASLDEQDSLGACFKDAEYIYPSLESDDDDPALKSRPKKKKNSDDAPWSPKARVTPTLPKQDRPVREGTRVASIETGLAAAAAKLAQQELQKAQKKKYIKKKPLLKEVEQPRPQDSNLSLTVPAPTVAATPQLVTSSSPLPPPEPKQEALSGSLADHEYTARPNAFGMAQANRSTTPMAPGVFLTQRRPSVGSQSNQAGQGKRPKKGLATAKQRLGRILKIHRNGKLLL

SEQ ID NO: 71869 - protein, 1060 aa, Artificial Sequence
  derived and/or modified sequence
MNRSRAIVQRGRVLPPPAPLDTTNLAGRRTLQGRAKMASVPVYCLCRLPYDVTRFMIECDMCQDWFHGSCVGVEEEKAADIDLYHCPNCEVLHGPSIMKKRRGSSKGHDTHKGKPVKTGSPTFVRELRSRTFDSSDEVILKPTGNQLTVEFLEENSFSVPILVLKKDGLGMTLPSPSFTVRDVEHYVGSDKEIDVIDVTRQADCKMKLGDFVKYYYSGKREKVLNVISLEFSDTRLSNLVETPKIVRKLSWVENLWPEECVFERPNVQKYCLMSVRDSYTDFHIDFGGTSVWYHVLKGEKIFYLIRPTNANLTLFECWSSSSNQNEMFFGDQVDKCYKCSVKQGQTLFIPTGWIHAVLTPVDCLAFGGNFLHSLNIEMQLKAYEIEKRLSTADLFRFPNFETICWYVGKHILDIFRGLRENRRHPASYLVHGGKALNLAFRAWTRKEALPDHEDEIPETVRTVQLIKDLAREIRLVEDIFQQNVGKTSNIFGLQRIFPAGSIPLTRPAHSTSVSMSRLSLPSKNGSKKKGLKPKELFKKAERKGKESSALGPAGQLSYNLMDTYSHQALKTGSFQKAKFNITGACLNDSDDDSPDLDLDGNESPLALLMSNGSTKRVKSLSKSRRTKIAKKVDKARLMAEQVMEDEFDLDSDDELQIDERLGKEKATLIIRPKFPRKLPRAKPCSDPNRVREPGEVEFDIEEDYTTDEDMVEGVEGKLGNGSGAGGILDLLKASRQVGGPDYAALTEAPASPSTQEAIQGMLCMANLQSSSSSPATSSLQAWWTGGQDRSSGSSSSGLGTVSNSPASQRTPGKRPIKRPAYWRTESEEEEENASLDEQDSLGACFKDAEYIYPSLESDDDDPALKSRPKKKKNSDDAPWSPKARVTPTLPKQDRPVREGTRVASIETGLAAAAAKLAQQELQKAQKKKYIKKKPLLKEVEQPRPQDSNLSLTVPAPTVAATPQLVTSSSPLPPPEPKQEALSGSLADHEYTARPNAFGMAQANRSTTPMAPGVFLTQRRPSVGSQSNQAGQGKRPKKGLATAKQRLGRILKIHRNGKLLL

SEQ ID NO: 71870 - protein, 114 aa, Artificial Sequence
  derived and/or modified sequence
MASVPVYCLCRLPYDVTRFMIECDMCQDWFHGSCVGVEEEKAADIDLYHCPNCEVLHGPSIMKKRRGSSKGHDTHKGKPVKTGSPTFVRELRSRTFDSSDEVILKPTGNQLTVE

SEQ ID NO: 71871 - protein, 126 aa, Artificial Sequence
  derived and/or modified sequence
MASVPVYCLCRLPYDVTRFMIECDMCQDWFHGSCVGVEEEKAADIDLYHCPNCEVLHGPSIMKKRRGSSKGHDTHKGKPVKTGSPTFVRELRSRTFDSSDEVILKPTGNQLTVEFLEENSFSVPIL

SEQ ID NO: 71872 - protein, 97 aa, Artificial Sequence
  derived and/or modified sequence
MASVPVYCLCRLPYDVTRFMIECDMCQDWFHGSCVGVEEEKAADIDLYHCPNCEVLHGPSIMKKRRGSSKGHDTHKGKPVKTGSPTFVRELRSRTFD

SEQ ID NO: 71873 - DNA, 3075 bp, Artificial Sequence
  derived and/or modified sequence
atggcctcagtcccggtttactgcctgtgccgcttgccatacgatgtcacaaggttcatgatcgagtgcgacatgtgccaggactggttccatggttcctgtgtcggggttgaggaagagaaggccgctgatatcgatctctaccattgtcccaattgtgaagtcctgcatggccctagtatcatgaagaaaaggcgcggaagctctaagggacacgacacccacaagggcaagcccgtcaagactggatcccccaccttcgtgagggagctcaggtcgaggacttttgactcctctgacgaggttatcctgaagcctaccgggaaccagctgacggtcgagttcctggaggagaattctttctcagtgcctatcttggttctgaagaaagacggattggggatgactcttcccagtccatcctttaccgtcagagatgttgagcactacgttgggagtgacaaggaaatcgacgtgatcgatgtcacccggcaggccgattgcaagatgaagttaggggatttcgtgaagtattactactctggaaaaagggaaaaagtattgaatgtgatttctctcgagttcagtgacacacgtctgtcaaacctagtcgaaacccctaaaattgtgcggaaactgagttgggtggaaaacctgtggcccgaagagtgcgtcttcgagaggccaaacgtccagaaatattgtttgatgtccgttcgggattcttatacggacttccatatcgactttgggggtacctcggtgtggtatcatgtgcttaaaggagagaagatcttctaccttataaggcctaccaatgcaaacctcacactgtttgagtgctggtcatcatccagcaaccagaatgagatgttttttggcgaccaggttgacaagtgttataaatgctcagtgaagcaaggacagactctgttcattcccacgggttggattcacgccgtgctgacgcctgttgattgcctggcctttggaggtaactttctgcacagcttgaatattgagatgcagttgaaagcctacgagatcgagaagcggctctcgacagcagatctgttccgcttcccaaacttcgaaactatctgctggtacgttggcaaacatatcctggatattttccgcgggttgagggaaaatcggcgccatcctgcatcgtatctggtgcatggtggcaaggccctgaacctggcttttagagcctggactcgcaaagaggccctccccgatcacgaagacgaaatcccagagacagtgagaacggtacagctgatcaaggacttggcgcgggaaatccgcctggttgaggacatattccagcagaatgtcgggaagactagcaacatttttgggcttcaaaggatctttcctgccggttctattccgctaacaaggcctgcccactcaacctcggtcagcatgtcaagactttcattgcccagtaagaatgggtccaaaaagaaaggactgaaacccaaggagttatttaagaaagccgagcggaaaggcaaagaatccagcgccctcgggcctgccgggcagctgagctataatttgatggacacctacagccatcaagcgctgaagacaggcagcttccaaaaagctaaattcaacattaccggtgcctgcttgaacgactcagacgatgacagtcccgacttagatttggatgggaatgagtctcccctagcactgctgatgtcaaacggatcaaccaagcgggtaaaaagtctatccaagtccaggaggactaagattgccaaaaaggtagacaaggctagattgatggccgagcaggtaatggaagatgaatttgatcttgatagtgacgatgagttacagattgacgagcgactcggcaaagaaaaggcgacgctgataatacgccccaaattcccaaggaaattaccaagagcaaaaccctgttcagatcctaatcgcgtgcgagagcccggcgaagtcgagttcgacatcgaggaggactatactacagatgaagacatggtcgagggcgtggaaggcaaactcggcaatggatctggagctgggggcatccttgacctgctcaaagcatcaagacaagtgggcggccccgattatgcagccctgacagaagcacctgcctctccgagcactcaggaggctatccagggcatgttgtgcatggcgaatctccagagctcaagttctagtccggctacaagttccttgcaggcctggtggacaggtggacaggaccgatcctccggaagttcctcttctggcctgggaactgtgagcaactcccccgccagccaaagaactcccggaaagagacctataaaacgcccggcgtattggcggacagaaagcgaagaggaagaagagaatgcgagtctggatgaacaagactcactgggggcctgctttaaggatgctgaatacatatatccctccctggagagtgatgacgacgaccccgcccttaaatcccgtccgaaaaaaaagaagaactctgatgatgcaccgtggtccccaaaggcacgagtaactcccactctgccgaaacaggatagacctgttcgtgagggaactagggttgcctctattgaaaccgggctggcagctgctgctgcaaagctcgcccagcaggaactccaaaaggcccaaaagaaaaaatatattaagaaaaagcccctcctgaaagaggtcgaacaacccaggccccaagactcaaatctgagcctgacagtgcccgcgcctacagttgccgctacgcctcagctggtcacgagctccagtccactgcctccgccagaaccgaaacaggaagcactgtccgggagcctggcagaccatgaatacactgccaggcctaatgcgttcggcatggcccaagcaaacaggagtacaacccccatggccccgggcgtctttcttacgcaacgaagaccatccgtaggatcccagtcaaatcaggccggccagggaaaacgtccaaagaaaggtttagcaactgcgaaacaacggttgggccgcattctgaaaatccacaggaatggtaaactactcttgtag

SEQ ID NO: 71874 - DNA, 3183 bp, Artificial Sequence
  derived and/or modified sequence
atgaataggtcacgagcgattgtgcaacggggccgggtactgccccctcccgccccccttgacactaccaaccttgcaggcagaaggactttgcagggtagggccaagatggcgtcagtccccgtgtactgcctctgcaggctcccttatgatgtcactcgctttatgatcgaatgcgacatgtgccaagattggtttcacggctcctgcgtgggtgtggaagaggagaaggcggcggacatcgacctgtatcactgcccaaattgcgaggtccttcacgggcccagcattatgaagaaacgccgaggctcctcaaagggacacgatacccataaaggaaagccagtcaagactggttcccccacctttgtacgagagctcaggtctcgaaccttcgactcgagcgatgaggtcattctgaagcccactggcaaccagcttacagttgagttcctagaggagaattcattcagcgtgcccattctggtgctcaagaaggacggcttaggtatgaccctgccaagtccctcattcactgttcgcgatgtggagcactacgtgggatccgataaggagatcgatgtaatcgatgtcacacgccaagccgattgcaaaatgaagttgggcgactttgtgaagtactactatagtggaaagcgagagaaggtactgaatgtgatctcgctggagttctctgacacacgcctgtctaatctggttgaaacacccaagatcgttaggaaacttagttgggtggaaaatctgtggcctgaagagtgcgtattcgagcggcccaacgtccagaagtattgtctcatgagtgtgagagacagttacaccgacttccacattgattttgggggaacgagcgtttggtaccacgtactgaaaggagagaagatcttctacctaataagacctaccaacgctaacctgactctatttgagtgctggtcttcttctagcaatcagaacgagatgtttttcggggaccaggttgacaagtgttataagtgcagcgtgaagcagggtcagacccttttcatcccaacgggctggatacatgctgtgctgactccggtcgattgtctggctttcggggggaatttcctgcattctcttaacatcgagatgcagctgaaagcatacgagattgagaagaggctctcaacggccgacctgttccgcttccctaactttgaaaccatctgctggtacgtgggcaaacacattttggatatctttcggggcctgcgggaaaatcgccgacatccagcctcgtacctggtgcacgggggcaaggcactgaacctggcctttagagcttggacaagaaaagaggccctgcccgatcatgaggacgaaatacccgaaaccgtacgcaccgtgcagttgataaaggacctcgcccgagaaatccgcctcgtcgaagatattttccaacaaaacgttggaaagacatctaatatttttgggttacagcgcattttcccagctggcagcatcccactcaccaggcctgctcattcgacaagtgttagcatgtctcgactctctctgccatcaaagaatggcagcaaaaaaaagggcctaaagccaaaagaactgtttaaaaaagctgagaggaagggtaaagagagcagtgcactcgggcccgccggtcaacttagctacaacctgatggatacctacagccaccaggctctcaagaccgggtctttccagaaggcgaagtttaacattaccggcgcatgtttaaatgattccgatgatgacagccccgacttggacctcgatggtaacgaaagtccactggcgctgttgatgagtaacggctctactaagagggtaaaatctctttcgaaaagccgacgaactaaaatcgctaagaaagtcgataaagctagactgatggcggaacaggtgatggaagatgagttcgacctggattcagatgatgaattacaaattgacgagcggctggggaaggagaaagctaccctgattattaggccaaaattcccccgcaagctgcccagggcaaaaccttgcagtgacccgaacagggtgcgggagcctggagaagtggagttcgacattgaagaagactacaccacagacgaagacatggtggagggagtggaaggtaaactcgggaacggaagtggtgcgggtggcatcttggatctgctaaaggccagtcgacaggtcggcggccctgactacgcggccctgactgaagccccagcctcccctagtacccaggaggctatccagggcatgctctgcatggctaacctccagtcaagtagtagttctcccgcaacttcgtctcttcaggcttggtggacaggcgggcaagaccgtagcagcggctcttcctcatccggcttgggcactgtgagtaactctcctgccagccaacggacccctggcaaaaggcccatcaaaaggcccgcatactggcgaactgaatctgaggaggaggaagagaatgcctccctggatgaacaggattctttgggcgcatgttttaaagatgctgagtatatctacccttccctggagtcagatgacgacgatcccgccttaaagagtcggccaaaaaagaagaaaaattccgatgatgcaccatggtcgcctaaagctagagtcactccgaccctgcccaaacaggaccgtcctgtacgggaggggactagagtggccagtatagagactggactggcagctgcagccgccaaactggctcagcaagagctgcagaaagcccagaagaaaaagtatattaagaagaagccacttctgaaggaagtcgaacagcccagaccccaggacagcaatttgtctctgacagtgcccgcccctacggttgctgctacccctcaactcgttacctccagcagtcctttgcctccgcccgaacctaagcaagaggccttatctgggagtttggctgatcacgaatacacagctagacccaacgcctttggcatggcgcaagctaatcgctcaacaacacctatggcgcccggggtctttttaacacagcggcggcctagtgtcggctcgcaaagcaaccaggctgggcagggcaagcgcccaaaaaaagggctcgccaccgctaagcagcggctcgggcgaatcttaaagatacaccggaacggtaagctcctgctgtag

SEQ ID NO: 71875 - DNA, 3075 bp, Artificial Sequence
  derived and/or modified sequence
atggcctctgtgcctgtgtactgcctgtgccgcctgccctatgatgtgacccgcttcatgattgaatgtgacatgtgccaggactggttccacggcagctgtgtgggcgtggaggaggagaaggctgctgacatcgacctgtaccactgccccaactgtgaggtgctgcacggccccagcatcatgaagaagagaagaggcagcagcaagggccatgacacccacaagggcaagcctgtgaagacaggcagccccacctttgtgcgggagctgcggagcaggacctttgacagcagtgatgaggtgatcctgaagcccactggaaaccagctgactgtggagttcctggaggagaacagcttctctgtgcccatcctggtgctgaagaaggatggcctgggcatgaccctgcccagccccagcttcaccgtgagagatgtggagcactacgtgggcagtgacaaggagattgatgtgattgatgtgacccggcaggccgactgcaagatgaagctgggggactttgtgaagtactactacagcggcaagcgggagaaggtgctgaatgtcatcagcctggagttcagtgacacccggctgagcaacctggtggagacccccaagatcgtgaggaagctgtcctgggtggagaacctgtggccagaagaatgtgtgtttgagcggcccaacgtgcagaagtactgcctgatgtctgtgcgggacagctacacagacttccacatcgactttggaggcacctctgtgtggtaccacgtgctgaagggggagaagatcttctacctgatccggcccaccaatgccaacctgaccctgtttgagtgctggagcagcagcagcaaccagaatgagatgttctttggagaccaggtggacaagtgctacaagtgcagcgtgaagcagggccagaccctcttcatccccaccggctggattcatgctgtgctgacccctgtggactgcctggccttcggcggcaacttcctgcacagcctgaacatcgagatgcagctgaaggcctatgaaattgagaagaggctgagcacagctgacctcttccgcttccccaactttgagaccatctgctggtacgtgggcaagcacatcctggacatcttccggggcctgcgggagaacagaagacacccagccagctacctggtgcatggaggcaaggccctgaacctggccttccgggcctggaccaggaaggaggccctgcctgaccatgaagatgagatccctgagaccgtgaggacagtgcagctgatcaaggacctggcccgggagatccggctggtggaggacatcttccagcagaatgtgggcaagaccagcaacatcttcggcctgcagaggatcttccctgctggcagcatccccctgaccaggcctgcccacagcacctctgtgtccatgagccggctgagcctgcccagcaagaatggcagcaagaagaagggcctgaagcccaaggagctgttcaagaaggccgagaggaagggcaaggagagcagcgccctgggccctgctggccagctgagctacaacctgatggacacctacagccaccaggccctgaagacaggcagcttccagaaggccaagttcaacatcaccggggcctgcctgaatgacagtgatgatgacagcccagacctggacctggatggaaatgaaagccccctggccctgctgatgagcaatggcagcaccaagagggtgaagagcctgagcaagagcaggaggaccaagatcgccaagaaggtggacaaggcccggctgatggccgagcaggtgatggaggatgaatttgacctggacagtgatgatgagctgcagattgatgagcggctgggcaaggagaaggccaccctcatcatccggcccaagttccccaggaagctgccccgggccaagccctgcagcgaccccaacagagtgcgggagcctggagaggtggagtttgacatcgaggaggactacaccacagatgaggacatggtggagggcgtggagggcaagctgggcaatggcagcggggccggcggcatcctggacctgctgaaggccagccggcaggtgggcggccctgactatgctgccctgacagaggccccagccagccccagcacccaggaggccatccagggcatgctgtgcatggccaacctgcagagcagcagcagcagccctgccaccagcagcctgcaggcctggtggacaggaggccaggacaggagcagcggcagcagcagcagcggcctgggcaccgtgagcaacagccctgccagccagaggaccccaggcaagaggcccatcaagaggcctgcctactggaggacagagagcgaggaggaggaggagaatgccagcctggatgagcaggacagcctgggcgcctgcttcaaggatgctgagtacatctaccccagcctggagagtgatgatgatgatcctgccctgaagagccggcccaagaagaagaagaacagtgatgatgccccctggagccccaaggcccgggtgacccccaccctgcccaagcaggacaggcctgtgcgggagggcaccagggtggccagcattgaaacaggcctggccgctgctgctgccaagctggcccagcaggagctgcagaaggcccagaagaagaagtacatcaagaagaagcccctgctgaaggaggtggagcagccccggccccaggacagcaacctgagcctgactgtgcctgcccccaccgtggccgccaccccccagctggtgaccagcagcagccccctgcccccacctgagcccaagcaggaggccctgagcggcagcctggccgaccacgagtacacagcccggcccaatgccttcggcatggcccaggccaacagaagcaccacccccatggcccctggggtcttcctgacccagaggcggcccagcgtgggcagccagagcaaccaggccggccagggcaagaggcccaagaagggcctggccacagccaagcagaggctgggccgcatcctgaagatccacagaaatggcaagctgctgctgtag

SEQ ID NO: 71876 - DNA, 3183 bp, Artificial Sequence
  derived and/or modified sequence
atgaacagaagccgggccatcgtgcagaggggccgggtgctgcccccaccagcccccctggacaccaccaacctggccggccgccgcaccctgcagggccgggccaagatggcctctgtgcctgtgtactgcctgtgccgcctgccctatgatgtgacccgcttcatgattgaatgtgacatgtgccaggactggttccacggcagctgtgtgggcgtggaggaggagaaggctgctgacatcgacctgtaccactgccccaactgtgaggtgctgcacggccccagcatcatgaagaagagaagaggcagcagcaagggccatgacacccacaagggcaagcctgtgaagacaggcagccccacctttgtgcgggagctgcggagcaggacctttgacagcagtgatgaggtgatcctgaagcccactggaaaccagctgactgtggagttcctggaggagaacagcttctctgtgcccatcctggtgctgaagaaggatggcctgggcatgaccctgcccagccccagcttcaccgtgagagatgtggagcactacgtgggcagtgacaaggagattgatgtgattgatgtgacccggcaggccgactgcaagatgaagctgggggactttgtgaagtactactacagcggcaagcgggagaaggtgctgaatgtcatcagcctggagttcagtgacacccggctgagcaacctggtggagacccccaagatcgtgaggaagctgtcctgggtggagaacctgtggccagaagaatgtgtgtttgagcggcccaacgtgcagaagtactgcctgatgtctgtgcgggacagctacacagacttccacatcgactttggaggcacctctgtgtggtaccacgtgctgaagggggagaagatcttctacctgatccggcccaccaatgccaacctgaccctgtttgagtgctggagcagcagcagcaaccagaatgagatgttctttggagaccaggtggacaagtgctacaagtgcagcgtgaagcagggccagaccctcttcatccccaccggctggattcatgctgtgctgacccctgtggactgcctggccttcggcggcaacttcctgcacagcctgaacatcgagatgcagctgaaggcctatgaaattgagaagaggctgagcacagctgacctcttccgcttccccaactttgagaccatctgctggtacgtgggcaagcacatcctggacatcttccggggcctgcgggagaacagaagacacccagccagctacctggtgcatggaggcaaggccctgaacctggccttccgggcctggaccaggaaggaggccctgcctgaccatgaagatgagatccctgagaccgtgaggacagtgcagctgatcaaggacctggcccgggagatccggctggtggaggacatcttccagcagaatgtgggcaagaccagcaacatcttcggcctgcagaggatcttccctgctggcagcatccccctgaccaggcctgcccacagcacctctgtgtccatgagccggctgagcctgcccagcaagaatggcagcaagaagaagggcctgaagcccaaggagctgttcaagaaggccgagaggaagggcaaggagagcagcgccctgggccctgctggccagctgagctacaacctgatggacacctacagccaccaggccctgaagacaggcagcttccagaaggccaagttcaacatcaccggggcctgcctgaatgacagtgatgatgacagcccagacctggacctggatggaaatgaaagccccctggccctgctgatgagcaatggcagcaccaagagggtgaagagcctgagcaagagcaggaggaccaagatcgccaagaaggtggacaaggcccggctgatggccgagcaggtgatggaggatgaatttgacctggacagtgatgatgagctgcagattgatgagcggctgggcaaggagaaggccaccctcatcatccggcccaagttccccaggaagctgccccgggccaagccctgcagcgaccccaacagagtgcgggagcctggagaggtggagtttgacatcgaggaggactacaccacagatgaggacatggtggagggcgtggagggcaagctgggcaatggcagcggggccggcggcatcctggacctgctgaaggccagccggcaggtgggcggccctgactatgctgccctgacagaggccccagccagccccagcacccaggaggccatccagggcatgctgtgcatggccaacctgcagagcagcagcagcagccctgccaccagcagcctgcaggcctggtggacaggaggccaggacaggagcagcggcagcagcagcagcggcctgggcaccgtgagcaacagccctgccagccagaggaccccaggcaagaggcccatcaagaggcctgcctactggaggacagagagcgaggaggaggaggagaatgccagcctggatgagcaggacagcctgggcgcctgcttcaaggatgctgagtacatctaccccagcctggagagtgatgatgatgatcctgccctgaagagccggcccaagaagaagaagaacagtgatgatgccccctggagccccaaggcccgggtgacccccaccctgcccaagcaggacaggcctgtgcgggagggcaccagggtggccagcattgaaacaggcctggccgctgctgctgccaagctggcccagcaggagctgcagaaggcccagaagaagaagtacatcaagaagaagcccctgctgaaggaggtggagcagccccggccccaggacagcaacctgagcctgactgtgcctgcccccaccgtggccgccaccccccagctggtgaccagcagcagccccctgcccccacctgagcccaagcaggaggccctgagcggcagcctggccgaccacgagtacacagcccggcccaatgccttcggcatggcccaggccaacagaagcaccacccccatggcccctggggtcttcctgacccagaggcggcccagcgtgggcagccagagcaaccaggccggccagggcaagaggcccaagaagggcctggccacagccaagcagaggctgggccgcatcctgaagatccacagaaatggcaagctgctgctgtag

SEQ ID NO: 71877 - DNA, 3075 bp, Artificial Sequence
  derived and/or modified sequence
atggccagcgtgcccgtgtactgcctgtgccggctgccctacgacgtgacccgtttcatgatcgagtgtgacatgtgtcaggactggtttcacggctcatgcgtgggggtggaggaggagaaggctgcggacattgatctctaccattgtccaaactgcgaagtgctacacggtccatctatcatgaaaaagaggcgaggttcttcaaagggacacgatacccataagggcaagcccgttaaaacgggctctcctaccttcgtgcgggagctccgcagtagaactttcgactccagcgacgaggttattctgaaacccaccggaaaccaactgacagttgaattcctggaagaaaattccttttcagtccccattctggtactgaaaaaggacggcctcggcatgactcttccgtcccctagtttcacggttcgcgatgtcgagcactatgtggggagcgacaaggaaattgacgtgatcgatgtcacacgccaggcagattgcaaaatgaagctgggcgactttgtcaagtattattattctggcaaaagggagaaagtgctcaacgttatttccctggaattcagcgatactcggctgtcaaacctcgtggagactcccaagattgtccgcaagctctcctgggttgaaaacttgtggcccgaggagtgtgtgttcgaaaggccgaatgtgcaaaaatattgcttgatgagtgtgcgtgactcctataccgacttccacattgacttcggcggtaccagcgtgtggtatcatgtgctgaaaggcgagaagatcttttacctgattcgcccaaccaacgcgaatttgacattgttcgagtgctggtctagttcatcaaaccagaacgagatgttcttcggggaccaagtggataaatgttataaatgctctgttaaacaggggcagactctttttatccctacagggtggatacacgctgtactgaccccggtggactgtctggccttcggtggaaattttcttcactctctgaatatagaaatgcagctaaaggcatacgaaatcgagaagagactatccacagccgacctgtttaggtttccaaatttcgaaactatatgctggtacgttgggaagcacatactggacatctttcgaggtctcagggaaaaccggcgccatccagccagttacctggtccatggggggaaggccctgaatttggcttttagagcatggacccgaaaggaggctcttcccgaccacgaagacgagatccctgagacagtgaggacagttcagttgatcaaagatctcgcaagggagatccgcctggttgaagatattttccagcaaaatgtcgggaagacaagcaacatattcggattacagaggatcttcccagcaggtagcatccccttgactcggccggcacattctacttctgtttcaatgtctcggctgtcactgccaagcaaaaacgggtccaagaagaaggggttaaaaccgaaggaattattcaaaaaggcagagcgaaagggcaaagaaagcagcgccctgggacctgccggacagctgtcttacaatctgatggatacatactcccatcaggcactgaaaactggatcgtttcagaaagctaagttcaatatcacaggtgcctgccttaacgactctgatgatgactccccagacctggatctggatgggaacgagagccctctggctttgttaatgtctaacggtagcaccaagcgggtcaaatcactatcaaagagtaggagaaccaaaattgccaagaaagtggacaaagcaagactcatggccgagcaagtgatggaggacgagtttgacctggattctgacgatgagttgcagatagacgagagactcggtaaggaaaaggccaccctgattattcgtccaaaattccccaggaagctcccccgggcaaagccttgcagcgacccaaacagagttagagaacccggagaagttgagttcgatattgaggaggattacaccactgatgaagatatggtcgaaggggtggagggaaagctcggtaacggtagtggtgcaggtgggatcctggacctccttaaagcttcaagacaggttggtggtcctgactacgccgccctcacagaggcaccggcgagcccttcaacacaagaggctatccagggcatgctgtgtatggccaacctgcagagcagtagttcctcccctgctacctccagcctgcaggcttggtggactggaggacaagatcgcagctccggaagctcctcgagtggtctcgggactgtcagcaatagcccggcctcccagcggaccccgggtaagcgacccatcaagaggccagcatattggagaaccgaatcagaggaggaggaggagaatgcatcactggatgagcaagattcacttggcgcgtgcttcaaggacgctgagtacatctaccccagcctagaatcagatgatgacgaccctgctctgaagtcccgtcccaaaaaaaagaagaactccgacgatgcaccatggtccccaaaagcacgtgtgacacccacccttcccaaacaggatagacctgtgagagaggggacccgcgttgcgtctattgagaccggactggcagcagcagcggccaagcttgcccagcaggagttgcaaaaagcccaaaagaagaaatacataaaaaagaagcccctcctgaaggaggtggaacaaccacggcctcaggactcgaatttatctttaacagtgccagctcccacagtagccgccactccacagctcgtgacaagcagcagtccattgccccctccggagcctaaacaggaggcactgagtggctccctggctgatcacgagtacaccgcacgccccaacgcgtttggtatggcccaagccaaccgaagcacaactccaatggcacctggagtttttctgacacaacgtaggccgtctgttggatcgcagagcaatcaagcgggacaggggaagaggcccaagaaaggcttagccacagctaagcagaggctgggtcgtattctgaaaattcaccggaacggcaagcttctattatag

SEQ ID NO: 71878 - DNA, 3183 bp, Artificial Sequence
  derived and/or modified sequence
atgaaccggagccgggccatcgtgcagcggggccgggtgctgccccccccagcgcctctggacactactaatctggcaggacggcgtaccctccagggacgcgccaagatggcttcagtgcccgtttactgtctgtgtcgcctaccatacgacgttacgaggttcatgatcgagtgtgacatgtgccaggattggttccatgggtcctgtgttggcgtggaggaggaaaaggccgcagacatcgacttatatcattgtcccaattgtgaggtactgcacggcccttcgattatgaagaagagaagaggttccagcaaaggacatgatactcacaagggtaagcctgtcaaaaccggctcccccacatttgtgcgcgaactgaggagccggacctttgatagtagtgatgaggtcatcctcaaacctaccggcaaccagctgaccgtcgagtttctagaagagaattcatttagcgtgcccattctggttctcaagaaagatgggctgggcatgacattgccctcgcccagttttaccgtgcgagacgttgaacactatgtcgggagcgacaaagaaattgatgtgattgatgttacccgtcaggcggactgtaagatgaagctgggtgattttgtcaaatattattactctgggaagagagagaaggtcctgaacgtgatctcacttgagttctcagatacccgattatccaacctggtcgagactcccaagatcgtgagaaaactgagttgggtggagaacctgtggccagaggaatgcgtgttcgagaggccaaatgtgcagaagtattgcctcatgagtgtccgggactcttataccgacttccatattgatttcggaggtacgtccgtgtggtaccacgtgcttaagggggagaaaatattctatctgatccgccccactaacgccaatctcaccctcttcgagtgttggtccagttctagcaaccagaatgaaatgttcttcggagatcaggtggacaaatgttacaagtgtagtgtgaagcagggacaaacgctctttatcccaacaggctggattcatgcagtgctaaccccagtcgactgccttgcatttggaggcaacttcctccactctctgaatatcgagatgcagctgaaagcctacgagatcgagaagcgcctttctacagcagatctgttccgcttcccaaacttcgagaccatctgctggtacgtgggcaagcatatcctcgacatcttccgcggcctcagggagaacaggcggcaccccgcctcctatttagtccatggggggaaagcccttaacctggcctttagagcatggacgcgaaaggaggcactccccgatcacgaagacgagataccggaaacagtgcgaaccgtccaattgatcaaagacttggcgcgggaaattagactcgtcgaggacatttttcagcagaacgtggggaaaacctccaatatcttcggcttgcaaaggattttcccagcaggaagcatcccgttgacacgacccgcgcattccacctccgtgtctatgtccagactctccctgcccagtaaaaacggctccaagaaaaagggcctgaaacccaaggagctgttcaagaaagcagagagaaaagggaaggagtcttccgccctcggcccagccggccagctaagctataatctgatggacacctatagtcaccaggctttaaaaacaggctcctttcaaaaggcgaagtttaatataaccggagcttgccttaatgattccgacgatgattctcccgacctcgatctggatgggaacgagagcccgctggcactgctcatgtccaatggtagtaccaaacgggtgaaatctctcagcaaatccaggaggacaaagatcgctaaaaaggtggacaaagcaaggctgatggcagagcaagtgatggaagacgagtttgacctcgattcggatgacgaactccagattgacgagcgtcttggtaaggagaaggccaccctgatcatccggccgaagttcccacgcaaactgcctagagcaaagccgtgcagtgatcctaaccgcgtccgcgagccaggcgaggtagagttcgatatcgaggaggattatactaccgatgaagacatggtagaaggcgtagagggaaaactcggtaacggctccggggcaggcggaatcctggaccttttaaaagcatctcgccaggtgggcggccctgactatgcagccttaacggaagctccagctagcccctccacacaggaagctatccaggggatgttgtgtatggcaaatttgcagagctcatcaagcagccccgccacatcgagcctgcaggcctggtggaccgggggccaggatagatcctcaggttcttcgtcgtcagggctgggaacagttagcaatagccccgcaagccaacggacaccaggcaaaaggccaatcaaacggcctgcctattggcggaccgaaagtgaggaagaagaggagaacgcttctttggacgagcaggacagtctgggcgcctgtttcaaagatgccgagtacatttatccgtctctggagagtgatgacgatgatcctgccctgaagtctaggcccaaaaagaagaaaaatagtgatgacgctccttggagtcccaaggcccgcgttacccccactcttcctaagcaggacagacctgttcgagagggcactagagttgcttccatcgagactggcctcgcagctgctgccgctaaattagcacagcaagaattgcagaaggctcagaaaaagaaatatattaagaagaagcccctcctaaaggaggtggaacaacctcgtccccaagactcaaacctcagcctcacagtaccggctcctactgtggccgccacaccgcaattggtgactagcagcagcccgctcccgccaccagaacctaagcaggaggcattatccggctccctcgctgatcatgagtataccgcaaggcccaatgcgttcggcatggcccaagccaaccgatccaccacacccatggctccaggagtgttcttgacccagagacggccatctgtgggctcccagtcgaaccaggccgggcagggcaagaggccaaaaaaaggcctggcaacagcaaagcaacggctcggccggatactcaagatacacagaaacggaaagctgctgctgtag

SEQ ID NO: 71879 - DNA, 6062 bp, Artificial Sequence
  derived and/or modified sequence
gcggccgccagactaggcccaagccgcggtctccagtaggcccgaacggccgggccgaggggaatgttgtggaggaggctgctctgaagcaccgttgagcggctggcgccgcgcgacccagcggggggctcgaggggaaggcgagcgaggttcccggcggtacggggactatcccagaattcgacgcgcgtcgccgtaggggccggaactaccggacgagcctccgctgaggcgcttcgcagtcccggagctagcccggctgccggcgtgtcgctggggctgagctccgcgggcgtggagtccttgcagcccaaagcatgaggaggtccctgtaggattctggactgaagacgttcttgtcaggtttggggcgtgaggaggttcctgtcagttggggaagcgttaagattcctctatcgtccagagaggacgcgtgctgccgcctcccgcccctcttgacacgacgaacctggccggccgcagaacgctccagggccgagcgaagatggcctcggtgccggtgtattgcctctgccggctgccttacgatgtgacccgcttcatgatcgagtgtgacatgtgccaggactggtttcatggcagttgtgttggtgttgaagaggagaaggctgctgacattgacctctaccactgccccaactgtgaagtcttgcatgggccctccattatgaaaaaacgccgtggatcttcaaaggggcatgatacacacaaggggaaaccagtgaagaccgggagccctacgttcgtcagagagctccggagtaggacttttgacagctcagatgaagtgattctgaagcccactggaaatcaactgaccgtggaattcctggaagaaaatagcttcagtgtgcccatcctggtcctgaagaaggatgggttgggcatgacgctgccctcgccatcattcactgtgagggatgttgaacactatgttggttctgacaaagagattgatgtgattgatgtgacccgccaggctgactgcaagatgaagcttggtgattttgtgaaatactattacagcgggaagagggagaaagtcctcaatgtcattagtttggaattctctgataccagactttctaaccttgtggagacaccgaagattgttcgaaagctgtcatgggtcgaaaacttgtggccagaggaatgtgtctttgagagacccaatgtacagaagtactgcctcatgagtgtgcgagatagctatacagactttcacattgactttggtggcacctctgtctggtaccatgtactcaagggtgaaaagatcttctacctgatccgcccaacaaatgccaatctgactctctttgagtgctggagcagttcctctaatcagaatgagatgttctttggggaccaggtggacaagtgctacaagtgttccgtgaagcaaggacagacacttttcattcccacagggtggatccatgctgtgctgacgcctgtggactgccttgcctttggagggaacttcttacacagccttaacatcgagatgcagctcaaagcctatgagattgagaagcggctgagcacagcagacctcttcagattccccaactttgagaccatctgttggtatgtgggaaagcacatcctggacatctttcgcggtttgcgagagaacaggagacaccctgcctcctacctggtccatggtggcaaagccttgaacttggcctttagagcctggacaaggaaagaagctctgccagaccatgaggatgagatcccggagacagtgcgaaccgtacagctcattaaagatctggccagggagatccgcctggtggaagacatcttccaacagaacgttgggaagacgagcaatatctttgggctgcagaggatcttcccagccggctccattcccctaaccaggccagcccattccacttcagtgtccatgtccaggctgtcactgccctccaaaaatggttcaaagaagaaaggcctgaagcccaaggaactcttcaagaaggcagagcgaaagggcaaggagagttcagccttggggcctgctggccagttgagctataatctcatggacacatacagtcatcaggcactgaagacaggctctttccagaaagcaaagttcaacatcactggtgcctgcttgaatgactcagatgacgactcaccagacttggaccttgatggaaatgagagcccattggccctattgatgtctaacggcagtacgaaaagggtgaagagtttatccaaatctcggcgaaccaagatagcaaagaaggtagacaaggctaggctgatggcagaacaggtgatggaagacgaatttgacttggattcagatgatgagctgcagattgacgagagattgggaaaggagaaggcgaccctgataataagaccaaaatttccccggaaattgccccgtgcgaagccttgctctgaccccaaccgagttcgtgaaccaggagaagttgagtttgacattgaggaggactatacaacagatgaggacatggtggaaggggttgaaggcaagcttgggaatggtagtggcgctggtggcattcttgatctgctcaaggccagcaggcaggtggggggacctgactatgctgccctcaccgaggccccagcttctcccagcactcaggaggccatccagggcatgctgtgcatggccaacctgcagtcctcatcgtcctcaccggctacctctagcctgcaggcctggtggactgggggacaggatcgaagcagtgggagctccagcagtgggctgggcacagtgtctaacagtcctgcttcccagcgcaccccagggaagcggcccatcaagcggccagcatactggagaaccgagagcgaggaggaggaggagaacgccagtctggatgaacaggacagcttgggagcgtgcttcaaggatgcagagtatatctatccttcactggagtctgatgatgatgaccctgctttgaaatctcgacccaagaaaaagaagaattcagatgatgctccatggagtcctaaagcccgcgtgaccccaactctgccgaagcaggaccgtcctgtgcgtgaggggacccgggtagcctctattgagacaggtttggctgcagcagctgcaaagctggcccagcaggagctacagaaggcccaaaagaagaaatatatcaagaagaagcctttgctgaaggaggtagaacagcctcgccctcaagactccaatctcagtctgacagtaccagcccccactgtggctgccacaccacaacttgtcacctcctcctcacccctgcctcctcctgagcctaaacaagaggccctgtcaggaagtctcgctgaccatgagtacaccgctcgtcccaatgcctttggcatggcccaggcaaaccgcagcaccacacctatggcccccggtgtcttcttgacccagcggcgcccttcagttggctcccagagcaatcaggcaggacaaggaaagcgtcccaaaaagggcctggccacagcaaagcagagactcggccgtatcctgaaaatccacagaaatggcaaactacttctgtgagccctcctgtgtcccacccctcacccctttacccccattgccttctccattgtcaactcttggggcactcctggatcctatctgccctggacaaggtgctgaggtgcattgtcctgctttcttgggacttaccaaaggcacggacccctccaccgactccttctagttcccttccccactttcactagagcatcctgcctgccttctccactgaggagcaggtaaatgggagaggtttccagctgactagaaccctcttttctactcgtccaaaccactcccgtcacctgccttgtctgttctttattcttcatcccccgctagagctggaaggcaggatgaggagaggtatgaaggagcctgagccatgaagtgggaagcccagtgcttgacactttctgcaactctagccctatatccagaagcctgcccacctccacccattctgtttgccccatttccccagtccagtggacatgccccacctccagacttgctcatgggagaaggctgtggtctctgccccctcttgccaaatgcttcatggaaatgaagaggaaggcctagagcctccttcctgccccactgtgggccatttccagaagtggcctagaaatgccaacttcacttacctttcaaaagaaaggtgattcctatcacttgtcaaggtagggagaggtcagatgcccaagcctttgaccacggttttgtagcctgttggaggaagctacttttagctggctacacatgaggccacttgttttagggtgagctccagggatttgcctggattttgaaatcatgtagaacattatccacgtggctgtggctgtggctgtggctgggccctggcaggtggaaaaccatctcccagaaacctgaaagcacctgccaatgacgcagataaccctggccctacagcctgcttgctccgcctataccacagagcacagcctggacattatggagggtgtggcgggacggcccacacctgggtcctccatcgggaacttttcatgcttctttctccacctgaggtcttggtctgaagaagacctcaggactcacatcttcactcctgggcctttgcacttccagacgacaggtcatcgttcaagcagaatgcagacaggccattcacgagcccaagttgaagagaagagacgcccatccgtgaaggagcagaccatccatccgatcctccccttcccctgtccttccttcgtggattgtctccattgtccagacagtgcccccacctcccaccgccttgcctcactggcaatctggactcgatggagaacatccccccacctccatttggcactacccaagtggagtgtacccttgccctttccacctgtaccacccactccaacctcaccccagcttgcccaatgcttctggggaatttaatagctaccatgcaggccacagggaatttgtgaggcttcttttgtcatctttgtatctccagtttgtctttcttttctccatagccctgcctctactttccttccttggaatcaggggttcctttagcccatttgctttctctaccttggggaccccaggggccaagcagttctccatctagtcacaccaaaggcaaaaagcctggctacctcccccctagcacgtgagtccctactcccctcccctctgtttctgcccagctttgcttattttggggatttcaaggcagcagagggtagtgaggggagagcaggagaagcctctgtcctgtataggcaactgcctgactatgcggtgactgctgtaaccaagatcaggtccccagcccttttgtccattaacaccccttcttgatctttcaaaggcagctaattgctagcaaatccccccgattccggccttttccctctatttctttgttagaagttttctgtggagctgaaacccagcctctgtttgactgggtttcatttagcttagttgggttcttagagccccctgtttgttgttttgtgttgtttccaatgaaaagcaagtttaccctcagagttatgcttttccaaagaggctgatgtctttgtttttgttttttttaatgtttcaggttctaagtgaagtgagttggggaggggttgggagtgttagtaatcaaggtttagaacaccatgagatagttacccctgatctccagtccctagctgggggctggacagggggaagggagagaggatttctattcacctttaatatatttttacaaaaaaagcaaacaatttaaaaacaagcccaccgcttctgtacatgtctaaatatatttttagaagtgggtaggattgtgaatttctgatgcagggcctttttataaataggttagggtagcatcattcagacttctctgttgtttttgtccctgtctttttcttatgttgtgttactaatgtaatttatattttttttagatcctccctttcctatagagataaaagtgatttatcttggcaattgc

SEQ ID NO: 71880 - DNA, 6024 bp, Artificial Sequence
  derived and/or modified sequence
tttcctctcatcccccctcctctcccctcccctcaggctatagtcagaaaattgtgggacaggtgcaaacaaatccttgaactgtatttgaactgaagtgaaacagtagggtcaaagaagagttcagagggagttgtggagttggcagcagctttacagaggaactacactgagggcctggggacagaacgcgggtagcacagggcacaaggttcaacgtccctgctccgggactcaagtcacttggcttctcgaagcccctgccttcatttggtgataatcacagagcttccttcacagggggaagaaccaacaacgcagagaccgtgggaaagagcccagcctatcgaaggtgctcaatgaacaggagccgcgctatcgtccagagaggacgcgtgctgccgcctcccgcccctcttgacacgacgaacctggccggccgcagaacgctccagggccgagcgaagatggcctcggtgccggtgtattgcctctgccggctgccttacgatgtgacccgcttcatgatcgagtgtgacatgtgccaggactggtttcatggcagttgtgttggtgttgaagaggagaaggctgctgacattgacctctaccactgccccaactgtgaagtcttgcatgggccctccattatgaaaaaacgccgtggatcttcaaaggggcatgatacacacaaggggaaaccagtgaagaccgggagccctacgttcgtcagagagctccggagtaggacttttgacagctcagatgaagtgattctgaagcccactggaaatcaactgaccgtggaattcctggaagaaaatagcttcagtgtgcccatcctggtcctgaagaaggatgggttgggcatgacgctgccctcgccatcattcactgtgagggatgttgaacactatgttggttctgacaaagagattgatgtgattgatgtgacccgccaggctgactgcaagatgaagcttggtgattttgtgaaatactattacagcgggaagagggagaaagtcctcaatgtcattagtttggaattctctgataccagactttctaaccttgtggagacaccgaagattgttcgaaagctgtcatgggtcgaaaacttgtggccagaggaatgtgtctttgagagacccaatgtacagaagtactgcctcatgagtgtgcgagatagctatacagactttcacattgactttggtggcacctctgtctggtaccatgtactcaagggtgaaaagatcttctacctgatccgcccaacaaatgccaatctgactctctttgagtgctggagcagttcctctaatcagaatgagatgttctttggggaccaggtggacaagtgctacaagtgttccgtgaagcaaggacagacacttttcattcccacagggtggatccatgctgtgctgacgcctgtggactgccttgcctttggagggaacttcttacacagccttaacatcgagatgcagctcaaagcctatgagattgagaagcggctgagcacagcagacctcttcagattccccaactttgagaccatctgttggtatgtgggaaagcacatcctggacatctttcgcggtttgcgagagaacaggagacaccctgcctcctacctggtccatggtggcaaagccttgaacttggcctttagagcctggacaaggaaagaagctctgccagaccatgaggatgagatcccggagacagtgcgaaccgtacagctcattaaagatctggccagggagatccgcctggtggaagacatcttccaacagaacgttgggaagacgagcaatatctttgggctgcagaggatcttcccagccggctccattcccctaaccaggccagcccattccacttcagtgtccatgtccaggctgtcactgccctccaaaaatggttcaaagaagaaaggcctgaagcccaaggaactcttcaagaaggcagagcgaaagggcaaggagagttcagccttggggcctgctggccagttgagctataatctcatggacacatacagtcatcaggcactgaagacaggctctttccagaaagcaaagttcaacatcactggtgcctgcttgaatgactcagatgacgactcaccagacttggaccttgatggaaatgagagcccattggccctattgatgtctaacggcagtacgaaaagggtgaagagtttatccaaatctcggcgaaccaagatagcaaagaaggtagacaaggctaggctgatggcagaacaggtgatggaagacgaatttgacttggattcagatgatgagctgcagattgacgagagattgggaaaggagaaggcgaccctgataataagaccaaaatttccccggaaattgccccgtgcgaagccttgctctgaccccaaccgagttcgtgaaccaggagaagttgagtttgacattgaggaggactatacaacagatgaggacatggtggaaggggttgaaggcaagcttgggaatggtagtggcgctggtggcattcttgatctgctcaaggccagcaggcaggtggggggacctgactatgctgccctcaccgaggccccagcttctcccagcactcaggaggccatccagggcatgctgtgcatggccaacctgcagtcctcatcgtcctcaccggctacctctagcctgcaggcctggtggactgggggacaggatcgaagcagtgggagctccagcagtgggctgggcacagtgtctaacagtcctgcttcccagcgcaccccagggaagcggcccatcaagcggccagcatactggagaaccgagagcgaggaggaggaggagaacgccagtctggatgaacaggacagcttgggagcgtgcttcaaggatgcagagtatatctatccttcactggagtctgatgatgatgaccctgctttgaaatctcgacccaagaaaaagaagaattcagatgatgctccatggagtcctaaagcccgcgtgaccccaactctgccgaagcaggaccgtcctgtgcgtgaggggacccgggtagcctctattgagacaggtttggctgcagcagctgcaaagctggcccagcaggagctacagaaggcccaaaagaagaaatatatcaagaagaagcctttgctgaaggaggtagaacagcctcgccctcaagactccaatctcagtctgacagtaccagcccccactgtggctgccacaccacaacttgtcacctcctcctcacccctgcctcctcctgagcctaaacaagaggccctgtcaggaagtctcgctgaccatgagtacaccgctcgtcccaatgcctttggcatggcccaggcaaaccgcagcaccacacctatggcccccggtgtcttcttgacccagcggcgcccttcagttggctcccagagcaatcaggcaggacaaggaaagcgtcccaaaaagggcctggccacagcaaagcagagactcggccgtatcctgaaaatccacagaaatggcaaactacttctgtgagccctcctgtgtcccacccctcacccctttacccccattgccttctccattgtcaactcttggggcactcctggatcctatctgccctggacaaggtgctgaggtgcattgtcctgctttcttgggacttaccaaaggcacggacccctccaccgactccttctagttcccttccccactttcactagagcatcctgcctgccttctccactgaggagcaggtaaatgggagaggtttccagctgactagaaccctcttttctactcgtccaaaccactcccgtcacctgccttgtctgttctttattcttcatcccccgctagagctggaaggcaggatgaggagaggtatgaaggagcctgagccatgaagtgggaagcccagtgcttgacactttctgcaactctagccctatatccagaagcctgcccacctccacccattctgtttgccccatttccccagtccagtggacatgccccacctccagacttgctcatgggagaaggctgtggtctctgccccctcttgccaaatgcttcatggaaatgaagaggaaggcctagagcctccttcctgccccactgtgggccatttccagaagtggcctagaaatgccaacttcacttacctttcaaaagaaaggtgattcctatcacttgtcaaggtagggagaggtcagatgcccaagcctttgaccacggttttgtagcctgttggaggaagctacttttagctggctacacatgaggccacttgttttagggtgagctccagggatttgcctggattttgaaatcatgtagaacattatccacgtggctgtggctgtggctgtggctgggccctggcaggtggaaaaccatctcccagaaacctgaaagcacctgccaatgacgcagataaccctggccctacagcctgcttgctccgcctataccacagagcacagcctggacattatggagggtgtggcgggacggcccacacctgggtcctccatcgggaacttttcatgcttctttctccacctgaggtcttggtctgaagaagacctcaggactcacatcttcactcctgggcctttgcacttccagacgacaggtcatcgttcaagcagaatgcagacaggccattcacgagcccaagttgaagagaagagacgcccatccgtgaaggagcagaccatccatccgatcctccccttcccctgtccttccttcgtggattgtctccattgtccagacagtgcccccacctcccaccgccttgcctcactggcaatctggactcgatggagaacatccccccacctccatttggcactacccaagtggagtgtacccttgccctttccacctgtaccacccactccaacctcaccccagcttgcccaatgcttctggggaatttaatagctaccatgcaggccacagggaatttgtgaggcttcttttgtcatctttgtatctccagtttgtctttcttttctccatagccctgcctctactttccttccttggaatcaggggttcctttagcccatttgctttctctaccttggggaccccaggggccaagcagttctccatctagtcacaccaaaggcaaaaagcctggctacctcccccctagcacgtgagtccctactcccctcccctctgtttctgcccagctttgcttattttggggatttcaaggcagcagagggtagtgaggggagagcaggagaagcctctgtcctgtataggcaactgcctgactatgcggtgactgctgtaaccaagatcaggtccccagcccttttgtccattaacaccccttcttgatctttcaaaggcagctaattgctagcaaatccccccgattccggccttttccctctatttctttgttagaagttttctgtggagctgaaacccagcctctgtttgactgggtttcatttagcttagttgggttcttagagccccctgtttgttgttttgtgttgtttccaatgaaaagcaagtttaccctcagagttatgcttttccaaagaggctgatgtctttgtttttgttttttttaatgtttcaggttctaagtgaagtgagttggggaggggttgggagtgttagtaatcaaggtttagaacaccatgagatagttacccctgatctccagtccctagctgggggctggacagggggaagggagagaggatttctattcacctttaatatatttttacaaaaaaagcaaacaatttaaaaacaagcccaccgcttctgtacatgtctaaatatatttttagaagtgggtaggattgtgaatttctgatgcagggcctttttataaataggttagggtagcatcattcagacttctctgttgtttttgtccctgtctttttcttatgttgtgttactaatgtaatttatattttttttagatcctccctttcctatagagataaaagtgatttatcttggcaattgc

SEQ ID NO: 71881 - DNA, 3075 bp, Artificial Sequence
  derived and/or modified sequence
atggcgagtgttcctgtttactgcctatgtcgactgccttatgatgtcactagatttatgatcgaatgcgatatgtgccaggactggttccacggctcatgtgtgggagtcgaggaggagaaagctgcagatatcgatctgtaccattgtccgaattgcgaagtcctgcacggtccctccatcatgaaaaagagaaggggatcctccaaaggacatgatactcataagggcaagcctgtgaagactgggtccccgacgttcgtgcgtgaactgagaagtagaacctttgacagctcagatgaggtaatcctcaaacctacaggcaaccagttaacagtcgagtttctggaggaaaacagtttctccgttccaattctcgtactgaagaaggacggcctggggatgacattgccatcgccctcttttactgtgagagacgtggagcactacgtgggttctgacaaggagatcgacgtcattgatgtgacacgtcaggcagactgcaaaatgaaactgggagattttgtcaagtactactattcaggtaagagagagaaggtgctgaatgtgatcagcttagagtttagcgacacacgactcagcaacctggtggagactccaaaaatcgtgcggaagctttcctgggttgagaacttatggcccgaagaatgcgtttttgaacgcccaaatgttcagaagtactgcctgatgagtgtgcgcgattcctacaccgattttcacatagatttcggaggcacgtcggtgtggtatcatgttctcaagggcgaaaagatattttacctcattagacctaccaacgccaacctgaccttgttcgaatgctggtctagctcctccaaccagaacgagatgttttttggagatcaggtggataagtgttacaagtgctccgtgaaacaggggcagactttgttcatccccaccggatggatccatgctgtgctgacacccgttgactgcctcgctttcgggggaaatttccttcactctttaaatatcgagatgcaacttaaggcctacgagatcgagaagaggctaagcactgctgatctatttcgattccccaattttgaaacgatctgctggtatgtaggcaagcacattcttgatatttttcggggtctgcgcgagaaccggcgtcacccagcctcttatttggttcacggtggcaaggctctgaatctggccttcagagcctggactcggaaagaagcactgcccgaccacgaggacgagatccccgaaaccgtgaggacggtacaactcatcaaggacctggcacgcgagattcgactcgtggaggatattttccagcagaacgtgggtaaaacctccaacatcttcgggctccagcgtattttccccgcaggtagtattccactgacccgccctgcccactctacgtcagtgtcaatgtcccggttgagtctaccctctaagaacggctccaagaaaaaaggacttaaaccaaaagagctctttaagaaggccgagcgcaagggcaaggagtcaagtgccctcggacccgctggacagctgagctataatctaatggacacctactcccatcaggcccttaaaacaggctctttccagaaggcaaagttcaacattactggagcctgcctgaatgactccgatgatgattcgcccgatctcgatctcgacggtaatgagagtccgttagctctgctgatgagtaacggatctaccaaaagggtaaaaagcctgagcaagtctcggagaacaaagatcgcgaaaaaagttgacaaagctcggctgatggcagagcaagttatggaggacgagttcgacctcgattccgatgacgaactgcagatcgatgagcgactgggaaaagaaaaagcgactctgatcatccggcctaagttcccccgtaagctccccagagccaaaccatgttcagatccgaatagggttagggagcctggagaggttgagttcgacatcgaggaggactataccaccgacgaggatatggtggagggcgtagaagggaagctgggaaacgggtcgggcgctggagggattctggatttactgaaggcctctaggcaagttggcggacccgactacgccgctctgaccgaggcccctgcttcacccagtacacaggaggcaatacagggcatgctctgtatggccaatctgcaatcttcctcatccagtcccgctacatcaagtctccaggcctggtggacagggggacaggaccggtcttctggctcttctagtagcggcctgggcactgttagcaactcccccgcatcccagaggactcctggtaaaagacccatcaagcgaccagcctactggaggacagagtccgaggaggaagaagagaacgcatcccttgacgagcaggactccctgggggcatgtttcaaggacgcggaatatatttacccctccctcgagtctgacgacgatgatcccgcacttaagagtcgtcctaaaaagaagaaaaactcagacgacgccccatggtcccccaaggccagggtgacccctactcttcccaaacaagaccgcccagtaagggagggaacccgagttgcctcaatcgagaccggccttgcagccgcagcagccaaactggcccagcaggagctccagaaagctcagaagaaaaagtatatcaaaaaaaaacccctcttaaaggaggtggaacagcctaggccccaggattcaaacctgtccctgacagttccagctcccacggtcgctgcaactccccagttagtgacctctagcagcccgttgccgccaccagagccaaaacaggaagcgctgtctggttctcttgctgaccacgagtacactgctcgaccaaacgcattcgggatggcacaagcaaacagaagcactactccaatggcaccgggagtgttcttgacacagcgtcgtccctctgtgggttcgcaatcaaatcaggcaggtcaagggaaaagacccaaaaagggcctggcaactgcaaaacagcgcttgggtagaattttgaagattcacaggaatggcaagctactgctctag

SEQ ID NO: 71882 - DNA, 3183 bp, Artificial Sequence
  derived and/or modified sequence
atgaataggagtcgggcaattgtacaacggggaagggtgctcccaccacctgctccactcgacacaaccaacctcgccggtcgacgaactctccagggcagagccaaaatggcttccgtccctgtttactgtttgtgtaggctgccttatgatgtgaccaggttcatgattgaatgcgatatgtgtcaagattggttccatggctcctgtgttggcgtggaggaggagaaagcggcagatatcgacttataccactgtcccaattgtgaagtccttcacggaccgagtattatgaagaagcgtcgtggctctagcaaggggcacgatacccacaagggtaaacccgtgaaaaccggttcgccaaccttcgtgcgagagctcaggtccagaacttttgatagcagtgacgaggtgatattgaaacctacaggcaaccaactcacggtcgaattcctggaggaaaactcttttagtgttcccatattggtcctgaaaaaggacggactcgggatgacgctgccttctccttcgtttacagtgcgggatgtcgagcactacgttggctctgacaaggaaatcgatgtgattgacgtaactcgccaagccgattgtaaaatgaagctcggggacttcgtcaagtactactattccggtaagcgtgaaaaggtgctgaacgtaatctccttggagttcagcgatacaaggctctcaaacctggtggagacacccaagatcgttcggaaacttagctgggtggagaatctgtggcccgaggagtgtgtgttcgagaggcccaatgtccagaagtactgcttaatgagtgtcagagacagctacactgattttcacattgattttggcggaacaagcgtgtggtaccacgtgctaaaaggcgaaaaaatcttctacttaattcgccctacgaacgccaatcttacattgtttgaatgttggtcctcaagcagtaatcagaatgagatgttttttggagatcaggtggacaagtgctacaagtgctcagtaaagcaggggcagacactctttattcctacaggatggatccatgctgtcctgaccccggttgattgcctcgcgtttggcggtaactttctgcattcacttaatatagaaatgcagctcaaggcctacgagattgagaaacggttgtccactgctgatctgtttcggtttcctaatttcgaaactatatgctggtacgtcgggaagcacatcctggatatcttccgtggcctgagggagaacaggagacatccggcaagttatctcgtccacgggggaaaggcgctgaacctggcatttcgagcctggacaagaaaagaagctcttcccgaccacgaggatgaaattcccgaaaccgtacggactgtgcagcttatcaaggacttggcacgggaaattcgtctcgtggaggacatcttccagcagaacgtgggaaagacctccaacatcttcggcttgcagcggatctttcccgctgggagcattccccttacgagacctgctcactcgacttctgtgtccatgtcaagactgtctttgccctctaaaaacgggtctaagaaaaagggattgaaaccaaaggaactcttcaagaaggcggagaggaaaggcaaggagtcaagtgcccttggccctgccggacagctctcatataacctcatggacacctactctcatcaggccctgaagaccggatcatttcagaaagccaagtttaacataacgggtgcatgtcttaatgattctgatgacgactcccccgacttggatcttgacggtaatgagtcacccctagctttattaatgagcaacggttcaaccaagcgagttaagagcttgtcaaagtctcggagaaccaagattgcgaagaaggtcgacaaggcaaggctaatggccgagcaggtgatggaggacgagtttgatctcgattctgatgatgagctgcaaatcgacgagcgattgggcaaagagaaagccacactgatcattcgccctaaatttcctaggaaactacccagggcaaagccatgctccgacccaaatcgggtgcgggaaccgggtgaagtggagtttgatatcgaagaggactacaccaccgacgaagacatggtagaaggtgtggagggaaaactgggcaacgggtccggcgctgggggaattctggacctcctaaaagcttctcggcaggtcggtggacctgactatgccgctctgactgaagctccggcaagcccatccactcaggaagccattcagggaatgctatgtatggcaaatctccagtcttcaagctccagccccgctacatcgtccctgcaggcctggtggactggcggacaggaccggagcagcggctcctcttcctcaggcctcggtacagtatccaacagccctgcaagccagagaacacctgggaaacggcctatcaagaggcccgcttactggcgcaccgaatccgaagaggaggaggagaatgcatctttggacgaacaggattcactcggggcttgttttaaggacgctgagtacatttatccatcactggagagcgacgacgacgacccagccctgaagtccagacctaagaaaaagaaaaattccgacgacgctccctggagtccaaaggcgagagtgactccaactctgcctaaacaagaccggccagtcagagaggggacacgcgtagcgtctattgagactggcttggctgccgctgcagctaaactcgcccaacaagagctccaaaaggcccagaagaagaaatatattaagaaaaagccacttctcaaggaagtcgaacagcccagaccccaggacagcaacctttctctcacggttcctgccccaactgtggccgcaactccacaactcgttactagcagcagccccttgccccctccagagccaaaacaggaagcactgtctggctcgctggctgaccatgagtatacagcccgtccaaacgcattcgggatggcccaggcaaatcggagcacaactcccatggctcccggtgtcttcttaactcagaggcgcccatccgtcgggtctcagtcaaaccaagccggacaaggaaagaggcctaaaaaaggtctggcgaccgcgaaacagaggttaggccgaatcctcaaaattcaccgaaacggcaagctcctgctgtag

SEQ ID NO: 71883 - DNA, 3075 bp, Artificial Sequence
  derived and/or modified sequence
atggccagcgtgcccgtgtactgcctgtgcagactgccctacgacgtgaccagattcatgatcgagtgcgacatgtgccaggactggttccacggcagctgcgtgggcgtggaggaggagaaggccgccgacatcgacctgtaccactgccccaactgcgaggtgctgcacggccccagcatcatgaagaagagaagaggcagcagcaagggccacgacacccacaagggcaagcccgtgaagaccggcagccccaccttcgtgagagagctgagaagcagaaccttcgacagcagcgacgaggtgatcctgaagcccaccggcaaccagctgaccgtggagttcctggaggagaacagcttcagcgtgcccatcctggtgctgaagaaggacggcctgggcatgaccctgcccagccccagcttcaccgtgagagacgtggagcactacgtgggcagcgacaaggagatcgacgtgatcgacgtgaccagacaggccgactgcaagatgaagctgggcgacttcgtgaagtactactacagcggcaagagagagaaggtgctgaacgtgatcagcctggagttcagcgacaccagactgagcaacctggtggagacccccaagatcgtgagaaagctgagctgggtggagaacctgtggcccgaggagtgcgtgttcgagagacccaacgtgcagaagtactgcctgatgagcgtgagagacagctacaccgacttccacatcgacttcggcggcaccagcgtgtggtaccacgtgctgaagggcgagaagatcttctacctgatcagacccaccaacgccaacctgaccctgttcgagtgctggagcagcagcagcaaccagaacgagatgttcttcggcgaccaggtggacaagtgctacaagtgcagcgtgaagcagggccagaccctgttcatccccaccggctggatccacgccgtgctgacccccgtggactgcctggccttcggcggcaacttcctgcacagcctgaacatcgagatgcagctgaaggcctacgagatcgagaagagactgagcaccgccgacctgttcagattccccaacttcgagaccatctgctggtacgtgggcaagcacatcctggacatcttcagaggcctgagagagaacagaagacaccccgccagctacctggtgcacggcggcaaggccctgaacctggccttcagagcctggaccagaaaggaggccctgcccgaccacgaggacgagatccccgagaccgtgagaaccgtgcagctgatcaaggacctggccagagagatcagactggtggaggacatcttccagcagaacgtgggcaagaccagcaacatcttcggcctgcagagaatcttccccgccggcagcatccccctgaccagacccgcccacagcaccagcgtgagcatgagcagactgagcctgcccagcaagaacggcagcaagaagaagggcctgaagcccaaggagctgttcaagaaggccgagagaaagggcaaggagagcagcgccctgggccccgccggccagctgagctacaacctgatggacacctacagccaccaggccctgaagaccggcagcttccagaaggccaagttcaacatcaccggcgcctgcctgaacgacagcgacgacgacagccccgacctggacctggacggcaacgagagccccctggccctgctgatgagcaacggcagcaccaagagagtgaagagcctgagcaagagcagaagaaccaagatcgccaagaaggtggacaaggccagactgatggccgagcaggtgatggaggacgagttcgacctggacagcgacgacgagctgcagatcgacgagagactgggcaaggagaaggccaccctgatcatcagacccaagttccccagaaagctgcccagagccaagccctgcagcgaccccaacagagtgagagagcccggcgaggtggagttcgacatcgaggaggactacaccaccgacgaggacatggtggagggcgtggagggcaagctgggcaacggcagcggcgccggcggcatcctggacctgctgaaggccagcagacaggtgggcggccccgactacgccgccctgaccgaggcccccgccagccccagcacccaggaggccatccagggcatgctgtgcatggccaacctgcagagcagcagcagcagccccgccaccagcagcctgcaggcctggtggaccggcggccaggacagaagcagcggcagcagcagcagcggcctgggcaccgtgagcaacagccccgccagccagagaacccccggcaagagacccatcaagagacccgcctactggagaaccgagagcgaggaggaggaggagaacgccagcctggacgagcaggacagcctgggcgcctgcttcaaggacgccgagtacatctaccccagcctggagagcgacgacgacgaccccgccctgaagagcagacccaagaagaagaagaacagcgacgacgccccctggagccccaaggccagagtgacccccaccctgcccaagcaggacagacccgtgagagagggcaccagagtggccagcatcgagaccggcctggccgccgccgccgccaagctggcccagcaggagctgcagaaggcccagaagaagaagtacatcaagaagaagcccctgctgaaggaggtggagcagcccagaccccaggacagcaacctgagcctgaccgtgcccgcccccaccgtggccgccaccccccagctggtgaccagcagcagccccctgcccccccccgagcccaagcaggaggccctgagcggcagcctggccgaccacgagtacaccgccagacccaacgccttcggcatggcccaggccaacagaagcaccacccccatggcccccggcgtgttcctgacccagagaagacccagcgtgggcagccagagcaaccaggccggccagggcaagagacccaagaagggcctggccaccgccaagcagagactgggcagaatcctgaagatccacagaaacggcaagctgctgctgtag

SEQ ID NO: 71884 - DNA, 3183 bp, Artificial Sequence
  derived and/or modified sequence
atgaacagaagcagagccatcgtgcagagaggcagagtgctgcccccccccgcccccctggacaccaccaacctggccggcagaagaaccctgcagggcagagccaagatggccagcgtgcccgtgtactgcctgtgcagactgccctacgacgtgaccagattcatgatcgagtgcgacatgtgccaggactggttccacggcagctgcgtgggcgtggaggaggagaaggccgccgacatcgacctgtaccactgccccaactgcgaggtgctgcacggccccagcatcatgaagaagagaagaggcagcagcaagggccacgacacccacaagggcaagcccgtgaagaccggcagccccaccttcgtgagagagctgagaagcagaaccttcgacagcagcgacgaggtgatcctgaagcccaccggcaaccagctgaccgtggagttcctggaggagaacagcttcagcgtgcccatcctggtgctgaagaaggacggcctgggcatgaccctgcccagccccagcttcaccgtgagagacgtggagcactacgtgggcagcgacaaggagatcgacgtgatcgacgtgaccagacaggccgactgcaagatgaagctgggcgacttcgtgaagtactactacagcggcaagagagagaaggtgctgaacgtgatcagcctggagttcagcgacaccagactgagcaacctggtggagacccccaagatcgtgagaaagctgagctgggtggagaacctgtggcccgaggagtgcgtgttcgagagacccaacgtgcagaagtactgcctgatgagcgtgagagacagctacaccgacttccacatcgacttcggcggcaccagcgtgtggtaccacgtgctgaagggcgagaagatcttctacctgatcagacccaccaacgccaacctgaccctgttcgagtgctggagcagcagcagcaaccagaacgagatgttcttcggcgaccaggtggacaagtgctacaagtgcagcgtgaagcagggccagaccctgttcatccccaccggctggatccacgccgtgctgacccccgtggactgcctggccttcggcggcaacttcctgcacagcctgaacatcgagatgcagctgaaggcctacgagatcgagaagagactgagcaccgccgacctgttcagattccccaacttcgagaccatctgctggtacgtgggcaagcacatcctggacatcttcagaggcctgagagagaacagaagacaccccgccagctacctggtgcacggcggcaaggccctgaacctggccttcagagcctggaccagaaaggaggccctgcccgaccacgaggacgagatccccgagaccgtgagaaccgtgcagctgatcaaggacctggccagagagatcagactggtggaggacatcttccagcagaacgtgggcaagaccagcaacatcttcggcctgcagagaatcttccccgccggcagcatccccctgaccagacccgcccacagcaccagcgtgagcatgagcagactgagcctgcccagcaagaacggcagcaagaagaagggcctgaagcccaaggagctgttcaagaaggccgagagaaagggcaaggagagcagcgccctgggccccgccggccagctgagctacaacctgatggacacctacagccaccaggccctgaagaccggcagcttccagaaggccaagttcaacatcaccggcgcctgcctgaacgacagcgacgacgacagccccgacctggacctggacggcaacgagagccccctggccctgctgatgagcaacggcagcaccaagagagtgaagagcctgagcaagagcagaagaaccaagatcgccaagaaggtggacaaggccagactgatggccgagcaggtgatggaggacgagttcgacctggacagcgacgacgagctgcagatcgacgagagactgggcaaggagaaggccaccctgatcatcagacccaagttccccagaaagctgcccagagccaagccctgcagcgaccccaacagagtgagagagcccggcgaggtggagttcgacatcgaggaggactacaccaccgacgaggacatggtggagggcgtggagggcaagctgggcaacggcagcggcgccggcggcatcctggacctgctgaaggccagcagacaggtgggcggccccgactacgccgccctgaccgaggcccccgccagccccagcacccaggaggccatccagggcatgctgtgcatggccaacctgcagagcagcagcagcagccccgccaccagcagcctgcaggcctggtggaccggcggccaggacagaagcagcggcagcagcagcagcggcctgggcaccgtgagcaacagccccgccagccagagaacccccggcaagagacccatcaagagacccgcctactggagaaccgagagcgaggaggaggaggagaacgccagcctggacgagcaggacagcctgggcgcctgcttcaaggacgccgagtacatctaccccagcctggagagcgacgacgacgaccccgccctgaagagcagacccaagaagaagaagaacagcgacgacgccccctggagccccaaggccagagtgacccccaccctgcccaagcaggacagacccgtgagagagggcaccagagtggccagcatcgagaccggcctggccgccgccgccgccaagctggcccagcaggagctgcagaaggcccagaagaagaagtacatcaagaagaagcccctgctgaaggaggtggagcagcccagaccccaggacagcaacctgagcctgaccgtgcccgcccccaccgtggccgccaccccccagctggtgaccagcagcagccccctgcccccccccgagcccaagcaggaggccctgagcggcagcctggccgaccacgagtacaccgccagacccaacgccttcggcatggcccaggccaacagaagcaccacccccatggcccccggcgtgttcctgacccagagaagacccagcgtgggcagccagagcaaccaggccggccagggcaagagacccaagaagggcctggccaccgccaagcagagactgggcagaatcctgaagatccacagaaacggcaagctgctgctgtag

SEQ ID NO: 71885 - protein, 948 aa, Artificial Sequence
  derived and/or modified sequence
MASVPVYCLCRLPYDVTRFMIECDMCQDWFHGSCVGVEEEKAADIDLYHCPNCEVLHGPSIMKKRRGSSKGHDTHKGKPVKTGSPTFVRELRSRTFDSSDEVILKPTGNQLTVEFLEENSFSVPILVLKKDGLGMTLPSPSFTVRDVEHYVGSDKEIDVIDVTRQADCKMKLGDFVKYYYSGKREKVLNVISLEFSDTRLSNLVETPKIVRKLSWVENLWPEECVFERPNVQKYCLMSVRDSYTDFHIDFGGTSVWYHVLKGEKIFYLIRPTNANLTLFECWSSSSNQNEMFFGDQVDKCYKCSVKQGQTLFIPTGWIHAVLTPVDCLAFGGNFLHSLNIEMQLKAYEIEKRLSTADLFRFPNFETICWYVGKHILDIFRGLRENRRHPASYLVHGGKALNLAFRAWTRKEALPDHEDEIPETVRTVQLIKDLAREIRLVEFNITGACLNDSDDDSPDLDLDGNESPLALLMSNGSTKRVKSLSKSRRTKIAKKVDKARLMAEQVMEDEFDLDSDDELQIDERLGKEKATLIIRPKFPRKLPRAKPCSDPNRVREPGEVEFDIEEDYTTDEDMVEGVEGKLGNGSGAGGILDLLKASRQVGGPDYAALTEAPASPSTQEAIQGMLCMANLQSSSSSPATSSLQAWWTGGQDRSSGSSSSGLGTVSNSPASQRTPGKRPIKRPAYWRTESEEEEENASLDEQDSLGACFKDAEYIYPSLESDDDDPALKSRPKKKKNSDDAPWSPKARVTPTLPKQDRPVREGTRVASIETGLAAAAAKLAQQELQKAQKKKYIKKKPLLKEVEQPRPQDSNLSLTVPAPTVAATPQLVTSSSPLPPPEPKQEALSGSLADHEYTARPNAFGMAQANRSTTPMAPGVFLTQRRPSVGSQSNQAGQGKRPKKGLATAKQRLGRILKIHRNGKLLLRQVIVQAECRQAIHEPKLKRRDAHP

SEQ ID NO: 71886 - DNA, 2847 bp, Artificial Sequence
  derived and/or modified sequence
atggcctccgtccccgtgtactgcctatgccgactcccatatgacgttactaggtttatgatcgaatgtgacatgtgtcaggattggttccacggaagctgcgttggagtggaggaagagaaagctgcagacattgacctctaccattgtccaaattgtgaggttttacatgggccgagtatcatgaagaagcgaagggggtcgtctaaaggtcacgatacgcataaaggaaagccggtcaaaacagggtcccctacttttgtgagggagctccgctcccggacctttgactcctctgacgaggtaatcttgaagccaaccggcaatcagctgacagtggagttcctagaggagaattcattttctgtcccaattcttgtccttaagaaggacggactcggcatgactttaccatctccctctttcacggtgagagacgtggagcattacgtgggcagcgacaaggaaattgacgtcatcgacgtcaccaggcaagcagattgcaagatgaagcttggggattttgtcaagtactactactccggaaaacgggagaaagtgctcaacgtgataagcctggagttcagcgatacaagattgagcaacttagtagagactccaaagatcgttcgcaaactgagttgggtagaaaacctatggccagaagaatgtgtgttcgagcggcccaacgtgcaaaagtactgcctaatgtcagtacgcgattcatacactgatttccatattgatttcgggggcactagcgtttggtatcatgtcttgaagggagagaagattttttacctgataagacccacaaacgccaatctgactctgtttgaatgctggtcttcatcaagcaaccaaaatgagatgtttttcggggaccaagtggacaagtgctacaaatgctccgtaaaacaaggccagacgctcttcatccccaccggctggatccacgccgttctaactccagtcgactgcctggccttcggcggcaattttttacactcactgaacattgagatgcagctgaaggcttatgagattgaaaagcgcctctcaaccgctgacctgtttcgattccctaacttcgagacgatttgttggtacgtggggaagcacattctagacatattccgaggactacgggagaatagacggcatcctgcaagttacttggtccatggagggaaagctctgaatctagcgttcagagcgtggacacgaaaggaggccttgcctgatcacgaagatgaaattcccgagacagttaggacagtgcagctcattaaggacctcgcccgggaaatcagactggttgagtttaatatcaccggagcttgtctgaatgattctgatgatgactcccccgatcttgacctcgatgggaacgagtccccattggctcttctcatgagcaatgggtccaccaagcgagtcaagtctcttagcaaatctaggaggactaagatcgccaaaaaggtggacaaggcgaggctcatggccgagcaggtcatggaagacgaattcgacctcgatagtgacgatgagctccaaatagacgagcgacttggcaaggagaaagccacactgatcataaggcctaaatttcctcggaagctgcccagggccaagccatgctccgaccctaaccgggtaagggaacctggtgaggtcgaatttgacattgaagaagactacacaacagacgaggacatggtcgaaggagtagaaggcaagttagggaacggaagtggcgctggcggcattttggatcttctcaaggccagtagacaggtggggggcccagattacgctgctctcaccgaagcacccgcttctcccagtacccaagaggccatccagggcatgttgtgtatggcaaacttacaaagttcctctagcagccctgccacgagttcattgcaggcatggtggacaggaggccaggaccgctcttcaggctcaagctccagcgggcttggtacggtctctaatagccccgcatcacagcggaccccgggcaagcggcccatcaaacggcctgcttattggcgaacggaaagcgaagaggaggaagaaaatgcgtcccttgatgagcaagactccctcggtgcatgtttcaaggatgcagagtatatctatccctctttagagtccgacgatgacgacccagccctgaagagcaggcccaagaagaaaaaaaactcagatgacgccccatggtcacctaaggccagagtcacccctactcttccaaaacaagacaggcccgtgcgggaggggacccgagtcgccagcattgaaacagggctggcagccgccgcggctaagcttgcccagcaggaactgcagaaagctcagaagaaaaagtatattaaaaaaaaaccactgctgaaagaagtggaacaacccagaccacaggactccaacctgtcactcacagtgcccgcccccacagtggctgcgacccctcagctggtaacctctagtagtcctctgcctcctcctgaaccgaaacaggaagcactgtcaggaagtttggccgaccacgagtacacagctcgacctaacgctttcggaatggcacaggctaaccggtccacgacgcctatggctccgggcgtcttcctgacccagcgccgtccctctgtcgggagccagtctaatcaggcagggcagggcaaacgtcccaagaagggattggccacggccaaacagcgtttgggccggatcctaaaaattcacagaaatggtaaactcttgttgcggcaggtaattgtgcaggccgaatgtaggcaggccatccatgaacccaagttgaagagacgtgacgcacacccttag

SEQ ID NO: 71887 - DNA, 2847 bp, Artificial Sequence
  derived and/or modified sequence
atggcctctgtgcctgtgtactgcctgtgccgcctgccctatgatgtgacccgcttcatgattgaatgtgacatgtgccaggactggttccacggcagctgtgtgggcgtggaggaggagaaggctgctgacatcgacctgtaccactgccccaactgtgaggtgctgcacggccccagcatcatgaagaagagaagaggcagcagcaagggccatgacacccacaagggcaagcctgtgaagacaggcagccccacctttgtgcgggagctgcggagcaggacctttgacagcagtgatgaggtgatcctgaagcccactggaaaccagctgactgtggagttcctggaggagaacagcttctctgtgcccatcctggtgctgaagaaggatggcctgggcatgaccctgcccagccccagcttcaccgtgagagatgtggagcactacgtgggcagtgacaaggagattgatgtgattgatgtgacccggcaggccgactgcaagatgaagctgggggactttgtgaagtactactacagcggcaagcgggagaaggtgctgaatgtcatcagcctggagttcagtgacacccggctgagcaacctggtggagacccccaagatcgtgaggaagctgtcctgggtggagaacctgtggccagaagaatgtgtgtttgagcggcccaacgtgcagaagtactgcctgatgtctgtgcgggacagctacacagacttccacatcgactttggaggcacctctgtgtggtaccacgtgctgaagggggagaagatcttctacctgatccggcccaccaatgccaacctgaccctgtttgagtgctggagcagcagcagcaaccagaatgagatgttctttggagaccaggtggacaagtgctacaagtgcagcgtgaagcagggccagaccctcttcatccccaccggctggattcatgctgtgctgacccctgtggactgcctggccttcggcggcaacttcctgcacagcctgaacatcgagatgcagctgaaggcctatgaaattgagaagaggctgagcacagctgacctcttccgcttccccaactttgagaccatctgctggtacgtgggcaagcacatcctggacatcttccggggcctgcgggagaacagaagacacccagccagctacctggtgcatggaggcaaggccctgaacctggccttccgggcctggaccaggaaggaggccctgcctgaccatgaagatgagatccctgagaccgtgaggacagtgcagctgatcaaggacctggcccgggagatccggctggtggagttcaacatcactggagcctgcctgaatgacagtgatgatgacagcccagacctggacctggatggaaatgaaagccccctggccctgctgatgagcaatggcagcaccaagagggtgaagagcctgagcaagagcaggaggaccaagatcgccaagaaggtggacaaggcccggctgatggccgagcaggtgatggaggatgaatttgacctggacagtgatgatgagctgcagattgatgagcggctgggcaaggagaaggccaccctcatcatccggcccaagttccccaggaagctgccccgggccaagccctgcagcgaccccaacagagtgcgggagcccggggaggtggagtttgatattgaggaggactacaccacagatgaggacatggtggagggcgtggagggcaagctgggcaatggaagtggagctgggggcatcctggacctgctgaaggccagccggcaggtgggcggccctgactatgctgccctgacagaggccccagccagccccagcacccaggaggccatccagggcatgctgtgcatggccaacctgcagagcagcagcagcagccctgccaccagcagcctgcaggcctggtggacaggaggccaggacaggagcagcggcagcagcagcagcggcctgggcaccgtgagcaacagccctgccagccagaggacccctgggaagaggcccatcaagaggcctgcctactggaggacagaaagtgaggaggaggaggagaatgccagcctggatgagcaggacagcctgggcgcctgcttcaaggatgctgagtacatctaccccagcctggagagtgatgatgatgatcctgccctgaagagccggcccaagaagaagaagaacagtgatgatgccccctggagccccaaggcccgggtgacccccaccctgcccaagcaggacaggcctgtgcgggagggcaccagggtggccagcattgagaccggcctggccgctgctgctgccaagctggcccagcaggagctgcagaaggcccagaagaagaagtacatcaagaagaagcccctgctgaaggaggtggagcagccccggccccaggacagcaacctgagcctgactgtgcctgcccccaccgtggccgccaccccccagctggtgaccagcagcagccccctgcccccacctgagcccaagcaggaggccctgagcggcagcctggccgaccacgagtacacagcccggcccaatgccttcggcatggcccaggccaacagaagcaccacccccatggcccctggggtcttcctgacccagaggcggcccagcgtgggcagccagagcaaccaggccggccagggcaagaggcccaagaagggcctggccacagccaagcagaggctgggccgcatcctgaagatccacagaaatggcaagctgctgctgcggcaggtgattgtgcaggctgaatgtcggcaggccatccacgagcccaagctgaagagaagagatgcccacccctag

SEQ ID NO: 71888 - DNA, 2847 bp, Artificial Sequence
  derived and/or modified sequence
atggccagcgtgcccgtgtactgcctgtgccggctgccctacgacgtgacacgcttcatgatcgaatgtgacatgtgtcaggactggtttcacggcagctgtgtgggtgtggaagaggaaaaggccgccgacatcgatttgtatcactgccctaactgtgaagtactacacgggccatcaattatgaagaagcgccgaggatcctccaaggggcatgacactcacaaggggaaacctgtgaaaacaggcagccccaccttcgtgagagaactgaggagccgcacttttgatagtagtgatgaggtgatccttaaaccaacggggaaccagctgaccgtggaatttcttgaggagaacagcttttctgtgcctattctggtgttgaaaaaagatggcctgggaatgaccctgcctagccctagtttcacagtaagagacgtcgagcattacgtcggctcagataaggaaatcgacgtgattgatgtcacacgacaggctgattgcaaaatgaaactcggcgattttgtcaaatactactacagtggcaagagagagaaggtgctgaacgttatttccctcgaatttagcgacactcggctgtccaacctggttgaaacccctaaaatcgtcagaaagctttcgtgggtggaaaacctgtggcccgaagagtgtgtatttgaacggcccaatgtgcaaaagtactgcctgatgtccgtgagggactcctatactgatttccatattgacttcggcggtactagtgtctggtaccacgtgctcaagggtgagaagatcttttatcttattcggcccaccaacgcaaacctgaccctgttcgaatgctggagcagcagttcaaatcagaatgagatgttctttggggaccaggtcgacaagtgctataaatgttccgttaagcagggtcagaccctcttcatccccaccgggtggattcatgcagtgttgacaccggtggactgcctcgcatttggagggaatttcttacactctctaaacatcgagatgcaactgaaggcctatgagatagaaaagcggcttagcacagccgacctcttccgcttcccaaacttcgagaccatttgttggtacgtagggaaacacattcttgacatcttcaggggtttgcgcgaaaatcggcgtcaccctgcatcctacctggtgcatgggggaaaagccttgaacctcgcctttagagcttggactaggaaagaagcactcccagaccatgaagatgagatacccgagacggttcggacagtgcagttgattaaggacctcgctagagaaatcaggcttgtcgagttcaacataacaggagcctgcctgaacgattccgacgacgactcccccgacctcgacttagacggcaatgaatcaccactggctctcctgatgtctaatggttccacgaagagggtgaaaagtctcagcaagtcacggcggactaagatcgccaaaaaagttgacaaggcacggctgatggcggagcaagtcatggaagacgagttcgacctggattctgacgacgagcttcagatcgacgagagactcggtaaggaaaaggccactctgatcatacgccccaagttcccgagaaagctgcctcgcgccaaaccatgttcggacccgaaccgcgtgagggaaccaggggaggttgagtttgacatcgaggaagattatacaacggacgaagacatggttgagggcgttgaggggaagttggggaacgggagtggcgccggtgggatcctagatcttctaaaggcctccagacaagttgggggccccgactatgccgcacttacagaggctcccgcttcacctagtactcaagaagctatccagggcatgctttgtatggccaacctacagagctcatcctctagtccagccacaagctcccttcaagcctggtggacaggggggcaggaccgttcctcgggttccagctcctcggggctaggcacagtttcgaacagccctgcaagtcagcggacccctgggaaacgccctattaagaggcccgcatactggagaacagagagtgaagaggaggaagaaaatgcaagtttggatgagcaagactccctgggtgcctgttttaaagacgcagagtatatatacccaagtctggaatctgatgacgacgacccagctcttaagagccggccgaaaaagaagaaaaacagcgacgacgctccttggtccccgaaagcccgcgttacccccactttacccaagcaggaccggcctgtgcgggaaggtacccgtgtcgctagcatcgagactggtctggctgctgccgctgctaagttggctcaacaggagctgcaaaaggcccagaaaaagaagtacattaagaaaaaaccgctgttgaaggaggtggagcagcctagaccacaggactctaacctgtcgcttacagttccggctcctacagtggccgcaacccctcagctggtcacatcatcttccccccttccccctcccgaaccaaagcaggaagccctttctggcagcctcgctgatcacgaatataccgcccggcctaatgcatttggtatggcccaggccaaccggagcacaaccccaatggcccctggcgtcttcctgacccaacggcgccccagtgtgggctctcaaagcaaccaggcgggccaggggaagcggcccaagaaagggctggcaaccgccaagcagcgtctgggtcggatcttgaaaatccatcgaaacgggaaactcctcctgagacaagttatcgtgcaggccgagtgtcgccaggctatccacgaacccaagctgaagaggagggacgctcacccctag

SEQ ID NO: 71889 - DNA, 2847 bp, Artificial Sequence
  derived and/or modified sequence
atggcctcagttccagtctattgtttatgtcggctgccctatgacgtcactcggttcatgatcgaatgcgacatgtgtcaggattggttccacgggtcctgtgtaggcgtcgaagaagagaaggccgctgatatagacttataccactgtcccaactgcgaggtcctgcacggccctagtatcatgaaaaagcggcgagggtcttccaagggtcacgacacacacaaaggcaaacctgtgaaaacaggtagtccaacatttgtgagggagctgcgcagccgtactttcgattcctccgacgaggtaattctgaagccgaccggaaatcagcttaccgtcgaattcctggaagagaactccttcagtgtgcccatactggtgttgaaaaaggacggccttggaatgactttgccaagcccctcatttactgtgcgggacgtggagcactatgtgggttcagataaggagatagacgtcatagatgtgacgaggcaggccgattgcaagatgaagctgggcgactttgtaaaatattactactccggaaagcgggaaaaagtgctgaatgtgatttcgctcgaattctcagacacaagactgtctaatctggtcgagacacccaaaatcgtcaggaaactatcctgggtggagaatctgtggccggaagagtgcgtgttcgaaaggcccaacgtgcagaagtactgcctaatgtcggttcgtgattcatacaccgactttcatattgacttcgggggtactagcgtttggtatcatgtcttgaagggagagaaaattttctatttaatccgacccactaacgccaatcttacactgtttgagtgttggagttccagttcgaatcagaatgagatgttttttggggatcaggttgataaatgttataagtgctcagtgaaacaggggcagaccttattcatacctaccgggtggattcatgccgtgctgactcccgtggactgcctggctttcgggggaaactttctccattcgttaaacattgagatgcagctgaaggcatatgagatagaaaagaggctgagcacagccgatctatttcgattcccaaattttgaaactatctgctggtacgtcgggaaacatatcctagacatttttaggggcctgcgggagaaccgcagacatcccgctagctacctcgttcacgggggtaaagccctgaacctcgccttcagggcttggaccaggaaggaagccctccctgaccatgaggacgaaatccccgaaaccgttaggacagtccagctgatcaaagaccttgcgagagagatcaggctggtggagtttaatataactggagcgtgtctcaacgacagtgatgacgactccccggacttagacctcgatggcaatgagagcccactggcactactgatgtctaatggcagtacaaagcgggtgaagtccctatcaaaaagtaggcgaaccaagattgccaaaaaggttgacaaggcgagactaatggctgagcaggtgatggaggatgagtttgatctggattcagatgacgaattgcagatagacgaaaggttgggaaaagagaaggccaccctgatcatcagaccaaaattcccaaggaaactgccacgcgcaaagccttgttccgatcccaatcgtgttcgggaaccgggtgaggtggagttcgacatagaggaggactataccaccgacgaggacatggtggaaggcgtggagggaaagcttgggaacggaagcggcgcaggtggcattttggacttgctgaaagcgtcccgccaggttggcggacctgactatgccgctctgactgaagccccagcttccccttccacacaggaggccattcaagggatgctctgcatggcgaatctacagtcctccagtagtagccctgccacttcaagccttcaggcatggtggactgggggtcaggatcgctcctctgggtctagtagttctggtctgggaacggtttccaatagtcctgctagccagcggacacctggaaaacgccctatcaaaaggccggcatactggcgcacggagtcggaggaagaggaagagaatgcctcccttgacgagcaggactccttaggtgcctgtttcaaggacgcggaatatatctatccgtctctggaatcagatgacgacgatccggcattaaagtccagaccaaagaaaaaaaaaaacagtgatgacgcaccctggtcaccaaaggcccgtgtcactcctaccctgcctaaacaagatcgtcccgtgagggagggtactcgggttgccagcatagaaacagggctggctgctgccgctgctaagctggcccagcaggaactccagaaggcacagaagaagaagtacatcaaaaagaaacccttgttaaaggaagtggagcaaccacggcctcaggattcaaatcttagcttaaccgtgccagcacccaccgtggccgctacacctcagctcgtgacttcctcaagtcctctgccccctcctgagcctaagcaagaggccctatcaggatctctggcggatcatgagtacactgcccgaccaaatgcatttggaatggcccaggcaaaccgtagtacaactcctatggccccaggcgtatttctaacgcagagacgcccatccgttggatcccagtcaaaccaggccggtcaaggaaagcggcctaaaaaaggtctggccaccgccaagcagaggcttgggcgaatcctcaaaatacatcgcaatgggaagctcctgctcaggcaggtcatcgttcaggccgaatgtcgacaggctattcacgaacccaagctgaagaggagggacgcccacccatag

SEQ ID NO: 71890 - DNA, 2847 bp, Artificial Sequence
  derived and/or modified sequence
atggccagcgtgcccgtgtactgcctgtgcagactgccctacgacgtgaccagattcatgatcgagtgcgacatgtgccaggactggttccacggcagctgcgtgggcgtggaggaggagaaggccgccgacatcgacctgtaccactgccccaactgcgaggtgctgcacggccccagcatcatgaagaagagaagaggcagcagcaagggccacgacacccacaagggcaagcccgtgaagaccggcagccccaccttcgtgagagagctgagaagcagaaccttcgacagcagcgacgaggtgatcctgaagcccaccggcaaccagctgaccgtggagttcctggaggagaacagcttcagcgtgcccatcctggtgctgaagaaggacggcctgggcatgaccctgcccagccccagcttcaccgtgagagacgtggagcactacgtgggcagcgacaaggagatcgacgtgatcgacgtgaccagacaggccgactgcaagatgaagctgggcgacttcgtgaagtactactacagcggcaagagagagaaggtgctgaacgtgatcagcctggagttcagcgacaccagactgagcaacctggtggagacccccaagatcgtgagaaagctgagctgggtggagaacctgtggcccgaggagtgcgtgttcgagagacccaacgtgcagaagtactgcctgatgagcgtgagagacagctacaccgacttccacatcgacttcggcggcaccagcgtgtggtaccacgtgctgaagggcgagaagatcttctacctgatcagacccaccaacgccaacctgaccctgttcgagtgctggagcagcagcagcaaccagaacgagatgttcttcggcgaccaggtggacaagtgctacaagtgcagcgtgaagcagggccagaccctgttcatccccaccggctggatccacgccgtgctgacccccgtggactgcctggccttcggcggcaacttcctgcacagcctgaacatcgagatgcagctgaaggcctacgagatcgagaagagactgagcaccgccgacctgttcagattccccaacttcgagaccatctgctggtacgtgggcaagcacatcctggacatcttcagaggcctgagagagaacagaagacaccccgccagctacctggtgcacggcggcaaggccctgaacctggccttcagagcctggaccagaaaggaggccctgcccgaccacgaggacgagatccccgagaccgtgagaaccgtgcagctgatcaaggacctggccagagagatcagactggtggagttcaacatcaccggcgcctgcctgaacgacagcgacgacgacagccccgacctggacctggacggcaacgagagccccctggccctgctgatgagcaacggcagcaccaagagagtgaagagcctgagcaagagcagaagaaccaagatcgccaagaaggtggacaaggccagactgatggccgagcaggtgatggaggacgagttcgacctggacagcgacgacgagctgcagatcgacgagagactgggcaaggagaaggccaccctgatcatcagacccaagttccccagaaagctgcccagagccaagccctgcagcgaccccaacagagtgagagagcccggcgaggtggagttcgacatcgaggaggactacaccaccgacgaggacatggtggagggcgtggagggcaagctgggcaacggcagcggcgccggcggcatcctggacctgctgaaggccagcagacaggtgggcggccccgactacgccgccctgaccgaggcccccgccagccccagcacccaggaggccatccagggcatgctgtgcatggccaacctgcagagcagcagcagcagccccgccaccagcagcctgcaggcctggtggaccggcggccaggacagaagcagcggcagcagcagcagcggcctgggcaccgtgagcaacagccccgccagccagagaacccccggcaagagacccatcaagagacccgcctactggagaaccgagagcgaggaggaggaggagaacgccagcctggacgagcaggacagcctgggcgcctgcttcaaggacgccgagtacatctaccccagcctggagagcgacgacgacgaccccgccctgaagagcagacccaagaagaagaagaacagcgacgacgccccctggagccccaaggccagagtgacccccaccctgcccaagcaggacagacccgtgagagagggcaccagagtggccagcatcgagaccggcctggccgccgccgccgccaagctggcccagcaggagctgcagaaggcccagaagaagaagtacatcaagaagaagcccctgctgaaggaggtggagcagcccagaccccaggacagcaacctgagcctgaccgtgcccgcccccaccgtggccgccaccccccagctggtgaccagcagcagccccctgcccccccccgagcccaagcaggaggccctgagcggcagcctggccgaccacgagtacaccgccagacccaacgccttcggcatggcccaggccaacagaagcaccacccccatggcccccggcgtgttcctgacccagagaagacccagcgtgggcagccagagcaaccaggccggccagggcaagagacccaagaagggcctggccaccgccaagcagagactgggcagaatcctgaagatccacagaaacggcaagctgctgctgagacaggtgatcgtgcaggccgagtgcagacaggccatccacgagcccaagctgaagagaagagacgcccacccctag

SEQ ID NO: 71891 - protein, 878 aa, Artificial Sequence
  derived and/or modified sequence
MASVPVYCLCRLPYDVTRFMIECDMCQDWFHGSCVGVEEEKAADIDLYHCPNCEVLHGPSIMKKRRGSSKGHDTHKGKPVKTGSPTFVRELRSRTFDSSDEVILKPTGNQLTVEFLEENSFSVPILVLKKDGLGMTLPSPSFTVRDVEHYVGSDKEIDVIDVTRQADCKMKLGDFVKYYYSGKREKVLNVISLEFSDTRLSNLVETPKIVRKLSWVENLWPEECVFERPNVQKYCLMSVRDSYTDFHIDFGGTSVWYHVLKGEKIFYLIRPTNANLTLFECWSSSSNQNEMFFGDQVDKCYKCSVKQGQTLFIPTGWIHAVLTPVDCLAFGGNFLHSLNIEMQLKAYEIEKRLSTADLFRFPNFETICWYVGKHILDIFRGLRENRRHPASYLVHGGKALNLAFRAWTRKEALPDHEDEIPETVRTVQLIKDLAREIRLVEDIFQQNVGKTSNIFGLQRIFPAGSIPLTRPAHSTSVSMSRLSLPSKNGSKKKGLKPKELFKKAERKGKESSALGPAGQLSYNLMDTYSHQALKTGSFQKAKFNITGACLNDSDDDSPDLDLDGNESPLALLMSNGSTKRVKSLSKSRRTKIAKKVDKARLMAEQVMEDEFDLDSDDELQIDERLGKEKATLIIRPKFPRKLPRAKPCSDPNRVREPGEVEFDIEEDYTTDEDMVEGVEGYQTATPAPAQGASEAPASPSTQEAIQGMLCMANLQSSSSSPATSSLQAWWTGGQDRSSGSSSSGLGTVSNSPASQRTPGKRPIKRPAYWRTESEEEEENASLDEQDSLGACFKDAEYIYPSLESDDDDPALKSRPKKKKNSDDAPWSPKARVTPTLPKQDRPVREGTRVASIETGLAAAAAKLAQQVKKMKLSLTDSG

SEQ ID NO: 71892 - DNA, 345 bp, Artificial Sequence
  derived and/or modified sequence
atggcctcagttcccgtttactgcctttgcagacttccctatgacgtgactaggtttatgatcgaatgcgacatgtgtcaggactggtttcacggaagctgcgtaggcgtggaggaggagaaagcggctgatatcgatctgtatcattgcccaaattgtgaagtgctgcacggtcctagtattatgaaaaaacgaagaggcagttctaaaggacacgacactcacaaaggcaaaccagtgaagacaggctctccaacctttgttagggagctgaggtcaaggacgttcgatagcagtgatgaggtgattctgaaaccaaccgggaatcagctcacagtagagtag

SEQ ID NO: 71893 - DNA, 381 bp, Artificial Sequence
  derived and/or modified sequence
atggcctccgttccagtgtattgcctgtgtcgactcccctatgacgtgacacgtttcatgatcgagtgtgacatgtgtcaggactggttccatggatcttgcgtgggagttgaggaggagaaggcagccgatatcgatctctatcactgtcccaactgcgaagttttgcacggcccttcaatcatgaaaaagagacgcggcagcagcaagggtcacgacactcacaaaggcaagcctgtgaagactgggtcaccaaccttcgtgcgggaactccgctctagaactttcgattccagcgacgaagtcattctaaagcccaccgggaatcaactgacagtggagttcctggaagagaactcttttagcgtgcctatcctgtag

SEQ ID NO: 71894 - DNA, 294 bp, Artificial Sequence
  derived and/or modified sequence
atggcttcggttcccgtgtattgtttgtgtagactaccctacgatgtcacgaggttcatgattgaatgtgatatgtgtcaggattggtttcacggctcatgcgtcggcgtagaggaagaaaaggccgccgacatcgatttgtatcattgtcccaattgcgaggttctgcacggcccctctatcatgaagaagaggagaggctcctctaaggggcatgacacccataagggtaagcctgtgaagaccggctcgcccacattcgtgagagagctgagaagccgcacttttgattag

SEQ ID NO: 71895 - DNA, 348 bp, Artificial Sequence
  derived and/or modified sequence
atggcatctgtacccgtttattgtttatgcaggctgccctacgacgtcacaagattcatgattgagtgcgacatgtgccaggattggttccacggctcttgtgtgggcgtggaagaggagaaggctgctgacatagatctctatcactgcccaaattgcgaggtcctgcatggcccaagtatcatgaagaaacgcagaggtagctccaaagggcacgacacccacaaaggtaagcctgtcaagaccggctccccaacttttgtgcgcgagctcagatcccgtacctttgactcatctgacgaagttattctcaagccaactggcaatcagctaacggtggaattctag

SEQ ID NO: 71896 - DNA, 294 bp, Artificial Sequence
  derived and/or modified sequence
atggccagtgtgcccgtatactgcctctgtaggttaccgtacgatgttacccgatttatgattgaatgcgatatgtgtcaggattggttccacggctcctgtgtcggagtggaagaagagaaggcagccgacattgatctgtaccactgtccaaattgcgaggttctccatggcccctccataatgaaaaaaaggcgcggaagcagcaagggacacgacacacacaaagggaagccggttaagactggaagccctactttcgtgagggagttgagatctcggaccttcgactag

SEQ ID NO: 71897 - DNA, 2637 bp, Artificial Sequence
  derived and/or modified sequence
atggccagcgtccccgtttactgcctgtgtcggttgccatacgacgtaacccgattcatgatcgagtgcgatatgtgccaggattggttccacgggtcctgcgttggtgtcgaggaggaaaaggcggccgatatcgatctgtaccactgtcccaattgcgaggtattgcacggtccaagtatcatgaagaaaaggaggggaagttcaaaagggcatgacacccataagggaaagccagtgaaaacagggtctcccacatttgtaagagagctgagatcccgtacctttgacagttctgatgaagtcatcctgaaacccaccggcaatcagctgaccgtcgaattcttagaagaaaactcattttcggtgcccattttggtgctgaaaaaagacgggcttggaatgacgttgccctccccaagcttcaccgtgcgggatgtggagcattacgttggatctgacaaggaaattgacgtaattgatgtcactcgacaggcagactgcaagatgaagcttggcgacttcgtgaaatattattactcagggaagcgcgaaaaggtcctgaatgttatctctctggagttctcagataccaggttgagcaatctcgtcgagacaccaaagatcgttcgaaagttgtcatgggtagagaacctatggcctgaggagtgcgtctttgaacggccaaacgtgcagaaatactgcctgatgagcgtgcgggacagctacacagatttccatatagatttcggggggactagtgtgtggtaccacgttttgaaaggggaaaagattttctacctgatacgccccacaaacgcgaacctgacactgttcgagtgttggtcctctagctcaaatcagaacgagatgttctttggagatcaagtcgataagtgctacaagtgcagcgtcaagcaggggcaaaccctctttatcccaactgggtggatccatgcggtgcttactcctgttgattgtctcgcctttgggggtaatttcctgcactctcttaacatcgagatgcagctgaaggcatacgagattgaaaagcgtctgtccacagctgacctctttaggtttcctaatttcgagaccatttgctggtacgtcggaaaacatattctggatatcttcagggggctcagagaaaacagaagacaccccgcaagctaccttgttcatgggggcaaagctctaaatcttgcatttcgggcctggacacgtaaggaggcactgcccgaccatgaggacgagatccctgaaacggtgcggaccgttcagttgataaaagacttggcacgtgaaatcagactcgtcgaggacatatttcagcaaaacgttggcaagactagcaacattttcggccttcagaggatattcccagctggatcaattcccctgacccgacccgcccatagcacgtccgtgagtatgtcccgtctctccttgccgagtaaaaacgggagcaagaagaagggcctgaagccgaaggagctgtttaagaaggctgagcggaagggtaaagaatcgtctgctctcggccccgcaggacagcttagctataacctgatggatacctacagccaccaggcactgaagactggatcgttccagaaggcaaaattcaacatcaccggggcatgtctgaatgattcggatgatgatagccctgacctagatctcgacggcaacgaatcaccacttgctctcttgatgtctaacgggagcacaaagcgggtcaaaagcctcagtaagtcccggcggacaaagatagctaaaaaagttgataaggcaagactcatggccgaacaagtgatggaagatgagtttgacttggactccgacgacgagctccaaatagacgaaaggcttggaaaggagaaggccactctgatcatccgaccaaagtttccacgcaaactccctagggctaaaccctgctcagaccccaatcgagtccgagagcctggcgaggtggaattcgatatcgaagaagattatacaactgacgaagatatggtggaaggggtggagggttatcagacagctacacccgcccccgcccaaggcgcttccgaagcccctgcgtctcccagcacgcaggaagcgattcagggtatgctgtgtatggccaatctacagagctccagcagtagccctgccaccagcagcctgcaggcctggtggaccggcgggcaagatagatcaagcggctccagcagctccgggctcgggaccgtatccaacagtccagcatctcagcgaacaccgggcaaaagacccataaagcgccccgcctactggcggaccgagagtgaggaggaggaagagaacgccagtctggatgaacaggactccctcggggcatgcttcaaagacgccgagtacatctatccctcactggagtctgatgatgatgatccggccctcaaaagccgacccaagaagaaaaagaatagcgatgacgccccgtggagcccaaaggcgcgggttactccgaccctccccaaacaggatcgccctgtccgagagggtacgcgcgtagcatcaatagagacaggtctggctgcagcagctgctaaactggcccagcaggtgaagaagatgaagctgagcctaactgacagcggatag

SEQ ID NO: 71898 - DNA, 345 bp, Artificial Sequence
  derived and/or modified sequence
atggcctctgtgcctgtgtactgcctgtgccgcctgccctatgatgtgacccgcttcatgattgaatgtgacatgtgccaggactggttccacggcagctgtgtgggcgtggaggaggagaaggctgctgacatcgacctgtaccactgccccaactgtgaggtgctgcacggccccagcatcatgaagaagagaagaggcagcagcaagggccatgacacccacaagggcaagcctgtgaagacaggcagccccacctttgtgcgggagctgcggagcaggacctttgacagcagtgatgaggtgatcctgaagcccactggaaaccagctgactgtggagtag

SEQ ID NO: 71899 - DNA, 381 bp, Artificial Sequence
  derived and/or modified sequence
atggcctctgtgcctgtgtactgcctgtgccgcctgccctatgatgtgacccgcttcatgattgaatgtgacatgtgccaggactggttccacggcagctgtgtgggcgtggaggaggagaaggctgctgacatcgacctgtaccactgccccaactgtgaggtgctgcacggccccagcatcatgaagaagagaagaggcagcagcaagggccatgacacccacaagggcaagcctgtgaagacaggcagccccacctttgtgcgggagctgcggagcaggacctttgacagcagtgatgaggtgatcctgaagcccactggaaaccagctgactgtggagttcctggaggagaacagcttctctgtgcccatcctgtag

SEQ ID NO: 71900 - DNA, 294 bp, Artificial Sequence
  derived and/or modified sequence
atggcctctgtgcctgtgtactgcctgtgccgcctgccctatgatgtgacccgcttcatgattgaatgtgacatgtgccaggactggttccacggcagctgtgtgggcgtggaggaggagaaggctgctgacatcgacctgtaccactgccccaactgtgaggtgctgcacggccccagcatcatgaagaagagaagaggcagcagcaagggccatgacacccacaagggcaagcctgtgaagacaggcagccccacctttgtgcgggagctgcggagcaggacctttgattag

SEQ ID NO: 71901 - DNA, 348 bp, Artificial Sequence
  derived and/or modified sequence
atggcctctgtgcctgtgtactgcctgtgccgcctgccctatgatgtgacccgcttcatgattgaatgtgacatgtgccaggactggttccacggcagctgtgtgggcgtggaggaggagaaggctgctgacatcgacctgtaccactgccccaactgtgaggtgctgcacggccccagcatcatgaagaagagaagaggcagcagcaagggccatgacacccacaagggcaagcctgtgaagacaggcagccccacctttgtgcgggagctgcggagcaggacctttgacagcagtgatgaggtgatcctgaagcccactggaaaccagctgactgtggagttctag

SEQ ID NO: 71902 - DNA, 2637 bp, Artificial Sequence
  derived and/or modified sequence
atggcctctgtgcctgtgtactgcctgtgccgcctgccctatgatgtgacccgcttcatgattgaatgtgacatgtgccaggactggttccacggcagctgtgtgggcgtggaggaggagaaggctgctgacatcgacctgtaccactgccccaactgtgaggtgctgcacggccccagcatcatgaagaagagaagaggcagcagcaagggccatgacacccacaagggcaagcctgtgaagacaggcagccccacctttgtgcgggagctgcggagcaggacctttgacagcagtgatgaggtgatcctgaagcccactggaaaccagctgactgtggagttcctggaggagaacagcttctctgtgcccatcctggtgctgaagaaggatggcctgggcatgaccctgcccagccccagcttcaccgtgagagatgtggagcactacgtgggcagtgacaaggagattgatgtgattgatgtgacccggcaggccgactgcaagatgaagctgggggactttgtgaagtactactacagcggcaagcgggagaaggtgctgaatgtcatcagcctggagttcagtgacacccggctgagcaacctggtggagacccccaagatcgtgaggaagctgtcctgggtggagaacctgtggccagaagaatgtgtgtttgagcggcccaacgtgcagaagtactgcctgatgtctgtgcgggacagctacacagacttccacatcgactttggaggcacctctgtgtggtaccacgtgctgaagggggagaagatcttctacctgatccggcccaccaatgccaacctgaccctgtttgagtgctggagcagcagcagcaaccagaatgagatgttctttggagaccaggtggacaagtgctacaagtgcagcgtgaagcagggccagaccctcttcatccccaccggctggattcatgctgtgctgacccctgtggactgcctggccttcggcggcaacttcctgcacagcctgaacatcgagatgcagctgaaggcctatgaaattgagaagaggctgagcacagctgacctcttccgcttccccaactttgagaccatctgctggtacgtgggcaagcacatcctggacatcttccggggcctgcgggagaacagaagacacccagccagctacctggtgcatggaggcaaggccctgaacctggccttccgggcctggaccaggaaggaggccctgcctgaccatgaagatgagatccctgagaccgtgaggacagtgcagctgatcaaggacctggcccgggagatccggctggtggaggacatcttccagcagaatgtgggcaagaccagcaacatcttcggcctgcagaggatcttccctgctggcagcatccccctgaccaggcctgcccacagcacctctgtgtccatgagccggctgagcctgcccagcaagaatggcagcaagaagaagggcctgaagcccaaggagctgttcaagaaggccgagaggaagggcaaggagagcagcgccctgggccctgctggccagctgagctacaacctgatggacacctacagccaccaggccctgaagacaggcagcttccagaaggccaagttcaacatcaccggggcctgcctgaatgacagtgatgatgacagcccagacctggacctggatggaaatgaaagccccctggccctgctgatgagcaatggcagcaccaagagggtgaagagcctgagcaagagcaggaggaccaagatcgccaagaaggtggacaaggcccggctgatggccgagcaggtgatggaggatgaatttgacctggacagtgatgatgagctgcagattgatgagcggctgggcaaggagaaggccaccctcatcatccggcccaagttccccaggaagctgccccgggccaagccctgcagcgaccccaacagagtgcgggagcctggagaggtggagtttgacatcgaggaggactacaccacagatgaggacatggtggagggcgtggagggctaccagacagccaccccagccccagcccagggcgccagcgaggccccagccagccccagcacccaggaggccatccagggcatgctgtgcatggccaacctgcagagcagcagcagcagccctgccaccagcagcctgcaggcctggtggacaggaggccaggacaggagcagcggcagcagcagcagcggcctgggcaccgtgagcaacagccctgccagccagaggacccctgggaagaggcccatcaagaggcctgcctactggaggacagaaagtgaggaggaggaggagaatgccagcctggatgagcaggacagcctgggcgcctgcttcaaggatgctgagtacatctaccccagcctggagagtgatgatgatgatcctgccctgaagagccggcccaagaagaagaagaacagtgatgatgccccctggagccccaaggcccgggtgacccccaccctgcccaagcaggacaggcctgtgcgggagggcaccagggtggccagcattgagaccggcctggccgctgctgctgccaagctggcccagcaggtgaagaagatgaagctgagcctgacagattctggatag

SEQ ID NO: 71903 - DNA, 912 bp, Artificial Sequence
  derived and/or modified sequence
atggacacctacagccaccaggccctgaagaccggcagcttccagaaggccaagttcaatatcactggcgcatgtctgaatgactctgacgatgattctcccgatttggatttagatggaaatgagtctcctcttgcgctgctaatgtcgaacggctctacaaaacgtgtgaagtctctgagtaagagccgacgaacaaagatcgcaaagaaagttgataaagcccgcttaatggctgagcaagttatggaagatgaattcgatttggattcagacgatgagctacagattgatgaacggcttggcaaagagaaagctaccctcatcattaggcccaagttcccacggaagttgccgcgggcttcactggctctgaccccaaccgagttcgtgaaccaggagaaactcagtctgacattgcggcgaactattcagcagatgaggacttggtggaaagggctgaaagcaagcctggggatggtggtggccctggtcgcttttctgatctgttcccgacctgctgggagatggggtgatctgacaatgctcccttctcctaggccccagctgttgcccgctctaagacgaccaagccgtgcttgctgcgcttggcccacttgttctccacacaggccacaccgactgcctctcgcatgtcggccaggcgggttaggagaccggatcgaagccgttggcgccccagccgtggggtgggcacagtgtctgaccgtgctgcttccctccgcaccacaggggtcgggcccttcatccggccagcacacaggagaaccacgcgcccgcaggcgccgaagaactcccgtgtggatgaataggacagcttgggaaagggcgagccgaatgcagtctatctctatcttacactggtcactgatgatgatgacgctcctgtag

SEQ ID NO: 71904 - DNA, 345 bp, Artificial Sequence
  derived and/or modified sequence
atggccagcgtgcccgtgtactgcctgtgccggctgccctacgacgtgactaggttcatgatcgagtgcgatatgtgccaggactggtttcacgggtcatgtgttggggtggaggaagagaaggcagccgacatcgatctgtaccactgccccaactgcgaggtgctgcacggccccagcattatgaagaagcggaggggatcttccaagggccacgacacgcataaagggaaaccggtgaagactggctctccgacctttgttagggagctgcgcagtcggacctttgactcctccgatgaggttatcctcaagcccaccggtaatcaactgacagtggagtag

SEQ ID NO: 71905 - DNA, 381 bp, Artificial Sequence
  derived and/or modified sequence
atggccagcgtgcccgtgtactgcctgtgccggctgccctacgacgtgactcgttttatgatagagtgcgatatgtgtcaggactggttccatggctcttgtgtcggtgtcgaagaggaaaaggctgcagacattgacttataccattgcccaaactgcgaagtgctgcacggtccgagtattatgaagaaacggcgaggaagcagtaagggtcacgatacgcataaaggaaagccggttaaaaccggttcaccaacattcgtgcgagagctcaggagccggacattcgattccagtgatgaagtgattttgaaaccgactggcaaccaacttaccgtagaattcctggaagaaaattccttctccgtgcctatattatag

SEQ ID NO: 71906 - DNA, 294 bp, Artificial Sequence
  derived and/or modified sequence
atggccagcgtgcccgtgtactgcctgtgccggctgccctacgacgtgactcggttcatgattgagtgcgacatgtgtcaggactggttccatgggagctgcgttggcgtagaggaggagaaagccgcggatattgatttgtatcactgtcctaactgcgaggtgttgcacggcccgtccataatgaaaaagagacgaggttcctctaaaggacatgatactcacaaggggaagcctgtaaaaaccggcagccccactttcgtcagggagttgcgtagcagaacttttgattag

SEQ ID NO: 71907 - DNA, 348 bp, Artificial Sequence
  derived and/or modified sequence
atggccagcgtgcccgtgtactgcctgtgccggctgccctacgacgtcactcgttttatgatcgaatgtgatatgtgtcaagactggtttcatgggtcttgcgtgggcgtggaagaagaaaaggcggcagacattgatctgtaccactgccccaattgtgaagtgctgcatggtccgtccatcatgaaaaagcggcgcggaagcagcaagggacatgatacacacaaaggtaagcccgtgaaaaccggttcacccaccttcgtaagggaactgcggtcacgtacttttgactctagcgatgaagtgattctgaagcccaccgggaatcagcttacggtcgagttttag

SEQ ID NO: 71908 - DNA, 294 bp, Artificial Sequence
  derived and/or modified sequence
atggccagcgtgcccgtgtactgcctgtgccggctgccctacgacgttacacgtttcatgattgagtgtgatatgtgtcaggactggtttcatggctcgtgcgttggagtagaagaggagaaagcagcagacattgatctgtatcattgcccaaactgcgaggttttacatggacctagtattatgaaaaagaggagagggtcctccaagggccatgacactcataagggcaagccggtgaagactggctcccctaccttcgtgagagagctcagaagccggaccttcgactag

SEQ ID NO: 71909 - DNA, 2637 bp, Artificial Sequence
  derived and/or modified sequence
atggccagcgtgcccgtgtactgcctgtgccggctgccctacgacgtcacacgcttcatgattgagtgcgacatgtgtcaagattggttccatgggagctgtgtgggagtggaggaggaaaaggccgccgacatcgacctatatcactgcccaaactgcgaggtgcttcacggaccttcgataatgaagaaaaggcgaggtagtagcaagggccatgatacacataaagggaaaccggtcaagaccggatccccaactttcgttcgggagctgaggtcaagaacgttcgattccagcgacgaagtgatcctcaaacctaccgggaaccaactgactgtagagttcctcgaagagaatagcttcagcgtccccatcctggtcctgaagaaggatgggctgggcatgacacttcccagcccatcttttactgtccgggatgtagaacattacgtagggtcagacaaagagattgacgtgatcgacgtcacacgccaggccgactgcaagatgaagctcggggactttgtgaaatactactattccgggaaacgtgaaaaagtgttaaatgttatctctctggagttttccgacacccgattgtcaaacctagtggaaaccccgaagatcgtcaggaagttgagctgggttgaaaacctgtggccagaagagtgcgtctttgagaggcccaatgttcagaagtactgcttgatgtctgttcgcgacagctataccgattttcatattgactttgggggcactagcgtatggtaccacgttctaaagggggagaaaatcttctacttgatacggccaacaaacgccaacttaaccctgttcgagtgctggtcgagctcttcgaaccaaaatgagatgtttttcggtgaccaggtagacaagtgttataagtgctctgtcaagcagggccaaactctatttatacctacgggttggatccatgccgtgctaactccagtagactgtctagcttttggtggcaacttcctgcatagccttaacattgaaatgcagctcaaagcttacgaaatcgaaaaaaggctgagcacggccgatctgtttcgttttccaaattttgagacaatttgttggtacgtgggcaaacacattcttgatatcttccggggcctccgtgagaaccgccggcatcccgctagctatctagtgcacggtggaaaagctcttaatctggcattcagagcctggacacggaaagaggccttgcccgatcacgaagacgagataccggagacagtgaggaccgttcagttaatcaaggaccttgcgagggaaattcggctggtcgaggacatattccaacaaaacgtgggtaaaaccagcaatatcttcggtctgcagcgtatctttccagctggctcaattcctctcacccggccagcacattccacatccgtctctatgtccagactcagtctcccatcaaagaacggaagcaaaaagaaaggtctgaagcccaaagagctctttaaaaaagccgagcgaaaaggaaaagaatccagtgcgctgggaccggccgggcagctcagttacaatcttatggatacttacagccatcaggcgcttaaaacagggagcttccagaaggccaaatttaatataacaggtgcatgtcttaacgactccgatgatgacagccccgatctggacttagacggaaatgaaagccccttagcactactcatgagcaatggctcaacgaaaagagtcaagagtttgtccaagtccaggcgtacaaagatcgccaaaaaggtagataaagctagactgatggctgagcaggtgatggaggatgaatttgacctggattccgatgacgaactacagattgatgagagactgggtaaagagaaggcaactctcataatccgacccaaattccccagaaagctcccgagggccaagccctgtagtgatccgaatcgagtgagggaaccgggcgaggtggaatttgacattgaggaggattatacgacagatgaggatatggtggagggcgttgaagggtaccagacagctacccccgcaccagcacaaggggcctctgaggcgccagcctctccaagcactcaggaagctatccaggggatgctttgtatggccaacctgcagtcttcttcatcttctcccgcgactagctccctgcaagcctggtggactggaggtcaagaccggtcttcaggaagttcttcatccgggctcggcaccgtgagcaacagccctgcctcccagcgaactcccggcaagaggccaatcaagcgccctgcctactggaggaccgagtccgaggaagaggaggagaacgcctcgctggatgagcaggatagcctgggcgcctgcttcaaggatgcggagtacatttaccccagtttggaaagcgacgacgatgacccagcactaaaaagtaggcctaagaagaaaaaaaactctgacgatgctccctggtcccctaaggctcgagtaacgcctacgctgccaaagcaagatcgacctgtgagagaaggtacgcgagtggccagcatcgaaaccggcctcgcggcggccgccgccaaactcgctcagcaagtgaaaaagatgaaactctcactgaccgattccggctag

SEQ ID NO: 71910 - DNA, 2726 bp, Artificial Sequence
  derived and/or modified sequence
atgagtgtgcgagatagctatacagactttcacattgactttggtggcacctctgtctggtaccatgtactcaagggtgaaaagatcttctacctgatccgcccaacaaatgccaatctgactctctttgagtgctggagcagttcctctaatcagaatgagatgttctttggggaccaggtggacaagtgctacaagtgttccgtgaagcaaggacagacacttttcattcccacagggtggatccatgctgtgctgacgcctgtggactgccttgcctttggagggaacttcttacacagccttaacatcgagatgcagctcaaagcctatgagattgagaagcggctgagcacagcagacctcttcagattccccaactttgagaccatctgttggtatgtgggaaagcacatcctggacatctttcgcggtttgcgagagaacaggagacaccctgcctcctacctggtccatggtggcaaagccttgaacttggcctttagagcctggacaaggaaagaagctctgccagaccatgaggatgagatcccggagacagtgcgaaccgtacagctcattaaagatctggccagggagatccgcctggtggaagacatcttccaacagaacgttgggaagacgagcaatatctttgggctgcagaggatcttcccagccggctccattcccctaaccaggccagcccattccacttcagtgtccatgtccaggctgtcactgccctccaaaaatggttcaaagaagaaaggcctgaagcccaaggaactcttcaagaaggcagagcgaaagggcaaggagagttcagccttggggcctgctggccagttgagctataatctcatggacacatacagtcatcaggcactgaagacaggctctttccagaaagcaaagttcaacatcactggtgcctgcttgaatgactcagatgacgactcaccagacttggaccttgatggaaatgagagcccattggccctattgatgtctaacggcagtacgaaaagggtgaagagtttatccaaatctcggcgaaccaagatagcaaagaaggtagacaaggctaggctgatggcagaacaggtgatggaagacgaatttgacttggattcagatgatgagctgcagattgacgagagattgggaaaggagaaggcgaccctgataataagaccaaaatttccccggaaattgccccgtgcgagccttgctctgaccccaaccgagttcgtgaaccaggagaagttgagtttgacattgaggaggactatacaacagatgaggacatggtggaaggggttgaaggcaagcttgggaatggtagtggcgctggtggcattcttgatctgctcaaggccagcaggcaggtggggggacctgactatgctgccctcaccgaggccccagcttctcccagcactcaggaggccatccagggcatgctgtgcatggccaacctgcagtcctcatcgtcctcaccggctacctctagcctgcaggcctggtggactgggggacaggatcgaagcagtgggagctccagcagtgggctgggcacagtgtctaacagtcctgcttcccagcgcaccccagggaagcggcccatcaagcggccagcatactggagaaccgagagcgaggaggaggaggagaacgccagtctggatgaacaggacagcttgggagcgtgcttcaaggatgcagagtatatctatccttcactggagtctgatgatgatgaccctgctttgaaatctcgacccaagaaaaagaagaattcagatgatgctccatggagtcctaaagcccgcgtgaccccaactctgccgaagcaggaccgtcctgtgcgtgaggggacccgggtagcctctattgagacaggtttggctgcagcagctgcaaagctggcccagcaggtgaagaaaatgaagctctcattaactgactcaggataatacagccagtaaatggaggagacaactcaaactcatatcctctaacttcaaatttcatattactttctatttaaataaatgcttatgtagttcagtcattacatcctatttaaatagtgtttaaatctttggcaatcttctttgaccagaacttctgtctcttatgtatatcccaatacagtgtaagctgtaatttgaaaaagggggttctactgttttatataaatataaattaagtaaagctgtgaaaattactcttagtgccttttaaggagctaaattctgtttgggatgatcagagataacctcaaagaagaggttttgaaattggggaggggctttgcaagctaagcttctggtaggggccagggaggcattctaaaagaagggacttccttcgtatagcacacaaagccctcttaaagtcctcttgatttggtctctagtcatctccctgacctccttccagcccctcatgcacaccttttatacagccatagtgcactgcaatactcatagtcccctcagtgagtatatcagattgtctcatgcttttgtgcctttacacaagatgttccttttacccattgagaatcataccctatcagatcccttacctaacagcccttcatactacctaccaccactttatttcagaggcctttttctatatgcttctacaacattcgtggtacttacaatcataaatgtatgttttggtgtttcttattaaactatgaatacttc

SEQ ID NO: 71911 - DNA, 912 bp, Artificial Sequence
  derived and/or modified sequence
atggacacatattcccatcaggccctgaagaccgggtcatttcaaaaagcgaaattcaacattaccggggcttgtttgaacgatagcgacgacgactctccagacctggatcttgacggcaacgaatctcccctggccttactcatgtccaacggaagcaccaagcgggtgaagtcactgtcaaagtcaaggcgaaccaagatcgctaagaaagttgacaaagcccgactgatggctgaacaggtgatggaggatgaattcgacctggacagcgatgatgaactgcagatagacgagcggcttgggaaagagaaggccaccttgatcatcaggcccaaatttccgaggaaactgccaagggcttcattggccctcacacccacagaattcgttaatcaggagaagctatccttgacactgcggaggacaatccagcaaatgaggacatggtggaaaggtctcaaggccagtctcggaatggttgttgccttagttgctttccttatctgtagccgacctgcgggacgatggggggacttaacgatgcttcccagtcccaggcctcagctgttgccagcgttgcgaagaccatcccgagcctgttgcgcctggccaacctgctcacctcacagaccgcatcgtctcccgctcgcttgtcgccctggaggtctcggagatcgcatagaagccgtcggtgccccagccgtgggttgggcccagtgcctgaccgtactattgcctagcgcccctcagggaagcggcccaagttccgggcagcatacgggagaacccagagcgaggcgcaggagacgcacacccgtttggatgaaccgcactgcctgggagcgtgccagccgcatgcagtctattagcattctccattggtctttgatgatgatgaccttactgtag

SEQ ID NO: 71912 - DNA, 345 bp, Artificial Sequence
  derived and/or modified sequence
atggcctccgtgcccgtttattgtctgtgccggctgccctatgatgtcactagattcatgattgaatgtgacatgtgtcaggactggtttcacgggtcttgcgtgggggtggaggaggaaaaagcggctgacattgacctgtaccactgtccaaattgtgaggtgctgcatggaccctcaattatgaaaaagaggaggggctcaagcaaaggacacgatacacacaaaggcaaacccgttaaaaccgggagtccaacctttgtaagagaactgaggtcacgaacatttgattcttcagacgaagtgattctgaaacccacagggaatcagctgaccgttgagtag

SEQ ID NO: 71913 - DNA, 381 bp, Artificial Sequence
  derived and/or modified sequence
atggcctctgtgcccgtctactgcctttgtagactgccatacgatgtgacacgtttcatgatcgaatgtgacatgtgtcaagactggttccacggttcctgcgtgggcgtggaagaggagaaggcagctgatatcgatctgtatcactgtccgaattgcgaagtcctgcacgggccatctataatgaaaaaaagacggggatcaagcaaaggccacgatacgcataagggtaaacccgtgaagaccggatctcccacattcgtgcgggagcttaggagcagaacctttgattccagcgatgaggttattctaaagcctactggcaatcaactcacagtggaatttctcgaagagaactccttcagcgtacccatcttatag

SEQ ID NO: 71914 - DNA, 294 bp, Artificial Sequence
  derived and/or modified sequence
atggcttctgtcccagtctactgcctctgccggttaccctacgacgtgacacgatttatgatagagtgtgacatgtgccaggactggttccatggttcttgcgtgggagtcgaggaagagaaggcggcagatatcgacctgtaccactgccccaactgtgaagttctgcacgggccttccatcatgaaaaagagacggggatctagcaaaggacacgacacacacaaaggaaagccagtgaagacaggttcccctacctttgtcagggagctaaggtctcgcacttttgactag

SEQ ID NO: 71915 - DNA, 348 bp, Artificial Sequence
  derived and/or modified sequence
atggcatccgtcccggtgtattgcctgtgcaggctcccttatgatgtcactcgattcatgattgagtgtgacatgtgccaggactggtttcatgggtcatgtgtgggagtggaagaggagaaggccgctgatatcgacctgtaccattgccctaactgtgaagtgcttcatgggcctagtatcatgaagaagagaagaggctccagtaaggggcacgatacacacaaaggtaagccagtgaaaacgggctcccctacattcgtgcgggaactaaggagccggacgtttgattcttcagacgaggtgattttaaaacccactggaaaccagctcaccgtcgagttctag

SEQ ID NO: 71916 - DNA, 294 bp, Artificial Sequence
  derived and/or modified sequence
atggcttctgtgccagtgtactgcctttgtcgactcccttacgacgtgactcggttcatgattgagtgcgacatgtgccaagattggttccacggatcatgcgtgggtgtggaagaagaaaaagctgccgacattgacctgtaccactgcccgaattgcgaggtactgcatggaccctccatcatgaaaaaacggcgtggatcttctaagggccatgacacccacaagggaaaacctgtgaagaccgggtcccccacattcgttagggagctgcgcagtcgaacgttcgactag

SEQ ID NO: 71917 - DNA, 2637 bp, Artificial Sequence
  derived and/or modified sequence
atggcttccgtacccgtctactgcctgtgccggctgccttacgatgtgacccgcttcatgatcgagtgcgatatgtgtcaggattggtttcacggttcttgtgtgggcgttgaggaggagaaggcggctgacattgacctgtaccactgccctaactgcgaagtcctccatggccctagtattatgaaaaaaaggaggggaagttcaaaggggcacgacacccacaagggtaagcccgtcaaaacagggagtccaacctttgtacgcgaattacggtcccgcacctttgactcatccgatgaagtaatcctaaaacccacgggcaaccaacttactgtagaatttttagaggaaaactcttttagtgtcccaatcctggttctgaaaaaggatggcctcggcatgactctgccatcgccttccttcactgtgagagatgtagagcactacgtgggatcagacaaagagatcgatgtgatagacgttacaagacaggctgattgcaagatgaaacttggcgatttcgtaaagtactactactccggcaagcgggaaaaggtcctaaacgtgattagcttggagttttctgacactagactgagcaatcttgtggagacccctaaaattgttcggaagctgagttgggtcgaaaacctttggcctgaggagtgcgtgttcgagagacctaacgttcaaaagtactgcttaatgtcagtgagagattcatacactgactttcacatcgattttgggggaacctcagtgtggtatcacgtgctgaagggagagaagatattttacctgattaggccgacaaatgctaacctgaccctgttcgagtgctggagctccagttccaaccagaacgagatgttttttggtgaccaagtagataagtgctacaaatgttccgtcaagcaggggcagaccttgttcattcctaccggttggattcatgccgtgctgacccccgtggattgccttgcgttcggtggaaatttcctgcacagcctcaatattgagatgcagctgaaagcttacgaaatcgagaagagacttagcaccgccgacctgtttaggtttcccaatttcgagaccatatgctggtatgtagggaagcacatactggacatatttagggggctgcgcgagaacaggagacacccggcttcttatctcgtgcatggcggtaaggcactcaatctagcctttcgtgcttggacaaggaaagaagctctgcctgatcatgaggatgagattcctgagacggtgagaaccgttcagctgatcaaggacctcgccagagagataaggttggtcgaggatatcttccagcagaacgtaggcaaaacatctaacatattcgggctccaaagaatctttcccgctggaagtatcccactcactcggcctgcgcattccacgagcgtttctatgagcaggctctctctcccttcaaagaatggctctaagaaaaaggggttgaagccaaaggagctctttaaaaaagccgagcgcaaaggcaaggagtccagtgcccttgggcctgcaggtcagttgtcttacaacctgatggatacatacagtcaccaggcgttgaagacgggatcctttcaaaaggcaaaatttaacattacaggagcctgcctcaacgactccgacgatgacagtcccgatctggatttggacggcaatgagtcccctctcgccctgcttatgtccaatggctctacaaagcgggtcaagtctctttccaagtcgcgcaggactaagatagccaaaaaagtggacaaggccagactcatggcagagcaggtgatggaagacgaatttgacctcgattcagatgacgagctccagatcgacgaaagactggggaaggagaaagctaccttgatcattcgcccaaaattccccagaaagttgccaagggcgaagccctgtagcgatccaaaccgtgttcgagagcccggagaagtagagtttgacattgaggaagattatacgactgacgaggacatggtagaaggcgtggaggggtaccagacagctacccccgctccagcccagggcgcaagcgaggcccctgcctccccttccactcaggaagccattcagggaatgctttgtatggctaacctgcagagttcctctagtagtcccgctacctcatcactccaggcctggtggaccggaggtcaggaccgctcaagcggatcttccagctctggccttggcacagtcagtaattcgccggcatcacaaagaacacctggtaaacggccaattaaaagaccagcctactggagaacagagtctgaggaggaggaggagaacgccagcctcgatgagcaagatagcctgggtgcctgttttaaagatgcagaatatatctaccccagcctagagagtgacgacgacgatcctgcactgaaatctcgccctaagaagaaaaagaatagcgacgatgccccatggagcccaaaggcccgagtgaccccaacactaccgaagcaggaccggcctgtcagagaaggaacaagagttgcatctattgaaacgggcctcgctgctgctgctgctaagctcgcccagcaagttaaaaagatgaagctgagcctcacggattcaggttag

SEQ ID NO: 71918 - DNA, 345 bp, Artificial Sequence
  derived and/or modified sequence
atggccagcgtgcccgtgtactgcctgtgcagactgccctacgacgtgaccagattcatgatcgagtgcgacatgtgccaggactggttccacggcagctgcgtgggcgtggaggaggagaaggccgccgacatcgacctgtaccactgccccaactgcgaggtgctgcacggccccagcatcatgaagaagagaagaggcagcagcaagggccacgacacccacaagggcaagcccgtgaagaccggcagccccaccttcgtgagagagctgagaagcagaaccttcgacagcagcgacgaggtgatcctgaagcccaccggcaaccagctgaccgtggagtag

SEQ ID NO: 71919 - DNA, 381 bp, Artificial Sequence
  derived and/or modified sequence
atggccagcgtgcccgtgtactgcctgtgcagactgccctacgacgtgaccagattcatgatcgagtgcgacatgtgccaggactggttccacggcagctgcgtgggcgtggaggaggagaaggccgccgacatcgacctgtaccactgccccaactgcgaggtgctgcacggccccagcatcatgaagaagagaagaggcagcagcaagggccacgacacccacaagggcaagcccgtgaagaccggcagccccaccttcgtgagagagctgagaagcagaaccttcgacagcagcgacgaggtgatcctgaagcccaccggcaaccagctgaccgtggagttcctggaggagaacagcttcagcgtgcccatcctgtag

SEQ ID NO: 71920 - DNA, 294 bp, Artificial Sequence
  derived and/or modified sequence
atggccagcgtgcccgtgtactgcctgtgcagactgccctacgacgtgaccagattcatgatcgagtgcgacatgtgccaggactggttccacggcagctgcgtgggcgtggaggaggagaaggccgccgacatcgacctgtaccactgccccaactgcgaggtgctgcacggccccagcatcatgaagaagagaagaggcagcagcaagggccacgacacccacaagggcaagcccgtgaagaccggcagccccaccttcgtgagagagctgagaagcagaaccttcgactag

SEQ ID NO: 71921 - DNA, 348 bp, Artificial Sequence
  derived and/or modified sequence
atggccagcgtgcccgtgtactgcctgtgcagactgccctacgacgtgaccagattcatgatcgagtgcgacatgtgccaggactggttccacggcagctgcgtgggcgtggaggaggagaaggccgccgacatcgacctgtaccactgccccaactgcgaggtgctgcacggccccagcatcatgaagaagagaagaggcagcagcaagggccacgacacccacaagggcaagcccgtgaagaccggcagccccaccttcgtgagagagctgagaagcagaaccttcgacagcagcgacgaggtgatcctgaagcccaccggcaaccagctgaccgtggagttctag

SEQ ID NO: 71922 - DNA, 2637 bp, Artificial Sequence
  derived and/or modified sequence
atggccagcgtgcccgtgtactgcctgtgcagactgccctacgacgtgaccagattcatgatcgagtgcgacatgtgccaggactggttccacggcagctgcgtgggcgtggaggaggagaaggccgccgacatcgacctgtaccactgccccaactgcgaggtgctgcacggccccagcatcatgaagaagagaagaggcagcagcaagggccacgacacccacaagggcaagcccgtgaagaccggcagccccaccttcgtgagagagctgagaagcagaaccttcgacagcagcgacgaggtgatcctgaagcccaccggcaaccagctgaccgtggagttcctggaggagaacagcttcagcgtgcccatcctggtgctgaagaaggacggcctgggcatgaccctgcccagccccagcttcaccgtgagagacgtggagcactacgtgggcagcgacaaggagatcgacgtgatcgacgtgaccagacaggccgactgcaagatgaagctgggcgacttcgtgaagtactactacagcggcaagagagagaaggtgctgaacgtgatcagcctggagttcagcgacaccagactgagcaacctggtggagacccccaagatcgtgagaaagctgagctgggtggagaacctgtggcccgaggagtgcgtgttcgagagacccaacgtgcagaagtactgcctgatgagcgtgagagacagctacaccgacttccacatcgacttcggcggcaccagcgtgtggtaccacgtgctgaagggcgagaagatcttctacctgatcagacccaccaacgccaacctgaccctgttcgagtgctggagcagcagcagcaaccagaacgagatgttcttcggcgaccaggtggacaagtgctacaagtgcagcgtgaagcagggccagaccctgttcatccccaccggctggatccacgccgtgctgacccccgtggactgcctggccttcggcggcaacttcctgcacagcctgaacatcgagatgcagctgaaggcctacgagatcgagaagagactgagcaccgccgacctgttcagattccccaacttcgagaccatctgctggtacgtgggcaagcacatcctggacatcttcagaggcctgagagagaacagaagacaccccgccagctacctggtgcacggcggcaaggccctgaacctggccttcagagcctggaccagaaaggaggccctgcccgaccacgaggacgagatccccgagaccgtgagaaccgtgcagctgatcaaggacctggccagagagatcagactggtggaggacatcttccagcagaacgtgggcaagaccagcaacatcttcggcctgcagagaatcttccccgccggcagcatccccctgaccagacccgcccacagcaccagcgtgagcatgagcagactgagcctgcccagcaagaacggcagcaagaagaagggcctgaagcccaaggagctgttcaagaaggccgagagaaagggcaaggagagcagcgccctgggccccgccggccagctgagctacaacctgatggacacctacagccaccaggccctgaagaccggcagcttccagaaggccaagttcaacatcaccggcgcctgcctgaacgacagcgacgacgacagccccgacctggacctggacggcaacgagagccccctggccctgctgatgagcaacggcagcaccaagagagtgaagagcctgagcaagagcagaagaaccaagatcgccaagaaggtggacaaggccagactgatggccgagcaggtgatggaggacgagttcgacctggacagcgacgacgagctgcagatcgacgagagactgggcaaggagaaggccaccctgatcatcagacccaagttccccagaaagctgcccagagccaagccctgcagcgaccccaacagagtgagagagcccggcgaggtggagttcgacatcgaggaggactacaccaccgacgaggacatggtggagggcgtggagggctaccagaccgccacccccgcccccgcccagggcgccagcgaggcccccgccagccccagcacccaggaggccatccagggcatgctgtgcatggccaacctgcagagcagcagcagcagccccgccaccagcagcctgcaggcctggtggaccggcggccaggacagaagcagcggcagcagcagcagcggcctgggcaccgtgagcaacagccccgccagccagagaacccccggcaagagacccatcaagagacccgcctactggagaaccgagagcgaggaggaggaggagaacgccagcctggacgagcaggacagcctgggcgcctgcttcaaggacgccgagtacatctaccccagcctggagagcgacgacgacgaccccgccctgaagagcagacccaagaagaagaagaacagcgacgacgccccctggagccccaaggccagagtgacccccaccctgcccaagcaggacagacccgtgagagagggcaccagagtggccagcatcgagaccggcctggccgccgccgccgccaagctggcccagcaggtgaagaagatgaagctgagcctgaccgacagcggctag

SEQ ID NO: 71923 - protein, 70 aa, Artificial Sequence
  derived and/or modified sequence
MEKKECPEKSSSSEEELPRRDSGSSRNIDASKLIRLQGSRKLLVDNSIRELQYTKTGIFFQAEACVTNDT

SEQ ID NO: 71924 - protein, 537 aa, Artificial Sequence
  derived and/or modified sequence
MEKKECPEKSSSSEEELPRRDSGSSRNIDASKLIRLQGSRKLLVDNSIRELQYTKTGIFFQAEACVTNDTVYRELPCVSETLCDISHFFQEDDETEAEPLLFRAVPECQLSGGDIPSVSEEQESSEGQDSGDICSEENQIVSSYASKVCFEIEEDYKNRQFLGPEGNVDVELIDKSTNRYSVWFPTAGWYLWSATGLGFLVRDEVTVTIAFGSWSQHLALDLQHHEQWLVGGPLFDVTAEPEEAVAEIHLPHFISLQAGEVDVSWFLVAHFKNEGMVLEHPARVEPFYAVLESPSFSLMGILLRIASGTRLSIPITSNTLIYYHPHPEDIKFHLYLVPSDALLTKAIDDEEDRFHGVRLQTSPPMEPLNFGSSYIVSNSANLKVMPKELKLSYRSPGEIQHFSKFYAGQMKEPIQLEITEKRHGTLVWDTEVKPVDLQLVAASAPPPFSGAAFVKENHRQLQARMGDLKGVLDDLQDNEVLTENEKELVEQEKTRQSKNEALLSMVEKKGDLALDVLFRSISERDPYLVSYLRQQNL

SEQ ID NO: 71925 - DNA, 1614 bp, Artificial Sequence
  derived and/or modified sequence
atggagaagaaggagtgtcctgagaagtcgagcagctcggaggaggaactgcccaggagagattctggctcttctcgcaatattgatgcttccaaactcataaggctgcaggggtcgagaaagctgctcgttgacaattctattcgggaactgcagtataccaaaactggaatctttttccaggccgaagcatgcgtgaccaacgacacagtctatcgggaactaccatgcgtgtctgaaaccttgtgcgacatcagtcactttttccaggaggatgatgaaacagaagccgagccgttgctgttcagagcagtcccagagtgtcaacttagcgggggggacattccatcggtatcggaggagcaggagtcaagtgaggggcaagattccggggacatctgttcagaagagaatcaaatagtaagttcatatgcgagcaaagtttgctttgaaatagaggaagactacaagaatcgacaatttctgggccccgaaggaaacgtagatgtggaactgattgacaagtctactaacaggtattcagtttggttccccacagctggttggtacttgtggtcggccacagggctcggctttctggtgcgtgatgaagtcacagtgactatagcatttggttcttggagccagcacctcgccctggacctgcagcaccacgagcaatggcttgtgggcggcccgctgtttgatgttacagccgagccggaagaagctgtggccgagatccatcttccgcactttatcagccttcaggcaggggaggtcgatgtatcgtggttccttgtcgcccacttcaaaaacgaggggatggtcctggaacacccagctagggtcgagccattttatgcagtactcgagagcccgtcgttcagcctgatgggcattcttcttagaatcgcctcgggcactaggctttcgataccaataacatctaacacactgatctattaccacccccatccagaggatattaaattccacctctatcttgtaccaagcgatgcactgttgaccaaggccatcgacgacgaggaagaccgatttcacggtgttcggcttcagaccagccccccaatggagcctctcaacttcggatcaagttacatcgtttctaactcggcgaacctaaaggtcatgcctaaggaactcaaactgagctacagaagtcccggcgaaattcaacacttttctaaattctatgccggacagatgaaggaacccattcagcttgagattaccgagaaaaggcacggtactcttgtgtgggacaccgaagtgaaacctgtagatttgcaactggtggcagcaagtgcccctccgcccttttccggagccgcttttgtaaaggaaaatcaccgacaactgcaggccagaatgggtgacctcaagggcgttctcgatgatcttcaggataatgaggttctgacagaaaacgaaaaagagctggttgagcaggagaaaacgcgccagtcaaaaaacgaagctctgctcagtatggtcgaaaaaaagggtgatttggctctggatgtattgttccgtagcattagcgagcgagatccgtatctggtgtcttatctcaggcagcaaaatctctag

SEQ ID NO: 71926 - DNA, 1614 bp, Artificial Sequence
  derived and/or modified sequence
atggagaagaaggaatgtcctgagaagagcagcagcagcgaggaggagctgccccggcgggacagcggcagcagcaggaacattgatgccagcaagctgatccggctgcagggcagcaggaagctgctggtggacaacagcatccgggagctgcagtacaccaagacaggcatcttcttccaggccgaggcctgtgtgaccaatgacacagtgtaccgggagctgccctgtgtgtctgagaccctgtgtgacatcagccacttcttccaggaggatgatgaaacagaagctgagcccctgctcttccgggctgtgcctgagtgccagctgtctggaggagacatccccagcgtgtctgaggagcaggagagcagcgagggccaggacagcggggacatctgcagcgaggagaaccagatcgtgtcctcctatgccagcaaggtgtgctttgaaattgaggaggactacaagaaccggcagttcctgggccctgagggcaatgtggatgtggagctgattgacaagagcaccaaccgctacagcgtgtggttccccacagctggctggtacctgtggagcgccaccggcctgggcttcctggtgagagatgaggtgacagtgaccatcgccttcggctcctggagccagcacctggccctggacctgcagcaccacgagcagtggctggtgggcggccccctgtttgatgtgacagctgagcctgaggaggccgtggccgagatccacctgccccacttcatcagcctgcaggccggggaggtggatgtgtcctggttcctggtggcccacttcaagaatgaaggcatggtgctggagcacccagcccgggtggagcccttctatgctgtgctggagagccccagcttcagcctgatgggcatcctgctgagaattgccagcggcacccggctgagcatccccatcaccagcaacaccctcatctactaccacccccaccctgaggacatcaagttccacctgtacctggtgcccagtgatgccctgctgaccaaggccattgatgatgaagaagatcgcttccatggagtgcggctgcagaccagcccccccatggagcccctgaactttggcagcagctacatcgtgagcaacagcgccaacctgaaggtgatgcccaaggagctgaagctgagctaccgcagccctggagagatccagcacttcagcaagttctacgccggccagatgaaggagcccatccagctggagatcacagagaagagacatggcaccctggtgtgggacacagaggtgaagcctgtggacctgcagctggtggccgccagcgcccccccacccttctctggagctgcctttgtgaaggagaaccaccggcagctgcaggccaggatgggagacctgaagggcgtgctggatgacctgcaggacaatgaggtgctgacagaaaatgagaaggagctggtggagcaggagaagacccggcagagcaagaatgaggccctgctgtccatggtggagaagaagggggacctggccctggatgtgctcttccgcagcatcagcgagcgggacccctacctggtgtcctacctgcggcagcagaacctgtag

SEQ ID NO: 71927 - DNA, 1614 bp, Artificial Sequence
  derived and/or modified sequence
atggagaagaaggagtgccccgagaagagcagcagcagcgaggaggagttaccgcggagggactctggctcaagccgaaacatcgatgcctcaaagcttatcaggctgcaggggagccgcaaattactggttgacaacagcatccgcgaactacaatacacaaagaccgggatttttttccaggcagaggcctgtgtgactaatgacacggtctatcgggaactcccttgcgtctctgagacactttgcgacatttctcacttttttcaggaggacgacgaaaccgaggccgaacctctcctttttcgggctgttccagaatgccagctctccgggggggatatacccagcgttagcgaggaacaggagtccagcgagggtcaagacagcggtgatatctgttctgaggagaatcagatcgtaagctcttacgcatccaaggtgtgttttgagatcgaagaggactataagaatcgccagtttcttggcccagaaggcaatgtcgatgtggagctcatcgacaagtccaccaatcgatatagtgtatggttccctacagccggatggtatctttggtctgctacgggcttagggttcctggtacgtgacgaggttactgtcacaattgcttttgggagctggagccagcacttggccctggatctccagcaccacgaacagtggctggtgggaggacctctctttgatgtaaccgccgagccagaggaagcagtagccgaaattcacctgccacactttatttccttgcaggccggcgaggtcgatgtttcgtggttcctcgtggcccacttcaagaacgagggcatggtgttggaacaccctgctcgtgtcgaacctttctatgcagtgcttgagagccctagctttagccttatgggcatcctcctgaggatagcatcagggactcgcctgagtattcccataacatctaataccctgatctattaccaccctcaccccgaggatattaagttccacctgtacctggtgcccagtgatgccttactgaccaaagctatcgatgacgaggaggatcggttccacggggttagattgcagaccagtccaccgatggagcctctgaactttggcagttcatacattgtgtcaaacagcgccaacctcaaggtgatgccaaaggaacttaagctctcctaccgtagccccggcgagattcagcacttctctaagttttatgccggacagatgaaagagcctatccagctggaaataaccgagaaaagacacggtaccctcgtttgggatacagaagtgaaacctgtggacctacagctcgtcgcggcctcagcccctccccctttcagcggcgcggctttcgtgaaggagaaccacaggcagctgcaagcccgcatgggtgatttgaaaggggtgctcgatgatctgcaagacaatgaggtgctgactgagaatgaaaaggaactagtagagcaggagaaaacaaggcagtccaaaaatgaggccctcctgtccatggtggaaaagaaaggcgacctggcattggatgtgttatttcgcagcatttcagaacgcgatccctacctcgtgagctatctgcggcagcagaatctgtag

SEQ ID NO: 71928 - DNA, 1614 bp, Artificial Sequence
  derived and/or modified sequence
atggagaagaaggagtgcccggaaaagtcttcctccagcgaggaagagctgccccgacgggatagcggatcaagccgtaatatcgacgccagcaaactcattcgtcttcagggaagcaggaagttgttagttgataattcgatacgggagctgcagtacaccaagaccggtattttcttccaggcagaggcgtgtgtgacaaacgataccgtataccgagagctcccttgtgtgtctgaaaccctgtgcgacatcagtcactttttccaggaggatgatgagaccgaggcggagcctctgctgttccgggcagtcccggaatgtcagctgtcgggaggggatatcccctctgtatccgaggagcaggaaagcagcgaaggacaggattccggtgatatctgttcagaagagaaccagattgtgtcgtcttacgcctctaaggtctgctttgagattgaagaggattacaaaaaccgccagtttctcgggccagaaggaaacgtcgatgtggaactcatcgacaagagcaccaataggtattcagtatggtttcccaccgctggctggtacttgtggtccgccaccggtttgggcttccttgtcagggatgaggtcacagtgactatagcctttggcagttggtcgcagcacttggcattggacctgcagcaccacgaacagtggctcgtgggaggacctctgtttgacgtgacagcagagccagaagaggcagtcgcagagattcacctgcctcattttatttcccttcaggccggagaggtcgacgttagctggtttctggtggcccatttcaagaatgaaggcatggtgctggagcaccccgcaagggtggagccgttctatgccgttctggaaagcccatcattcagtttgatggggattctgttgagaatcgcgagcggaacaaggttatcaattcccataacgagcaataccctaatctattatcaccctcacccagaagacatcaagttccatctgtaccttgtgccctctgatgcccttttaaccaaggccatagacgacgaagaagacaggtttcacggcgtccgcctgcagacaagccctcccatggagcccctgaacttcggatcctcttacatcgtgagtaattcagcgaatctgaaagtcatgccaaaagagctgaagttgagttacagaagccctggggagatccaacacttctcaaagttttacgcaggacagatgaaagaaccaatccaactcgaaatcaccgagaagcggcacggcactttagtatgggacactgaagttaagccagtcgacctgcaactcgtggcagcgtcagccccacccccattttctggtgctgcattcgtgaaagagaaccacaggcagctgcaggccagaatgggtgatctgaagggcgtcctggacgatctccaggacaatgaggtgttaaccgaaaacgaaaaggaactggtcgagcaggagaagacacggcagtccaaaaatgaggctctgctcagcatggtggagaaaaagggtgacctcgctctggacgttctctttcggagtatctccgaacgagacccatacttggtgagctacctcaggcagcagaacctttag

SEQ ID NO: 71929 - DNA, 5263 bp, Artificial Sequence
  derived and/or modified sequence
ggtaaaaaagatacagtaaagacataaataccacatttgacaaatggaaaaaaaggagtgtccagaaaagagtagcagcagtgaggaagagctgccgagacgggacagtggatccagtaggaacatagatgcatccaaactcattagactacaaggatcacggaaactgttggttgacaatagcatacgggaactgcaatacacaaaaactggaattttttttcaggctgaggcctgtgtgacaaatgatacggtatacagggagctaccctgtgtttctgagaccctttgtgacatctcacattttttccaagaagatgatgagacagaggcagagccattattgttccgtgctgttcctgagtgtcaactatctgggggggacattcccagtgtatcagaagagcaggaatcttcagagggacaagattcaggagacatttgctcagaagagaatcaaatagtttcctcttatgcttctaaagtctgttttgagatcgaagaagattataaaaatcgtcagtttctggggcctgaaggaaatgtggatgttgagttgattgataagagcacaaacagatacagcgtttggttccccactgctggctggtatctgtggtcagccacaggcctcggcttcctggtaagggatgaggtcacagtgacgattgcgtttggttcctggagtcagcacctggccctggacctgcagcaccatgaacagtggctggtgggcggccccttgtttgatgtcactgcagagccagaggaggctgtcgccgaaatccacctcccccacttcatctccctccaagcaggtgaggtggacgtctcctggtttctcgttgcccattttaagaatgaagggatggtcctggagcatccagcccgggtggagcctttctatgctgtcctggaaagccccagcttctctctgatgggcatcctgctgcggatcgccagtgggactcgcctctccatccccatcacttccaacacattgatctattatcacccccaccccgaagatattaagttccacttgtaccttgtccccagcgacgccttgctaacaaaggcgatagatgatgaggaagatcgcttccatggtgtgcgcctgcagacttcgcccccaatggaacccctgaactttggttccagttatattgtgtctaattctgctaacctgaaagtaatgcccaaggagttgaaattgtcctacaggagccctggagaaattcagcacttctcaaaattctatgctgggcagatgaaggaacccattcaacttgagattactgaaaaaagacatgggactttggtgtgggatactgaggtgaagccagtggatctccagcttgtagctgcatcagcccctcctcctttctcaggtgcagcctttgtgaaggagaaccaccggcaactccaagccaggatgggggacctgaaaggggtgctcgatgatctccaagacaatgaggttcttactgagaatgagaaggagctggtggagcaggaaaagacacggcagagcaagaatgaggccttgctgagcatggtggagaagaaaggggacctggccctggacgtgctcttcagaagcattagtgaaagggacccttacctcgtgtcctatcttagacagcagaatttgtaaaatgagtcagttaggtagtctggaagagagaatccagcgttctcattggaaatggataaacagaaatgtgatcattgatttcagtgttcaagacagaagaagactgggtaacatctatcacacaggctttcaggacagacttgtaacctggcatgtacctattgactgtatcctcatgcattttcctcaagaatgtctgaagaaggtagtaatattccttttaaattttttccaaccattgcttgatatatcactattttatccattgacatgattcttgaagacccaggataaaggacatccggataggtgtgtttatgaaggatggggcctggaaaggcaacttttcctgattaatgtgaaaaataattcctatggacactccgtttgaagtatcaccttctcataactaaaagcagaaaagctaacaaaagcttctcagctgaggacactcaaggcatacatgatgacagtcttttttttttttgtatgttaggactttaacactttatctatggctactgttattagaacaatgtaaatgtatttgctgaaagagagcacaaaaatgggagaaaatgcaaacatgagcagaaaatattttcccactggtgtgtagcctgctacaaggagttgttgggttaaatgttcatggtcaactccaaggaatactgagatgaaatgtggtaaatcaactccacagaaccaccaaaaagaaaatgagggtaattcagcttattctgagacagacattcctggcaatgtaccatacaaaaaataagccaactctgacatttggattctaccatagactctgtcattttgtagccatttcagctgtcttttgattaatgttttcgtggcacacatatttccatccttttatgtttaatctgtttaaaacaagttcctagtagacaccatctggttgagtcagttttttttatggtgtattttgaacccattctgatagtctcttttaactggaagatttcaattacttacgttaatgtaattattaatatgttaggatttatcctcagtcagccagtttgttatgtcttttctattctactgttatcacatttgtaccacttaaagtggaatctaggcactttatcaccatttagatcctattaccttttctcatctaggatatagttatcttctacataatctttctgtatcttaaaacccatcaataaattattatatattttctacttttaatcactcagaagatttaaaaaactcatgagaagagtaatctgttatgtttttccagatatttaccatttctgttgctcttccttcattattttccaaatttcgttctgcaaatttccacttcctctgatagacgttttttagttcttttagagtggttctgataggtacagattctcttattttttgcttcctctgaggacatctttttctcaccttcattctcagtgatgttttttgcttgtagtatttttagttgacattgttttctgttcagcagtttccttttagcttccgtatttcctgatgagaaatctgcagtcattcaaattgttgtttccctgtatgtagtgtgtcatttttctgtcagatttcaaggtatttatctttagtttttagccatttcattatgttggggatgagtttccttgttttattccctttggaatttgctccaattcataaatttgcagttttatgtcttttaccaaacttagaggttttcagcctaatttctaaaaatactttttattagcctgattttcatctttataggaaatagtttaagtgatgacaagttccaatagcttatatgcccagaaggccttcaaaataagaattttgaaagaatacagaaaacaaacttttatatccttctcatgtcttctactgtaaaattcatatgctttgctactctaaacctagtttgaaatcaacagtcttgagaatagatgaaaattttgatgaatagtggaattcttttaaatggaaacctcttacatgtgattttccttgccatctagaaataaaccatagtatttatgttgaatcaatcaatattatattttgtttttttcctcctcttctgagactcttattgtggaaatgttagacttttatgttttcctaaatgtccctgatattctacttatttagaacatcttttcattttttccattattctgattgggtaattttaatttgtctattttcaaatttgctggagtgttcacctgttgttatctgtgtcgtcccactgagtgcattcaccaccttttaaattttggtcactgtatgtatcagttctaaaatttccattttgttctctatattttaaatttcttgccttatattctattttcctgcaaatgtgtcagcatttgcttgtttgagctttttttttttcaagacagggtctcaactctgttacccaggctggagtgcagtggtgcgatctcagctcactgcaacctctgcctcctggttcaagcgattattgtgcctcagcctccagagtagctgggattacaggcatgcaccaccacagcccagctaattttttgtatttttagtagagacagagttttgctatgttggccaggctggttttgaactcctggcctcaagtgatccacccacctcagcctcccaaagtgctgggattacaggccactacacctggcacatttgagtatttttttttttttttttttttttttgagatggagtctcgctctgtcatctaggctggagtgcagtggtgtgatctcagctcactgcagcctctgtctcccgggctcaagcgattctcttgcctcagcctcctgagtagctaggactacaggtgcatgccaacacgcccggctaatttttttttaaaaatatttttagtagagacagggtttcaccattttggccaggatggtcttgatctcctgacctcatgatccacccgcctcggccttccaaagtgctgggattacaggcatgagccaccgtgcctggcctcatttgagtatttttataatgtctcttttaaagtctttgtcagataatttcactgtacatgttattcagtgtttggtgtccactgagttgtcatttgccagacaagtggagatttttgcagctcatccttgtattctcagtagttccgatatgtaccctcgaaatgtgaatgttatcttatgagactctgttttatttgtatccaacagaagatgtttattatttatttggctttctgtgaactgaggtcttaatatcagctcattttaaaagtctttgcagtggtattcggatctatcctgtgtgtgcctatgagattgggtgcagtgtatcctgttagctccattctcagggcgtttgaatgtgaattaggaccagcgcaatgaatgctcaagttggggttgggcgttagaattcataaaagtctttatatgctcagattctgcagctccatcctcttcatgattgtgatcgtaaggacagtggaattttgcagttgtctataccttatcttgaagtagaactaaattgttacatttgaagaatgtacttcataaatttacaaaaataaaaaaataggttaatgttatt

SEQ ID NO: 71930 - DNA, 1614 bp, Artificial Sequence
  derived and/or modified sequence
atggagaagaaggagtgccccgagaagagcagcagcagcgaggaggagctgcccagaagagacagcggcagcagcagaaacatcgacgccagcaagctgatcagactgcagggcagcagaaagctgctggtggacaacagcatcagagagctgcagtacaccaagaccggcatcttcttccaggccgaggcctgcgtgaccaacgacaccgtgtacagagagctgccctgcgtgagcgagaccctgtgcgacatcagccacttcttccaggaggacgacgagaccgaggccgagcccctgctgttcagagccgtgcccgagtgccagctgagcggcggcgacatccccagcgtgagcgaggagcaggagagcagcgagggccaggacagcggcgacatctgcagcgaggagaaccagatcgtgagcagctacgccagcaaggtgtgcttcgagatcgaggaggactacaagaacagacagttcctgggccccgagggcaacgtggacgtggagctgatcgacaagagcaccaacagatacagcgtgtggttccccaccgccggctggtacctgtggagcgccaccggcctgggcttcctggtgagagacgaggtgaccgtgaccatcgccttcggcagctggagccagcacctggccctggacctgcagcaccacgagcagtggctggtgggcggccccctgttcgacgtgaccgccgagcccgaggaggccgtggccgagatccacctgccccacttcatcagcctgcaggccggcgaggtggacgtgagctggttcctggtggcccacttcaagaacgagggcatggtgctggagcaccccgccagagtggagcccttctacgccgtgctggagagccccagcttcagcctgatgggcatcctgctgagaatcgccagcggcaccagactgagcatccccatcaccagcaacaccctgatctactaccacccccaccccgaggacatcaagttccacctgtacctggtgcccagcgacgccctgctgaccaaggccatcgacgacgaggaggacagattccacggcgtgagactgcagaccagcccccccatggagcccctgaacttcggcagcagctacatcgtgagcaacagcgccaacctgaaggtgatgcccaaggagctgaagctgagctacagaagccccggcgagatccagcacttcagcaagttctacgccggccagatgaaggagcccatccagctggagatcaccgagaagagacacggcaccctggtgtgggacaccgaggtgaagcccgtggacctgcagctggtggccgccagcgcccccccccccttcagcggcgccgccttcgtgaaggagaaccacagacagctgcaggccagaatgggcgacctgaagggcgtgctggacgacctgcaggacaacgaggtgctgaccgagaacgagaaggagctggtggagcaggagaagaccagacagagcaagaacgaggccctgctgagcatggtggagaagaagggcgacctggccctggacgtgctgttcagaagcatcagcgagagagacccctacctggtgagctacctgagacagcagaacctgtag

SEQ ID NO: 71931 - protein, 487 aa, Artificial Sequence
  derived and/or modified sequence
MEKKECPEKSSSSEEELPRRVYRELPCVSETLCDISHFFQEDDETEAEPLLFRAVPECQLSGGDIPSVSEEQESSEGQDSGDICSEENQIVSSYASKVCFEIEEDYKNRQFLGPEGNVDVELIDKSTNRYSVWFPTAGWYLWSATGLGFLVRDEVTVTIAFGSWSQHLALDLQHHEQWLVGGPLFDVTAEPEEAVAEIHLPHFISLQAGEVDVSWFLVAHFKNEGMVLEHPARVEPFYAVLESPSFSLMGILLRIASGTRLSIPITSNTLIYYHPHPEDIKFHLYLVPSDALLTKAIDDEEDRFHGVRLQTSPPMEPLNFGSSYIVSNSANLKVMPKELKLSYRSPGEIQHFSKFYAGQMKEPIQLEITEKRHGTLVWDTEVKPVDLQLVAASAPPPFSGAAFVKENHRQLQARMGDLKGVLDDLQDNEVLTENEKELVEQEKTRQSKNEALLSMVEKKGDLALDVLFRSISERDPYLVSYLRQQNL

SEQ ID NO: 71932 - DNA, 1464 bp, Artificial Sequence
  derived and/or modified sequence
atggaaaaaaaggaatgcccagagaaatcgagttcctcagaggaggagctacctcggcgagtttaccgagagctgccctgcgtaagcgagacgctgtgtgacattagccacttctttcaggaagatgatgagacggaggccgagccattactcttccgagctgttcccgaatgtcagctgtctggcggggacatcccttcagtatcagaagagcaggaaagctcggagggccaggattccggcgacatctgctccgaggaaaatcagattgtgtcctcctatgcatcaaaggtctgtttcgagatcgaagaagactacaagaaccggcaattcctggggcccgaagggaatgtagatgttgagctaatcgacaagtctactaatcgctactctgtgtggttcccaactgccggctggtatttgtggagtgccaccggcctcggattcttggtgcgggatgaagtgaccgttaccattgcattcgggagttggagtcaacaccttgccttggatctacagcaccatgagcagtggctcgtaggcgggccccttttcgatgtgacagccgagcctgaggaagctgtggccgaaatccacctgcctcacttcatctctctccaggctggagaagtggacgtttcctggtttctggtcgcgcacttcaagaacgagggaatggtgcttgaacacccagccagggtggagcctttttacgcagtgctggaatctccctctttttccctgatgggaatcttgctgcggatagccagtggtacgaggctgtcaataccaatcacctcaaacactctcatctattaccatcctcatcccgaagatatcaagtttcatttgtacctggttcctagtgatgctctgctcaccaaggctattgacgatgaggaggacagattccatggcgtgagattgcagacatcaccacccatggaacctctgaacttcgggagttcctacatagtgagcaacagcgctaacctgaaggtgatgcccaaggagcttaagctgtcttaccgttcaccaggagaaatccagcatttttccaagttttatgctggacagatgaaggagccaatccagctggagataaccgagaaacgacacggtactcttgtttgggacacggaggtaaaacccgttgacctccaactggttgctgctagcgcccctcccccatttagcggagccgcctttgtgaaagagaaccatcgccagctgcaggcccggatgggcgatctgaagggggtcctagacgacctacaggataacgaagtgttgacagagaatgaaaaggagctggtggagcaggagaagacccgccagtcaaagaatgaagccctgcttagtatggtggagaagaaaggcgatctggccctcgatgtcctgttcaggagtatctctgagagggatccctatctcgtctcatatctgcggcagcagaatctttag

SEQ ID NO: 71933 - DNA, 1464 bp, Artificial Sequence
  derived and/or modified sequence
atggagaagaaggaatgtcctgagaagagcagcagcagcgaggaggagctgcccaggagagtgtaccgggagctgccctgtgtgtctgagaccctgtgtgacatcagccacttcttccaggaggatgatgaaacagaagctgagcccctgctcttccgggctgtgcctgagtgccagctgtctggaggagacatccccagcgtgtctgaggagcaggagagcagcgagggccaggacagcggggacatctgcagcgaggagaaccagatcgtgtcctcctatgccagcaaggtgtgctttgaaattgaggaggactacaagaaccggcagttcctgggccctgagggcaatgtggatgtggagctgattgacaagagcaccaaccgctacagcgtgtggttccccacagctggctggtacctgtggagcgccaccggcctgggcttcctggtgagagatgaggtgacagtgaccatcgccttcggctcctggagccagcacctggccctggacctgcagcaccacgagcagtggctggtgggcggccccctgtttgatgtgacagctgagcctgaggaggccgtggccgagatccacctgccccacttcatcagcctgcaggccggggaggtggatgtgtcctggttcctggtggcccacttcaagaatgaaggcatggtgctggagcacccagcccgggtggagcccttctatgctgtgctggagagccccagcttcagcctgatgggcatcctgctgagaattgccagcggcacccggctgagcatccccatcaccagcaacaccctcatctactaccacccccaccctgaggacatcaagttccacctgtacctggtgcccagtgatgccctgctgaccaaggccattgatgatgaagaagatcgcttccatggagtgcggctgcagaccagcccccccatggagcccctgaactttggcagcagctacatcgtgagcaacagcgccaacctgaaggtgatgcccaaggagctgaagctgagctaccgcagccctggagagatccagcacttcagcaagttctacgccggccagatgaaggagcccatccagctggagatcacagagaagagacatggcaccctggtgtgggacacagaggtgaagcctgtggacctgcagctggtggccgccagcgcccccccacccttctctggagctgcctttgtgaaggagaaccaccggcagctgcaggccaggatgggagacctgaagggcgtgctggatgacctgcaggacaatgaggtgctgacagaaaatgagaaggagctggtggagcaggagaagacccggcagagcaagaatgaggccctgctgtccatggtggagaagaagggggacctggccctggatgtgctcttccgcagcatcagcgagcgggacccctacctggtgtcctacctgcggcagcagaacctgtag

SEQ ID NO: 71934 - DNA, 1464 bp, Artificial Sequence
  derived and/or modified sequence
atggagaagaaggagtgccccgagaagagcagcagcagcgaggaggaactgccccgaagggtatatcgagagttaccctgtgtgtccgaaactctttgtgatatcagccacttctttcaagaggatgatgagaccgaagccgagcctctgctctttagggcagtccccgagtgccagctgagcgggggtgacattccctcagtttctgaggagcaggaaagttcagaaggtcaagattctggagatatctgctcagaagagaatcagatcgtgtcctcgtacgcgtccaaagtctgttttgaaattgaggaagactacaaaaataggcaatttctgggcccggaaggtaacgtggacgtcgaactcatcgacaagagtactaaccggtactcggtgtggtttccaaccgcgggatggtacctttggagtgcaacgggcctcggcttcctggtcagagatgaggtgactgtcacaatagcattcggatcatggtcccagcacctggccctggaccttcagcaccatgaacagtggttggtgggggggccccttttcgacgtaaccgcggagcctgaagaagccgtggccgagatacacttgccacattttatcagcctccaagctggtgaggtcgatgtgtcgtggtttttggtggctcatttcaaaaatgagggaatggtcttggaacatccagctagagtggagcctttctacgccgtgctggagtcaccttcatttagcctgatgggaatactcctgcgtatcgccagcgggactcggctgagtattcccatcacctctaataccttgatttactaccaccctcaccctgaggacatcaaatttcatctctacctggtgccgtcagacgccctgctgaccaaagcaatcgacgacgaagaagacagatttcacggagtgaggctccagacatcaccaccaatggaacctctcaactttgggtcttcttacattgtgtctaactccgccaatttgaaagtaatgcccaaggaactaaagcttagctacaggtcccctggggaaatccagcacttctcgaagttctatgctggacaaatgaaagagcccatccagcttgaaatcaccgagaagcgacacgggacactcgtatgggatactgaggtcaagcccgtggatctgcagctcgttgctgcatccgcccctccccctttctccggggccgcctttgttaaggagaaccatcgacagctgcaggcgcggatgggtgacctcaaaggggtcctcgacgatttgcaggataacgaggtactcacagagaacgaaaaagaactagtggagcaggagaagacacgacagagcaagaatgaagccttactcagcatggtggagaaaaaaggcgatctcgctctggatgtcctttttcggtcaatctctgagcgtgacccatacctagtttcatatttgaggcagcaaaatttatag

SEQ ID NO: 71935 - DNA, 1464 bp, Artificial Sequence
  derived and/or modified sequence
atggagaagaaggagtgtccagaaaaaagtagtagttctgaggaggaacttcctagaagggtataccgggaattaccatgcgtgtccgagactctatgtgatatatcccactttttccaggaggatgatgaaaccgaagccgagcccctgctgtttcgcgctgttcccgagtgccagttaagcggaggcgatattccatctgtctctgaggaacaggagtcctcagagggccaggattctggagatatctgctccgaggaaaatcaaattgtatccagttacgcctctaaagtgtgtttcgagattgaagaggattacaagaatcgacaatttctgggaccggaggggaacgtcgacgtggagcttatcgataagtccaccaaccggtatagtgtgtggttccccaccgccggttggtacctgtggtccgcaaccggcttgggattcctggtccgggatgaggtcaccgtcaccatcgcttttgggtcctggtctcagcacctggcgctcgacctccagcatcacgaacagtggctggtgggcggacccctttttgatgtcacggctgaacctgaggaggccgtggcagagattcacctcccccacttcatcagtttgcaggccggagaggtagacgtgtcctggttccttgtggctcacttcaagaatgagggtatggtgttagaacatcccgctcgggtggaaccattctacgccgttctcgagtctccctcattcagtctcatgggcatcctcctacggatcgcatccggcacgcgcctgagcattccaataacctctaacaccctgatctactatcacccccatcccgaggatattaagttccacctgtatctggtgcccagcgatgcactgctgacaaaagcaatagatgacgaggaggacaggtttcacggagtgaggttacagacctcaccccctatggagccactcaacttcggatcttcctatatcgtgtccaactcagccaatcttaaagttatgcctaaagagttgaaacttagctatcgctcccctggcgagatccagcatttttctaaattctacgccggtcagatgaaggagccaattcagttggagatcactgagaagaggcatgggacgttagtttgggataccgaagttaaacctgtggaccttcagctggtagccgctagcgctcccccacccttttctggcgctgccttcgtgaaagaaaaccatcgccagcttcaagcccgtatgggagatctaaagggtgtacttgatgacctgcaggacaacgaggtgcttaccgagaatgaaaaagagcttgtggagcaggagaaaactcggcagagcaaaaacgaggcgttgctttcgatggtcgagaaaaagggagatctcgccctggacgtcctgtttcggtccatctccgagcgggatccttatctagtttcttatctgagacagcagaatctgtag

SEQ ID NO: 71936 - DNA, 5210 bp, Artificial Sequence
  derived and/or modified sequence
tgaccaagaggaacagaacacagagcagcctggcagtgtccaagcaacaagcctccgctcctccttcctgcaccctggggctcctgaaactcacatgggtaaaaaagatacagtaaagacataaataccacatttgacaaatggaaaaaaaggagtgtccagaaaagagtagcagcagtgaggaagagctgccgagacgggtatacagggagctaccctgtgtttctgagaccctttgtgacatctcacattttttccaagaagatgatgagacagaggcagagccattattgttccgtgctgttcctgagtgtcaactatctgggggggacattcccagtgtatcagaagagcaggaatcttcagagggacaagattcaggagacatttgctcagaagagaatcaaatagtttcctcttatgcttctaaagtctgttttgagatcgaagaagattataaaaatcgtcagtttctggggcctgaaggaaatgtggatgttgagttgattgataagagcacaaacagatacagcgtttggttccccactgctggctggtatctgtggtcagccacaggcctcggcttcctggtaagggatgaggtcacagtgacgattgcgtttggttcctggagtcagcacctggccctggacctgcagcaccatgaacagtggctggtgggcggccccttgtttgatgtcactgcagagccagaggaggctgtcgccgaaatccacctcccccacttcatctccctccaagcaggtgaggtggacgtctcctggtttctcgttgcccattttaagaatgaagggatggtcctggagcatccagcccgggtggagcctttctatgctgtcctggaaagccccagcttctctctgatgggcatcctgctgcggatcgccagtgggactcgcctctccatccccatcacttccaacacattgatctattatcacccccaccccgaagatattaagttccacttgtaccttgtccccagcgacgccttgctaacaaaggcgatagatgatgaggaagatcgcttccatggtgtgcgcctgcagacttcgcccccaatggaacccctgaactttggttccagttatattgtgtctaattctgctaacctgaaagtaatgcccaaggagttgaaattgtcctacaggagccctggagaaattcagcacttctcaaaattctatgctgggcagatgaaggaacccattcaacttgagattactgaaaaaagacatgggactttggtgtgggatactgaggtgaagccagtggatctccagcttgtagctgcatcagcccctcctcctttctcaggtgcagcctttgtgaaggagaaccaccggcaactccaagccaggatgggggacctgaaaggggtgctcgatgatctccaagacaatgaggttcttactgagaatgagaaggagctggtggagcaggaaaagacacggcagagcaagaatgaggccttgctgagcatggtggagaagaaaggggacctggccctggacgtgctcttcagaagcattagtgaaagggacccttacctcgtgtcctatcttagacagcagaatttgtaaaatgagtcagttaggtagtctggaagagagaatccagcgttctcattggaaatggataaacagaaatgtgatcattgatttcagtgttcaagacagaagaagactgggtaacatctatcacacaggctttcaggacagacttgtaacctggcatgtacctattgactgtatcctcatgcattttcctcaagaatgtctgaagaaggtagtaatattccttttaaattttttccaaccattgcttgatatatcactattttatccattgacatgattcttgaagacccaggataaaggacatccggataggtgtgtttatgaaggatggggcctggaaaggcaacttttcctgattaatgtgaaaaataattcctatggacactccgtttgaagtatcaccttctcataactaaaagcagaaaagctaacaaaagcttctcagctgaggacactcaaggcatacatgatgacagtcttttttttttttgtatgttaggactttaacactttatctatggctactgttattagaacaatgtaaatgtatttgctgaaagagagcacaaaaatgggagaaaatgcaaacatgagcagaaaatattttcccactggtgtgtagcctgctacaaggagttgttgggttaaatgttcatggtcaactccaaggaatactgagatgaaatgtggtaaatcaactccacagaaccaccaaaaagaaaatgagggtaattcagcttattctgagacagacattcctggcaatgtaccatacaaaaaataagccaactctgacatttggattctaccatagactctgtcattttgtagccatttcagctgtcttttgattaatgttttcgtggcacacatatttccatccttttatgtttaatctgtttaaaacaagttcctagtagacaccatctggttgagtcagttttttttatggtgtattttgaacccattctgatagtctcttttaactggaagatttcaattacttacgttaatgtaattattaatatgttaggatttatcctcagtcagccagtttgttatgtcttttctattctactgttatcacatttgtaccacttaaagtggaatctaggcactttatcaccatttagatcctattaccttttctcatctaggatatagttatcttctacataatctttctgtatcttaaaacccatcaataaattattatatattttctacttttaatcactcagaagatttaaaaaactcatgagaagagtaatctgttatgtttttccagatatttaccatttctgttgctcttccttcattattttccaaatttcgttctgcaaatttccacttcctctgatagacgttttttagttcttttagagtggttctgataggtacagattctcttattttttgcttcctctgaggacatctttttctcaccttcattctcagtgatgttttttgcttgtagtatttttagttgacattgttttctgttcagcagtttccttttagcttccgtatttcctgatgagaaatctgcagtcattcaaattgttgtttccctgtatgtagtgtgtcatttttctgtcagatttcaaggtatttatctttagtttttagccatttcattatgttggggatgagtttccttgttttattccctttggaatttgctccaattcataaatttgcagttttatgtcttttaccaaacttagaggttttcagcctaatttctaaaaatactttttattagcctgattttcatctttataggaaatagtttaagtgatgacaagttccaatagcttatatgcccagaaggccttcaaaataagaattttgaaagaatacagaaaacaaacttttatatccttctcatgtcttctactgtaaaattcatatgctttgctactctaaacctagtttgaaatcaacagtcttgagaatagatgaaaattttgatgaatagtggaattcttttaaatggaaacctcttacatgtgattttccttgccatctagaaataaaccatagtatttatgttgaatcaatcaatattatattttgtttttttcctcctcttctgagactcttattgtggaaatgttagacttttatgttttcctaaatgtccctgatattctacttatttagaacatcttttcattttttccattattctgattgggtaattttaatttgtctattttcaaatttgctggagtgttcacctgttgttatctgtgtcgtcccactgagtgcattcaccaccttttaaattttggtcactgtatgtatcagttctaaaatttccattttgttctctatattttaaatttcttgccttatattctattttcctgcaaatgtgtcagcatttgcttgtttgagctttttttttttcaagacagggtctcaactctgttacccaggctggagtgcagtggtgcgatctcagctcactgcaacctctgcctcctggttcaagcgattattgtgcctcagcctccagagtagctgggattacaggcatgcaccaccacagcccagctaattttttgtatttttagtagagacagagttttgctatgttggccaggctggttttgaactcctggcctcaagtgatccacccacctcagcctcccaaagtgctgggattacaggccactacacctggcacatttgagtatttttttttttttttttttttttttgagatggagtctcgctctgtcatctaggctggagtgcagtggtgtgatctcagctcactgcagcctctgtctcccgggctcaagcgattctcttgcctcagcctcctgagtagctaggactacaggtgcatgccaacacgcccggctaatttttttttaaaaatatttttagtagagacagggtttcaccattttggccaggatggtcttgatctcctgacctcatgatccacccgcctcggccttccaaagtgctgggattacaggcatgagccaccgtgcctggcctcatttgagtatttttataatgtctcttttaaagtctttgtcagataatttcactgtacatgttattcagtgtttggtgtccactgagttgtcatttgccagacaagtggagatttttgcagctcatccttgtattctcagtagttccgatatgtaccctcgaaatgtgaatgttatcttatgagactctgttttatttgtatccaacagaagatgtttattatttatttggctttctgtgaactgaggtcttaatatcagctcattttaaaagtctttgcagtggtattcggatctatcctgtgtgtgcctatgagattgggtgcagtgtatcctgttagctccattctcagggcgtttgaatgtgaattaggaccagcgcaatgaatgctcaagttggggttgggcgttagaattcataaaagtctttatatgctcagattctgcagctccatcctcttcatgattgtgatcgtaaggacagtggaattttgcagttgtctataccttatcttgaagtagaactaaattgttacatttgaagaatgtacttcataaatttacaaaaataaaaaaataggttaatgttatt

SEQ ID NO: 71937 - DNA, 1464 bp, Artificial Sequence
  derived and/or modified sequence
atggagaagaaggagtgccccgagaagagcagcagcagcgaggaggagctgcccagaagagtgtacagagagctgccctgcgtgagcgagaccctgtgcgacatcagccacttcttccaggaggacgacgagaccgaggccgagcccctgctgttcagagccgtgcccgagtgccagctgagcggcggcgacatccccagcgtgagcgaggagcaggagagcagcgagggccaggacagcggcgacatctgcagcgaggagaaccagatcgtgagcagctacgccagcaaggtgtgcttcgagatcgaggaggactacaagaacagacagttcctgggccccgagggcaacgtggacgtggagctgatcgacaagagcaccaacagatacagcgtgtggttccccaccgccggctggtacctgtggagcgccaccggcctgggcttcctggtgagagacgaggtgaccgtgaccatcgccttcggcagctggagccagcacctggccctggacctgcagcaccacgagcagtggctggtgggcggccccctgttcgacgtgaccgccgagcccgaggaggccgtggccgagatccacctgccccacttcatcagcctgcaggccggcgaggtggacgtgagctggttcctggtggcccacttcaagaacgagggcatggtgctggagcaccccgccagagtggagcccttctacgccgtgctggagagccccagcttcagcctgatgggcatcctgctgagaatcgccagcggcaccagactgagcatccccatcaccagcaacaccctgatctactaccacccccaccccgaggacatcaagttccacctgtacctggtgcccagcgacgccctgctgaccaaggccatcgacgacgaggaggacagattccacggcgtgagactgcagaccagcccccccatggagcccctgaacttcggcagcagctacatcgtgagcaacagcgccaacctgaaggtgatgcccaaggagctgaagctgagctacagaagccccggcgagatccagcacttcagcaagttctacgccggccagatgaaggagcccatccagctggagatcaccgagaagagacacggcaccctggtgtgggacaccgaggtgaagcccgtggacctgcagctggtggccgccagcgcccccccccccttcagcggcgccgccttcgtgaaggagaaccacagacagctgcaggccagaatgggcgacctgaagggcgtgctggacgacctgcaggacaacgaggtgctgaccgagaacgagaaggagctggtggagcaggagaagaccagacagagcaagaacgaggccctgctgagcatggtggagaagaagggcgacctggccctggacgtgctgttcagaagcatcagcgagagagacccctacctggtgagctacctgagacagcagaacctgtag

SEQ ID NO: 71938 - DNA, 213 bp, Artificial Sequence
  derived and/or modified sequence
atggagaaaaaagagtgccctgaaaaatcctccagcagtgaggaagaacttccgaggcgtgattctgggagctcacgaaatatcgacgcctcaaaactgataagactccaaggcagtcgcaagctgttggtcgataatagtattcgcgaattgcagtacactaaaacgggcatttttttccaagcagaggcttgtgttacgaacgatacctag

SEQ ID NO: 71939 - DNA, 213 bp, Artificial Sequence
  derived and/or modified sequence
atggagaagaaggaatgtcctgagaagagcagcagcagcgaggaggagctgccccggcgggacagcggcagcagcaggaacattgatgccagcaagctgatccggctgcagggcagcaggaagctgctggtggacaacagcatccgggagctgcagtacaccaagacaggcatcttcttccaggccgaggcctgtgtgaccaatgacacctag

SEQ ID NO: 71940 - DNA, 213 bp, Artificial Sequence
  derived and/or modified sequence
atggagaagaaggagtgccccgagaagagcagcagcagcgaggaggaactacctaggcgggactccggcagctccaggaacattgatgcctctaagctgattcgcctgcagggatcaaggaagctcctcgtggacaactccatcagggaattgcaatatacaaaaaccggcatcttctttcaagccgaggcttgtgttactaatgatacgtag

SEQ ID NO: 71941 - DNA, 213 bp, Artificial Sequence
  derived and/or modified sequence
atggagaaaaaggaatgcccagagaagtcctcatcatccgaagaagaactgccacggagggattctggtagctctcgcaacatcgacgcttccaaattaatacggttacagggatcgagaaagctcctggtggacaacagcatccgagagttgcaatacactaagacgggcattttttttcaagccgaggcctgcgtgacaaatgacacctag

SEQ ID NO: 71942 - DNA, 500 bp, Artificial Sequence
  derived and/or modified sequence
aaaagaagttgagaaccagagaaaccgacctaaggggattctcccatttggcccgtcctaccctaaagtcaccacctgctgcttttctggagcgcttaccagtgaccaagaggaacagaacacagagcagcctggcagtgtccaagcaacaagcctccgctcctccttcctgcaccctggggctcctgaaactcacatgggtaaaaaagatacagtaaagacataaataccacatttgacaaatggaaaaaaaggagtgtccagaaaagagtagcagcagtgaggaagagctgccgagacgggacagtggatccagtaggaacatagatgcatccaaactcattagactacaaggatcacggaaactgttggttgacaatagcatacgggaactgcaatacacaaaaactggaattttttttcaggctgaggcctgtgtgacaaatgatacgtaagggacatctatttgttgggaaaaaattaaagatttggaattttgc

SEQ ID NO: 71943 - DNA, 213 bp, Artificial Sequence
  derived and/or modified sequence
atggagaagaaggagtgccccgagaagagcagcagcagcgaggaggagctgcccagaagagacagcggcagcagcagaaacatcgacgccagcaagctgatcagactgcagggcagcagaaagctgctggtggacaacagcatcagagagctgcagtacaccaagaccggcatcttcttccaggccgaggcctgcgtgaccaacgacacctag

SEQ ID NO: 71944 - protein, 404 aa, Artificial Sequence
  derived and/or modified sequence
MRRDVNGVTKSRFEMFSNSDEAVINKKLPKELLLRIFSFLDVVTLCRCAQVSRAWNVLALDGSNWQRIDLFDFQRDIEGRVVENISKRCGGFLRKLSLRGCLGVGDNALRTFAQNCRNIEVLNLNGCTKTTDAEGCPLLEQLNISWCDQVTKDGIQALVRGCGGLKALFLKGCTQLEDEALKYIGAHCPELVTLNLQTCLQITDEGLITICRGCHKLQSLCASGCSNITDAILNALGQNCPRLRILEVARCSQLTDVGFTTLARNCHELEKMDLEECVQITDSTLIQLSIHCPRLQVLSLSHCELITDDGIRHLGNGACAHDQLEVIELDNCPLITDASLEHLKSCHSLERIELYDCQQITRAGIKRLRTHLPNIKVHAYFAPVTPPPSVGGSRQRFCRCCIIL

SEQ ID NO: 71945 - DNA, 1215 bp, Artificial Sequence
  derived and/or modified sequence
atgagaagagacgtgaacggcgtgaccaagagcagattcgagatgttcagcaacagcgacgaggccgtgatcaacaagaagctgcccaaggagctgctgctgagaatcttcagcttcctggacgtggtgaccctgtgcagatgcgcccaggtgagcagagcctggaacgtgctggccctggacggcagcaactggcagagaatcgacctgttcgacttccagagagacatcgagggcagagtggtggagaacatcagcaagagatgcggcggcttcctgagaaagctgagcctgagaggctgcctgggcgtgggcgacaacgccctgagaaccttcgcccagaactgcagaaacatcgaggtgctgaacctgaacggctgcaccaagaccaccgacgccgagggctgccccctgctggagcagctgaacatcagctggtgcgaccaggtgaccaaggacggcatccaggccctggtgagaggctgcggcggcctgaaggccctgttcctgaagggctgcacccagctggaggacgaggccctgaagtacatcggcgcccactgccccgagctggtgaccctgaacctgcagacctgcctgcagatcaccgacgagggcctgatcaccatctgcagaggctgccacaagctgcagagcctgtgcgccagcggctgcagcaacatcaccgacgccatcctgaacgccctgggccagaactgccccagactgagaatcctggaggtggccagatgcagccagctgaccgacgtgggcttcaccaccctggccagaaactgccacgagctggagaagatggacctggaggagtgcgtgcagatcaccgacagcaccctgatccagctgagcatccactgccccagactgcaggtgctgagcctgagccactgcgagctgatcaccgacgacggcatcagacacctgggcaacggcgcctgcgcccacgaccagctggaggtgatcgagctggacaactgccccctgatcaccgacgccagcctggagcacctgaagagctgccacagcctggagagaatcgagctgtacgactgccagcagatcaccagagccggcatcaagagactgagaacccacctgcccaacatcaaggtgcacgcctacttcgcccccgtgacccccccccccagcgtgggcggcagcagacagagattctgcagatgctgcatcatcctgtag

SEQ ID NO: 71946 - DNA, 1215 bp, Artificial Sequence
  derived and/or modified sequence
atgagacgcgacgtgaacggcgtgacaaagagccggtttgaaatgttcagtaattcagacgaagcagtaatcaataagaaactccccaaagagctgctacttagaatcttttcatttcttgacgttgtcactctctgtagatgcgctcaggtatcgagggcatggaacgtgctggcactggatggatctaactggcaaagaatcgatctttttgattttcagcgcgacattgagggtcgtgtcgttgagaatatttccaagagatgtggtggtttcttgagaaaacttagtcttcggggttgcctcggggtgggggacaatgccttgcgaacttttgcacagaactgcagaaacatcgaggtacttaatctgaacgggtgcacaaaaactacggacgcggaaggctgtcctttacttgaacagctgaacatcagctggtgcgaccaggtcacaaaagatggcatacaggcactggttcgcgggtgtggcggccttaaagcgttgtttctgaagggatgcacccaactagaggacgaggcgctgaagtatattggcgcacattgtcctgagctggtgacgttgaacctgcagacctgcctacaaattacagacgagggtctgatcactatctgtagagggtgtcacaaactccagagtctgtgtgcctcagggtgcagcaatatcacagatgcaattcttaacgctttagggcagaattgcccacgactgaggatactggaagtcgcccggtgtagccaattgacggacgttgggtttactacactggcgcggaattgccatgagctcgaaaagatggatctggaggaatgtgtgcagattaccgacagcactctgatccaacttagcatccactgccctaggcttcaggtgctgagtctcagtcactgcgaactcatcactgacgatggcatacgccacctgggcaacggggcttgcgctcacgaccaattggaggttatcgaactagataattgtcccctcattacagacgccagtcttgagcacctcaaaagttgccactcccttgaacgcatcgaattgtacgactgccagcaaatcactcgagccggcattaagcggttgcggacccatctgccaaatatcaaagtccatgcgtatttcgcccccgtcaccccccctccttccgtcgggggaagccggcagcgtttttgccgctgctgcatcatactgtag

SEQ ID NO: 71947 - DNA, 1215 bp, Artificial Sequence
  derived and/or modified sequence
atgagaagagatgtgaatggagtgaccaagagcagatttgagatgttcagcaacagtgatgaggccgtcatcaacaagaagctgcccaaggagctgctgctgcgcatcttctccttcctggatgtggtgaccctgtgccgctgtgcccaggtgtcccgggcctggaatgtgctggccctggatggcagcaactggcagagaattgacctgtttgacttccagagggacatcgagggccgggtggtggagaacatcagcaagagatgtggcggcttcctgaggaagctgagcctgcggggctgcctgggcgtgggggacaatgccctgcggacctttgcccagaactgcagaaatattgaggtgctgaacctgaatggctgcaccaagaccacagatgctgagggctgccccctgctggagcagctgaacatctcctggtgtgaccaggtgaccaaggatggcatccaggccctggtgcggggctgcggcggcctgaaggccctcttcctgaagggctgcacccagctggaggatgaggccctgaagtacatcggggcccactgcccagagctggtgaccctgaacctgcagacctgcctgcagatcacagatgagggcctcatcaccatctgccggggctgccacaagctgcagagcctgtgtgccagcggctgcagcaacatcacagatgccatcctgaatgccctgggccagaactgcccccggctgcgcatcctggaggtggcccgctgcagccagctgacagatgtgggcttcaccaccctggccaggaactgccacgagctggagaagatggacctggaggagtgtgtgcagatcacagacagcaccctcatccagctgagcatccactgcccccggctgcaggtgctgagcctgagccactgtgagctgatcacagatgatggcatccgccacctgggcaatggagcctgtgcccatgaccagctggaggtgattgagctggacaactgccccctcatcacagatgccagcctggagcacctgaagagctgccacagcctggagcgcatcgagctgtatgactgccagcagatcaccagggctggcatcaagaggctgcggacccacctgcccaacatcaaggtgcacgcctactttgcccctgtgaccccacctccttctgtgggcggcagccggcagcgcttctgccgctgctgcatcatcctgtag

SEQ ID NO: 71948 - DNA, 10274 bp, Artificial Sequence
  derived and/or modified sequence
gggttgaagttgaggctgaggagagagccgagctagcgacgagcagtcgttgcggccgccggcgccgcgggaggtggtggaggcctagccggagccgagaggtctcttgttcccgtcccacggtcccggcgtcacccctccggcgcccagtccccgtcccggaactcccgggcctgtcctgggcccccggtctgtgcactccgctcgccgcagcgcccggcccgggccgcacccgccggccccatgaggagggacgtgaacggagtgaccaagagcaggtttgagatgttctcaaatagtgatgaagctgtaatcaataaaaaacttcccaaagaactcctgttacggatattttcttttctagatgttgttaccctgtgccgctgtgctcaggtctccagggcctggaatgttctggctctggatggcagtaactggcagcgaattgacctatttgatttccagagggatattgagggccgagtagtggagaatatttcaaaacgatgtgggggctttttacgaaagttaagtcttcgtggatgtcttggagtgggagacaatgcattaagaacctttgcacaaaactgcaggaacattgaagtactgaatctaaatgggtgtacaaagacaacagacgctgagggatgtccactgttggagcagttgaacatttcctggtgtgaccaagtaaccaaggatggcattcaagcactagtgaggggctgtgggggtctcaaggccttattcttaaaaggctgcacgcagctagaagatgaagctctcaagtacataggtgcacactgccctgaactggtgactttgaacttgcagacttgcttgcaaatcacagatgaaggtctcattactatatgcagagggtgccataagttacaatccctttgtgcctctggctgctccaacatcacagatgccatcctgaatgctctaggtcagaactgcccacggcttagaatattggaagtggcaagatgttctcaattaacagatgtgggctttaccactctagccaggaattgccatgaacttgaaaagatggacctggaagagtgtgttcagataacagatagcacattaatccaactttctatacactgtcctcgacttcaagtattgagtctgtctcactgtgagctgatcacagatgatggaattcgtcacctggggaatggggcctgcgcccatgaccagctggaggtgattgagctggacaactgcccactaatcacagatgcatccctggagcacttgaagagctgtcatagccttgagcggatagaactctatgactgccagcaaatcacacgggctggaatcaagagactcaggacccatttacccaatattaaagtccacgcctacttcgcacctgtcactccacccccatcagtagggggcagcagacagcgcttctgcagatgctgcatcatcctatgacaatggaggtggtcaaccttggcgaactgagtatttaatgacacttctagagctaccgtggagtctctccagtggaagcaaccccagtgttctgagcaagggttacaaagtgagggagggcagtgtccagatccccagagccacacatacatacacatacacacccttacccccatccactctagctttgtgaccatgggactgaagtttgtgatggcttttttatcaagtagattggtaaaatttaaccattcctgttgaggtgcccataagaaaatcataggccaagatagggaggggcattccagcaaaccccgtgttaatgctactgtggtttttaaatttttgtctaggggtttctttggggattttagaacagcatctgctgtcctccggggtcaagaaaagcatggaaagacaatatatgatgtacccagggaccagaaagaaaatttctttgcatcttagaaatggtagacattcattgtgactaaagagcttctatgcttccttgtttccatgccaacatgctgagcatgctcacaaagaaggctcgtccattcctcctgtgttttagtatttggcccagaggtttcctaaatggttgccttgaaatcactgtggtccaaatgtaattcttacacactcaaattatcactgtctgtagcacacttgtgcacctgtcttacattctctgttgctcccccccacactcttgctcagtctgtcacctgttcagtctgcttactcactcaattgttacccttttgctgttgtcgtgtttacagtttgcattttgaatgattagttgggattaccaaacattttttaaaaagatattatcaataaatatttttttaattctaaattttaccattaggggaccctgcctgaatctttgccaacctgcaaggaaactctaatgaaagcaagaaaagttatgagaagaaactgttttgatgaaaacagatgctaccttttggtttctattttatcttctgatatgtgataattcgcatggtatccccaatattccccctacatattcttccttctgtcagactccaccaactgtatcataaggaaagagagagatgtattattaggaaagagtgaaaatgataaatcacaaaacagagcctgaaagtccccaacacccaagttcagacattaatgattaatgttattatatatttactgaaatctaggagtgatcagtggcatctctgacctatgaggttgttttaacaggaatgccactagaggagctgtgtattctagccagtctgtttctctcttttcccccatttcagcctttcagggatacaagaatggctctataacagctggtcaattgtatgtcagtgttaatggattcatatctagtgttggcaccccaaagggccagaaccttcccataacctgtcagtcatctctcttttctgccccagtctttttttttttttttttttttttttaagacgggttctcactcttgcccagactggagtgcagtggtgcgatctcggctcaccgcaacctccacttcccaggctcaagcgattctcttgcctcagcctaccgagtagctgggattacaggcatgcaccactactgcctggctaatttttgtatttttagtagagatggggtttcacatgttggccagcctggtcttgaactcctgacctcaaatgatccacctgcctcagcctcccaaagtgctgggactacaggcatgagccaccatgcccggccctgttcagacttctgaatgaagtatgaatgtagccaggtgaagcattgaggcagctgaaagagaacactgagaggaagtaaggggtttagtgtctctgcttagcctgggcactagaactgagggaggaatttagtgtccaggactcaagagtccaagaagaagcaccctctgtcttcccaaaaaatcagaggataaaggaagtaaaatgagtttttaaagcataagaagaaaatttctaaaccccaagattagaaacccagtgtgatttttagtagggtgattttggcggggggtgtcctttgagacattaatgtgcaatccatcataatattaatcttctatatgatccagactattaaaaggcttgttttatttatttattttattttattttatttttttagagatggggtctcgctatcttgcccagcctggactcaaactcctgggctcaagccttcctcccacctcagcctcccaagtagctgggactacaggtgtgtgccactgtacccagcttaagaggtttgttttaatgctgcagttgctgattataccagcatatataagaataaagtctgatttatttatccattgatttagaaggcaattggatgaaagggtcttagaagtctatactatccattaatatttatcatattaaatttattttaaatcctgttttattgtgccgctttaaaaacgcagattacttgtttattcattcccctttccccttattctctttcagattaccttataaggaatatagtttttaacatgaaactcagtttcttgtctgtacccctacacataaaaatacatacgtgcatacacacatacttccagatgtggttaataatattcagatccctaggttactcaaacaaaactaaaggagagaactatttaggggccatctgctttaaagtttaaggtgttttgttgttgttttagtgcctgtacaaattgaccataaaacccagattgattagtgagtgtggatttgagttgcctaagttgaggctattaaggtacttctttacttaaaagataagtttaaaagactctattcatcagttcatgatgatcttggaaatgctgtttctctgctcaaaggatatacccacaggcaggtccatggggacttgctctggtgatctctgctattaaggcaaattccagcctgtttgtgccaagaacagagtcaagtgagagagaatgaagactcagagatgtgcagcactggcttgtatgttgtcaggcagaagccttgttcctttctcaagaaaacttcaggcctatcaagcttggaaggaaatacatttttttatgctgatttgcagcctacaccagctgatgaatatgctaggactttgagagaacacaaagcatggtaagttttggtcaggtggaaaggagcctgacatctgaacataatgcttcctctctcaacatctgggatacttttgaaaattcagtaaggcttaatgtaggaaaaattctttacaggaaaagctaattgatctgtttgtctaacctcatagccactccaaaatatgccttttataatggaaaaaaacagtgaacagagagaagagatttggggataagttagaaggtaccctcaaaactactgccgtaaacctacaggtgggcaaggaggaattactgtagtgtctctggagaaagttcttgaacatccaaatcatctcttttctaagcagtttttcccctaatctcataccttacatcttccagcatcatttgctacatcaatgtcttttcatcctcttcatcagccccattgagctgactccagcttatttttgcactgatttccaccatttccttcccacacccatcctttccctctatttaaagcctccatctcaccctcagtaatgctgctgatttactctcagatgtctcaagtctagcttcctttttgaatccttctcctactccaggggctgtcaaaggcagccttaaagttcagtgactgttaggtggctcaggccatttttcattgggtggtctttggtgtttgcatactgaatttgaattcagtttaaaagcaaactgttggatatgaggaagaaagggatatggccttagccctttttccaatatttggaatatgaaagcatattgtgctttgtgtaaaaaatgttttcttctcctattctgctcttgtctttactgaaggtaaaagtattccttaagtagcttttgcaaatttctagtctgatttccacattcattaagttgatttagcagacatgtaagtcagaagtttcacatatcccttgtatcaaacattttatagggaaacctagtaaatttatgatgcttcattttgggctttccagactatttgagttattcaagatagccataatgttttagtagcgacattcttttattacttctaattgccttgtaaaatgcattgttatggcccggcacggtgggtggatcacaaggtcaggagttcaagaacagcctggccaagatggtgaaatgctgtctctactgaaaatacaaaaattagccaggtgtggtggcaggtgcctgtaatcccagctactcgggaggctgaggcagagaattgcttgaacccgggaggtggaggttgcagtgagctgagatcgcaccactgcactccaccctgggcgacagagtgagactatctcaaaaaaaaagaaagaaagaaagaaaaaaatgcatcgttactagtttgatagcccactaatgccatgggggactaaacaaaatatgtgatgaaacctgtcttggtttgaagttgttagaaagtgtgagagtgtcactggaaagaagagagtggcttcctgcctgcttgtttagtcagcatgtccttaggtgactgtgttgttgggagaagagcactcatgggtcatgggtgacccttggccattttatgtttattgtgctgaaagtcacaggcggctcatgccagttgctaccagtgagaggaggggtttaaaggaaattgctctattttgccttattcctccttatgtgtatgatttaagggtaggcttttatcctggttgtatctcctggctgacagactttctcaatcatatgtttgagctctgaagcattttacaaaaagattgcctctctatctgcctgccaatcctagaatctttagccacctcaaacccaggcactgtgaattagccaagtcctgtttgagaagaaatgtaggatgtttggttggaattcttgagacagaacctctctccccattaatgatgttgtaccaaagaattctaaagcagtaaaaggataatggggaaaaatggagtcacagcctttcctcgcctatatttcttttttttttttttttttttgacatggagtctcgctctgtcacccaggttggagtgccatggcacaatctcagttcactgcaacctctgcctcctgggttcaagtgattcttctgtttcagcctcccaagaggccaggattacaggtgcccaccaccacgcccagctaatgtttgtatttttcatagagatggggttttgccatgttggccaggctagtctcgaacttctgacctcaagtggtccacctgccttggcctcccaaagtgctgggattacaggtgtaagccaccgcacctggccagtttctatcataaattttaaatgtaagattggaagatacagagagctgtataaaatcataccagtagggtataattagcccaggtagtttaggaataaaattgggttgtatccgagtgccctaacttgacattttgattctccagcaaagaacataggttactaggttactaaccttgccttctcacttgggataaactttttttttttttcttgttgcccaggctggagtgcaatagtgagatctcggctcaccgcaacctccgcctcttgggttcaagcgattctcctcccttagcctcccgagtagctggaattacagcctgtgccaccacgcccggcaaaatttgtatttttagtagagacggggtttcaccatgttggtcaggctggtttcaaactcccaacctcaggtgatctgcccacctcagcctcccaacatgctaggattacaggcgtgagccactgcgcccagcccaggataaacattctacctgcctgaaagtaccataagaggcaagtgagtttcttgcatgatgggcttctgcagcttccccctcaagtcacatctacctgttgtatttatttatttatttatttttgagacagagtctcgctctgtttcccaggctggagtgcagtggcgtgatctcggctcactgcaagctccacctcccaggttcacgccattctcctgcctcagcctcccaagtagctgggactacaggctcccgccaccacgcccggctaattttttgtatttttagtagagacggggtttcaccctgttagccaggatggtctcgatctcctgacctcatgatccacccgcctcggcctcccaaagtgctgggattacaggcgtgagccaccgcgcccggcccgttgtatctattttttttagacgcatcaattcagtgtctctgaagcctttgatcgttaggaaggtcagtacataacctcttaggtgaagctgagttgatctttggagcccaagagagttaattttcaggagaaaaagaattagggcaagctcccctgtgggatgttaagagaaagtccatatgcgcttcttccatctctgcctcttgtttttaaataagtgcttgtgaagttcagtttatagaggttgagtctcagtgcttcctcagccagggtggtttattgctgttttacaaagaaccatgaacaagcaaaatcctatcaatagtcctttctgttttatgttttatagtcttattttgaagaatcggcatggtaaaatgatagacaagtttcaaataaagcagataattagctctagaattggggtactttgcctcaggtacagcatctgtcttgaatacatagtgatggctgtgtcacacatgggtacatttactttcctctctgatcaactgcacccctttttactggcaaagagggctcctactttctacacacttaaccagtcaaacagataggttttggcaccaccgaaagaaccacaagtgcaccccagctgcatctgggcatggttttggtactaggactagagaagtgagcagtaaatgacagtccttaccctaggaagagatgggagaagagaggtgtccagacatatttaccttttctcttctgtcatgccccaagaaccaaggatcatctttgaagtgacgtcttttttgttaaattggaagaagaaaactttgcagccaggcgtggtggctcacgcctgtaatcccagcactttgggaggccgaggcgggcggatcacaaagtgtcaggagtttgagaacagcctggccaacatggtgaaaccccatctctactgaaaatacaaaatcccagctacttgggaggctgaggcaagagaatcacttgaacctgggaggcggatgttgcagtgagccgagatcacgccactgcactccagcctgggcaacggagtgagactccatctcacaaaaaagagaaaagaaaagaaaactttgcttcactaagtttctcttgccattatctcattaattcagatctgtacctcattgctgctcacacatatatgtttcttaccttagcctgaaccttctcaggccttgaagtcattattctactctttttttttcttttccttttttatggcactagagaatgaaaacctaaggtcttagaaaatcttaacttgaaaaagtctctaactggcatgatttgattacttttttcccctgtggacaaataattttctttcctatataatagatttttagtaagtgaaacctttgctgctgctttcctgggtttacattagttttttcctgcccttaagaataatttatctgtgcttctctgatgactgttaatttctaatagtgcaggaagggatgagcttttgatttcttctcactcccctcctcaccctacttccaaattacacactaacttctaacccttacagcctgttggcacatacacaagatccacgagaccatgctcctcagaagctacccatgtcctttctcaccatggtgtggctcttggagccctgagtatctgtgactacccactccaaaggttgactgtaagaggagagcggccttcttaattttgcatttcttaattttgtttttctccattcctgttttatgacttggccttcagatgcttcctactctggcctcctccttttttctcctaggaattgtttccaggtaacctaccatgtgcacttctcagctgctctgctcacctttgcccaccttcccgtgaccctgagagtacagatccgaataatgtggcctgtgcagagctcagagaactgtgaggactacccatgcctgtcagactctgctcagggacagagatggatgggtaaatggtgctgttggagacatttttatcttcataccaggctctgtttcatccctgcaccccgcacccccactcactcccctgagggggtaaaatgcagaggtggttgacctgaagggtctgattccctccttcccaagccttagggcctaccctggagtgctgcagtgtgtgagagctgctgcttgcttgtttctccactaggcctgctccaaatgcttagccaatctctggagccgacacagttgcctacggggtgacttagcaccaggttccattagctctccaagtgactgtttccacccagtacttttggcgcttgaggatggggggagggggattatttaaaataaataaaatccgaggtggcagtagaggattccttttgctttaaaaatctttggactaaaaaaaaaaaaaaaaagttttttatatataaatatataaagtaaattgttatgtaactattattgtttcttgtatgttctaattttgttttatgatgtaattaaagaaagtaagctgtgaagacttttcattttcctgtg

SEQ ID NO: 71949 - DNA, 1215 bp, Artificial Sequence
  derived and/or modified sequence
atgcggcgggacgtgaacggcgtgaccaagagccggttcgagatgtttagcaatagcgacgaggcggtgatcaataagaagcttccaaaagaattactgctaaggatattcagtttcttagacgttgtaaccctctgtcggtgcgcccaggtcagcagagcatggaacgtgctggctctcgacggttcaaactggcagcgtatcgacttgtttgactttcagcgcgatattgaggggagagtagtggaaaacatttctaagagatgcggtggtttcctgaggaagctgtctctacggggctgtcttggagtcggggataacgcactgcgaacttttgcccagaattgccgcaatattgaagtcctgaacttaaacggatgcacaaagactactgacgcagaaggatgtccactcctcgagcaactgaacatcagctggtgtgatcaggtcacaaaagacggaatccaggccttggtgcgcggctgcggcggtctcaaagccctatttctgaagggctgcacacagttggaggacgaagctctcaagtacatcggcgcccactgccccgagctggtgaccctgaacctccaaacgtgccttcagattaccgatgaaggcttaatcactatttgtcgtggttgccacaaactccaaagcttgtgtgcctcagggtgcagcaatatcactgacgccattctgaacgctctgggccagaactgccctaggctcagaatcttagaagttgcaaggtgctctcaattgaccgatgttggctttacaactctggccaggaactgccacgagttggagaagatggacctcgaagagtgcgtgcaaatcaccgatagcacactcatacagttgtcaatccattgccctcgactgcaggtgctgagtctaagccattgcgagttgatcactgacgatggaataaggcacttggggaacggcgcttgcgctcatgatcaactggaggtgatcgagctggataattgtccactgattaccgatgcctcacttgagcatctgaaaagctgtcatagccttgagaggatcgagctctacgactgccagcagatcactcgagctggcattaaacgcctgcggacacatttgccaaatattaaagtacacgcttatttcgcgcccgttacaccgcccccgtccgttggcgggagccgccagcgtttttgccgctgttgtattatcctgtag

SEQ ID NO: 71950 - DNA, 1215 bp, Artificial Sequence
  derived and/or modified sequence
atgaggcgcgatgtgaacggggtaactaagagcaggttcgaaatgttttctaacagcgatgaggccgtcattaataagaagctccccaaggagttgctgctgcggattttttcctttctggacgttgtgacactttgccgttgcgcccaggtcagccgggcatggaacgtccttgcgcttgacggaagcaactggcagcgaatcgatcttttcgacttccaacgggacatcgagggtagggtagtcgagaatattagtaagcgatgcggcggtttcctcagaaaacttagtcttagaggttgtttgggtgtaggcgacaatgctctgcggacctttgcacagaattgtagaaacatcgaggtcctgaaccttaatggctgtactaagactaccgatgccgaggggtgcccactgcttgagcaattaaacatctcttggtgcgatcaagtcaccaaggatggaattcaggctctcgtgaggggctgcggtggtctcaaagccttattcctgaaaggctgtactcaattagaggatgaagcgctgaagtatataggtgcccattgtcccgagttagtaaccctgaatctgcagacttgtctgcagattacagatgagggactcatcactatatgtcggggatgccacaagttgcaaagcctctgcgcctccggctgtagcaatataactgatgccatcctcaacgcccttggacaaaattgtcccaggttacggatattggaggtggccaggtgcagtcagctgaccgacgtcggattcacgaccctcgcgagaaactgccacgagctcgagaagatggaccttgaggagtgcgtacaaatcacagacagtacgctgattcagctgagtattcattgcccccgtctgcaggttctctccctctctcactgcgaactcatcactgatgatgggattcgccacttgggaaatggggcttgtgcccatgatcagttggaagtgattgagcttgataattgcccgctgattaccgacgccagtcttgagcatctcaagtcatgtcactccctagaacgcatcgagctatatgattgccagcagatcactcgggctggaataaaacgcctgagaacccacctccctaacattaaagtccacgcctacttcgcccctgttacgccgccacccagtgtgggtgggagccgacagcgcttttgccggtgttgcattatcctgtag

SEQ ID NO: 71951 - protein, 784 aa, Artificial Sequence
  derived and/or modified sequence
MRQVCCSALPPPPLEKGRCSSYSDSSSSSSERSSSSSSSSSESGSSSRSSSNNSSISRPAAPPEPRPQQQPQPRSPAARRAAARSRAAAAGGMRRDPAPGFSMLLFGVSLACYSPSLKSVQDQAYKAPVVVEGKVQGLVPAGGSSSNSTREPPASGRVALVKVLDKWPLRSGGLQREQVISVGSCVPLERNQRYIFFLEPTEQPLVFKTAFAPLDTNGKNLKKEVGKILCTDCATRPKLKKMKSQTGQVGEKQSLKCEAAAGNPQPSYRWFKDGKELNRSRDIRIKYGNGRKNSRLQFNKVKVEDAGEYVCEAENILGKDTVRGRLYVNSEAEELYQKRVLTITGICVALLVVGIVCVVAYCKTKKQRKQMHNHLRQNMCPAHQNRSLANGPSHPRLDPEEIQMADYISKNVPATDHVIRRETETTFSGSHSCSPSHHCSTATPTSSHRHESHTWSLERSESLTSDSQSGIMLSSVGTSKCNSPACVEARARRAAAYNLEERRRATAPPYHDSVDSLRDSPHSERYVSALTTPARLSPVDFHYSLATQVPTFEITSPNSAHAVSLPPAAPISYRLAEQQPLLRHPAPPGPGPGPGPGPGPGADMQRSYDSYYYPAAGPGPRRGTCALGGSLGSLPASPFRIPEDDEYETTQECAPPPPPRPRARGASRRTSAGPRRWRRSRLNGLAAQRARAARDSLSLSSGSGGGSASASDDDADDADGALAAESTPFLGLRGAHDALRSDSPPLCPAADSRTYYSLDSHSTRASSRHSRGPPPRAKQDSAPL

SEQ ID NO: 71952 - DNA, 2355 bp, Artificial Sequence
  derived and/or modified sequence
atgcggcaggtgtgctgctcagccctgccacctcctccactggagaaaggtaggtgttccagctattccgatagtagcagtagcagctcagaacgaagttcctcctcgagttccagctccagcgaaagcgggagctcttcgagatcttcgagtaataactcttcgattagccggccagcagcccctcccgagccgcgtccccagcagcaacctcaaccgcgctcgcctgcagcccggcgcgcagccgcgcgaagtagagctgccgccgccgggggcatgagaagagaccctgctcctggcttctcgatgctcctgttcggcgtgtccctagcttgttatagtccaagtctgaaatccgtgcaggatcaggcatacaaggcccctgtggttgtggaggggaaagtgcaagggctagtgcccgccggagggagtagttccaattctacaagagagccccccgccagcggccgcgtggcattggtcaaggtgttggataagtggcccctgcgaagtggcggtctgcagcgagagcaggtcatctcggttggctcctgtgtgcctttagagaggaaccagagatacattttcttcttggaacctactgagcagcccttggtatttaagactgcttttgccccccttgataccaatggcaagaatttaaagaaggaggtaggaaagatcctttgcacagattgtgcaacccggcctaagttaaagaaaatgaagtcacagacaggacaggttggcgagaagcagagcctcaagtgtgaggccgctgccggaaatccccagccaagctataggtggtttaaagatggtaaagagctaaatcgtagtcgcgatatacggatcaaatacggaaacggcagaaagaattcgcgcctgcagtttaataaggtcaaggttgaggatgccggtgagtacgtgtgcgaagctgaaaatatcctcgggaaggacacagtgcgcggccggttgtatgttaactccgaagctgaggagctgtaccagaagagggtcttgaccatcacaggcatctgtgtagccttgctcgtcgttggcatagtgtgcgtggtggcctattgtaagactaagaaacagcggaaacagatgcacaatcatctgcgccaaaatatgtgtccggcgcaccagaatcgctcgctcgccaacggcccaagccaccccagactggacccagaagagatccaaatggccgattacatcagcaagaatgtccctgctactgatcatgtgattagacgagaaacggagaccacctttagtggctcacactcatgtagccctagccatcattgctcaaccgctacacccacctcttcacatagacacgagtcacatacctggtccttggaacgcagcgaatcactgacttccgatagccagtcaggaatcatgttatcttctgtgggaacctcgaagtgcaatagccctgcatgtgtcgaggcacgtgcacgccgggcagctgcttacaatttggaggagaggagaagagccaccgcccccccctatcatgatagtgtcgactcacttagagatagccctcattctgaacgttatgtttctgccctgacaacgccagccaggctctcacctgtggattttcactactccctggctacccaggtacctacgtttgagattaccagtccgaatagcgcccacgctgtttcgttacccccagccgcgcctatttcctatcggctcgcagagcaacagccacttctgcggcaccccgctcccccaggtcccggcccagggccaggacctgggccgggaccgggagcagatatgcagcggtcatatgactcctattactacccggcagccggccccgggcccagacgcggcacttgcgccctggggggaagcttgggatctctgccggcttctcccttccggattcctgaggacgacgagtatgaaaccacacaggagtgcgccccaccaccccctccacggcccagagcgagaggcgcaagtcgacgcacttctgcgggaccccggagatggcgtcggtcaaggttgaacggccttgccgctcaacgggcgagagccgcacgagatagcttgtcgttgtcttcagggagtggtggagggtccgcctcggcctcagatgatgatgccgacgacgcagatggtgcactcgcagctgagtccactccgtttctgggtctaagaggcgcacatgatgctctgagatctgacagcccgccgctctgtccagcagcagacagtcggacatactactcccttgacagccattcaactagggcctcttcgcgccatagccggggccctccaccgcgtgccaaacaggatagtgcccctctgtag

SEQ ID NO: 71953 - DNA, 2355 bp, Artificial Sequence
  derived and/or modified sequence
atgaggcaggtgtgctgcagcgccctgcccccaccacccctggagaagggccgctgcagcagctacagcgacagcagcagcagcagcagcgagaggagcagcagcagcagcagcagcagcagcgagagcggcagcagcagccgcagcagcagcaacaacagcagcatcagcaggcctgctgcccctcctgagccccggccccagcagcagccccagcccaggagccctgctgccaggagagctgctgcccggagcagagctgctgctgctgggggcatgaggcgggaccctgcccctggcttctccatgctgctgtttggagtgtccctggcctgctacagccccagcctgaagtctgtgcaggaccaggcctacaaggcccctgtggtggtggagggcaaggtgcagggcctggtgcctgctgggggcagcagcagcaacagcacccgggagcccccagccagcggccgggtggccctggtgaaggtgctggacaagtggcccctgcggagcggcggcctgcagcgggagcaggtgatctctgtgggcagctgtgtgcccctggagaggaaccagcgctacatcttcttcctggagcccacagagcagcccctggtgttcaagacagcctttgcccccctggacaccaacgggaagaacctgaagaaggaggtgggcaagatcctgtgcacagactgtgccacccggcccaagctgaagaagatgaagagccagacaggccaggtgggggagaagcagagcctgaagtgtgaggccgctgctggcaacccccagcccagctaccgctggttcaaggatggcaaggagctgaacagaagccgggacatccgcatcaagtatggaaatggaaggaagaacagccggctgcagttcaacaaggtgaaggtggaggatgctggggagtatgtgtgtgaggccgagaacatcctgggcaaggacacagtgcggggccgcctgtatgtgaacagcgaggccgaggagctgtaccagaagagggtgctgaccatcaccggcatctgtgtggccctgctggtggtgggcatcgtgtgtgtggtggcctactgcaagaccaagaagcagaggaagcagatgcacaaccacctgcggcagaacatgtgcccagcccaccagaacagaagcctggccaacggccccagccacccccggctggaccctgaggagatccagatggctgactacatcagcaagaatgtgcctgccacagaccacgtgatccggcgggagacagagaccaccttcagcggcagccacagctgcagccccagccaccactgcagcacagccacccccaccagcagccacagacatgagagccacacctggagcctggagaggtctgagagcctgaccagtgacagccagagcggcatcatgctgagctctgtgggcaccagcaagtgcaacagccctgcctgtgtggaggcccgggcccggcgggctgctgcctacaacctggaggagaggagaagagccacagccccaccctaccatgattctgtggacagcctgcgggacagcccccacagcgagcgctacgtgtctgccctgaccaccccagcccggctgagccctgtggacttccactacagcctggccacccaggtgcccacctttgagatcaccagccccaacagcgcccatgctgtgtccctgcccccagctgcccccatctcctaccgcctggccgagcagcagcccctgctgcggcacccagcccctcctggccctggccctggccctggccctggccctggccctggagctgacatgcagaggagctatgacagctactactacccagctgctggccctggcccccggcggggcacctgtgccctgggcggcagcctgggcagcctgcctgccagccccttccgcatcccagaagatgatgaatatgagaccacccaggagtgtgcccctcctcctccaccccggccccgggcccggggggccagcaggaggaccagcgctggcccccggcgctggaggaggagccggctgaatggcctggccgcccagagggcccgggccgcccgggacagcctgagcctgagcagcggcagcggcggcggcagcgccagcgccagtgatgatgatgctgatgatgctgatggagccctggccgctgagagcacccccttcctgggcctgcggggggcccatgatgccctgcggagtgacagcccccccctgtgcccagctgctgacagcaggacctactacagcctggacagccacagcacccgggccagcagccgccacagccggggccccccaccccgggccaagcaggacagcgcccccctgtag

SEQ ID NO: 71954 - DNA, 2355 bp, Artificial Sequence
  derived and/or modified sequence
atgcggcaggtgtgctgcagcgccctgccccccccccccctggagaaggggcgctgctcatcctatagcgactccagcagctcctcctcagagcgcagttcttcctcttcttccagctcctccgaatctggatcatcatccaggtcctccagcaacaactcttcaattagccgacccgctgcccccccagaacctcggcctcagcaacagccacaacccaggtccccagccgcccgccgggcagccgcacgcagcagggccgccgcagccggcggtatgcgcagggaccccgcccctgggttctccatgttactgttcggcgtatctctagcctgctactcccccagtttgaagagtgtgcaggaccaggcctataaggccccggtggtcgtcgaaggcaaggtgcagggcctggtgcctgcgggaggctcctcttctaacagtacacgagaacccccagcgtcagggcgagttgctcttgttaaggtcctggataagtggcccctgcgctccggagggcttcaacgcgagcaagtgatatccgttggttcatgtgtcccgctggagcgcaatcagcgatacatattctttctggagcccaccgagcagccactggtgtttaaaacagcctttgccccactcgatactaacggcaaaaacctgaaaaaggaggtgggcaaaatcctgtgtacagattgcgcaactaggccaaaactgaaaaaaatgaagagccagaccggccaagtgggcgagaagcaatcgctgaagtgcgaggctgcagccggtaaccctcagccatcttataggtggtttaaagatgggaaagagctaaaccgaagccgggatatccggatcaaatacgggaatggacgtaagaactcaaggctccaatttaataaagttaaggttgaggacgctggcgaatacgtctgtgaagcagaaaatattctggggaaggacaccgtgaggggccgtctttacgtgaactcggaagcagaggagctgtaccaaaaacgggtcctcacaatcactggaatttgcgtcgctttgttagtcgtgggcatcgtgtgtgtggttgcttattgtaagaccaagaaacaacgtaaacagatgcacaatcatctgagacagaatatgtgcccagctcaccaaaatagatctctagccaacggaccttcccatcctcgcctggatccagaagagatccaaatggccgattatatttctaaaaacgtgccagccacggatcacgtgatccgacgcgaaactgagaccactttctctggctcacacagctgttcaccaagccatcattgttctaccgcgacgccaacgtccagccaccgccacgagagccatacgtggtccctggagaggtccgagtcccttacctccgattcacagagcggtattatgctttcgtctgtggggaccagcaagtgtaactctcctgcctgcgtggaggctcgggcccgtagagccgccgcctacaacctcgaggaaagacggagggccaccgcacctccttatcatgacagcgtggactctctgcgagattctcctcatagcgagcgctacgtcagcgcgctgactaccccagcccgtctatcaccagtagacttccactattcgctggcaactcaggttcccacctttgagataacaagtcccaacagcgctcatgccgttagtctcccacccgcagcccctatcagttataggctggccgagcagcagccgctgctccggcacccggcgcctccaggtccaggacctgggcctgggccaggccctggtcccggagctgacatgcagagaagctacgactcctattattatccggccgcgggacctggcccacgtcgtggcacgtgcgcattgggaggctccctgggatcactgcctgccagcccattccggatacctgaggacgacgagtatgagacaacacaggagtgcgccccacctccgcccccaagacccagagcaagaggtgcatctcgcaggacctccgccggaccgcgccgctggcggcggtccaggctcaacggcttggctgcacagcgagccagggcagcgcgagattctctctctctgagctccggcagtggaggcgggtcagccagcgctagcgacgacgacgctgacgatgctgatggcgccctggccgctgagagcactcccttcctcggcctacgcggagctcacgatgctctccgctccgacagccctcccctgtgtcccgctgcagattctaggacctattactctctggattcacatagcacgcgagcctcaagccgacacagccgtggcccaccgccaagggcaaaacaagattccgcacctttgtag

SEQ ID NO: 71955 - DNA, 3723 bp, Artificial Sequence
  derived and/or modified sequence
atcctcctccaggtcctggcgcacagggtgggagcgctgcgctgcgccgcgctgcgcatcgcggcccgcttgccgcctgccccctgccctagctgggccacctccccgggctgccggtggagggctaagaggcgctaacgttacgctgtttccggttttccagcgggctctgtttcccctcccaaggcggcggcggctgagcggcggagccccccaaatggcctggccagatgcggcaggtttgctgctcagcgctgccgccgccgccactggagaagggtcggtgcagcagctacagcgacagcagcagcagcagcagcgagaggagcagcagcagcagcagcagcagcagcgagagcggcagcagcagcaggagcagcagcaacaacagcagcatctctcgtcccgctgcgcccccagagccgcggccgcagcaacagccgcagccccgcagccccgcagcccggagagccgccgcccgttcgcgagccgcagccgccggcggcatgaggcgcgacccggcccccggcttctccatgctgctcttcggtgtgtcgctcgcctgctactcgcccagcctcaagtcagtgcaggaccaggcgtacaaggcacccgtggtggtggagggcaaggtacaggggctggtcccagccggcggctccagctccaacagcacccgagagccgcccgcctcgggtcgggtggcgttggtaaaggtgctggacaagtggccgctccggagcggggggctgcagcgcgagcaggtgatcagcgtgggctcctgtgtgccgctcgaaaggaaccagcgctacatctttttcctggagcccacggaacagcccttagtctttaagacggcctttgcccccctcgataccaacggcaaaaatctcaagaaagaggtgggcaagatcctgtgcactgactgcgccacccggcccaagttgaagaagatgaagagccagacgggacaggtgggtgagaagcaatcgctgaagtgtgaggcagcagccggtaatccccagccttcctaccgttggttcaaggatggcaaggagctcaaccgcagccgagacattcgcatcaaatatggcaacggcagaaagaactcacgactacagttcaacaaggtgaaggtggaggacgctggggagtatgtctgcgaggccgagaacatcctggggaaggacaccgtccggggccggctttacgtcaacagcgaagccgaggagctgtaccagaagagggtcctgaccatcacgggcatctgcgtggctctgctggtcgtgggcatcgtctgtgtggtggcctactgcaagaccaaaaaacagcggaagcagatgcacaaccacctccggcagaacatgtgcccggcccatcagaaccggagcttggccaatgggcccagccacccccggctggacccagaggagatccagatggcagattatatttccaagaacgtgccagccacagaccatgtcatcaggagagaaactgagaccaccttctctgggagccactcctgttctccttctcaccactgctccacagccacacccacctccagccacagacacgagagccacacgtggagcctggaacgttctgagagcctgacttctgactcccagtcggggatcatgctatcatcagtgggtaccagcaaatgcaacagcccagcatgtgtggaggcccgggcaaggcgggcagcagcctacaacctggaggagcggcgcagggccaccgcgccaccctatcacgattccgtggactcccttcgcgactccccacacagcgagaggtacgtgtcggccctgaccacgcccgcgcgcctctcgcccgtggacttccactactcgctggccacgcaggtgccaactttcgagatcacgtcccccaactcggcgcacgccgtgtcgctgccgccggcggcgcccatcagttaccgcctggccgagcagcagccgttactgcggcacccggcgccccccggcccgggacccggacccgggcccgggcccgggcccggcgcagacatgcagcgcagctatgacagctactattaccccgcggcggggcccggaccgcggcgcgggacctgcgcgctcggcggcagcctgggcagcctgcctgccagccccttccgcatccccgaggacgacgagtacgagaccacgcaggagtgcgcgcccccgccgccgccgcggccgcgcgcgcgcggtgcgtcccgcaggacgtcggcggggccccggcgctggcgccgctcgcgcctcaacgggctggcggcgcagcgcgcacgggcggcgagggactcgctgtcgctgagcagcggctcgggcggcggctcagcctcggcgtcggacgacgacgcggacgacgcggacggggcgctggcggccgagagcacacctttcctgggcctgcgtggggcgcacgacgcgctgcgctcggactcgccgccactgtgcccggcggccgacagcaggacttactactcactggacagccacagcacgcgggccagcagcagacacagccgcgggccgcccccgcgggccaagcaggactcggcgccactctagggccccgccgcgcgcccctccgccccgcccgccccactatctttaaggagaccagagaccgcctactggagagaaaggaggaaaaaagaaataaaaatatttttattttctataaaaggaaaaaagtataacaaaatgttttattttcattttagcaaaaattgtcttataatactagctaacggcaaaggcgtttttatagggaaactatttatatgtaacatcctgatttacagcttcggaaaaaaaaaagaaacaacaaaaaaaaaagagagatgggccaattttttgactctttaatagaaacctattttgtggtgccttttgctgtatgctcatctggggctccgggggacaggtctgggttgtggggtgctgagagtgacagctgggagagaagaggtgcgggttctgttgggggcgagggtggggggcggtggggggttggccctaaggaagaactgaggacggaagtagctttgctcccaggcaagagctgaagttcccgacccctgggaggagagggccaggaccctaggcttggagctggagctggggtaacttccagggggagataaagacacagctacccgaatggggaagccctggctactcacagctgttaaaggagggggggcagagaaacgtttccccaagagcctgagcccagggaggtggcagctctgccaggggcccaatgttggcggctcctgtcccccacagcctccaggacgcccctccgtcctctgcagcaccttcgtttacaggtcgtcttttctattttacacctgcatgtcctttgcatttcagattctttagattggatgcatggtcacgctgggaccgagaagagccactcgacagtgtattccccttttagcaataaagtaacaccatttccttctcacaggctgcctcctagcccccaacccacctatgacatccactcgtctccagtcctgccctcccacccccaaaaactgggtccactgctaatttgtcaaaaaggtaattgtttaaaaaaaaaaaaaatcccaaacagaaacagatgggaatcctgtcctgaaatgtctgaacacctgactgttgacacttgaacatttttatattataaataaaatcagaaataactcctgtt

SEQ ID NO: 71956 - DNA, 2355 bp, Artificial Sequence
  derived and/or modified sequence
atgcgccaggtgtgctgttctgctctcccaccgccacccctggagaagggcaggtgttcgtcttacagcgatagctcctcaagcagcagtgagaggtctagctctagctcgtcatcctcttccgaatcaggatcgtctagccgcagctctagcaataattctagtatcagccgccctgccgcacctcctgagcccaggccacaacaacagccccagccacgttctcccgcagccagaagggccgcagctcgctctagggcagccgcagccggtggaatgcgtagagaccctgctcccggtttttcgatgctattatttggcgtgtctctggcctgctactctcccagtttgaagtcagttcaggatcaggcctacaaggcaccagtagtcgtggaaggtaaggtccagggcctggtgcccgctgggggaagctcctctaacagcacacgagaaccccctgcttctggtagagtcgcgttggtgaaagttttggacaagtggcccttgcggagtggcggtcttcagagagagcaggtgattagcgtcggcagctgcgtgccattagagaggaaccagagatacatattcttcctggaacccactgaacagcctctagtgtttaaaacagcctttgcgcctttggacacgaatgggaaaaacctgaaaaaagaagttggtaagatcctgtgcaccgattgcgctacccgtccaaaactcaagaagatgaaaagccagaccggccaggtgggtgagaaacagagcctcaagtgcgaagctgctgctggaaacccgcagccatcttaccgctggtttaaagacggaaaggagttgaatcggtcaagggacatcagaatcaagtacgggaacgggcgtaagaatagcaggctccagttcaacaaggtgaaggtggaagacgccggagaatacgtctgtgaagccgagaacatcctcggtaaggacactgtgcggggtagactctacgtgaactccgaagccgaagagctttaccagaaacgtgtgctaacaattaccggtatctgtgtggcgctgctcgtggtcggcatcgtgtgcgtcgttgcctactgcaaaactaagaaacagcgaaaacagatgcacaatcacctgcgacagaatatgtgtccagcccaccaaaaccggtctttagctaatgggccttctcatccaagattggatcctgaggagattcaaatggctgactatatcagcaagaatgttccggctacggaccatgtgatccgcagggaaacagaaactactttcagtgggtcgcacagttgctcaccgtcgcaccactgtagcactgctacaccaacgagttcccaccggcacgaaagtcacacatggtcacttgagaggtcagaaagtctaacctctgactcccaatctggcataatgctgtcgagcgtggggacaagcaagtgtaatagcccggcttgcgtggaggctagggctagacgcgctgccgcttacaacctcgaagaacggaggcgagcgaccgctcccccatatcatgacagcgtcgactcgctgcgggacagccctcatagtgagcgatatgtgtccgcactgacgactccagctagactgtcaccggtggatttccattacagcctggccacacaggtcccaaccttcgagatcactagccccaacagcgcccatgcagtgtccctccctccagctgcccctatctcctacaggctggcagaacaacagcccttactccggcatcctgctccacccggtcctggtcctggacccggacccggtcctgggccaggggctgacatgcaaaggtcgtatgattcttactactatcctgccgctggtccaggtcccagaaggggaacatgtgcactcggagggagcctgggcagcctccctgccagtccctttcgcatacctgaggatgacgagtacgagaccacacaggagtgtgccccacccccacccccaaggccccgagctcgcggtgcctctaggcggaccagcgctgggccaagaaggtggcgccgttcacggttgaacggccttgctgctcagcgggcacgggctgcaagagactctctctccttaagctctggcagcggcggtggctctgcctccgcatcagatgacgacgcagacgatgcagacggagcactggcagccgagtctacgcccttcctcggactgagaggcgctcacgacgctctcagaagcgactctccaccactgtgtccagcggctgattcgagaacctattactccctcgattcccatagtaccagagcctcttctcggcattcccggggtccaccacctcgcgcaaaacaagacagcgcacccctctag

SEQ ID NO: 71957 - DNA, 2355 bp, Artificial Sequence
  derived and/or modified sequence
atgagacaggtgtgctgcagcgccctgccccccccccccctggagaagggcagatgcagcagctacagcgacagcagcagcagcagcagcgagagaagcagcagcagcagcagcagcagcagcgagagcggcagcagcagcagaagcagcagcaacaacagcagcatcagcagacccgccgccccccccgagcccagaccccagcagcagccccagcccagaagccccgccgccagaagagccgccgccagaagcagagccgccgccgccggcggcatgagaagagaccccgcccccggcttcagcatgctgctgttcggcgtgagcctggcctgctacagccccagcctgaagagcgtgcaggaccaggcctacaaggcccccgtggtggtggagggcaaggtgcagggcctggtgcccgccggcggcagcagcagcaacagcaccagagagccccccgccagcggcagagtggccctggtgaaggtgctggacaagtggcccctgagaagcggcggcctgcagagagagcaggtgatcagcgtgggcagctgcgtgcccctggagagaaaccagagatacatcttcttcctggagcccaccgagcagcccctggtgttcaagaccgccttcgcccccctggacaccaacggcaagaacctgaagaaggaggtgggcaagatcctgtgcaccgactgcgccaccagacccaagctgaagaagatgaagagccagaccggccaggtgggcgagaagcagagcctgaagtgcgaggccgccgccggcaacccccagcccagctacagatggttcaaggacggcaaggagctgaacagaagcagagacatcagaatcaagtacggcaacggcagaaagaacagcagactgcagttcaacaaggtgaaggtggaggacgccggcgagtacgtgtgcgaggccgagaacatcctgggcaaggacaccgtgagaggcagactgtacgtgaacagcgaggccgaggagctgtaccagaagagagtgctgaccatcaccggcatctgcgtggccctgctggtggtgggcatcgtgtgcgtggtggcctactgcaagaccaagaagcagagaaagcagatgcacaaccacctgagacagaacatgtgccccgcccaccagaacagaagcctggccaacggccccagccaccccagactggaccccgaggagatccagatggccgactacatcagcaagaacgtgcccgccaccgaccacgtgatcagaagagagaccgagaccaccttcagcggcagccacagctgcagccccagccaccactgcagcaccgccacccccaccagcagccacagacacgagagccacacctggagcctggagagaagcgagagcctgaccagcgacagccagagcggcatcatgctgagcagcgtgggcaccagcaagtgcaacagccccgcctgcgtggaggccagagccagaagagccgccgcctacaacctggaggagagaagaagagccaccgcccccccctaccacgacagcgtggacagcctgagagacagcccccacagcgagagatacgtgagcgccctgaccacccccgccagactgagccccgtggacttccactacagcctggccacccaggtgcccaccttcgagatcaccagccccaacagcgcccacgccgtgagcctgccccccgccgcccccatcagctacagactggccgagcagcagcccctgctgagacaccccgccccccccggccccggccccggccccggccccggccccggccccggcgccgacatgcagagaagctacgacagctactactaccccgccgccggccccggccccagaagaggcacctgcgccctgggcggcagcctgggcagcctgcccgccagccccttcagaatccccgaggacgacgagtacgagaccacccaggagtgcgcccccccccccccccccagacccagagccagaggcgccagcagaagaaccagcgccggccccagaagatggagaagaagcagactgaacggcctggccgcccagagagccagagccgccagagacagcctgagcctgagcagcggcagcggcggcggcagcgccagcgccagcgacgacgacgccgacgacgccgacggcgccctggccgccgagagcacccccttcctgggcctgagaggcgcccacgacgccctgagaagcgacagcccccccctgtgccccgccgccgacagcagaacctactacagcctggacagccacagcaccagagccagcagcagacacagcagaggccccccccccagagccaagcaggacagcgcccccctgtag

SEQ ID NO: 71958 - DNA, 2349 bp, Artificial Sequence
  derived and/or modified sequence
atggccagacaggtgagaacccaccaggagaccctgaacagattccagcagcagagcatccacctgctgaccgagctgctgagactgaagatgaaggccatggtggagagcatgagcgtgggcgccaaccccctggacatcaccagaagattcgtggaggccagccagctgctgcacctgaacgccaaggagatggccttcaactgcctgatcagcaccgccggcagaagcggctacagcagcggccagctgtggaaggagagcctggccaacatgagcgccatcggcgtgaacagcccctaccagctgatctaccacagcagcaccgcctgcctgagcttcagcctgagcgccggcaaggaggccaagaagaagatcggcaagagcagaaccaccgaggacgtgagcatgccccccctgcacagaggcgtgggcacccccgccaacagcctggagttcagcgacccctgccccgaggccagagagaagctgcaggagctgtgcagacacatcgaggccgagagagccacctggaagggcagaaacatcagctaccccatgatcctgagaaactacaaggccaagatgcccagccacctgatgctggccagaaagggcgacagccagacccccggcctgcactacccccccaccgccggcgcccagaccctgagccccaccagccaccccagcagcgccaaccaccacttcagccagcactgccaggagggcaaggcccccaagaaggccttcaagttccactacaccttctacgacggcagcagcttcgtgtactaccccagcggcaacgtggccgtgtgccagatccccacctgctgcagaggcagaaccatcacctgcctgttcaacgacatccccggcttcagcctgctggccctgttcaacaccgagggccagggctgcgtgcactacaacctgaagaccagctgcccctacgtgctgatcctggacgaggagggcggcaccaccaacgaccagcagggctacgtggtgcacaagtggagctggaccagcagaaccgagaccctgctgagcctggagtacaaggtgaacgaggagatgaagctgaaggtgctgggccaggacagcatcaccgtgaccttcaccagcctgaacgagaccgtgaccctgaccgtgagcgccaacaactgcccccacggcatggcctacgacaagagactgaacagaagaatcagcaacatggacgacaaggtgtacaagatgagcagagccctggccgagatcaagaagagattccagaagaccgtgacccagttcatcaacagcatcctgctggccgccggcctgttcaccatcgagtaccccaccaagaaggaggaggaggagttcgtgagattcaagatgagaagcagaacccaccccgagagactgcccaagctgagcctgtacagcggcgagagcctgctgagaagccagagcggccacctggagagcagcatcgccgagaccctgaaggacgagcccgagagcgcccccgtgagccccgtgagaaagaccaccaagatccacaccaaggccaaggtgaccagcagaggcaaggccagagagggcagaagccccaccagatgggccgccctgcccagcgactgccccctggtgctgagaaagctgatgctgaaggaggacaccagagccggctgcaagtgcctggtgaaggcccccctggtgagcgacgtggagctggagagattcctgctggcccccagagaccccagccaggtgctggtgttcggcatcatcagcagccagaactacaccagcaccggccagctgcagtggctgctgaacaccctgtacaaccaccagcagagaggcagaggcagcccctgcatccagtgcagatacgacagctacagactgctgcagtacgacctggacagccccctgcaggaggacccccccctgatggtgaagaagaacagcgtggtgcagggcatgatcctgatgttcgccggcggcaagctgatcttcggcggcagagtgctgaacggctacggcctgagcaagcagaacctgctgaagcagatcttcagaagccagcaggactacaagatgggctacttcctgcccgacgactacaagttcagcgtgcccaacagcgtgctgagcctggaggacagcgagagcgtgaagaaggccgagagcgaggacatccagggcagcagcagcagcctggccctggaggactacgtggagaaggagctgagcctggaggccgagaagaccagagagcccgaggtggagctgcaccccctgagcagagacagcaagatcaccagctggaagaagcaggccagcaagaagtag

SEQ ID NO: 71959 - DNA, 2349 bp, Artificial Sequence
  derived and/or modified sequence
atggctcgacaggtgaggacacatcaagaaactctgaacaggttccagcagcaatcgatccacctgctgaccgagctgcttcggctgaagatgaaggctatggtggagtcgatgtcagtgggagccaatccgctggacatcaccaggagatttgttgaggcaagccagcttcttcacctgaatgcaaaagaaatggcattcaactgccttatttcaaccgctggcagatctggctacagcagcggacagctgtggaaagaaagcctggccaatatgtccgccattggggtgaacagtccgtaccagttaatctatcactccagcaccgcttgcctgagctttagtttatctgccggcaaagaagcaaaaaagaagatcgggaaatctcgcactacagaggacgtttctatgcccccactacatcggggggtgggtacacccgccaattctctggaatttagcgatccatgtccagaagccagagaaaaattgcaggaattatgtaggcacatcgaggccgagcgggctacttggaaggggcggaacatctcatacccaatgatccttagaaactacaaggcaaaaatgccatctcaccttatgctggctagaaaaggggacagtcagaccccagggctgcattacccaccaaccgccggtgcccagacacttagtcccacttcgcacccaagcagcgcgaaccaccacttctcgcaacattgccaagagggaaaggcccccaagaaagcgttcaaattccactataccttctatgatggaagtagctttgtctactacccctcaggcaatgtggccgtgtgtcaaattccaacctgctgtcgaggaaggaccatcacttgtttattcaatgatatcccaggcttctctctcctggccctctttaacacagaaggtcagggttgtgtgcactacaaccttaaaacaagctgtccatacgtcctgatcttagacgaagagggagggacaaccaatgaccaacaaggttacgtggtccacaagtggagctggacctcaagaacagaaacgctccttagcctcgaatacaaggtgaatgaagaaatgaaacttaaggttctcggtcaagatagcatcaccgtgacattcactagtttgaacgagactgtcaccttaactgtctccgcaaacaactgcccacacggaatggcgtacgataagcgcctaaataggagaatcagcaacatggacgacaaagtttacaaaatgagccgagcactcgcagaaataaaaaagcgattccaaaagaccgttacccagttcatcaattctatcctcctggccgccgggttgtttaccatcgaatatccaaccaagaaggaagaggaggaattcgtaagatttaagatgcgaagccggacgcacccggaacgcctgcctaaactctcgctctatagtggcgagagcttgctgcgctcacagtccggacacttggagtcctccatagccgaaacgctgaaagatgagcccgagtcggccccagtgtccccagttaggaagaccaccaaaattcacaccaaagccaaagttacaagccggggcaaagcccgtgaagggcggagccctacgagatgggccgcattaccgagcgactgtcccctcgtgttaaggaagctgatgctgaaggaagatacccgggccgggtgcaagtgtttggtaaaggctcctttggtgtctgatgtcgaactggaaagattcctcctggcgcctcgggacccttcacaggtgttggttttcggcatcataagttctcagaactacacttcaacagggcagcttcagtggctattgaacacactgtataatcaccaacagagaggcaggggaagcccatgcattcaatgccggtatgacagttatcgcttactgcaatacgacttggatagccccctgcaggaagatcctcctcttatggttaagaagaattccgtggtgcaggggatgatactgatgtttgctgggggaaaactaatatttggcggcagggtgctcaatgggtacggactgtcaaagcaaaatctgctcaaacagatcttcaggagccagcaggactacaaaatgggatacttcctgcctgacgactacaaattcagcgtgcctaatagcgttctgagtctcgaggacagcgagagtgtgaagaaagctgaatctgaagacatccaaggttcctcttcctccctagcgttagaggattatgtggagaaagaactgagtctagaagctgaaaagaccagggaacccgaagtggagctacacccgcttagcagagatagtaagatcacctcgtggaaaaagcaggcctctaagaaatag

SEQ ID NO: 71960 - DNA, 2349 bp, Artificial Sequence
  derived and/or modified sequence
atggcgcgacaggttcgtactcaccaggaaaccctgaaccggttccagcagcaatcgatacaccttctgactgagctgctgagactgaaaatgaaagccatggtagagtcgatgtctgtgggggctaatccactggacatcacccgccgttttgtggaggccagccaactgctacacttgaacgcgaaggaaatggctttcaactgtctcattagcacggctgggcgtagcggctactcaagcggtcagttatggaaagagtccctggcgaatatgtcggccatcggagttaatagcccgtaccagctcatttaccacagctctaccgcatgcctatcctttagcttaagtgctggcaaggaggctaagaagaaaatagggaagtcacgtactactgaggacgtcagcatgccaccgttgcacagaggagttgggacaccagccaacagcctggaattttccgatccttgcccagaagccagagagaaattgcaagagctttgtcggcacatagaagccgaacgcgccacctggaaaggccgcaatatctcatacccgatgatattaaggaattacaaggccaagatgccctcgcacctgatgttggccaggaaaggagattcccagaccccaggcctgcactacccccctactgcgggtgcccagactctgagtccgaccagccaccccagtagtgccaatcatcacttcagccagcactgtcaggaggggaaggccccaaagaaagctttcaagtttcactacacgttttatgatgggagtagcttcgtctactaccccagtgggaatgtggccgtctgtcagatacccacttgttgtagaggacgaaccatcacctgtctcttcaacgatatccccggtttttctctcctagcattgttcaataccgaaggccagggctgcgtgcactacaatctgaagactagctgcccgtatgtactgattctcgacgaggaaggaggcactacgaatgaccagcaggggtacgtagtccacaagtggtcatggacatcacgtactgagactttattatctcttgagtataaggtgaacgaggaaatgaaactgaaagtcctgggccaggattcgatcacggttacatttacatcactgaatgagaccgtgaccctcacagtgagcgctaacaattgccctcacggaatggcatatgacaagcggctgaacagaagaataagtaacatggacgataaggtgtataaaatgtcacgggctcttgccgagatcaagaagaggttccagaaaactgtgacacagttcatcaatagtattctcttagcagcaggcttattcacgatcgagtatcccaccaagaaagaggaggaggagtttgttcgattcaagatgaggtcccggacgcacccagagagactacctaaactgtcactctatagcggggagtctcttctgagatcacagtccggacacctcgaatcaagcatagcagagacactaaaggacgaacctgagtcagcccccgtttcgccagtcagaaaaacaaccaagatacacactaaagctaaggtcacctcacgcggcaaagctcgagaaggcagatccccaactagatgggcagccttgccatctgactgtccactggttctgaggaaattgatgctcaaagaagacactcgggccggctgcaagtgtctggtgaaggcacccctcgtctccgacgtggagctggagagatttctgctggcccctagggaccctagccaagtgctcgtatttggcattatctcctcccagaactacacgagtacgggccagttgcagtggctgttgaacacattatataaccatcagcagcgggggaggggaagtccttgcatccagtgccgctatgacagctaccgcctgcttcagtacgatctggactcaccattacaggaggacccccccctgatggttaagaaaaatagcgttgtacagggaatgatactgatgtttgctggcggtaagctcatattcggaggccgtgtgctcaatggatacggactctccaaacagaaccttttgaagcagattttccgctcacagcaggattacaaaatgggctacttcctgcccgatgactataagttctcggtgcctaacagcgttctctcactggaagactccgagtcagtgaaaaaggcagaaagtgaagatatacaaggatcctccagttcccttgccctcgaagactatgtcgagaaggagttaagcctggaggcagaaaagacccgtgaacctgaggtggaactgcacccattatccagggattctaagatcacctcttggaaaaagcaggccagtaaaaagtag

SEQ ID NO: 71961 - DNA, 2349 bp, Artificial Sequence
  derived and/or modified sequence
atggcccggcaggtgaggacccaccaggagaccctgaaccgcttccagcagcagagcatccacctgctgacagagctgctgcggctgaagatgaaggccatggtggagagcatgtctgtgggcgccaaccccctggacatcaccaggagatttgtggaggccagccagctgctgcacctgaatgccaaggagatggccttcaactgcctgatcagcacagctggccgcagcggctacagcagcggccagctgtggaaggagagcctggccaacatgtctgccatcggcgtgaacagcccctaccagctgatctaccacagcagcacagcctgcctgtccttcagcctgtctgctgggaaggaggccaagaagaagattggcaagagcaggaccacagaagatgtgtccatgccacccctgcacagaggagtgggcaccccagccaacagcctggagttcagtgacccctgcccagaggcccgggagaagctgcaggagctgtgccgccacattgaagctgagcgggccacctggaagggcaggaacatctcctaccccatgatcctgaggaactacaaggccaagatgcccagccacctgatgctggccaggaaaggagacagccagaccccaggcctgcactacccacccacagctggggcccagaccctgagccccaccagccaccccagcagcgccaaccaccacttcagccagcactgccaggagggcaaggcccccaagaaggccttcaagttccactacaccttctatgatggcagcagctttgtgtactaccccagcggaaatgtggccgtgtgccagatccccacctgctgccggggccgcaccatcacctgcctcttcaatgacatccctggcttcagcctgctggccctcttcaacacagagggccagggctgtgtgcactacaacctgaagaccagctgcccctacgtgctgatcctggatgaggagggcggcaccaccaatgaccagcagggctacgtggtgcacaagtggagctggaccagcaggacagagaccctgctgagcctggagtacaaggtgaatgaggagatgaagctgaaggtgctgggccaggacagcatcaccgtgaccttcaccagcctgaatgaaacagtgaccctgactgtgtctgccaacaactgcccccacggcatggcctatgacaagaggctgaacagacgcatcagcaacatggatgacaaggtgtacaagatgagccgggccctggccgagatcaagaagcgcttccagaagacagtgacccagttcatcaacagcatcctgctggccgccggcctcttcaccatcgagtaccccaccaagaaggaggaggaggagtttgtgcgcttcaagatgaggagcaggacccaccctgagcggctgcccaagctgagcctgtacagcggggagagcctgctgcggagccagagcggccacctggagagcagcattgctgagaccctgaaggatgagcctgagagcgcccctgtgtcccctgtgaggaagaccaccaagatccacaccaaggccaaggtgaccagccggggcaaggcccgggagggccgcagccccacccgctgggccgccctgcccagcgactgccccctggtgctgaggaagctgatgctgaaggaggacaccagggctggctgcaagtgcctggtgaaggcccccctggtgtctgatgtggagctggagcgcttcctgctggccccccgggaccccagccaggtgctggtgtttggcatcatcagcagccagaactacaccagcacaggccagctgcagtggctgctgaacaccctgtacaaccaccagcagaggggccggggcagcccctgcatccagtgccgctatgacagctaccgcctgctgcagtatgacctggacagccccctgcaggaggacccccccctgatggtgaagaagaacagcgtggtgcagggcatgatcctgatgtttgctgggggcaagctgatctttggaggccgggtgctgaatggctacggcctgagcaagcagaacctgctgaagcagatcttccgcagccagcaggactacaagatgggctacttcctgcctgatgactacaagttctctgtgcccaacagcgtgctgagcctggaggacagcgagagcgtgaagaaggccgagagcgaggacatccagggcagcagcagcagcctggccctggaggactatgtggagaaggagctgagcctggaggccgagaagacccgggagcctgaggtggagctgcaccccctgagccgggacagcaagatcacctcctggaagaagcaggccagcaagaagtag

SEQ ID NO: 71962 - DNA, 2349 bp, Artificial Sequence
  derived and/or modified sequence
atggcccggcaggtgcggacccaccaggagaccctgaaccggttccagcaacagagtatccatctgttaactgagcttctgagactgaagatgaaagccatggtggagagtatgtccgtcggagctaaccccctggacatcacgagacggtttgtcgaggcgagtcagctgctccatttgaacgccaaagaaatggcctttaactgcctgataagtacagcagggagaagcggttactctagcggacagttgtggaaggaatcactggcgaatatgagtgctataggcgtgaacagcccatatcaactgatctatcattcttccactgcttgcctttcgttctcactgagcgcaggcaaggaagccaagaagaagatcgggaagagtcgcaccaccgaggacgtctctatgcctcctctccacaggggagtgggaacccctgcaaatagcctcgagttctccgatccttgccccgaagctagggagaaattgcaggaactatgtaggcacattgaagcagaaagggccacgtggaaaggtagaaacatcagttatcctatgatcctgcggaactataaagctaagatgccttctcatctcatgttggcccgtaagggagacagtcaaaccccgggcttgcactacccacctactgcgggtgcccagacacttagtcccacaagtcatcctagctcagctaaccaccatttctcccaacactgtcaggaagggaaggctcccaagaaagccttcaagttccactatactttttatgacggaagcagctttgtctactacccttccggcaacgttgctgtttgccagatcccaacctgctgccgggggagaaccataacatgtctgtttaacgacatcccggggttctctctgttagccctgttcaacaccgaaggacaggggtgtgtacactataacctcaagactagctgcccttacgtattgattctggatgaagagggtgggaccactaacgatcaacaggggtatgttgtacacaaatggtcgtggacttctcgaaccgaaacactgttgtcgttggagtacaaagttaacgaggagatgaagctgaaagtgcttggccaagacagtattacagtgactttcacaagccttaatgaaaccgtcactcttaccgttagcgccaacaattgtccccacgggatggcttacgataaaaggttgaatagacgaatctctaatatggatgacaaagtgtataaaatgagcagagctttagcagagattaaaaagaggtttcagaagaccgttactcagttcattaattccatcctgcttgccgctggtttatttaccattgagtacccaaccaagaaagaagaggaagagttcgtgcggttcaaaatgagatccagaacccaccctgagcggctccctaagctctccctttactctggagaatccttgctacgttcccaaagcggccatcttgagagcagcatcgcagaaacactgaaagacgagccggagtcagcccccgttagccccgttagaaaaacaaccaaaatccacacaaaagcaaaagtgacctcaagaggaaaagctcgggaaggtcgtagtcctacgcgctgggccgccttaccctctgactgccccttggtgctgagaaaactgatgctgaaggaggatacacgcgccggctgtaaatgtctggtgaaagcccccctggttagcgacgtcgaattagagcgctttttgcttgcaccacgggacccttctcaagtgctggtctttggcattatctcctcgcagaactacacctccactgggcagttgcagtggttactaaacacattgtataatcatcagcagcggggcaggggtagcccttgcatccaatgcaggtacgatagttaccggctcctgcagtatgacctcgactctcccctgcaagaggacccacccctaatggtgaagaaaaattcagtggtgcagggcatgatcctgatgttcgcgggagggaaactgatttttggtggaagggtgctgaatgggtacggtctgtcaaagcagaatctactgaagcagatcttccgctctcagcaggattacaaaatgggctattttttgccagatgactacaagtttagcgtcccaaatagcgttctgtccctcgaggactctgagtcagtcaaaaaggccgaatctgaggacatccagggatcttcgtctagcctggccttggaggattacgtggagaaggaacttagcttggaggcagagaagacacgagaacctgaggtcgaactgcatccgttgtctcgagacagcaaaattacaagctggaaaaagcaggcctctaagaaatag

SEQ ID NO: 71963 - DNA, 2349 bp, Artificial Sequence
  derived and/or modified sequence
atggcccggcaggtgcggacccaccaggagaccctgaaccggttccagcagcaatcaattcatttattaaccgaattgctacgtttgaagatgaaagctatggtggaatcaatgtctgtgggggccaatcctctggacatcacgaggcggttcgtggaggcctcacaacttctgcatctgaacgctaaagagatggcatttaactgcctgatttcaactgcgggtagatcaggatacagctcaggccagctttggaaagaatctctggccaatatgtctgccatcggagtgaactcaccctatcaactcatatatcactccagcacagcgtgtctgtcattttccctatcggctggcaaagaggctaagaaaaaaattggcaaatctaggaccactgaggatgtaagtatgccaccccttcaccgtggagtaggaacaccagccaacagtttggaatttagcgacccttgtcccgaagcaagagagaagcttcaagagctctgcaggcatatagaggccgagcgcgccacatggaagggccgcaatatcagttatccgatgattctgcggaactacaaggctaagatgccctcccacttgatgctggcgcgcaagggcgatagtcagactcccggtctgcactatcctccaaccgctggggctcagacactgtctccaacaagccacccctcaagcgcaaaccaccatttcagccagcattgtcaggagggaaaggccccaaagaaagcattcaaatttcattacactttctacgatggatcatcatttgtgtactacccaagtggcaacgttgctgtctgccagatccccacctgttgtaggggtaggactatcacatgtctgttcaacgacatccccggatttagtctgctggctctgttcaataccgaggggcagggatgtgtgcactataacctcaaaacctcatgcccttacgtactgatcttggacgaagagggcggcaccacaaatgatcaacaagggtatgttgtgcataaatggagctggactagcaggaccgaaaccttgctgagcttggaatacaaggtcaatgaagaaatgaagctgaaggtactagggcaggatagtattaccgtgacctttacgagcctgaacgagaccgtgaccctaaccgtgtctgctaacaattgcccccacgggatggcttacgacaagaggcttaataggaggatctctaatatggacgataaggtttacaaaatgtcccgcgcacttgctgaaataaagaagcggttccagaagactgtaacccagttcatcaactcgatcctcttggcagcgggattgtttacaattgagtaccccactaagaaggaagaggaggagttcgtacgcttcaaaatgaggagtaggacacatcccgagcgcctgcccaagctgagtctgtatagtggtgagagccttctcaggagccagagcgggcatctggagtccagtatcgctgaaacactcaaggacgagcccgagtcagctccagttagccccgtcagaaagactacaaaaatccacaccaaagctaaggtgacatctcggggaaaagccagggaaggaaggagccctaccagatgggcagcactgccctctgattgcccgctcgttctgaggaagttaatgctgaaggaggacacgagagctgggtgtaaatgtctggtgaaggctccactcgtgagcgacgtggaactggagcgattcctactcgcccctcgcgatccgtcacaagtgcttgtttttggcatcatatcgtctcagaactatacgtccaccggacagctccagtggctccttaacacactctacaatcaccagcagaggggccgcggttccccatgtattcagtgtcggtacgatagctatcgactgctccaatacgacctggattcacctttgcaggaagacccgcctcttatggtgaagaaaaattctgtcgtgcagggcatgatattaatgtttgctggcgggaaactcatttttggggggagagtcctcaacgggtatggcttgagtaaacagaatctcctgaaacaaatctttcggtcacagcaggattacaagatggggtatttcctgcccgacgattacaagttttccgtccccaactcagtgctgtcactcgaggacagcgagagtgtgaaaaaggctgagagtgaggatatacagggcagctcttcaagtctcgcacttgaggattatgtagaaaaagaattgtccctagaagccgagaagaccagagagcctgaagtggagcttcatcctctgtctcgcgactctaaaattacaagctggaagaagcaggcatccaaaaagtag

SEQ ID NO: 71964 - DNA, 2349 bp, Artificial Sequence
  derived and/or modified sequence
atggctaggcaggtaaggacacaccaggaaactttaaaccggttccagcagcaatcgattcatctgctaactgaactgctgagactgaagatgaaggctatggtggaaagcatgtcagtaggcgctaatccccttgacattactaggcgctttgtggaagccagccagcttttgcacctgaacgccaaggagatggcattcaactgcttaatcagtaccgcaggcaggtcaggatacagcagtggacagctgtggaaggaaagccttgccaatatgtctgccattggcgttaattccccttatcagttgatttaccatagctccacggcttgcctatcattctccttgtcagccggtaaagaggctaagaagaagattggtaaatctcgaacaaccgaggacgtgagtatgccaccactccacaggggtgtggggacccctgcaaacagtctggagtttagcgatccatgtcctgaagcccgagaaaagcttcaggagttgtgtcgacacattgaggccgagagagctacctggaagggtaggaacatttcgtacccaatgatcctgcgaaattacaaagctaaaatgcccagccacctgatgctcgccagaaagggggattcacagacacctggcttgcattaccctcctactgccggtgcacagaccctctcgcctacttcacaccctagtagcgctaaccaccacttctcacagcactgccaggaaggaaaggcacccaaaaaggcctttaagtttcattacaccttctacgatgggtcctcattcgtgtactacccttccggaaacgttgcagtttgccagatccccacatgttgccgcggaagaacaatcacctgtttattcaacgacattccgggattttcactcttggctctgtttaataccgagggacaaggatgcgtccactacaacctgaagacttcctgcccctatgtgctgattttggacgaggaaggcggtacaaccaatgatcagcaaggatatgtggtccacaagtggtcatggacctcccgcaccgagaccctgctgtctctggagtacaaggtgaacgaggaaatgaagctaaaggtgttgggccaggattccataaccgtgacattcacttctctgaatgaaacagttactttgaccgtgtccgctaacaattgcccacacggcatggcatacgacaagcgactcaatagaagaatttccaatatggatgataaggtatacaaaatgtctagagctctggccgagatcaaaaaaagatttcagaaaactgtcacccagtttataaatagcattttgctcgctgcaggactcttcaccattgaatatcccactaaaaaggaggaagaagaattcgtaaggttcaaaatgaggtcccgtacccatcctgagcggctgcccaaactgagcctctactctggagagagcctcctccggtctcaatcgggccaccttgagtctagtattgctgagaccttaaaggacgagccagagagcgctcccgtgtcccctgtcagaaaaaccactaaaattcacactaaggcaaaagttaccagtaggggcaaggcaagggaaggacggagtcccacgagatgggccgcattgccttctgattgtccattagtcttgcgcaaacttatgctcaaagaagatactagagcaggatgcaagtgcctcgtaaaagccccactggtgagtgatgtggaactcgaaagattcttactcgcaccaagagacccctcccaggtattggtgttcgggatcatctcaagccagaactatacttcaacaggccagttacagtggttacttaatacactgtacaatcaccagcagaggggaagggggagcccttgtatccagtgtaggtacgacagctaccgtctgctacaatacgaccttgatagcccactacaggaggaccccccattaatggtgaaaaagaactccgttgttcagggaatgatcttgatgtttgcaggcggtaaactgatctttggtgggagagtgctaaatggctatggcctgtccaagcagaatctgctgaaacagatcttcaggagccagcaggactataaaatgggctactttttgcccgacgattacaagttcagtgttcccaactcagtgctgtctcttgaagattccgagtctgtcaagaaagctgagtccgaagacattcaaggaagtagcagcagcctcgctctcgaagattacgttgaaaaagagctcagtttggaggcagaaaaaacgagagaaccagaggttgagctgcatcccctgagcagagactcgaaaatcacctcctggaaaaaacaggcaagtaagaagtag

SEQ ID NO: 71965 - DNA, 2349 bp, Artificial Sequence
  derived and/or modified sequence
atggcaaggcaggtgcgtacccaccaggagactctcaatagatttcaacagcagtctatacatttgctgaccgagctcttaaggctgaaaatgaaagcgatggtggaatcgatgagtgtgggagctaatcccctcgacatcaccagaagatttgtcgaagcctcgcagctgcttcaccttaacgccaaggaaatggcatttaactgcctgatctccacagcagggagatctggatattcttctggtcagctgtggaaggaaagcctggctaatatgagtgccatcggtgtcaattctccttatcagctgatctatcattcgtctacagcatgtctgtcgttctccctttctgctggaaaagaagccaagaaaaaaattggaaaaagccggaccacagaggatgtctcgatgccaccactgcacaggggagtaggtacgccagccaattctctggaattcagcgacccttgccccgaggctagagagaaactgcaagagctgtgtcggcacattgaggctgagcgcgctacatggaaaggtaggaatatatcttaccctatgatcttacggaattataaggctaaaatgccttcgcacctgatgctcgcccgaaaaggcgattcccaaaccccgggtctgcactatcctccaaccgccggtgcgcaaactctgtcgccgacatctcatcccagctcagccaatcatcatttttcacagcactgtcaggagggaaaggccccaaagaaagcctttaagtttcactataccttctacgatgggtcttctttcgtgtactaccccagcggcaatgtggcagtgtgtcagataccaacatgttgtcggggtaggaccataacctgtctgttcaatgacatacccggatttagtttgctggccttgtttaatacagaggggcagggatgcgtgcactacaacctgaagacctcctgtccttacgtgctgattttggatgaggagggcggaacgacgaacgaccaacaagggtatgtagtgcataagtggtcctggactagtcggaccgagactctgctctcgctcgagtacaaggtcaatgaagagatgaaacttaaggttctaggccaggacagcatcaccgtcacttttacttcactgaacgaaaccgtgacacttacggtgtcagcaaataattgtcctcatggcatggcgtacgataagcgattaaacagaagaatttcgaatatggatgacaaagtctacaaaatgagcagggctctggcagaaataaagaagagattccagaagaccgtcacacagttcatcaactcaatccttctggccgcaggcctgtttacaatcgagtatccaaccaagaaggaggaggaagagtttgttcggttcaagatgcggagtcggactcacccagaacgtctccctaaactgtcactctactccggggaatcgttactgaggtcccagtctgggcatcttgaatcaagtattgccgaaacactgaaagacgagcccgagagcgcgcctgtcagcccagtgcggaaaaccactaagatccacaccaaggccaaggtgacgtcacggggaaaggcaagggagggaagaagtcctactcgatgggctgcccttccatccgactgcccgctggtactccgcaagttgatgctgaaggaggacactagagccggttgcaagtgcttggtgaaggctccactggtctctgacgtggaactcgagcgattcctcctcgctcccagagacccgtcacaggttctggtatttggaatcatatcaagtcaaaactacacctccactggtcagttgcaatggttgctgaacacactgtacaatcatcagcagcggggacgcggatctccttgtatccagtgcagatatgacagctatcggctcctgcagtatgatctggactcccccctgcaagaagaccctcctctgatggtgaagaagaacagcgttgtgcagggaatgatcctcatgttcgcagggggtaaactaatattcggtggcagagtgcttaacggatatggcctgtccaagcaaaacttacttaaacagatcttcaggagccagcaggactacaagatgggctactttctccccgatgattacaaattttctgtgccaaactccgtgctgagcctcgaggatagtgagtcggtaaaaaaagctgagtccgaagacatccagggttcctcaagctcactggctcttgaagattacgtagagaaggagctcagtctcgaggcagagaagacccgcgagccagaggtggagctccaccctttgtcacgcgattcaaaaattacctcatggaaaaagcaggctagtaagaagtag

SEQ ID NO: 71966 - protein, 427 aa, Artificial Sequence
  derived and/or modified sequence
MGEETIGKKLPATTATPDSSKTEMDSRTKSKDYCKVIFPYEAQNDDELTIKEGDIVTLINKDCIDVGWWEGELNGRRGVFPDNFVKLLPPDFEKEGNRPKKPPPPSAPVIKQGAGTTERKHEIKKIPPERPEMLPNRTEEKERPEREPKLDLQKPSVPAIPPKKPRPPKTNSLSRPGALPPRRPERPVGPLTHTRGDSPKIDLAGSSLSGILDKDLSDRSNDIDLEGFDSVVSSTEKLSHPTTSRPKATGRRPPSQSLTSSSLSSPDIFDSPSPEEDKEEHISLAHRGVDASKKTSKTVTISQVSDNKASLPPKPGTMAAGGGGPAPLSSAAPSPLSSSLGTAGHRANSPSLFGTEGKPKMEPAASSQAAVEELRTQVRELRSIIETMKDQQKREIKQLLSELDEEKKIRLRLQMEVNDIKKALQSK

SEQ ID NO: 71967 - DNA, 1284 bp, Artificial Sequence
  derived and/or modified sequence
atgggcgaggagacaattggcaaaaagcttcctgccaccaccgccacacccgactcctcaaaaactgagatggattcacggaccaaatctaaggattactgtaaggtaatctttccttacgaggcccagaacgatgatgagctgacgattaaggaaggggacatcgtaacgctgatcaataaggactgcatagacgtgggctggtgggagggagagctgaacggcaggcgcggtgtatttcccgacaattttgtgaagctcctacctcccgatttcgagaaggaaggaaatcgaccaaagaaaccacccccccctagcgcacctgtaatcaaacaaggagccggcacgacagagcgaaagcacgaaatcaagaaaatcccacccgagcgtcctgagatgctgccaaatcgaactgaagagaaagagagaccagagcgtgaacccaagctggatctgcagaagcccagcgtccctgccatccccccaaagaagccgaggcctcctaagaccaactcgctgagccgtcccggagcgctgcctccacgccgacctgaaagacctgtgggccccctcacccatacgcgaggcgactcgccgaaaattgacctcgcaggctcgtctctatctggtattcttgacaaggacctgtccgaccggagtaatgatattgacctggaaggttttgattccgtggtgtcttcgacagaaaaactgtctcaccccactacctccaggccaaaagcaaccggcaggcgtccgccatctcagtccctaacatctagttcgctgagcagccccgatatcttcgacagccctagtcctgaagaagataaagaagaacacattagcttggcccaccggggggtcgatgcatccaagaaaacatcaaagaccgtcaccatttctcaagttagtgataacaaagcctctctgccccccaagccagggaccatggctgctggtggcggcgggcccgctcctctaagcagtgccgctccttcgccactgtcctcgagcctggggacagccgggcaccgcgcaaacagcccaagtctcttcgggacagaggggaaacccaaaatggaacctgcggccagttcccaggctgcagttgaggaactgcgaacacaggtgcgtgaattacgctctatcattgagacgatgaaggatcaacagaaacgagagataaaacaactgctgagcgaactggatgaagagaagaaaatccgcctgagactgcagatggaggtgaacgacattaaaaaggccctccagagcaagtag

SEQ ID NO: 71968 - DNA, 1215 bp, Artificial Sequence
  derived and/or modified sequence
atggatagtcgcacgaagtccaaggattactgcaaagtgatcttcccatatgaagcccagaacgacgatgaattaactataaaagagggcgacatagttaccctgatcaacaaggattgtattgatgtgggatggtgggagggtgaacttaatggacggcgtggggttttccctgataactttgtgaaattgctgccgcctgacttcgagaaagaaggaaacagacccaagaagcctcctccaccgtcagccccagtcataaagcaaggggccggcacgactgagcgcaagcatgaaatcaaaaagatccccccagaacgcccggagatgctgcctaaccggacggaggagaaggaacgcccagaacgggagcccaagctggatcttcagaaacccagtgttccagccatcccacccaagaagccacgacccccaaaaaccaatagcctctcccgtcccggggccttgcctccccgccggccagagaggcctgtggggcctcttacccatacacgaggggacagtccaaagatagacctggccggttcgtcactctccggcattctggataaagatttgtcagataggagtaacgatatcgatctggaaggtttcgatagtgtggtttcgtcgaccgaaaagctgagtcatcctacgacctctcggcccaaggctacaggacggcgacccccctcacagtcactcacctcatccagtctgtccagccctgacatctttgatagccccagcccagaggaagacaaagaggagcacatctccctagcgcataggggggtggacgccagcaaaaaaacctctaagactgtgaccatctcacaggtcagcgacaacaaagccagtctgccacccaagcctggtacaatggctgcaggcggtgggggcccagctcctctgtcaagcgctgccccgtcacctttgtctagttctcttgggacggctggccaccgggccaattcccccagcctttttggcacagaggggaaacctaaaatggagccagcagccagtagtcaggcagcggtcgaggagctgaggactcaagttagagaactccgcagtatcatcgagaccatgaaggaccagcaaaaaagagagattaaacaactgctgtcagagcttgacgaggagaagaaaatccgtttacgtctgcaaatggaggtgaatgacataaaaaaggcgttgcagagcaagtag

SEQ ID NO: 71969 - DNA, 1284 bp, Artificial Sequence
  derived and/or modified sequence
atgggagaggagaccatcggcaagaagctgcctgccaccacagccaccccagacagcagcaagacagagatggacagcaggaccaagagcaaggactactgcaaggtgatcttcccctatgaggcccagaatgatgatgagctgaccatcaaggagggggacatcgtgaccctcatcaacaaggactgcattgatgtgggctggtgggagggggagctgaatggccggcggggcgtcttcccagacaactttgtgaagctgctgcccccagactttgagaaggagggcaaccggcccaagaagcccccaccacccagcgcccctgtgatcaagcagggcgccggcaccacagagaggaagcatgagatcaagaagatccccccagagaggcctgagatgctgcccaacagaacagaggagaaggagaggcctgagcgggagcccaagctggacctgcagaagcccagcgtgcctgccatcccccccaagaagcccaggcctcccaagaccaacagcctgagcaggcctggggccctgcccccccggcggcctgagaggcctgtgggccccctgacccacaccaggggggacagccccaagattgacctggccggcagcagcctgagcggcatcctggacaaggacctgagtgacaggagcaatgacatcgacctggagggctttgacagcgtggtgagcagcacagagaagctgagccaccccaccaccagccggcccaaggccactggaagaagaccacccagccagagcctgaccagcagcagcctgagcagcccagacatctttgacagccccagccctgaggaggacaaggaggagcacatcagcctggcccaccggggcgtggatgccagcaagaagaccagcaagacagtgaccatcagccaggtgtctgacaacaaggccagcctgccccccaagccaggcaccatggccgccggcggcggcggccctgcccccctgagcagcgctgcccccagccccctgagcagcagcctgggcacagctggccaccgggccaacagccccagcctgtttggaacagagggcaagcccaagatggagcctgctgccagcagccaggccgctgtggaggagctgcggacccaggtgcgggagctgcggagcatcatcgagaccatgaaggaccagcagaagcgggagatcaagcagctgctgtctgagctggatgaggagaagaagatccggctgcggctgcagatggaggtgaatgacatcaagaaggccctgcagagcaagtag

SEQ ID NO: 71970 - DNA, 1215 bp, Artificial Sequence
  derived and/or modified sequence
atggacagcaggaccaagagcaaggactactgcaaggtgatcttcccctatgaggcccagaatgatgatgagctgaccatcaaggagggggacatcgtgaccctcatcaacaaggactgcattgatgtgggctggtgggagggggagctgaatggaagaagaggagtcttcccagacaactttgtgaagctgctgcccccagactttgagaaggagggcaaccggcccaagaagcccccacctccttctgcccctgtgatcaagcagggcgccggcaccacagagaggaagcatgagatcaagaagatccccccagagaggcctgagatgctgcccaacagaacagaggagaaggagaggcctgagcgggagcccaagctggacctgcagaagcccagcgtgcctgccatcccccccaagaagccccggccccccaagaccaacagcctgagcaggcctggggccctgcccccaagaagacctgagaggcctgtgggccccctgacccacaccaggggggacagccccaagattgacctggccggcagcagcctgagcggcatcctggacaaggacctgagtgacaggagcaatgacatcgacctggagggctttgattctgtggtgagcagcacagagaagctgagccaccccaccaccagccggcccaaggccaccggccggcggccccccagccagagcctgaccagcagcagcctgagcagcccagacatctttgacagccccagccctgaggaggacaaggaggagcacatcagcctggcccacagaggagtggatgccagcaagaagaccagcaagacagtgaccatcagccaggtgtctgacaacaaggccagcctgccccccaagccaggcaccatggctgctgggggcggcggccctgcccccctgagcagcgctgcccccagccccctgagcagcagcctgggcacagctggccaccgggccaacagccccagcctgtttggaacagagggcaagcccaagatggagcctgctgccagcagccaggccgctgtggaggagctgcggacccaggtgcgggagctgcggagcatcatcgagaccatgaaggaccagcagaagcgggagatcaagcagctgctgtctgagctggatgaggagaagaagatccggctgcggctgcagatggaggtgaatgacatcaagaaggccctgcagagcaagtag

SEQ ID NO: 71971 - DNA, 1284 bp, Artificial Sequence
  derived and/or modified sequence
atgggcgaggagaccatcggcaagaagctgcccgccaccaccgccacgccagactcaagcaagacggaaatggacagtcggaccaaatcgaaggattattgcaaggttatctttccttatgaagctcagaatgatgacgagcttactataaaggaaggagacatcgttaccttaattaataaagactgcattgatgtcggatggtgggaaggggagctcaacggcaggcgcggcgtcttcccagataatttcgtaaagctgctacccccggactttgagaaggaaggtaaccgaccaaagaaaccccctccccctagtgcacccgtcattaaacagggcgccgggactaccgagcgtaaacacgaaattaaaaaaattccacccgaaaggcccgagatgctgcccaatcgtaccgaagaaaaagaaaggccggaaagagagcctaagctggatctgcagaaaccctccgtcccagcaatccctcctaagaaacctagaccccccaaaacaaacagcctgagcaggcctggggccctacccccacgacggccggaacgacctgtcggacctctaactcacacgagaggggattcaccgaaaatcgacttggctgggagcagtttaagcggaatcctggataaggatctatccgatcgcagcaacgatatcgacctagaaggtttcgactccgtcgtgtccagtacagagaaactgtcgcaccctacaacttccaggcctaaggctaccgggcgtaggcctccatcacagtcactgacgagctcgagcctgagctcacccgatatttttgactccccaagcccagaagaggataaagaggaacacatctccttggcccatagaggggtcgatgcaagtaaaaagacatcaaagacagtgaccataagccaggtctccgataacaaagctagcctgccccccaagcccggaacaatggcagccggagggggcggccctgcacctttgagttcggccgccccctcccctttgagttcaagcttaggaactgccggacaccgcgctaacagccccagtctatttgggaccgaagggaaacccaagatggaaccagcagcttcttcccaggcagccgtggaggagctgcgaactcaggtgcgcgaactgagaagcatcatcgagactatgaaggaccagcagaagcgggaaatcaaacagcttctgtctgagttggacgaggaaaagaaaatccggctgagactccagatggaagttaatgatatcaagaaagctcttcagtccaaatag

SEQ ID NO: 71972 - DNA, 1215 bp, Artificial Sequence
  derived and/or modified sequence
atggacagccggaccaagagcaaggactactgcaaggtgatcttcccttatgaggcccagaacgatgacgagcttactatcaaggaaggcgacatcgtgactctgattaacaaagactgtatcgacgtaggttggtgggaaggtgaactcaatggccggcgcggagtttttccggacaacttcgtgaaactgctgcctccggattttgagaaagaaggcaaccggcccaaaaaacccccccccccatcagccccagtgatcaaacagggcgctgggacgacagaaaggaaacatgagatcaagaaaattccaccagagcgcccagagatgctacccaatagaacagaagagaaggagcggcctgaacgcgagcccaagctggatctccagaaaccttccgtccctgccattccacccaaaaagccaagacctccaaaaactaattctctgagccgtcccggagcactccctccgaggaggcccgagcgccccgtgggtcccctgacacacacccgcggggattcgcctaaaattgacttagctggttcctcactatcaggaatccttgataaagatcttagcgaccgttcaaatgacatcgacctggaaggattcgattcagtcgtcagctctacagaaaaactttcccaccctaccacatcacgtcccaaggccaccggaaggcgcccgccatctcaatccctaacaagttcaagcctatctagccccgacatcttcgactcaccttctccagaagaggataaagaggaacacataagtctcgcccaccggggcgtggatgcctccaagaaaacaagcaagacagttacaatctcccaggtttctgataataaggcctccctgccaccaaaaccaggtaccatggcagccggcggggggggacccgcacctctctccagcgcagcgccaagtccactatcttcttcactgggcacggccgggcatcgggcaaactcgccatccctattcggtacggagggaaagcccaaaatggagcctgcggccagctctcaagccgctgtagaagaactgagaacccaggtacgagaattaagatccattattgagacaatgaaggatcagcagaagcgagaaattaaacagctgctgagcgagctcgacgaggaaaaaaagatcagactccggctccagatggaagtgaatgacatcaagaaggctctgcagagcaagtag

SEQ ID NO: 71973 - DNA, 1284 bp, Artificial Sequence
  derived and/or modified sequence
atgggtgaggagacaatcggcaaaaaattaccagctaccacagcaacaccggactcttctaaaaccgagatggatagtcggactaaatcaaaggattactgcaaagtgattttcccatatgaagcccagaacgacgacgaactcaccataaaggagggggacatcgtgacccttattaacaaggactgtattgatgtagggtggtgggaaggggaactgaacgggaggcggggtgttttccccgacaacttcgtgaagctcctgcctcccgattttgaaaaggagggaaaccgcccaaaaaagcctccgcctccaagcgctcctgtgattaaacagggcgctggaactacggagaggaaacacgagataaagaaaatcccacctgaacgccctgagatgctacctaaccgcaccgaagagaaagagaggccagaacgcgagcccaaactcgatcttcaaaagccatccgtgcctgctatccctcctaaaaagccccgaccccctaaaactaactcactaagcagacctggagctctccctccacgcaggcccgagagaccagttggcccattgactcatacacgcggagacagcccaaagatcgacctggccggatcgtcgcttagcggaattttggataaagaccttagcgacaggtcaaacgacatcgatctggaggggttcgatagcgtcgtgagctccactgagaagctgtcccacccgactaccagcagaccgaaagccactgggcgtaggcccccaagtcagagcctaacgtctagctcgctgagcagtccggacatttttgacagtcctagccccgaagaggacaaggaggagcatatttctcttgcgcatagaggagtggacgccagtaaaaagacatccaagaccgtcactatttctcaggttagcgataataaagcctcactgcccccaaagcccggaactatggctgcgggagggggtgggccagctccattatcgtctgctgcaccatcacccttatcttcttccctggggaccgctgggcatcgcgctaattcccctagtttattcggcaccgaggggaagccaaagatggaaccagctgcgagcagtcaggccgcagtggaagaactgcgtacacaggtgcgcgagctccgatctatcattgaaactatgaaggaccagcaaaagcgagagattaaacaattgctcagtgagctggatgaggagaaaaaaatccgtctgcggctgcagatggaagtgaacgatataaaaaaagccctacagtctaagtag

SEQ ID NO: 71974 - DNA, 1215 bp, Artificial Sequence
  derived and/or modified sequence
atggacagtcgcacaaaatctaaggactactgtaaggtgatatttccttacgaggcgcagaatgacgatgagctgacaatcaaggagggcgacatagttaccttgataaataaagattgtattgacgtcgggtggtgggaaggggaacttaacgggagaaggggcgtattcccagacaatttcgttaaactactgcctcccgacttcgagaaggaaggcaataggccgaagaaacccccaccgccttcagccccagttatcaagcagggagccggaaccaccgaaagaaagcacgagattaagaagatcccccctgagaggccagagatgcttcccaataggactgaagaaaaagaaagaccagagcgggaaccgaaacttgacctccagaagccatctgtgcctgcgataccacccaagaagcctcggcctcctaaaacaaatagccttagccgaccgggagccttgccccctcgaaggcccgagcgcccagttggccctctgacgcataccaggggcgacagtcctaaaatcgacctggccggttccagcctctccggcattcttgacaaagatctatcagaccgcagcaacgatatcgacctggagggattcgacagcgtggtgtcgtctacagagaaactttcgcaccctacaaccagtagacctaaagctaccgggcgaagaccgccttcccagagcctgacaagctccagcttgtccagtcctgatatattcgatagtccatcacctgaagaggataaagaggagcacatatcgttagctcaccgtggagtggacgcctccaaaaagacgtccaagaccgtgacaatcagtcaagtctcagataacaaagcctcgcttccccctaagcccggtacgatggctgccggtggcggagggcctgcccctctgtcgtctgctgccccatccccacttagttcgagcttgggtacagcagggcatcgtgccaacagtcctagtttatttggaaccgaagggaaaccaaagatggaacctgctgccagttctcaggcagcggtcgaggagctcagaactcaggtccgcgaactccgctcaattatcgaaaccatgaaagaccagcagaaacgagagattaaacaactcttgagcgagctcgacgaggagaaaaagatccgattgagattacagatggaagtgaatgacattaagaaagcgctacaatccaaatag

SEQ ID NO: 71975 - DNA, 3819 bp, Artificial Sequence
  derived and/or modified sequence
tttggtcccaagtatgactcagggttaggctgggtcctcaggctccgtgctgttggaaggaagtgggaggattccaggggagttctgggaccttttcaaactgaagagaggaggctggctgcatcatgggagaagagactattgggaagaagttacctgcaactacagcaactccagactcatcaaaaacagaaatggacagcaggacaaagagcaaggattactgcaaagtaatatttccatatgaggcacagaatgatgatgaattgacaatcaaagaaggagatatagtcactctcatcaataaggactgcatcgacgtaggctggtgggaaggagagctgaacggcagacgaggcgtgttccccgataacttcgtgaagttacttccaccggactttgaaaaggaagggaatagacccaagaagccaccgcctccatccgctcctgtcatcaaacaaggggcaggcaccactgagagaaaacatgaaattaaaaagatacctcctgaaagaccagaaatgcttccaaacagaacagaagaaaaagaaagaccagagagagagccaaaactggatttacagaagccctccgttcctgccataccgccaaaaaagcctcggccacctaagaccaattctctcagcagacctggcgcactgcccccgagaaggccggagagaccggtgggtccgctgacacacaccaggggtgacagtccaaagattgacttggccggcagttcgctatctggcatcctggacaaagatctctcggaccgcagcaatgacattgacttagaaggttttgactccgtggtatcatctactgagaaactcagtcatccgaccacaagcagaccaaaagctacagggaggcggcctccgtcccagtccctcacatcttcatccctttcaagccctgatatcttcgactccccaagtcccgaagaggataaggaggaacacatttcacttgcgcacagaggagtggacgcgtcaaagaaaacttccaagactgttaccatatcccaagtgtctgacaacaaagcatccctgccgcccaagccggggaccatggcagcaggtggcggtgggccagcccctctgtcctcagcggcgccctcccccctgtcatcctctttgggaacagctggacacagagccaactccccgtctctgttcggcacggaaggaaaaccaaagatggagcctgcggccagcagccaggcggccgtggaggagctaaggacacaggtccgcgagctgaggagcatcatcgagaccatgaaggaccagcagaaacgagagattaaacagttattgtctgagttggatgaagagaagaaaatccggcttcggttgcagatggaagtgaacgacataaagaaagctctacaatcaaaatgaatacttgatcaatgaaatgtcacattattcatcctgagtccgagactcaaattttctgccccagccaaaataatcttgtgccaaaagattaaaggtttgcctcaaaatgtccctgtttgaaagattagcacaaaagtcttgatagcacaacacaaattccatccaagaggagaatcttccccagggtttagtcctggggctggcactcgttgtgacttacacagagcaaaattgtgctaaaggcttttctactctgagatctcaatgcgaaatgaaaactcaggcagtttagtccatagtggtactattttgatgatattttccattaataaaatgtaatttcagattattcgtttacaagctttataattttatgattttttaatcgtgttttgtcacagacttccctagtgtttgtactacacgtagtcagaagcgagtgtccttttcttttgcttcaggctaagagctgcctcgctctttgtccccccattaggattctattacatatgcaattgtaggttcaacctgtccctttccctgccagcaaaccccaccaccctaagagaaattttagcttatatatgacggtatatttacaaaaagagaaagagaaaatctggtatttgcaatgatctgtgccttctttttaccaccctcttgattggagcttttgtgatgcagctaccatgattcaaaaaaattaaaaattaaaaaaaaaaaatctgccacttatccaagtccactagaggccactgtcttcaaagcttctctcaccctagccaaaggtcctaagaggagacagctgtgaagttgggcgtgctctgtggtaccagctgtgacttttctatttctcctagttttaggttgttcatgaaactagaaatgtcatcctgcttgatttttcatcagccaagttaaacccctgctttctgtcctttgcaccttttgcgtgaacagaatatgcattattaaagcaaaaataaataaaagtaaaatgcaaatgaaaacaagggagggaaagttgtattatttcctgcactgggttacccgtgtgtgttatcgtttaaactgtattcacataatgtcatttgccttgctcacttgtaaccccttcctcaggtccaagagaatgggaggagggtcatgttgaagtgtagccactggaactttcttgcatttatggagttgctttttctttcccaaggaaactgatgtttgcctgtccgctttatctttgtagtacatgaacagttcagccttagactatgtaactgttttctcatccttagctgaaaatgaggggcctactgtattgcgagactgttcaggggtaggggtggagggggtggtcccttaatggcccctgaagatgttggatgtgtttctcaaaagctgctttgtctctttcctgagtttaatagtgaaactactaaacattaatagatttgcacagccacaaagaatgagagttgataataccgaagaagtgatgcaaaaacaaaaaatcacattactgatcattgatagtattacaaataaatgtctcttcctttctcttcctcccttcctccccctgccttcctcttaacctatgtgctcatccttgctacttgaggctgttatttccctccgagtatttaaggagcccaaacaccttggtcttcctgggtgggggcataattaagggaagggagtgtataaggaaggaaacctcataccctccattcccatccctggatatattgccttttcagcagcctcgggttcagtgtgcttggggtcaggagtgccaggttcccaagagcagcgtaaaacatccctgtaccccttgacagttataagcatttctgcgttaaacttgaagattccagagattccccacgacctaatgatctaagaatgcagattggattctttgatgttcaaatttctcatttacttatgaaaatccctaattatatagttttatataatgtgtatacagagtaggattgttgatgaaattgagcggttggaacaccctcatggaacactggcaacatggaatgtagagagctgatgtcttccccctcatagaggccattggcttcctttgtataaggagagggagaagtgattctggaaggagaagttggtatgtctagcttcattgcggcccctcgggctacccagcaagaggattctgcatcaaggaactggacgagccgctacccaaactgccaccatctttactctttacaaaatggacccatcgagaatgttgaaaagcttggaagtatcacttttgaaaaaaaaaaaaattattttgcattcagcatggactcgaccaggcatctatggagattatttttttgcttcattttataaagttgtatttagaaaagtcttaagtattgtgctttgtaaa

SEQ ID NO: 71976 - DNA, 1549 bp, Artificial Sequence
  derived and/or modified sequence
actcttgagggtcaccgacatttggagttttctttgtgagtggagcagctactattgggaagaagttacctgcaactacagcaactccagactcatcaaaaacagaaatggacagcaggacaaagagcaaggattactgcaaagtaatatttccatatgaggcacagaatgatgatgaattgacaatcaaagaaggagatatagtcactctcatcaataaggactgcatcgacgtaggctggtgggaaggagagctgaacggcagacgaggcgtgttccccgataacttcgtgaagttacttccaccggactttgaaaaggaagggaatagacccaagaagccaccgcctccatccgctcctgtcatcaaacaaggggcaggcaccactgagagaaaacatgaaattaaaaagatacctcctgaaagaccagaaatgcttccaaacagaacagaagaaaaagaaagaccagagagagagccaaaactggatttacagaagccctccgttcctgccataccgccaaaaaagcctcggccacctaagaccaattctctcagcagacctggcgcactgcccccgagaaggccggagagaccggtgggtccgctgacacacaccaggggtgacagtccaaagattgacttggccggcagttcgctatctggcatcctggacaaagatctctcggaccgcagcaatgacattgacttagaaggttttgactccgtggtatcatctactgagaaactcagtcatccgaccacaagcagaccaaaagctacagggaggcggcctccgtcccagtccctcacatcttcatccctttcaagccctgatatcttcgactccccaagtcccgaagaggataaggaggaacacatttcacttgcgcacagaggagtggacgcgtcaaagaaaacttccaagactgttaccatatcccaagtgtctgacaacaaagcatccctgccgcccaagccggggaccatggcagcaggtggcggtgggccagcccctctgtcctcagcggcgccctcccccctgtcatcctctttgggaacagctggacacagagccaactccccgtctctgttcggcacggaaggaaaaccaaagatggagcctgcggccagcagccaggcggccgtggaggagctaaggacacaggtccgcgagctgaggagcatcatcgagaccatgaaggaccagcagaaacgagagattaaacagttattgtctgagttggatgaagagaagaaaatccggcttcggttgcagatggaagtgaacgacataaagaaagctctacaatcaaaatgaatacttgatcaatgaaatgtcacattattcatcctgagtccgagactcaaattttctgccccagccaaaataatcttgtgccaaaagattaaaggtttgcctcaaaatgtccctgtttgaaagattagcacaaaagtcttgatagcacaacacaaattccatccaagaggagaatcttccccagggtttagtcctggggctggcactcgttgtgacttacacagagc

SEQ ID NO: 71977 - DNA, 1284 bp, Artificial Sequence
  derived and/or modified sequence
atgggcgaggagaccatcggcaagaagctgcccgccaccaccgccacccccgacagcagcaagaccgagatggacagcagaaccaagagcaaggactactgcaaggtgatcttcccctacgaggcccagaacgacgacgagctgaccatcaaggagggcgacatcgtgaccctgatcaacaaggactgcatcgacgtgggctggtgggagggcgagctgaacggcagaagaggcgtgttccccgacaacttcgtgaagctgctgccccccgacttcgagaaggagggcaacagacccaagaagccccccccccccagcgcccccgtgatcaagcagggcgccggcaccaccgagagaaagcacgagatcaagaagatcccccccgagagacccgagatgctgcccaacagaaccgaggagaaggagagacccgagagagagcccaagctggacctgcagaagcccagcgtgcccgccatcccccccaagaagcccagaccccccaagaccaacagcctgagcagacccggcgccctgccccccagaagacccgagagacccgtgggccccctgacccacaccagaggcgacagccccaagatcgacctggccggcagcagcctgagcggcatcctggacaaggacctgagcgacagaagcaacgacatcgacctggagggcttcgacagcgtggtgagcagcaccgagaagctgagccaccccaccaccagcagacccaaggccaccggcagaagaccccccagccagagcctgaccagcagcagcctgagcagccccgacatcttcgacagccccagccccgaggaggacaaggaggagcacatcagcctggcccacagaggcgtggacgccagcaagaagaccagcaagaccgtgaccatcagccaggtgagcgacaacaaggccagcctgccccccaagcccggcaccatggccgccggcggcggcggccccgcccccctgagcagcgccgcccccagccccctgagcagcagcctgggcaccgccggccacagagccaacagccccagcctgttcggcaccgagggcaagcccaagatggagcccgccgccagcagccaggccgccgtggaggagctgagaacccaggtgagagagctgagaagcatcatcgagaccatgaaggaccagcagaagagagagatcaagcagctgctgagcgagctggacgaggagaagaagatcagactgagactgcagatggaggtgaacgacatcaagaaggccctgcagagcaagtag

SEQ ID NO: 71978 - DNA, 1215 bp, Artificial Sequence
  derived and/or modified sequence
atggacagcagaaccaagagcaaggactactgcaaggtgatcttcccctacgaggcccagaacgacgacgagctgaccatcaaggagggcgacatcgtgaccctgatcaacaaggactgcatcgacgtgggctggtgggagggcgagctgaacggcagaagaggcgtgttccccgacaacttcgtgaagctgctgccccccgacttcgagaaggagggcaacagacccaagaagccccccccccccagcgcccccgtgatcaagcagggcgccggcaccaccgagagaaagcacgagatcaagaagatcccccccgagagacccgagatgctgcccaacagaaccgaggagaaggagagacccgagagagagcccaagctggacctgcagaagcccagcgtgcccgccatcccccccaagaagcccagaccccccaagaccaacagcctgagcagacccggcgccctgccccccagaagacccgagagacccgtgggccccctgacccacaccagaggcgacagccccaagatcgacctggccggcagcagcctgagcggcatcctggacaaggacctgagcgacagaagcaacgacatcgacctggagggcttcgacagcgtggtgagcagcaccgagaagctgagccaccccaccaccagcagacccaaggccaccggcagaagaccccccagccagagcctgaccagcagcagcctgagcagccccgacatcttcgacagccccagccccgaggaggacaaggaggagcacatcagcctggcccacagaggcgtggacgccagcaagaagaccagcaagaccgtgaccatcagccaggtgagcgacaacaaggccagcctgccccccaagcccggcaccatggccgccggcggcggcggccccgcccccctgagcagcgccgcccccagccccctgagcagcagcctgggcaccgccggccacagagccaacagccccagcctgttcggcaccgagggcaagcccaagatggagcccgccgccagcagccaggccgccgtggaggagctgagaacccaggtgagagagctgagaagcatcatcgagaccatgaaggaccagcagaagagagagatcaagcagctgctgagcgagctggacgaggagaagaagatcagactgagactgcagatggaggtgaacgacatcaagaaggccctgcagagcaagtag

SEQ ID NO: 71979 - DNA, 1488 bp, Artificial Sequence
  derived and/or modified sequence
atgctgtacgccttctggttcagccacagcagcagcgccgagcaccccggcgccagcaagccccccatcagcagcagcagcatgaccagcagaatcctgctgagacagcagctgatgagagagcagatgcaggagcaggagagaagagagcagcagcagaagctgcaggccgcccagttcatgcagcagagagtgcccgtgagccagacccccgccatcaacgtgagcgtgcccaccaccctgcccagcgccacccaggtgcccatggaggtgctgaaggtgcagacccacctggagaaccccaccaagtaccacatccagcaggcccagagacagcaggtgaagcagtacctgagcaccaccctggccaacaagcacgccaaccaggtgctgagcctgccctgccccaaccagcccggcgaccacgtgatgccccccgtgcccggcagcagcgcccccaacagccccatggccatgctgaccctgaacagcaactgcgagaaggagggcttctacaagttcgaggagcagaacagagccgagagcgagtgccccggcatgaacacccacagcagagccagctgcatgcagatggacgacgtgatcgacgacatcatcagcctggagagcagctacaacgaggagatcctgggcctgatggaccccgccctgcagatggccaacaccctgcccgtgagcggcaacctgatcgacctgtacggcaaccagggcctgcccccccccggcctgaccatcagcaacagctgccccgccaacctgcccaacatcaagagagagctgaccgagagcgaggccagagccctggccaaggagagacagaagaaggacaaccacaacctgatcgagagaagaagaagattcaacatcaacgacagaatcaaggagctgggcaccctgatccccaagagcaacgaccccgacatgagatggaacaagggcaccatcctgaaggccagcgtggactacatcagaaagctgcagagagagcagcagagagccaaggagctggagaacagacagaagaagctggagcacgccaacagacacctgctgctgagaatccaggagctggagatgcaggccagagcccacggcctgagcctgatccccagcaccggcctgtgcagccccgacctggtgaacagaatcatcaagcaggagcccgtgctggagaactgcagccaggacctgctgcagcaccacgccgacctgacctgcaccaccaccctggacctgaccgacggcaccatcaccttcaacaacaacctgggcaccggcaccgaggccaaccaggcctacagcgtgcccaccaagatgggcagcaagctggaggacatcctgatggacgacaccctgagccccgtgggcgtgaccgaccccctgctgagcagcgtgagccccggcgccagcaagaccagcagcagaagaagcagcatgagcatggaggagaccgagcacacctgctag

SEQ ID NO: 71980 - DNA, 1407 bp, Artificial Sequence
  derived and/or modified sequence
atgaccagcagaatcctgctgagacagcagctgatgagagagcagatgcaggagcaggagagaagagagcagcagcagaagctgcaggccgcccagttcatgcagcagagagtgcccgtgagccagacccccgccatcaacgtgagcgtgcccaccaccctgcccagcgccacccaggtgcccatggaggtgctgaaggtgcagacccacctggagaaccccaccaagtaccacatccagcaggcccagagacagcaggtgaagcagtacctgagcaccaccctggccaacaagcacgccaaccaggtgctgagcctgccctgccccaaccagcccggcgaccacgtgatgccccccgtgcccggcagcagcgcccccaacagccccatggccatgctgaccctgaacagcaactgcgagaaggagggcttctacaagttcgaggagcagaacagagccgagagcgagtgccccggcatgaacacccacagcagagccagctgcatgcagatggacgacgtgatcgacgacatcatcagcctggagagcagctacaacgaggagatcctgggcctgatggaccccgccctgcagatggccaacaccctgcccgtgagcggcaacctgatcgacctgtacggcaaccagggcctgcccccccccggcctgaccatcagcaacagctgccccgccaacctgcccaacatcaagagagagctgaccgagagcgaggccagagccctggccaaggagagacagaagaaggacaaccacaacctgatcgagagaagaagaagattcaacatcaacgacagaatcaaggagctgggcaccctgatccccaagagcaacgaccccgacatgagatggaacaagggcaccatcctgaaggccagcgtggactacatcagaaagctgcagagagagcagcagagagccaaggagctggagaacagacagaagaagctggagcacgccaacagacacctgctgctgagaatccaggagctggagatgcaggccagagcccacggcctgagcctgatccccagcaccggcctgtgcagccccgacctggtgaacagaatcatcaagcaggagcccgtgctggagaactgcagccaggacctgctgcagcaccacgccgacctgacctgcaccaccaccctggacctgaccgacggcaccatcaccttcaacaacaacctgggcaccggcaccgaggccaaccaggcctacagcgtgcccaccaagatgggcagcaagctggaggacatcctgatggacgacaccctgagccccgtgggcgtgaccgaccccctgctgagcagcgtgagccccggcgccagcaagaccagcagcagaagaagcagcatgagcatggaggagaccgagcacacctgctag

SEQ ID NO: 71981 - DNA, 1488 bp, Artificial Sequence
  derived and/or modified sequence
atgctatatgccttctggttttctcactcgtccagtgccgagcatccaggagcttcgaagcctcccatcagttcgtccagcatgaccagcagaattctgctcagacagcagctgatgcgggagcagatgcaagaacaggagagaagggaacagcagcagaaactccaggccgcacagtttatgcagcagagggtccctgtgtctcagacaccagctattaatgtcagcgtgcctacaactctgccaagtgcaactcaggtccccatggaagtgctgaaagtacagacacatctggagaacccgaccaagtaccacattcagcaggcccagagacagcaggtgaagcagtacctctccaccacactggctaacaaacacgccaatcaagtgttaagtttgccatgtcctaatcagccgggggatcacgtcatgcctccagtgccagggagctctgctccaaatagcccgatggctatgctgaccttgaattcaaattgtgagaaggagggattctacaaattcgaagaacaaaatcgcgcagagagcgaatgtcccggaatgaacactcattctcgggcgtcgtgtatgcagatggatgatgtgattgacgatataatctcattggaaagcagttacaacgaggagatcctcgggcttatggatcccgcgttgcagatggccaatacattacctgtctcaggtaacctaatagacctttatggtaatcagggcctacctcccccaggactcaccatttccaattcctgcccagcgaacctgcccaacatcaagcgggagttgaccgaatcagaagcgcgcgcattggccaaagaacgacagaagaaggacaatcacaatctcatcgaacgcaggaggcggtttaatatcaatgacaggataaaagaactgggcactttaatccctaagagtaatgatccagatatgagatggaataaaggaacgatcctgaaagccagtgtggactacattcgcaagctgcagcgcgagcaacagcgtgccaaggagctggaaaatcgccaaaaaaagctggaacatgcgaatcggcacctgttgttgcgcatccaagaacttgagatgcaggcacgtgcacatgggctgtctttaattccttcaactggactctgttcaccagatctggtgaaccgcattattaaacaggagcccgtccttgagaattgcagtcaggacctgctgcagcatcacgcggacctgacatgtactactaccctcgacctgaccgacggcacaatcacgtttaacaacaatctggggaccggaaccgaagctaatcaagcatacagcgtccctacaaagatgggcagcaagcttgaggacatcttgatggatgataccctttcaccagtgggagtgactgatcccttgttatcgtcagtatcaccgggcgccagcaagacatcgtccagacgcagttccatgagcatggaagaaaccgaacacacctgttag

SEQ ID NO: 71982 - DNA, 1407 bp, Artificial Sequence
  derived and/or modified sequence
atgacatcacggatccttttgcgccagcaattaatgcgcgagcagatgcaggagcaagaacggcgggaacaacagcagaagctgcaagctgcccagttcatgcagcagcgtgtgcctgtgtctcaaaccccagctatcaatgttagcgtgcccacgactcttccatctgctacacaggtaccaatggaggtgctgaaggtccagactcatttagaaaatcccaccaaatatcacatccagcaggcccagcgccagcaggtcaaacaatatttaagcactactcttgcaaataagcacgcaaaccaagtgcttagtctgccgtgtcctaatcagcctggtgaccatgtgatgcctcctgttcctggtagttccgcacctaactctccgatggccatgctgacattaaatagtaactgtgagaaggagggcttttacaagttcgaagaacagaatagggccgagtctgaatgtcctggcatgaatactcatagccgcgctagctgcatgcagatggatgacgtgattgatgacattattagtctagagagtagttacaacgaagagatcctgggactgatggacccggcactacagatggccaataccctccctgtctccggaaatttgatagatttatatgggaaccagggacttccccctccagggttaaccatctcaaacagttgcccagctaaccttccaaacatcaagcgcgagcttacagagtctgaggctcgggccctcgcaaaagaaagacagaagaaagacaaccataatctgatagaacgccgcaggcgcttcaacattaacgaccgcattaaagagctcggtacactaatccctaagtccaacgacccagacatgcgctggaacaaagggaccattctgaaagcaagcgtcgactatattcgaaagctacagcgcgaacagcagcgcgccaaggaacttgaaaatcgccagaaaaaattggaacacgccaatcgacacctcctgctgcgaattcaggaacttgagatgcaggctcgtgcacacgggctgtcccttatcccgtctactgggttatgtagtcctgatttggttaacaggataattaagcaggaaccggtgctcgagaactgtagccaggatctcctgcagcaccacgctgacttaacctgcactaccaccctggatttgactgatggtactatcacttttaataataatctcggtaccggaacggaggcaaatcaggcgtattctgtaccaacaaagatggggtcgaaactcgaggatatccttatggacgacactctcagcccagtcggggtaacggaccccctgctgtccagtgtttcccccggggcatccaaaacctccagcaggcgctcttcaatgagtatggaggagactgaacacacttgctag

SEQ ID NO: 71983 - DNA, 1488 bp, Artificial Sequence
  derived and/or modified sequence
atgctgtatgccttctggttcagccacagcagcagcgctgagcaccctggggccagcaagccacccatcagcagcagctccatgaccagccgcatcctgctgcggcagcagctgatgagggagcagatgcaggagcaggagcggcgggagcagcagcagaagctgcaggccgcccagttcatgcagcagagggtgcctgtgtcccagaccccagccatcaacgtgtctgtgcccaccaccctgcccagcgccacccaggtgcccatggaggtgctgaaggtgcagacccacctggagaaccccaccaagtaccacatccagcaggcccagaggcagcaggtgaagcagtacctgagcaccaccctggccaacaagcacgccaaccaggtgctgagcctgccctgccccaaccagcccggggaccacgtgatgcctcctgtgcccggcagcagcgcccccaacagccccatggccatgctgaccctgaacagcaactgtgagaaggagggcttctacaagtttgaggagcagaacagagctgagagtgaatgtcctggcatgaacacccacagccgggccagctgcatgcagatggatgatgtgattgatgacatcatcagcctggagagcagctacaatgaggagatcctgggcctgatggaccctgccctgcagatggccaacaccctgcctgtgtctggcaacctgattgacctgtatggcaaccagggcctgcccccacctggcctgaccatcagcaacagctgcccagccaacctgcccaacatcaagcgggagctgacagagagcgaggcccgggccctggccaaggagcggcagaagaaggacaaccacaacctgattgaaagaagaagacgcttcaacatcaatgaccgcatcaaggagctgggcaccctcatccccaagagcaatgaccctgacatgcgctggaacaagggcaccatcctgaaggcctctgtggactacatcaggaagctgcagcgggagcagcagagggccaaggagctggagaaccggcagaagaagctggagcacgccaacagacacctgctgctgcgcatccaggagctggagatgcaggcccgggcccacggcctgagcctcatccccagcacaggcctgtgcagcccagacctggtgaaccgcatcatcaagcaggagcctgtgctggagaactgcagccaggacctgctgcagcaccacgccgacctgacctgcaccaccaccctggacctgacagatggcaccatcaccttcaacaacaacctgggcaccggcacagaggccaaccaggcctacagcgtgcccaccaagatgggcagcaagctggaggacatcctgatggatgacaccctgagccctgtgggcgtgacagaccccctgctgagctctgtgtcccctggggccagcaagaccagcagccgccgcagctccatgtccatggaggagacagagcacacctgctag

SEQ ID NO: 71984 - DNA, 1407 bp, Artificial Sequence
  derived and/or modified sequence
atgaccagccgcatcctgctgcggcagcagctgatgagggagcagatgcaggagcaggagcggcgggagcagcagcagaagctgcaggccgcccagttcatgcagcagagggtgcctgtgtcccagaccccagccatcaacgtgtctgtgcccaccaccctgcccagcgccacccaggtgcccatggaggtgctgaaggtgcagacccacctggagaaccccaccaagtaccacatccagcaggcccagaggcagcaggtgaagcagtacctgagcaccaccctggccaacaagcacgccaaccaggtgctgagcctgccctgccccaaccagcccggggaccacgtgatgcctcctgtgcccggcagcagcgcccccaacagccccatggccatgctgaccctgaacagcaactgtgagaaggagggcttctacaagtttgaggagcagaacagagctgagagcgagtgccccggcatgaacacccacagccgggccagctgcatgcagatggatgatgtgattgatgacatcatcagcctggagagcagctacaatgaggagatcctgggcctgatggaccctgccctgcagatggccaacaccctgcctgtgtctggcaacctgattgacctgtatggcaaccagggcctgcccccacctggcctgaccatcagcaacagctgcccagccaacctgcccaacatcaagcgggagctgacagaaagtgaggcccgggccctggccaaggagcggcagaagaaggacaaccacaacctgattgaaagaagaagacgcttcaacatcaatgaccgcatcaaggagctgggcaccctcatccccaagagcaatgaccctgacatgcgctggaacaagggcaccatcctgaaggcctctgtggactacatcaggaagctgcagcgggagcagcagagggccaaggagctggagaaccggcagaagaagctggagcacgccaacagacacctgctgctgcgcatccaggagctggagatgcaggcccgggcccacggcctgagcctcatccccagcacaggcctgtgcagcccagacctggtgaaccgcatcatcaagcaggagcctgtgctggagaactgcagccaggacctgctgcagcaccacgccgacctgacctgcaccaccaccctggacctgacagatggcaccatcaccttcaacaacaacctgggcactggaacagaggccaaccaggcctacagcgtgcccaccaagatgggcagcaagctggaggacatcctgatggatgacaccctgagccctgtgggcgtgacagaccccctgctgagctctgtgtcccctggggccagcaagaccagcagcagaagaagctccatgtccatggaggagacagagcacacctgctag

SEQ ID NO: 71985 - DNA, 1488 bp, Artificial Sequence
  derived and/or modified sequence
atgctgtacgccttctggttcagccacagcagcagcgccgagcaccctggcgcatccaagcctccaattagcagtagttcaatgacaagcagaatactgttgagacaacaactgatgcgggagcaaatgcaggagcaagaacggcgagagcagcaacagaagctgcaggccgctcagttcatgcagcagcgcgtgcctgtttcgcagaccccagcaattaacgtgtctgtgcccactacactccccagcgcgactcaggtgcccatggaagtgctgaaagtgcagacacacctggagaacccgaccaaataccatattcagcaggctcaacgtcagcaggtcaagcagtatctaagcacaaccctagctaataaacatgcaaaccaagtgctcagcctgccatgcccaaaccagcccggagaccacgtcatgccacccgtgcccggaagttctgcccccaactcacctatggcgatgttgacactcaattcgaactgtgaaaaggaggggttttacaaatttgaagaacagaacagggccgaatctgagtgccctggtatgaacactcacagcagggctagctgtatgcagatggatgatgtgattgacgatattattagcctggagtccagctacaatgaagagattcttggcttgatggaccctgccctgcagatggccaacactttgccagtgtccgggaacctgatagatctctacggaaatcaagggcttcccccgcccgggctgaccatcagtaactcttgccccgccaatctgccaaacattaaacgggaattgacagaatccgaggccagagcactcgcaaaggagcgtcaaaagaaagataatcacaacctaatagaaaggcgacggcgatttaatatcaatgatcgcatcaaagaattgggtactctcattcctaagtcaaatgatcctgacatgagatggaataaggggacaatactgaaggcaagcgtggattacatacgcaagctgcagcgggagcaacaaagggcaaaagaacttgagaacaggcagaaaaagctggagcatgcaaaccggcacctgttgctgcgcatacaagaattagagatgcaggcaagagcccatggcctttctttaattccttcaaccggcctttgcagtcccgatcttgtgaaccgtatcatcaagcaggagccagtgttggaaaactgctcccaagatctgctccagcatcatgctgacctcacatgcactaccaccctggacctgaccgacgggaccattacttttaataataatttaggcactgggacggaagcaaatcaggcctatagcgtaccaaccaagatggggtcaaagttagaggacattctcatggacgacactctctccccagtgggggtgacggaccctttactgtcttccgtatccccaggagccagtaagaccagcagtaggcgcagcagcatgagcatggaggaaaccgagcacacctgttag

SEQ ID NO: 71986 - DNA, 1407 bp, Artificial Sequence
  derived and/or modified sequence
atgaccagccggatcctgctgcggcagcagctgatgcgggagcagatgcaggaacaggaacgtagggaacagcagcagaagctgcaggcggctcagttcatgcagcagcgagtgccagtgagtcagaccccagctatcaacgtcagtgtacccaccacactgccttccgccacccaggtaccaatggaagtgcttaaagtgcagacacacctggaaaacccgacaaagtaccacattcagcaagcccagcgtcagcaggtgaaacaatacctgagcacgactctggctaacaagcatgcaaaccaggtgctgagtctcccctgtcccaatcagcctggcgaccacgtaatgccaccagtgcccggatcaagtgcacccaactcgcccatggccatgctgactttaaacagtaactgtgagaaagagggtttctacaagttcgaagagcagaacagagccgagtctgaatgcccgggtatgaatacacattcacgcgccagctgcatgcaaatggatgatgttatagacgatatcatctctctggagtccagctacaatgaagagatcttaggtctgatggaccctgcactccagatggcaaatacactgcccgtgtccggcaatctcatcgacctgtacggcaatcagggacttccccccccgggtttgactatctcgaattcatgtcctgcgaacctccctaatatcaagcgcgagctgactgagagcgaagcacgcgccctggccaaggaacgccagaaaaaggataatcacaacctgatagagcgaagacggcggttcaacatcaacgaccggatcaaagagctgggcacgttaattccaaaaagcaacgaccccgacatgcgctggaataagggcaccattttaaaagccagcgtagactacatccggaaattacaacgggagcaacagcgagctaaagagctcgaaaacagacagaagaaactggagcacgccaacaggcaccttctactgcggatacaggagctggaaatgcaggccagagcccacgggctgtctctgataccttctaccggcttgtgcagtccagatttggttaataggattatcaaacaagaaccggtgctcgagaattgcagccaggatctactgcagcaccacgcagacctgacatgcacgacgactcttgacttgactgatgggaccattaccttcaataataacctggggacagggaccgaagctaatcaggcttactcagtgcctaccaaaatgggttccaaactggaagatatactcatggacgacactctgtcaccagttggcgtgaccgacccactgctctcatccgttagcccgggtgcctccaagacctccagcagaagaagctcgatgagcatggaagagacggagcatacatgttag

SEQ ID NO: 71987 - DNA, 1488 bp, Artificial Sequence
  derived and/or modified sequence
atgctgtatgctttctggttctcccattcctcatccgccgaacatcctggggctagcaagccacctatttcttccagtagcatgaccagccgcatcctgctcagacaacagctgatgagggagcagatgcaggagcaggaacgaagagagcagcagcagaagttacaggctgcccaatttatgcagcagagggttcccgtctcgcaaaccccagctatcaacgtgtcagtgccaacaacacttccgtcggcgacgcaggttcccatggaggtgctgaaagtccagacccatcttgagaatcctacaaagtaccacatccagcaggcccagaggcagcaggtgaagcagtaccttagcacgacattggcgaacaaacacgcaaatcaggtcctgtccctcccctgccccaaccaacctggagaccatgtgatgcccccagttccgggttcttctgcacccaactccccgatggcaatgttaactctgaacagcaattgcgaaaaggagggtttctataagtttgaggagcaaaatcgcgctgaaagtgagtgcccgggtatgaacacgcatagcagggcttcatgtatgcaaatggatgacgtgattgacgacattatttccctggagagtagctacaatgaggaaattctgggattgatggatcccgcactccagatggccaatactctgccagtgagtggaaatctgatagatctgtacggcaatcagggactcccccctcctggactcactatatcaaatagttgtccagccaatctcccaaacatcaaacgggagctgactgaatctgaggctagggccctggctaaggaaagacaaaagaaggacaaccacaaccttatcgagcgtcggagaaggttcaacatcaatgatcgaatcaaagagctagggactctgatacccaagagtaatgatcctgatatgcgatggaataagggaaccatcctcaaagcgagcgttgactatattcgaaagctgcagagagagcagcagcgggctaaggagttggaaaatcggcagaagaagttggaacacgccaacaggcacctccttctccgcatccaagaactcgagatgcaggcacgggcacatggcctgtcactaattccatctacaggactgtgctctccagatctggtgaatcgtatcatcaagcaggagcccgtgctggaaaattgctcccaggacctgctacagcaccatgctgatctgacctgcaccactaccctggacctgacggacggcactataacatttaacaacaatctaggcaccgggacggaggcaaatcaggcttatagcgtaccaaccaagatgggctcaaaattagaggacattctgatggatgacactctgtctcctgtgggagtgaccgatcccctcctttcctcagtgtctcccggagccagcaagacctcttcccgtaggtccagcatgagtatggaagagaccgagcatacctgctag

SEQ ID NO: 71988 - DNA, 1407 bp, Artificial Sequence
  derived and/or modified sequence
atgacctcacgcattctgctgcgtcagcagctgatgagggagcagatgcaggaacaagaaagaagggagcaacagcagaagttgcaggccgcacagttcatgcagcaacgcgtccccgtatctcagacacccgctattaatgtcagcgtaccaaccacactaccctccgccacccaggttcccatggaagtcctaaaagtgcagacacatctggagaacccaaccaaatatcacattcagcaggctcaaagacagcaggtgaagcaatacctaagtacgacgctcgccaataagcatgcaaaccaggtactctctttaccctgtccaaatcaacctggcgaccacgtgatgccacccgtccccggttctagcgctcctaatagccctatggcaatgctgacactgaatagcaactgcgagaaggagggcttctataagtttgaagaacagaaccgggcagaaagtgaatgtcctggcatgaatactcactccagggcctcttgcatgcagatggatgacgtaattgacgatattatcagtttagagtcttcgtacaacgaagaaatactgggcttaatggacccagctctgcagatggcaaatacattaccagtgtcgggcaacctaattgatctctacggaaatcagggcctccctccccctgggctcacgatctcgaactcttgccctgccaatctgccaaacatcaaacgcgagttgaccgagtccgaagcgagggcgctggctaaggagcgtcagaagaaagataaccataacctgattgagaggagacgtcgcttcaacatcaacgacagaatcaaggaactcggcacactgattcccaaatcaaatgaccccgatatgcgttggaataaggggaccattcttaaagcttcagtggattatattagaaagctccagagggagcaacagagggcaaaagagctggaaaatcggcagaagaagctagagcacgcgaacaggcacctgcttctgcgtatccaagaattagagatgcaggcacgggcacacgggctcagtttaattccctccactggcctgtgtagccccgacctggtaaaccgcataattaaacaagagcccgttctggaaaattgctctcaagatctcctccagcatcatgcagatctgacctgcactaccacccttgatctcacagacggtactatcactttcaacaataacttgggcactggcaccgaggccaaccaggcctattcagtgcccactaagatgggctcaaagttagaggatatactcatggacgacacactctctcccgtgggagtaactgatcccctgctatcctcagtgagccccggagcatccaagaccagcagccggagatcctccatgtctatggaggaaaccgaacatacatgttag

SEQ ID NO: 71989 - DNA, 4573 bp, Artificial Sequence
  derived and/or modified sequence
atgttgtatgcattttggttttcccacagcagttccgccgagcatcctggggcctccaagcctccgataagctcctccagtatgacatcacgcatcttgctacgccagcaactcatgcgtgagcagatgcaggagcaggagcgcagggagcagcagcagaagctgcaggcggcccagttcatgcaacagagagtgcccgtgagtcagacaccagccataaacgtcagtgtgcccaccacccttccctctgccacgcaggtgccgatggaagtccttaaggtgcagacccacctcgaaaaccccaccaagtaccacatacagcaagcccaacggcagcaggtaaagcagtacctttctaccactttagcaaataaacatgccaaccaagtcctgagcttgccatgtccaaaccagcctggcgatcatgtcatgccaccggtgccggggagcagcgcacccaacagccccatggctatgcttacgcttaactccaactgtgaaaaagagggattttataagtttgaagagcaaaacagggcagagagcgagtgcccaggcatgaacacacattcacgagcgtcctgtatgcagatggatgatgtaatcgatgacatcattagcctagaatcaagttataatgaggaaatcttgggcttgatggatcctgctttgcaaatggcaaatacgttgcctgtctcgggaaacttgattgatctttatggaaaccaaggtctgcccccaccaggcctcaccatcagcaactcctgtccagccaaccttcccaacataaaaagggagctcacagagtctgaagcaagagcactggccaaagagaggcagaaaaaggacaatcacaacctgattgaacgaagaagaagatttaacataaatgaccgcattaaagaactaggtactttgattcccaagtcaaatgatccagacatgcgctggaacaagggaaccatcttaaaagcatccgtggactatatccgaaagttgcaacgagaacagcaacgcgcaaaagaacttgaaaaccgacagaagaaactggagcacgccaaccggcatttgttgctcagaatacaggaacttgaaatgcaggctcgagctcatggactttcccttattccatccacgggtctctgctctccagatttggtgaatcggatcatcaagcaagaacccgttcttgagaactgcagccaagacctccttcagcatcatgcagacctaacctgtacaacaactctcgatctcacggatggcaccatcaccttcaacaacaacctcggaactgggactgaggccaaccaagcctatagtgtccccacaaaaatgggatccaaactggaagacatcctgatggacgacaccctttctcccgtcggtgtcactgatccactcctttcctcagtgtcccccggagcttccaaaacaagcagccggaggagcagtatgagcatggaagagacggagcacacttgttagcgaatcctccctgcactgcattcgcacaaactgcttcctttcttgattcgtagatttaataacttacctgaaggggttttcttgataattttcctttaatatgaaattttttttcatgctttatcaatagcccaggatatattttatttttagaattttgtgaaacagacttgtatattctattttacaactacaaatgcctccaaagtattgtacaaataagtgtgcagtatctgtgaactgaattcaccacagactttagctttctgagcaagaggattttgcgtcagagaaatgtctgtccatttttattcaggggaaacttgatttgagatttttatgcctgtgacttccttggaaatcaaatgtaaagtttaattgaaagaatgtaaagcaaccaaaaagaaaaaaaaaaagaaagaaagaggaaaagaaatccatactaacccttttccattttataaatgtattgattcattggtactgccttaaagatacagtacccctctagctttgtttagtctttatactgcaaactatttaaagaaatatgtattctgtaaaagaaaaaaaaaatgcggccttttcatgaggatcgtctggttagaaaacataactgataccaaccgaaactgaagggagttagaccaaggctctgaaatataaagtctaatcttgctctcttttattctgtgctgttacagttttcttcatcaatgagtgtgatccagtttttcataagatattttattttgaaatggaaattaatgtcctctcaaagtaaaatattgaggagcactgaaagtatgttttactttttttttattttatttttgcttttgataagaaaaccgaactgggcatatttctaattggctttactatttttatttttaaattatgttttactgttcatttgatttgtacagattctttattatcattgttcttttcaatatatttgtattaatttgtaagaatatgcatcttaaaatggcaagttttccatatttttacaactcactggtggttttccgcattctttgtacacccatgaaagaaaacttttatgcaaggtcttgcatttaaaagacagctttgcgaatattttgtaaattacagtctcactcagaactgtttttggacacatttaaggtgtagtattaataggttaaaaccaggctttctagaaagaataaacttacatatttatttttaggacatgaaaatagcaatattcttggagattgataaccatagcattaatacgcccattatggtcatttaaattggggtttatttcagcaaacttgttgaatttatttttaagaaagaaatactgtattgggaagttactgttacttgataacaatgttttaacaagaagcaatgttataaagttagtttcagtgcattatctacttgtgtagtcctatgcaataacagtagtgttacatgtatcaagcctagatgttttatacagatgccatatagtgttatgagccaggctgttgaatggaatttctcagtagcagcctacaactgaatagcaagtggcataaagcatatccattcagaatgaagtgccttaaatatagcagtagtcttttttggactagcactgactgaactgtaatgtaggggaaagtttcatgatggtatctatagtcaagacgaacatgtagcatggtgcctatgtagacaatataagagcttccaattttccttcagatatttttaatattaaatatattttagtgacagagtgccaacttctttcatcaggaaaccttattcaggagggtttttaaaaagtgtttaaatgtcaaatgtgaattggtgatgggtgatggagggttcagagaggagtgatcgtcagatgtgtgaatggacggtttaggtgaaaataatcaactgcatagttcccatgcacgctgggcaatgagaatccttggaaacattggtgatgctatcagttttatagctttatttcttaagggggtagggaaaattagttcccattctttcaacccccttaactgtatagctcttttcctagaatagtgacgcaaatctgcatgaacagctaattgtaccatagtgttcattgatacaatcatagcattgtctatttttctcttcatatttatatgggggggagggcgctggatgcaaaagttgaagatcgtgatgctatgatgttagttttccttagctgattttgagggtttttaaaaataaagcaaggttgactaacctacggccacgggaacaggaccatggttaagcaaccatatagaaagctttgttgaaagaaagtatggcatcttgtaccactgccctgactgtcacaactcctaaccttgccattgcctgcctccccctccccttctccttaagagacaatttctgcaggtggcaggtgagcaagcccaggagaatgctgcaatcttgggggtggttttatttatttcttttttgccaaatagagtgtggattcatttcaggggctagctaagccaagaggcagtggtttgggcttgttgtttgtaacaagaaaatgatccacaccactcccccgattcccgggtgcagaattgtaactcggggttgggcctctatatggagtgaccaaaatgccaaaattgtccatctgcctctgagtagggcaatggaaataccaaaccttctgactttgccaaaaagcatacaagcaacctggtcatacataggatgacaaaattctttctggttgtttttaaacaataaagcaataagaacaaatacaatacataggaagttaaaagcacaaaggaatgaacttattaatatttttgaaaaatgcactgggaaaaagttgatgtcaataacagtataaaacagccctatttcttgataaaaaatgacaaatgactgtctcttgcggatgcttggtactgtaatgttaataatagtcacctgctgttggatgcagcaataatttctgtatggtccatagcactgtatattatggatcgatattaatgtatccaatgaaataatcgacttgttcttgatagcctcattaaagcatttggtttttcac

SEQ ID NO: 71990 - DNA, 1995 bp, Artificial Sequence
  derived and/or modified sequence
aatttagccttcctagtgttgagagaaggtgcacgtaagcgtgtggcagaacgtctgcaatcgcatctttgtaataatctcctttctgagacggttcagtggactcaatgttccgccaaagggccaaggcagccctgcagttccgccgagcatcctggggcctccaagcctccgataagctcctccagtatgacatcacgcatcttgctacgccagcaactcatgcgtgagcagatgcaggagcaggagcgcagggagcagcagcagaagctgcaggcggcccagttcatgcaacagagagtgcccgtgagtcagacaccagccataaacgtcagtgtgcccaccacccttccctctgccacgcaggtgccgatggaagtccttaaggtgcagacccacctcgaaaaccccaccaagtaccacatacagcaagcccaacggcagcaggtaaagcagtacctttctaccactttagcaaataaacatgccaaccaagtcctgagcttgccatgtccaaaccagcctggcgatcatgtcatgccaccggtgccggggagcagcgcacccaacagccccatggctatgcttacgcttaactccaactgtgaaaaagagggattttataagtttgaagagcaaaacagggcagagagcgagtgcccaggcatgaacacacattcacgagcgtcctgtatgcagatggatgatgtaatcgatgacatcattagcctagaatcaagttataatgaggaaatcttgggcttgatggatcctgctttgcaaatggcaaatacgttgcctgtctcgggaaacttgattgatctttatggaaaccaaggtctgcccccaccaggcctcaccatcagcaactcctgtccagccaaccttcccaacataaaaagggagctcacagagtctgaagcaagagcactggccaaagagaggcagaaaaaggacaatcacaacctgattgaacgaagaagaagatttaacataaatgaccgcattaaagaactaggtactttgattcccaagtcaaatgatccagacatgcgctggaacaagggaaccatcttaaaagcatccgtggactatatccgaaagttgcaacgagaacagcaacgcgcaaaagaacttgaaaaccgacagaagaaactggagcacgccaaccggcatttgttgctcagaatacaggaacttgaaatgcaggctcgagctcatggactttcccttattccatccacgggtctctgctctccagatttggtgaatcggatcatcaagcaagaacccgttcttgagaactgcagccaagacctccttcagcatcatgcagacctaacctgtacaacaactctcgatctcacggatggcaccatcaccttcaacaacaacctcggaactgggactgaggccaaccaagcctatagtgtccccacaaaaatgggatccaaactggaagacatcctgatggacgacaccctttctcccgtcggtgtcactgatccactcctttcctcagtgtcccccggagcttccaaaacaagcagccggaggagcagtatgagcatggaagagacggagcacacttgttagcgaatcctccctgcactgcattcgcacaaactgcttcctttcttgattcgtagatttaataacttacctgaaggggttttcttgataattttcctttaatatgaaattttttttcatgctttatcaatagcccaggatatattttatttttagaattttgtgaaacagacttgtatattctattttacaactacaaatgcctccaaagtattgtacaaataagtgtgcagtatctgtgaactgaattcaccacagactttagctttctgagcaagaggattttgcgtcagagaaatgtctgtccatttttattcaggggaaacttgatttgagatttttatgcctgtgacttccttggaaatcaaatgtaaagtttaattgaaagaatgtaaagcaacc

SEQ ID NO: 71991 - protein, 486 aa, Artificial Sequence
  derived and/or modified sequence
MSVTYDDSVGVEVSSDSFWEVGNYKRTVKRIDDGHRLCSDLMNCLHERARIEKAYAQQLTEWARRWRQLVEKGPQYGTVEKAWMAFMSEAERVSELHLEVKASLMNDDFEKIKNWQKEAFHKQMMGGFKETKEAEDGFRKAQKPWAKKLKEVEAAKKAHHAACKEEKLAISREANSKADPSLNPEQLKKLQDKIEKCKQDVLKTKEKYEKSLKELDQGTPQYMENMEQVFEQCQQFEEKRLRFFREVLLEVQKHLDLSNVAGYKAIYHDLEQSIRAADAVEDLRWFRANHGPGMAMNWPQFEEWSADLNRTLSRREKKKATDGVTLTGINQTGDQSLPSKPSSTLNVPSNPAQSAQSQSSYNPFEDEDDTGSTVSEKDDTKAKNVSSYEKTQSYPTDWSDDESNNPFSSTDANGDSNPFDDDATSGTEVRVRALYDYEGQEHDELSFKAGDELTKMEDEDEQGWCKGRLDNGQVGLYPANYVEAIQ

SEQ ID NO: 71992 - protein, 152 aa, Artificial Sequence
  derived and/or modified sequence
MSVTYDDSVGVEVSSDSFWEVGNYKRTVKRIDDGHRLCSDLMNCLHERARIEKAYAQQLTEWARRWRQLVEKGPQYGTVEKAWMAFMSEAERVSELHLEVKASLMNDDFEKIKNWQKEAFHKQMMGGFKETKEAEDGFRKAQKPWAKKLKEV

SEQ ID NO: 71993 - DNA, 1461 bp, Artificial Sequence
  derived and/or modified sequence
atgtccgtcacttatgacgacagcgtgggtgtggaagtttcaagtgatagcttctgggaggtcggcaactacaaaagaactgtcaagcgaattgatgacggccaccggctgtgttctgacctgatgaattgccttcacgaaagagcgaggatcgaaaaagcatacgctcagcagctaactgaatgggccagaagatggcgtcagctagtagagaagggcccccagtacggcacagtggagaaggcatggatggccttcatgagtgaggccgagcgagtaagcgagctgcatctagaggtgaaggcctcccttatgaacgacgatttcgagaagatcaagaactggcagaaagaggcgtttcataagcagatgatgggcggcttcaaagaaactaaagaggccgaggacggctttagaaaggcccagaaaccgtgggctaagaaactgaaggaggtggaggcagccaagaaagcccaccatgctgcctgtaaggaggaaaagcttgccatctcccgagaagccaactccaaggctgaccccagcctcaatcccgagcagttgaagaagttgcaggataaaatcgaaaaatgtaaacaagacgtgctgaaaacaaaggagaagtacgaaaagtccttgaaggaacttgaccagggcacaccccagtacatggagaatatggagcaggtgttcgaacagtgtcagcaattcgaggaaaagagacttcgcttctttcgcgaagtgctgctggaagtccaaaagcacctcgatctttccaacgtcgccgggtacaaggcaatttatcacgacctggagcagtccatccgcgcggcagatgccgtagaagacctgagatggttccgagccaaccatggccctgggatggccatgaattggccacagtttgaggagtggagtgccgacctcaatcgcaccttaagtagaagagagaagaagaaggccacagacggcgtcacgctaaccgggataaatcaaacaggggatcagtccctacccagcaaaccctcgtcaaccctgaacgtccccagcaaccctgctcagtcagcacagagccaatcctcctataacccgttcgaggatgaggatgacaccggcagcaccgtttccgagaaagatgatacgaaggcgaagaatgtgagctcatatgagaagacacagtcctaccctacggattggagtgacgacgagagtaataaccctttttcgagcacggacgccaacggcgactcaaatccctttgatgatgatgcgacctccggaactgaggtgcgggtccgagcactgtatgactacgaaggccaggagcatgacgaactgtcattcaaggcaggggacgaactcacaaagatggaggacgaagatgagcagggttggtgtaagggaaggctagataacgggcaagttggactctacccagccaactacgttgaagctatccagtag

SEQ ID NO: 71994 - DNA, 1461 bp, Artificial Sequence
  derived and/or modified sequence
atgtcggtaacctacgatgattccgtgggagtggaggtgtcaagtgattcattttgggaggttggaaactataagcggactgttaaacgaattgacgatggtcacaggctgtgcagcgatctgatgaattgcctccacgagagagcacgcatcgaaaaagcctacgcccagcagcttacagagtgggctcgccgttggcgccagttagtggagaaggggcctcagtacggcacagtagagaaagcctggatggcatttatgagcgaggccgaacgcgtcagcgaattgcacctagaggtgaaggcatccttaatgaacgacgacttcgaaaaaataaagaactggcagaaggaggctttccacaagcaaatgatgggtggctttaaagaaaccaaagaagcagaggacggctttcggaaagcacagaagccgtgggcgaagaagttaaaggaggtggaagctgctaaaaaagctcaccatgcggcttgcaaagaagaaaagttggctatttcgcgggaggccaacagtaaggccgatccaagcctaaacccagagcagcttaaaaaactacaggataaaattgaaaaatgcaaacaggacgttctcaagactaaggaaaagtatgaaaagagtctcaaggaattagaccaggggactccacagtatatggagaacatggagcaggtctttgaacagtgccagcagttcgaagaaaaaagactgcggttctttagggaagttttgcttgaggtgcaaaaacacctggacctgtccaatgtggccggctataaagccatttatcacgacttagaacaaagcattagggccgcagatgctgttgaggatctgcggtggtttcgggctaatcacggcccaggcatggcaatgaactggccccagtttgaagagtggtctgcagatctgaacaggacattgtcaagacgcgagaaaaagaaggcgaccgacggcgtgacactaaccggaatcaatcagactggggaccaatctctgccgagtaagccctccagcacactcaatgtgccatcaaaccctgctcagagcgcgcagtcacagagcagttacaatccgttcgaggacgaagacgatactggttccacagtatccgaaaaggatgataccaaggccaagaatgtcagtagttatgaaaagacgcagagctacccgacagactggagcgacgatgagtccaacaaccccttcagcagtaccgatgccaatggtgattctaatccctttgatgacgatgcaacctctgggacagaggtgagagtcagagccctgtacgattacgagggacaggagcatgacgagctttcttttaaggcaggtgacgagttaactaaaatggaggatgaggatgaacaaggatggtgcaagggtcgcttagataatgggcaagttggtttgtaccccgccaactacgtggaggcgattcagtag

SEQ ID NO: 71995 - DNA, 1461 bp, Artificial Sequence
  derived and/or modified sequence
atgagcgtaacatacgacgattctgttggggtggaggtgtcatcggactccttctgggaggtgggcaactacaagagaactgtgaagagaattgatgacggccaccgcctgtgttcagatctgatgaactgcctgcatgagcgcgcgcggatagaaaaagcctatgctcagcagctgacggaatgggcgcgtagatggagacagctagtggagaaggggccacaatacggaaccgttgagaaggcctggatggccttcatgagcgaagcagagagggtgagcgagctgcacttagaagtgaaggcatcgctgatgaacgacgactttgaaaaaattaagaactggcagaaggaggcgttccacaaacagatgatggggggtttcaaagagacaaaagaagccgaggacggatttagaaaggcgcagaaaccttgggcaaaaaaactcaaggaagtggaagctgctaagaaagctcaccatgcggcctgtaaagaagagaagctggccattagtcgggaagcgaactcaaaggctgacccgtcattgaatcccgaacagttaaagaagctgcaagacaaaattgagaagtgcaaacaggatgttctgaaaaccaaggaaaaatatgaaaagagtttgaaagagctagaccaaggcacaccacagtatatggaaaatatggaacaggtatttgaacagtgtcagcagtttgaagagaagcgtctgcgcttttttcgagaggtgctgctcgaggttcagaagcatttggatctgagcaatgttgcgggatataaagccatataccatgatttggaacagtccatcagggcagcggacgccgtggaggatctgcgttggttccgggccaaccacggacctggcatggcaatgaactggcctcagttcgaagaatggagtgccgacttaaacaggactctaagtcggagggaaaagaaaaaggcaacagacggagttacactgactgggatcaaccagactggtgatcagagcctgcccagcaagcctagcagcactttaaacgttccttccaacccggcacagtcagcacagtctcagtcgtcctacaatccctttgaggacgaggacgacactgggtccactgtgtcggaaaaagacgacactaaagccaagaatgtatcaagttacgaaaaaacccagtcctaccccaccgactggtcggacgatgagtccaacaatccattttctagcacagatgctaacggggattcaaacccattcgatgacgatgccacatccggaacagaggtccgtgttagagccttgtacgattacgaaggccaagaacacgatgaactgtccttcaaggctggggatgagctgacaaagatggaggacgaagacgaacaggggtggtgcaaaggacggctggacaacggccaggtcggtctctatcctgccaattatgtcgaagccattcagtag

SEQ ID NO: 71996 - DNA, 1461 bp, Artificial Sequence
  derived and/or modified sequence
atgtctgtgacctatgatgacagcgtgggcgtggaggtgtccagtgacagcttctgggaggtgggcaactacaagaggacagtgaagagaattgatgatggccaccggctgtgcagcgacctgatgaactgcctgcacgagcgggccagaattgagaaggcctatgcccagcagctgacagagtgggcccggcgctggaggcagctggtggagaagggcccccagtatggcaccgtggagaaggcctggatggccttcatgtctgaggccgagcgggtgtctgagctgcacctggaggtgaaggccagcctgatgaatgatgactttgagaagatcaagaactggcagaaggaggccttccacaagcagatgatgggcggcttcaaggagaccaaggaggctgaagatggcttcaggaaggcccagaagccctgggccaagaagctgaaggaggtggaggccgccaagaaggcccaccacgccgcctgcaaggaggagaagctggccatcagccgggaggccaacagcaaggctgaccccagcctgaaccctgagcagctgaagaagctgcaggacaagattgagaagtgcaagcaggatgtgctgaagaccaaggagaagtatgagaagagcctgaaggagctggaccagggcaccccccagtacatggagaacatggagcaggtgtttgagcagtgccagcagtttgaggagaagaggctgcgcttcttccgggaggtgctgctggaggtgcagaagcacctggacctgagcaatgtggccggctacaaggccatctaccatgacctggagcagagcatccgggctgctgatgctgtggaggacctgcgctggttccgggccaaccacggccctggcatggccatgaactggccccagtttgaggagtggagcgctgacctgaacagaaccctgagccggcgggagaagaagaaggccacagatggagtgaccctgaccggcatcaaccagacaggagaccagagcctgcccagcaagcccagcagcaccctgaatgtgcccagcaacccagcccagagcgcccagagccagagcagctacaacccctttgaagatgaagatgacaccggcagcacagtgtctgagaaggatgacaccaaggccaagaatgtgtcctcctatgagaagacccagagctaccccacagactggagcgatgatgagagcaacaaccccttcagcagcacagatgccaatggagacagcaacccctttgatgatgatgccaccagcggcacagaggtgcgggtgcgggccctgtatgactatgagggccaggagcatgatgagctgtccttcaaggctggagatgagctgaccaagatggaggatgaagatgagcagggctggtgcaagggccgcctggacaatggccaggtgggcctgtacccagccaactacgtggaggccatccagtag

SEQ ID NO: 71997 - DNA, 1461 bp, Artificial Sequence
  derived and/or modified sequence
atgagcgtgacctacgacgacagcgtgggcgtggaggtgagcagcgactcattctgggaggtggggaactacaagagaaccgtcaaaaggatcgatgacggccacaggctgtgtagtgatctgatgaactgccttcatgagcgggcgcgcattgagaaggcatatgcccaacaactgaccgaatgggcaagaaggtggaggcagctggtcgaaaaaggaccacagtacggaactgtggagaaggcttggatggcttttatgtcagaggctgagcgagtctctgaacttcatcttgaagtcaaagccagcctaatgaacgatgactttgagaaaatcaaaaactggcagaaggaagcctttcacaagcagatgatggggggttttaaggaaaccaaggaagctgaagacggctttaggaaagcgcagaagccgtgggctaagaagctgaaggaggtagaggctgcaaagaaagcccaccatgcagcctgcaaggaggagaagctcgccatctctagagaagcgaacagcaaagcggaccccagtctgaaccctgagcagcttaaaaaactgcaagacaagattgaaaagtgcaagcaggacgtattaaaaaccaaagagaaatacgaaaagtcgttaaaggagttggatcagggcaccccccagtatatggagaacatggagcaggtgtttgaacagtgccagcagttcgaggaaaagcgtctgagatttttcagagaggttctcctcgaggtacagaagcacttggatctttccaacgtggctggttacaaggctatctatcatgacctcgagcagtcgataagggcagctgacgctgtggaggacttgagatggttccgggccaaccacggacccggtatggccatgaattggccccagtttgaagagtggtcagcagacctgaatcgaaccctgtcccgccgggagaaaaaaaaggccactgatggcgtcacgctcacagggataaatcagacaggggaccaaagtctgccttctaagccttctagcactctaaatgtcccatccaatcctgcgcaatctgcccaatcccagtcatcatataatcccttcgaagatgaggatgacaccggtagcacagtttcggaaaaggacgatactaaggctaaaaacgtaagttcgtacgagaaaactcagtcttacccaaccgactggagcgatgacgaaagcaataatcctttcagcagcacagatgctaatggagacagcaatccatttgacgatgatgccacaagcggcactgaggtaagggtgagggccctatatgattatgagggtcaggaacacgatgaattatcttttaaagctggtgacgagctcaccaagatggaagacgaagacgagcaagggtggtgtaagggccgtctggataacggccaagtaggcctgtacccagcgaactatgtggaggccattcagtag

SEQ ID NO: 71998 - DNA, 1461 bp, Artificial Sequence
  derived and/or modified sequence
atgagcgtgacctacgacgacagcgtgggcgtggaggtgagcagcgacagcttctgggaggtcgggaattacaaaaggactgtgaaacgtatagacgatgggcaccgtctctgctctgatctgatgaattgcctgcatgaaagagcaagaattgaaaaggcttatgcccagcagcttaccgagtgggcacggaggtggcgacagctggtggaaaaggggccacagtacggcacagtggaaaaggcatggatggcatttatgtcggaggctgagcgagtgtctgagctccatctagaggtgaaggccagcttaatgaatgacgatttcgagaaaatcaagaactggcaaaaagaggctttccacaagcaaatgatggggggctttaaagaaaccaaagaagctgaggacggcttccgaaaagctcagaagccctgggcaaagaaattaaaagaggtggaggccgccaagaaagcccaccatgccgcctgcaaggaggagaagctcgccattagccgcgaggctaacagcaaggccgatcctagcctcaaccccgagcagctgaaaaaactccaggacaaaatagaaaagtgcaaacaagacgtgctgaagactaaggagaaatacgaaaaatcactcaaggagctcgaccagggcactccccagtatatggagaatatggagcaggtcttcgaacaatgccaacagtttgaggagaaaagacttcggttcttcagagaggtcctgttagaggtgcagaagcatctggacctctctaacgttgccgggtataaagctatataccacgacttggaacaatccatccgcgctgctgatgcagtcgaggacctccgctggttcagggcaaatcatggtccaggtatggctatgaactggccgcaattcgaggaatggagcgcggacctaaatcggacactgtccagaagagagaaaaaaaaggctactgatggagtaactttgaccggaataaaccaaacaggcgatcagtccctcccatccaaaccatccagtacactgaacgtgccatctaaccccgcccaatccgcacaaagccagtcatcctataacccgtttgaagatgaggatgataccgggagtacagtcagcgaaaaagacgacaccaaagccaagaacgttagcagctatgaaaagactcagagctaccctaccgattggtctgacgacgaaagcaacaatcctttttcaagcactgatgcaaacggcgactctaacccttttgacgacgatgccacaagcggcaccgaggtgagagtgcgcgccctgtatgactacgagggacaggagcacgacgaactgtcgtttaaagccggcgatgagctcacgaagatggaagacgaggatgaacagggttggtgtaaaggccggctcgataacggccaggtggggctgtacccggccaattatgtggaggcgatccagtag

SEQ ID NO: 71999 - DNA, 1461 bp, Artificial Sequence
  derived and/or modified sequence
atgagcgtgacctacgacgacagcgtgggcgtggaggtgagcagcgacagtttttgggaagtggggaattataaacggactgtgaagagaatcgacgatgggcatcggctgtgctctgatttaatgaactgcttgcatgaacgggcaagaattgagaaggcatacgctcagcagctaactgaatgggcccggaggtggcgccaactggtagagaagggcccgcaatatggaaccgtcgagaaagcatggatggccttcatgtccgaggcggagcgcgtgtccgaactacatctggaagtgaaggctagcctcatgaatgatgatttcgagaagatcaaaaactggcagaaggaagcgttccataaacagatgatgggtgggtttaaggaaacaaaggaggctgaagatggcttccgcaaagctcaaaaaccttgggcaaaaaagctgaaggaagtggaggccgccaagaaagcacaccatgccgcatgcaaggaggagaagttggccatcagccgtgaagcaaactccaaggcagatccatctttaaaccccgaacagctgaaaaaactgcaggacaaaatagagaagtgtaaacaggatgtgttaaaaacgaaagaaaaatacgagaaatccctgaaagagctggatcaagggacgccccagtatatggagaacatggaacaggtctttgaacagtgccagcagtttgaggaaaagaggttaagattcttcagagaggtgctgcttgaagtgcagaaacatctggacctgagcaatgtcgctggatacaaagctatctaccacgacttggagcagtcaattcgggcggccgacgccgttgaggatctgcgctggttcagggccaaccacggacccggtatggccatgaactggccacagttcgaagaatggagcgccgatttgaataggacgctgagccggcgggaaaagaaaaaggctacagatggcgttacgctcactggcatcaatcagactggcgaccaatcactgcccagtaaaccatcctctactctcaatgtgccctccaaccccgcccagtctgcccagtcccaatcttcttacaatccgtttgaggatgaggatgatacgggttctactgttagcgaaaaggatgatactaaagccaaaaatgtgtcatcctatgagaagactcagtcctatcctactgattggtcagacgacgagagcaacaacccgttctctagcacagatgcaaatggcgactctaatcctttcgacgacgacgctacatctgggacagaagtgagggtccgcgccttgtatgattacgagggccaggagcatgacgaacttagcttcaaagccggcgatgagttgactaaaatggaggacgaggacgagcagggttggtgtaaagggcgtttggataacgggcaggtgggtctgtaccccgccaactacgtggaagccattcagtag

SEQ ID NO: 72000 - DNA, 1883 bp, Artificial Sequence
  derived and/or modified sequence
ggtcagacatgccagcagggttggaaagaggcaggtacggaagctgagctgcagagttagccggcatctgacagaaaaatgtgagtgtgctgtggaaggcttgcatttcctttaaggtttgtctacagattttgagcgttcgaagttgacccctgactaagtatactttgctgctccctcagcctttgaaaaaatgtctgtcacatatgatgattccgttggagtagaagtgtccagcgacagcttctgggaggtcgggaactacaagcggactgtgaagcggatcgacgatggccaccgcctgtgcagcgacctcatgaactgcctgcatgagcgggcgcgcatcgagaaggcgtatgcgcagcagctcactgagtgggcccggcgctggaggcagctcgtggagaaagggccccagtacgggaccgtggagaaggcctggatggccttcatgtccgaggcagagagggtgagcgagctgcacctcgaggtgaaggcctcactgatgaacgatgacttcgagaagatcaagaactggcagaaggaagcctttcacaagcagatgatgggcggcttcaaggagaccaaggaagctgaggacggctttcggaaggcacagaagccctgggccaagaagctgaaagaggtagaagcagcaaagaaagcccaccatgcagcgtgcaaagaggagaagctggctatctcacgagaagccaacagcaaggcagacccatccctcaaccctgaacagctcaagaaattgcaagacaaaatagaaaagtgcaagcaagatgttcttaagaccaaagagaagtatgagaagtccctgaaggaactcgaccagggcacaccccagtacatggagaacatggagcaggtgtttgagcagtgccagcagttcgaggagaaacgccttcgcttcttccgggaggttctgctggaggttcagaagcacctagacctgtccaatgtggctggctacaaagccatttaccatgacctggagcagagcatcagagcagctgatgcagtggaggacctgaggtggttccgagccaatcacgggccgggcatggccatgaactggccgcagtttgaggagtggtccgcagacctgaatcgaaccctcagccggagagagaagaagaaggccactgacggcgtcaccctgacgggcatcaaccagacaggcgaccagtctctgccgagtaagcccagcagcacccttaatgtcccgagcaaccccgcccagtctgcgcagtcacagtccagctacaaccccttcgaggatgaggacgacacgggcagcaccgtcagtgagaaggacgacactaaggccaaaaatgtgagcagctacgagaagacccagagctatcccaccgactggtcagacgatgagtctaacaaccccttctcctccacggatgccaatggggactcgaatccattcgacgacgacgccacctcggggacggaagtgcgagtccgggccctgtatgactatgaggggcaggagcatgatgagctgagcttcaaggctggggatgagctgaccaagatggaggacgaggatgagcagggctggtgcaagggacgcttggacaacgggcaagttggcctatacccggcaaattatgtggaggcgatccagtgatgagtcggggacaggccagcggggggacggaggcggcgggcccaggagcctcagccagccacgtgggcatccactccttttcctgcaagagatgatggttccattgctcttggcttcatggtgttcctggaaggcagatgagctggtcatttcgcctgggactcggcacctttccgagtgcagctggagggatctgagcgcaggaagacgcagaacaacagaaatagcc

SEQ ID NO: 72001 - DNA, 2110 bp, Artificial Sequence
  derived and/or modified sequence
ctgtcccactgggcaggtgcctctgacggagaggaggcgtcgtcgggaagtatgtggccgtggctgctctggcatgatcctgaagactggcacgaaggggaatggagccgcacagagaatttcaggcatcagaggggaagcgcaggtttgtctacagattttgagcgttcgaagttgacccctgactaagtatactttgctgctccctcagcctttgaaaaaatgtctgtcacatatgatgattccgttggagtagaagtgtccagcgacagcttctgggaggtcgggaactacaagcggactgtgaagcggatcgacgatggccaccgcctgtgcagcgacctcatgaactgcctgcatgagcgggcgcgcatcgagaaggcgtatgcgcagcagctcactgagtgggcccggcgctggaggcagctcgtggagaaagggccccagtacgggaccgtggagaaggcctggatggccttcatgtccgaggcagagagggtgagcgagctgcacctcgaggtgaaggcctcactgatgaacgatgacttcgagaagatcaagaactggcagaaggaagcctttcacaagcagatgatgggcggcttcaaggagaccaaggaagctgaggacggctttcggaaggcacagaagccctgggccaagaagctgaaagaggtagaagcagcaaagaaagcccaccatgcagcgtgcaaagaggagaagctggctatctcacgagaagccaacagcaaggcagacccatccctcaaccctgaacagctcaagaaattgcaagacaaaatagaaaagtgcaagcaagatgttcttaagaccaaagagaagtatgagaagtccctgaaggaactcgaccagggcacaccccagtacatggagaacatggagcaggtgtttgagcagtgccagcagttcgaggagaaacgccttcgcttcttccgggaggttctgctggaggttcagaagcacctagacctgtccaatgtggctggctacaaagccatttaccatgacctggagcagagcatcagagcagctgatgcagtggaggacctgaggtggttccgagccaatcacgggccgggcatggccatgaactggccgcagtttgaggagtggtccgcagacctgaatcgaaccctcagccggagagagaagaagaaggccactgacggcgtcaccctgacgggcatcaaccagacaggcgaccagtctctgccgagtaagcccagcagcacccttaatgtcccgagcaaccccgcccagtctgcgcagtcacagtccagctacaaccccttcgaggatgaggacgacacgggcagcaccgtcagtgagaaggacgacactaaggccaaaaatgtgagcagctacgagaagacccagagctatcccaccgactggtcagacgatgagtctaacaaccccttctcctccacggatgccaatggggactcgaatccattcgacgacgacgccacctcggggacggaagtgcgagtccgggccctgtatgactatgaggggcaggagcatgatgagctgagcttcaaggctggggatgagctgaccaagatggaggacgaggatgagcagggctggtgcaagggacgcttggacaacgggcaagttggcctatacccggcaaattatgtggaggcgatccagtgatgagtcggggacaggccagcggggggacggaggcggcgggcccaggagcctcagccagccacgtgggcatccactccttttcctgcaagagatgatggttccattgctcttggcttcatggtgttcctggaaggcagatgagctggtcatttcgcctgggactcggcacctttccgagtgcagctggagggatctgagcgcaggaagacgcagaacaacagaaatagccgcccctccccgcccactgtgcctgttggcctatcatagatctctatgttcttgactttgtctctcctttccgagtcaatggtgggttacactgatcttgttccactgattactctctctgacgagtccatcacctgcaacttaaatgaacaagcttacatcccattttgagtgaagattttgaggtttttaatttaaa

SEQ ID NO: 72002 - DNA, 1461 bp, Artificial Sequence
  derived and/or modified sequence
atgtccgttacctatgacgactccgtgggagttgaagtctcttccgatagtttttgggaggttggaaactacaagcggactgttaaaaggatcgatgatggacaccgtctgtgtagcgatctgatgaattgcctccacgaaagagcacggatcgagaaggcatacgctcagcagctaaccgagtgggcgagacggtggaggcagctggtggagaaagggcctcaatacggcacagtggagaaggcttggatggcctttatgtctgaggctgagagagttagcgagctacatctggaagtcaaggcatctttgatgaacgatgatttcgagaaaattaaaaactggcaaaaggaggcattccataagcagatgatggggggattcaaagagacaaaggaggccgaggacgggtttcgaaaggcacagaagccatgggccaaaaaattgaaggaagtcgaagccgctaaaaaagctcatcacgcagcatgcaaggaagaaaagttagccatctcccgcgaagcgaacagtaaggccgatccgtctctgaacccagaacagttaaagaaactgcaggataaaatcgagaaatgtaagcaagacgtgctgaaaaccaaggagaaatacgagaagtcacttaaggagctagatcaaggaacacctcaatatatggaaaatatggagcaggtcttcgaacagtgtcagcagtttgaggagaagcggctccggtttttcagggaggttttgctcgaagtgcagaaacatctggaccttagcaatgttgctggctacaaggccatctaccacgacctggagcagagtatcagagctgctgatgcggtggaggatttgaggtggttccgcgctaaccacggcccaggaatggcaatgaactggccacagtttgaggagtggtccgcagacctcaaccggactctgtcccgaagagagaaaaagaaagccactgacggcgttacccttacagggattaaccagactggcgaccagagcttaccaagcaaaccgtcctctactcttaacgtacctagtaaccccgctcagagtgctcagagccagagtagctataatccctttgaagacgaagatgacaccggcagtacggtgagtgaaaaggatgatactaaggccaagaatgtgtccagttacgagaaaacacagtcttatcctacagattggtcggatgacgagagcaacaatccattcagtagcaccgatgcaaacggcgattccaatccttttgatgacgacgcaacgagtggtactgaggtcagagtccgggcactttacgactatgaaggccaggaacatgatgaactgtcctttaaagcaggtgatgaactaacgaagatggaggacgaggacgagcaagggtggtgcaagggcagactagataacggacaggtgggcctgtacccagctaactacgtagaagcgatccagtag

SEQ ID NO: 72003 - DNA, 1461 bp, Artificial Sequence
  derived and/or modified sequence
atgagtgtgacctatgacgactcagtaggagtggaggtttcctccgactcattttgggaagtagggaattataagcggaccgtgaagcgaatcgacgatggacaccgcctttgttctgatctgatgaactgtctgcatgagcgggctagaattgaaaaagcttatgctcagcagttgaccgagtgggcaagacggtggcggcagttggtcgagaaaggccctcagtacgggaccgtggaaaaggcctggatggctttcatgtcagaagccgaacgtgtgagcgaactccacttggaagtgaaggcttctcttatgaatgacgatttcgagaaaatcaagaactggcaaaaggaggcctttcataaacagatgatggggggattcaaagagacgaaggaggcagaggacgggtttcgaaaagcccagaaaccctgggctaagaagctgaaggaggtggaggctgcaaagaaggcacatcatgctgcttgcaaggaggagaaactggcaatctctagggaggccaactccaaagctgatccttcactgaaccctgaacagctgaaaaaactgcaagataaaattgagaaatgtaagcaggatgtccttaagactaaagagaaatacgaaaagtctttgaaagaacttgatcaaggcacaccccagtacatggagaacatggagcaggtgttcgagcagtgccaacaattcgaggagaagcgcctgcgcttctttcgggaggtgctgttagaggtccagaaacacctcgatctttccaacgtcgcaggatacaaagctatctaccatgacctggagcagagcatccgcgctgccgatgcagtggaggacctccgttggtttcgggcaaatcacggacccggtatggcaatgaactggccgcaattcgaagaatggagcgccgaccttaatcggacactgagtcgaagggagaagaaaaaagccaccgacggcgtaacattaaccggcattaaccaaaccggcgatcagtctttgccctctaagccgagttcaacgctgaatgtgccctccaaccccgcacagagcgctcaaagccaatcatcttataacccatttgaagatgaagacgacactggttcaacggtctcagaaaaagacgatactaaggcaaagaacgtgagcagctatgaaaaaacccagagctacccaactgactggtcggatgatgaatcaaacaatccattctcttcaaccgatgcgaacggagacagtaacccatttgacgacgacgccacatctggtacagaagttcgggttagggctctgtatgactacgagggacaagagcatgacgaactgtcctttaaggcaggtgatgaactgactaagatggaggatgaggatgaacaggggtggtgtaaaggcaggctggacaacggtcaggttgggctgtatccagcgaattatgtagaggcaatacagtag

SEQ ID NO: 72004 - DNA, 1461 bp, Artificial Sequence
  derived and/or modified sequence
atgtctgtaacgtacgacgactcagtgggcgtggaagtgagttccgattccttttgggaggtcgggaattataaacggaccgtcaaacgcatagatgatgggcatcgactgtgttccgacttgatgaactgtctgcatgagagggcccgtatcgagaaagcttatgcccagcagcttaccgagtgggctcggcgatggcgacagcttgtggaaaaaggacctcagtacggcactgttgagaaggcgtggatggccttcatgagcgaggcagagcgagtgagtgagctccatctcgaagtcaaggccagcctgatgaatgacgatttcgagaagataaaaaactggcagaaggaggcgtttcacaagcagatgatggggggattcaaggagactaaagaagccgaggacggattccggaaagcccaaaaaccttgggctaagaaacttaaagaagtggaagccgcaaaaaaagctcaccacgcagcatgcaaagaagagaaactggctatcagtcgagaagccaactcaaaagcggacccatcccttaacccggagcagttgaagaagctgcaggacaaaattgagaaatgtaagcaagacgttctcaaaaccaaagaaaagtatgaaaagtcactgaaagaactcgatcaggggacaccacagtatatggagaacatggagcaggtatttgaacagtgccaacagtttgaagagaaacgcctgcgcttcttccgagaggtactgctcgaagttcagaaacacctggatctatcaaacgtggcagggtacaaggccatctaccatgatttagagcagagtattcgggcagccgacgcagtagaagacctaagatggtttagggccaaccatggcccaggcatggccatgaactggcctcaatttgaggaatggagtgccgacttgaacaggaccttatcccggagggagaagaagaaagcgacagatggcgtgacgctgacagggatcaatcagaccggagatcagagccttccttctaaaccatcgtctacgctgaatgtaccttcaaaccctgcacagtcggcacaatcccaatcatcctacaacccatttgaggatgaggatgatactggctccacagtcagcgagaaagatgacacaaaagcaaaaaacgtgagttcctatgaaaagacccagtcatatccaaccgactggtccgacgatgagagcaacaatcctttctcaagcaccgacgccaacggagacagtaacccgttcgatgatgacgccacaagtggcactgaggtgagagttcgggctctttatgactatgagggccaggagcacgacgaactgagctttaaggccggagacgagcttactaaaatggaagatgaggacgaacagggctggtgtaagggaaggctggataacggccaggtgggattataccctgctaactatgttgaagccatccagtag

SEQ ID NO: 72005 - DNA, 3249 bp, Artificial Sequence
  derived and/or modified sequence
gcggccgcaggggtctgggcagggctgggcagtgctgccggagcaaaagcggtagcgggagcccggccggagctgggtctggagacgccgtggcagcctgaacggagtgtgcgacggattgggaggtttgtctacagattttgagcgttcgaagttgacccctgactaagtatactttgctgctccctcagcctttgaaaaaatgtctgtcacatatgatgattccgttggagtagaagtgtccagcgacagcttctgggaggtcgggaactacaagcggactgtgaagcggatcgacgatggccaccgcctgtgcagcgacctcatgaactgcctgcatgagcgggcgcgcatcgagaaggcgtatgcgcagcagctcactgagtgggcccggcgctggaggcagctcgtggagaaagggccccagtacgggaccgtggagaaggcctggatggccttcatgtccgaggcagagagggtgagcgagctgcacctcgaggtgaaggcctcactgatgaacgatgacttcgagaagatcaagaactggcagaaggaagcctttcacaagcagatgatgggcggcttcaaggagaccaaggaagctgaggacggctttcggaaggcacagaagccctgggccaagaagctgaaagaggtagaagcagcaaagaaagcccaccatgcagcgtgcaaagaggagaagctggctatctcacgagaagccaacagcaaggcagacccatccctcaaccctgaacagctcaagaaattgcaagacaaaatagaaaagtgcaagcaagatgttcttaagaccaaagagaagtatgagaagtccctgaaggaactcgaccagggcacaccccagtacatggagaacatggagcaggtgtttgagcagtgccagcagttcgaggagaaacgccttcgcttcttccgggaggttctgctggaggttcagaagcacctagacctgtccaatgtggctggctacaaagccatttaccatgacctggagcagagcatcagagcagctgatgcagtggaggacctgaggtggttccgagccaatcacgggccgggcatggccatgaactggccgcagtttgaggagtggtccgcagacctgaatcgaaccctcagccggagagagaagaagaaggccactgacggcgtcaccctgacgggcatcaaccagacaggcgaccagtctctgccgagtaagcccagcagcacccttaatgtcccgagcaaccccgcccagtctgcgcagtcacagtccagctacaaccccttcgaggatgaggacgacacgggcagcaccgtcagtgagaaggacgacactaaggccaaaaatgtgagcagctacgagaagacccagagctatcccaccgactggtcagacgatgagtctaacaaccccttctcctccacggatgccaatggggactcgaatccattcgacgacgacgccacctcggggacggaagtgcgagtccgggccctgtatgactatgaggggcaggagcatgatgagctgagcttcaaggctggggatgagctgaccaagatggaggacgaggatgagcagggctggtgcaagggacgcttggacaacgggcaagttggcctatacccggcaaattatgtggaggcgatccagtgatgagtcggggacaggccagcggggggacggaggcggcgggcccaggagcctcagccagccacgtgggcatccactccttttcctgcaagagatgatggttccattgctcttggcttcatggtgttcctggaaggcagatgagctggtcatttcgcctgggactcggcacctttccgagtgcagctggagggatctgagcgcaggaagacgcagaacaacagaaatagccgcccctccccgcccactgtgcctgttggcctatcatagatctctatgttcttgactttgtctctcctttccgagtcaatggtgggttacactgatcttgttccactgattactctctctgacgagtccatcacctgcaacttaaatgaacaagcttacatcccattttgagtgaagattttgaggtttttaatttaaaggctgtgtacagttatacttttttatacacctgttcatttctacttaaattatggcacagattgatgcgcaccagtcttgaggaaacgatctccctattcccttaccctgttactcagccacgccgtgtgtaggcttagcctcaggtggcagatgtttgaggaaaggaattatgccaggaaggtgggaccgggttatggtcgggtttctattgggaatgctctttgtgcttttgggcatctgaatggaagctttacatagaaccttaggtagaactcccccaaatcgccatatttaaaaattattttcactctattcttgcttaaaactgtactcttttgcaaattaacaattttatcactgattcagagttaaaaagaagactaacttttcaagcaaatgcatctgtaaagatgctttagattagactgtcatgtctcagtgtctatctgtatatattatttgatattcagagaatctaaagcactcgtctactgttttaatgagatttaacagcttttaacagtgagtttcgtttgtaaactgcttgaagtctgtggcattcaggcacacgtctggctggccggctgggtctcctcccgggctcagtgggcctggggcctctctgacgtggtgcctgctggagggaggctcgtcgtcaccagctgactgctggtccggcttctgaccggcctttgtcctggctccgtagcagaacactgtaaaagtgcccgcgtctttgcagtagttgcagatttcagtcgtcgtgttacttgtgcacaaacagaagctgggtcttacccgcagcacgagtgtctcgggctgcccggagtcgcccgggagcaggtgctgcagccagagttacgcgggggccacgcgggccggcgggggtggggggaacgtgggggaacctgtgtttcacgtgactcagcagtgcccgccgccgtcaccagctatgcattcactccgtttccagtgagcagatgtcttgcttggaaagtggacctgtgtctgtgtctgtcctgagaacttaccagcagaaatcctcatttctgtgctacggatttaccaaaaattgtcaagtctttttcagtttaacagttcctttacatgtgtagtatttgaggaaaaaaatcaataaacagttgatctcgtgcata

SEQ ID NO: 72006 - DNA, 1461 bp, Artificial Sequence
  derived and/or modified sequence
atgagcgtgacctacgacgacagcgtgggcgtggaggtgagcagcgacagcttctgggaggtgggcaactacaagagaaccgtgaagagaatcgacgacggccacagactgtgcagcgacctgatgaactgcctgcacgagagagccagaatcgagaaggcctacgcccagcagctgaccgagtgggccagaagatggagacagctggtggagaagggcccccagtacggcaccgtggagaaggcctggatggccttcatgagcgaggccgagagagtgagcgagctgcacctggaggtgaaggccagcctgatgaacgacgacttcgagaagatcaagaactggcagaaggaggccttccacaagcagatgatgggcggcttcaaggagaccaaggaggccgaggacggcttcagaaaggcccagaagccctgggccaagaagctgaaggaggtggaggccgccaagaaggcccaccacgccgcctgcaaggaggagaagctggccatcagcagagaggccaacagcaaggccgaccccagcctgaaccccgagcagctgaagaagctgcaggacaagatcgagaagtgcaagcaggacgtgctgaagaccaaggagaagtacgagaagagcctgaaggagctggaccagggcaccccccagtacatggagaacatggagcaggtgttcgagcagtgccagcagttcgaggagaagagactgagattcttcagagaggtgctgctggaggtgcagaagcacctggacctgagcaacgtggccggctacaaggccatctaccacgacctggagcagagcatcagagccgccgacgccgtggaggacctgagatggttcagagccaaccacggccccggcatggccatgaactggccccagttcgaggagtggagcgccgacctgaacagaaccctgagcagaagagagaagaagaaggccaccgacggcgtgaccctgaccggcatcaaccagaccggcgaccagagcctgcccagcaagcccagcagcaccctgaacgtgcccagcaaccccgcccagagcgcccagagccagagcagctacaaccccttcgaggacgaggacgacaccggcagcaccgtgagcgagaaggacgacaccaaggccaagaacgtgagcagctacgagaagacccagagctaccccaccgactggagcgacgacgagagcaacaaccccttcagcagcaccgacgccaacggcgacagcaaccccttcgacgacgacgccaccagcggcaccgaggtgagagtgagagccctgtacgactacgagggccaggagcacgacgagctgagcttcaaggccggcgacgagctgaccaagatggaggacgaggacgagcagggctggtgcaagggcagactggacaacggccaggtgggcctgtaccccgccaactacgtggaggccatccagtag

SEQ ID NO: 72007 - DNA, 3234 bp, Artificial Sequence
  derived and/or modified sequence
atggagcccagcctgaagtacatcaacaagaagttccccaacatcgacgtgagaaacagcacccagcacctgggccccgtgcacagagagaaggccgagatcatcagattcctgaccaactactaccagagcttcgtggacgtgatggagttcagagaccacgtgtacgagctgctgaacaccatcgacgcctgccagtgccacttcgacatcaacctgaacttcgacttcaccagaagctacctggacctgatcgtgacctacaccagcgtgatcctgctgctgagcagaatcgaggacagaagaatcctgatcggcatgtacaactgcgcccacgagatgctgcacggccacggcgaccccagcttcgccagactgggccagatggtgctggagtacgaccaccccctgaagaagctgaccgaggagttcggcccccacaccaaggccgtgagcggcgccctgctgagcctgcacttcctgttcgtgagaagaaaccagggcgccgagcagtggagaagcgcccagctgctgagcctgatcagcaacccccccgccatgatcaaccccgccaacagcgacaccatggcctgcgagtacctgagcgtggaggtgatggagagatggatcatcatcggcttcctgctgtgccacggctgcctgaacagcaacagccagtgccagaagctgtggaagctgtgcctgcagggcagcctgtacatcaccctgatcagagaggacgtgctgcaggtgcacaaggtgaccgaggacctgttcagcagcctgaagggctacggcaagagagtggccgacatcaaggagagcaaggagcacgtgatcgccaacagcggccagttccactgccagagaagacagttcctgagaatggccgtgaaggagctggagaccgtgctggccgacgagcccggcctgctgggccccaaggccctgttcgccttcatggccctgagcttcatcagagacgaggtgacctggctggtgagacacaccgagaacgtgaccaagaccaagacccccgaggactacgccgacagcagcatcgccgagctgctgttcctgctggagggcatcagaagcctggtgagaagacacatcaaggtgatccagcagtaccacctgcagtacctggccagattcgacgccctggtgctgagcgacatcatccagaacctgagcgtgtgccccgaggaggagagcatcatcatgagcagcttcgtgagcatcctgagcagcctgaacctgaagcaggtggacaacggcgagaagttcgagttcagcggcctgagactggactggttcagactgcaggcctacaccagcgtggccaaggcccccctgcacctgcacgagaaccccgacctggccaaggtgatgaacctgatcgtgttccacagcagaatgctggacagcgtggagaagctgctggtggagaccagcgacctgagcaccttctgcttccacctgagaatcttcgagaagatgttcgccatgaccctggaggagagcgccatgctgagatacgccatcgccttccccctgatctgcgcccacttcgtgcactgcacccacgagatgtgccccgaggagtacccccacctgaagaaccacggcctgcaccactgcaacagcttcctggaggagctggccaagcagaccagcaactgcgtgctggagatctgcgccgagcagagaaacctgagcgagcagctgctgcccaagcactgcgccaccaccatcagcaaggccaagaacaagaagaccagaaagcagagacagacccccagaaagggcgagcccgagagagacaagcccggcgccgagagccacagaaagaacagaagcatcgtgaccaacatggacaagctgcacctgaacctgaccgagctggccctgaccatgaaccacgtgtacagcttcagcgtgttcgagcacaccatcttccccagcgagtacctgagcagccacctggaggccagactgaacagagccatcgtgtggctggccggctacaacgccaccacccaggagatcgtgagacccagcgagctgctggccggcgtgaaggcctacatcggcttcatccagagcctggcccagttcctgggcgccgacgccagcagagtgatcagaaacgccctgctgcagcagacccagcccctggacagctgcggcgagcagaccatcaccaccctgtacaccaactggtacctggagagcctgctgagacaggccagcagcggcaccatcatcctgagccccgccatgcaggccttcgtgagcctgcccagagagggcgagcagaacttcagcgccgaggagttcagcgacatcagcgagatgagagccctggccgagctgctgggcccctacggcatgaagttcctgagcgagaacctgatgtggcacgtgaccagccagatcgtggagctgaagaagctggtggtggagaacatggacatcctggtgcagatcagaagcaacttcagcaagcccgacctgatggccagcctgctgccccagctgaccggcgccgagaacgtgctgaagagaatgaccatcatcggcgtgatcctgagcttcagagccatggcccaggagggcctgagagaggtgttcagcagccactgccccttcctgatgggccccatcgagtgcctgaaggagttcgtgacccccgacaccgacatcaaggtgaccctgagcatcttcgagctggccagcgccgccggcgtgggctgcgacatcgaccccgccctggtggccgccatcgccaacctgaaggccgacaccagcagccccgaggaggagtacaaggtggcctgcctgctgctgatcttcctggccgtgagcctgcccctgctggccaccgaccccagcagcttctacagcatcgagaaggacggctacaacaacaacatccactgcctgaccaaggccatcatccaggtgagcgccgccctgttcaccctgtacaacaagaacatcgagacccacctgaaggagttcctggtggtggccagcgtgagcctgctgcagctgggccaggagaccgacaagctgaagaccagaaacagagagagcatcagcctgctgatgagactggtggtggaggagagcagcttcctgaccctggacatgctggagagctgcttcccctacgtgctgctgagaaacgcctacagagaggtgagcagagccttccacctgaactag

SEQ ID NO: 72008 - DNA, 3234 bp, Artificial Sequence
  derived and/or modified sequence
atggagccctctctgaaatatatcaataagaaatttcctaacattgacgtgaggaattctacacagcacttagggccagtccaccgagaaaaggccgagatcatccgcttcctcacaaattactatcagagctttgtcgacgtcatggagtttcgcgaccatgtatatgagctgctgaacaccatcgatgcctgccagtgccatttcgatatcaatctcaatttcgattttacacgatcataccttgacctgatcgtcacatatacaagtgtcatcctcttgttatctcgcatagaagaccggagaatattgatagggatgtataactgtgcccacgagatgttgcacggtcatggagatcccagcttcgcacgcctgggtcagatggtgctggaatatgatcacccactgaaaaaactcactgaggagttcggccctcacaccaaagccgtcagcggtgcactgctctcgctgcatttcctgtttgtgagacggaaccagggcgcagagcagtggaggtctgctcagctcctttccctgattagcaacccaccagctatgattaatccggctaacagcgacacaatggcgtgcgagtatctgagtgtggaagtcatggaacgatggatcataatcggatttctcctgtgtcatggctgtctgaacagcaattctcagtgtcagaagttgtggaaattgtgcctgcagggatcactttatatcacactgatcagggaagatgtgctgcaggtacataaggtcacggaggatcttttcagttctctgaagggatacggcaaaagggtggccgacattaaggagtctaaagaacatgttatagcaaactccggccagtttcactgtcagcggaggcagtttttaagaatggcagtgaaagagctggaaacagtgctggccgatgaacctgggctattgggcccaaaggcacttttcgcgtttatggccctctctttcatcagggatgaagttacatggctagtccgacatacagaaaacgttacaaagacgaagactcctgaggactacgcagactcgagcattgccgaattgctgtttctcctcgagggaatccgctccctggttagaaggcatattaaggtcatccagcaatatcaccttcagtacctggctcgcttcgacgcactggtcctgtccgacatcatccagaacttatctgtctgtcctgaggaagagtcaatcataatgagctccttcgtatcaatcctgtcttctctaaacttgaagcaagtggataacggcgaaaagtttgaattctccggattgcgtctggactggttcaggttgcaggcttacacaagcgttgcgaaggcacctctgcatctgcatgagaaccctgacttagcaaaggttatgaacctgatagtattccactcgcgaatgctcgacagtgtcgaaaagctcctcgtagagacatccgaccttagcaccttttgctttcacctgaggatctttgagaagatgtttgcaatgaccctggaggaatcagccatgctgaggtacgccattgcatttcccctaatctgtgcacattttgtacattgcacccatgagatgtgtcctgaggaatacccacacctgaaaaaccacgggctgcatcactgtaactcatttttggaggaactggccaagcaaactagcaactgtgtgttggagatttgtgccgagcagagaaatctgagcgaacaacttcttcccaaacattgcgctactaccataagtaaagccaagaataagaagacacggaagcagaggcagaccccccgcaagggagaaccggaaagggataagcccggcgctgaatcccatcgcaaaaacaggtcgattgtgacaaacatggacaaactccacctgaatttgactgagctggcccttacaatgaaccacgtgtactctttctccgtgtttgagcacacaatatttccatccgaatatctcagctctcacctggaggctaggctgaatcgggctatagtttggctagccggttacaacgccaccactcaagagatcgtgaggccatccgagctgctggcgggggtgaaagcctacatcggattcatccagtccctggcccagttccttggagccgatgcctcccgcgtcatcagaaatgcgctgctccagcagactcagcccttagacagttgtggggaacagacgattaccacactctacacaaactggtatctggaatcgttactcaggcaagccagctccggaaccatcatactgtctcccgcaatgcaggcttttgtctcgctcccgcgcgaaggtgaacagaattttagcgctgaagagttctcagacattagcgaaatgagagctctggctgagctcctgggcccctatggcatgaagttcctctccgagaaccttatgtggcacgtaacaagtcagatcgtagagcttaagaaactagttgtggaaaacatggatatcttggtgcagattcggagcaatttttccaaacccgatttgatggcctcactgctgccacagctgacaggcgctgagaacgtactgaaacgcatgacaattattggggtgatattgtcctttagagccatggcccaagagggattgcgggaagttttcagctcccattgccctttcttgatggggccgatcgagtgtttgaaggagttcgtcaccccagataccgatattaaagtcacgctctccattttcgaattggccagtgctgccggggtcggctgtgatatcgatcctgccctggtagctgccatcgcaaacctgaaggctgacacgtcctcccccgaggaagaatacaaagtcgcctgccttctgctgatttttctcgccgtttcactcccccttctggcaaccgatccaagctctttttattcaatagagaaggatggatataacaataacattcattgcctcacaaaggctattatccaggtgtctgctgcactttttaccctctataacaaaaacatcgagacccacctgaaagagttcctggttgtagccagcgtgagcctgttgcaattagggcaggagaccgacaaattgaaaacacgcaatagagaatccatttccctcctgatgcggttagtcgttgaggaaagctcctttttgacactggacatgctggagagttgtttcccatacgtgctccttagaaacgcttaccgggaggtttccagagcttttcatttgaactag

SEQ ID NO: 72009 - DNA, 3234 bp, Artificial Sequence
  derived and/or modified sequence
atggagcccagcctgaagtacatcaacaagaagttccccaacattgatgtgaggaacagcacccagcacctgggccctgtgcaccgggagaaggccgagatcatccgcttcctgaccaactactaccagagctttgtggatgtgatggagttccgggaccacgtgtatgagctgctgaacaccattgatgcctgccagtgccactttgacatcaacctgaactttgacttcaccaggagctacctggacctgattgtgacctacaccagcgtcatcctgctgctgagcagaattgaagatcggcgcatcctgattggcatgtacaactgtgcccacgagatgctgcacggccacggggaccccagctttgcccggctgggccagatggtgctggagtatgaccaccccctgaagaagctgacagaggagtttggcccccacaccaaggctgtgtctggggccctgctgagcctgcacttcctgtttgtgagaagaaaccagggcgctgagcagtggaggtctgcccagctgctgagcctcatcagcaaccccccagccatgatcaacccagccaacagcgacaccatggcctgtgagtacctgtctgtggaggtgatggagcgctggatcatcatcggcttcctgctgtgccacggctgcctgaacagcaacagccagtgccagaagctgtggaagctgtgcctgcagggcagcctgtacatcaccctcatccgggaggatgtgctgcaggtgcacaaggtgacagaggacctcttcagcagcctgaagggctacggcaagagggtggccgacatcaaggagagcaaggagcacgtgattgccaacagcggccagttccactgccagaggcggcagttcctgaggatggctgtgaaggagctggagaccgtgctggctgatgagcccggcctgctgggccccaaggccctgtttgccttcatggccctgtccttcatcagagatgaggtgacctggctggtgcgccacacagaaaatgtgaccaagaccaagaccccagaagattatgctgacagcagcattgctgagctgctcttcctgctggagggcatccgcagcctggtgagaagacacatcaaggtgatccagcagtaccacctgcagtacctggccaggtttgatgccctggtgctgagtgacatcatccagaacctgtctgtgtgcccagaggaggagagcatcatcatgagcagctttgtgtccatcctgagcagcctgaacctgaagcaggtggacaacggggagaagtttgagttcagcggcctgcggctggactggttccggctgcaggcctacacctctgtggccaaggcccccctgcacctgcatgaaaatccagacctggccaaggtgatgaacctgattgtgttccacagcaggatgctggacagcgtggagaagctgctggtggagaccagtgacctgagcaccttctgcttccacctgcgcatctttgagaagatgtttgccatgaccctggaggagagcgccatgctgcgctatgccatcgccttccccctcatctgtgcccactttgtgcactgcacccatgagatgtgcccagaggagtacccccacctgaagaaccacggcctgcaccactgcaacagcttcctggaggagctggccaagcagaccagcaactgtgtgctggagatctgtgccgagcagaggaacctgtctgagcagctgctgcccaagcactgtgccaccaccatcagcaaggccaagaacaagaagaccaggaagcagaggcagacccccaggaaaggagagcctgagcgggacaagccaggagctgagagccacaggaagaacagaagcatcgtgaccaacatggacaagctgcacctgaacctgacagagctggccctgaccatgaaccacgtgtacagcttctctgtgtttgagcacaccatcttccccagcgagtacctgagcagccacctggaggcccggctgaacagagccatcgtgtggctggccggctacaatgccaccacccaggagatcgtgcggcccagcgagctgctggccggcgtgaaggcctacatcggcttcatccagagcctggcccagttcctgggcgcagatgccagcagggtcatcagaaatgccctgctgcagcagacccagcccctggacagctgtggggagcagaccatcaccaccctgtacaccaactggtacctggagagcctgctgcggcaggccagcagcggcaccatcatcctgagccctgccatgcaggcctttgtgtccctgccccgggagggggagcagaacttctctgctgaggagttcagtgacatcagcgagatgagggccctggccgagctgctgggcccctacggcatgaagttcctgtctgagaacctgatgtggcacgtgaccagccagatcgtggagctgaagaagctggtggtggagaacatggacatcctggtgcagatccgcagcaacttcagcaagccagacctgatggccagcctgctgccccagctgactggagcagaaaatgtgctgaagaggatgaccatcattggagtcatcctgtccttccgggccatggcccaggagggcctgcgggaggtgttcagcagccactgccccttcctgatgggccccattgaatgtctgaaggagtttgtgaccccagacacagacatcaaggtgaccctgagcatctttgagctggccagcgctgctggggtgggctgtgacatcgaccctgccctggtggccgccatcgccaacctgaaggctgacaccagcagccctgaggaggagtacaaggtggcctgcctgctgctgatcttcctggccgtgtccctgcccctgctggccacagaccccagcagcttctacagcattgagaaggatggctacaacaacaacatccactgcctgaccaaggccatcatccaggtgtctgctgccctcttcaccctgtacaacaagaacatcgagacccacctgaaggagttcctggtggtggcctctgtgtccctgctgcagctgggccaggagacagacaagctgaagaccaggaaccgggagagcatcagcctgctgatgaggctggtggtggaggagagcagcttcctgaccctggacatgctggagagctgcttcccctacgtgctgctgagaaatgcctaccgggaggtgtcccgggccttccacctgaactag

SEQ ID NO: 72010 - DNA, 3234 bp, Artificial Sequence
  derived and/or modified sequence
atggagcccagcctgaagtacatcaacaagaagttccccaacatcgacgttcggaacagtacgcaacacctcggtcctgtgcaccgggagaaagcagagatcatccgctttctgaccaattattaccagagctttgtggacgtcatggagtttcgggatcacgtttacgagctcttgaacacaatcgacgcctgccagtgtcactttgacattaatctcaatttcgacttcacccgtagctaccttgacctgattgtgacttatacctccgtaatcctgcttctctcgagaatcgaggaccgaagaattctcatcggtatgtacaattgcgcacatgagatgctgcacggccacggcgatccctcatttgcccgtctgggccagatggtgctggaatacgaccacccactgaaaaagcttactgaggagtttggcccacataccaaagcggtgagcggcgcattgctgagcctccactttctgtttgtgcgtcgaaaccagggggcggagcagtggaggagcgcgcagctgctgtccctgatctcaaatccaccagctatgattaatcctgctaattcagatactatggcttgcgaatacctgagcgtcgaagttatggaacggtggatcattatcggatttctgctgtgtcacggctgtctcaatagcaacagccagtgtcaaaaactgtggaaattatgcctccaaggcagcctgtacatcacacttattcgggaggatgtgctacaagtgcataaggtcacggaggacttattttcttccctgaagggatacggtaagagggtcgctgatatcaaggagagcaaggagcatgtgatagctaattctggccagttccattgtcagcggcgacagtttctgagaatggccgtcaaagaactggaaaccgtgctggccgatgaacctggtctcctcggccccaaggcacttttcgcattcatggccctgtcctttattcgcgacgaggtgacttggctggttagacacaccgagaacgtgacaaagacaaagactccagaggactatgctgatagctccattgcagaactattattcctactggaaggcataagatccttggtccgccggcacatcaaggtgattcagcagtatcatctccagtacctagctcgcttcgacgctctggtgctatcggacataatccagaatctttcagtttgccctgaagaggagtcaattatcatgagcagcttcgtttcgatacttagttcgctgaacttgaagcaggtggataacggcgaaaagtttgagttttctggcttgagattagattggtttcggctccaagcctacacgagcgtcgccaaggctccactgcatctgcacgaaaacccagaccttgcgaaagtgatgaatctgatagtatttcattccagaatgttggatagcgtggaaaaactcttggtcgaaactagcgatctctctacgttttgtttccacctgcggatcttcgagaaaatgtttgccatgacgctggaagaaagcgctatgctcaggtatgccattgccttccccctgatctgtgcacatttcgttcattgtacgcatgagatgtgtcccgaagaatacccccacctcaagaaccacgggttgcaccactgtaactccttccttgaagaactggcaaaacaaacctcaaactgcgtgttagagatatgtgcagagcagcggaatctgtcagaacagttactgccaaagcactgtgcaaccacaatctccaaggcaaagaacaagaagacaagaaagcagcgccaaactccccgcaaaggagaacccgagagggacaaacctggtgccgaaagtcatcgaaagaatagaagcatagtgaccaatatggacaagttacaccttaatctcacagaactggcgttaacaatgaatcacgtctacagcttcagtgtattcgagcacactatttttccctccgagtatttgagctcacacctcgaagcacgactgaatcgagccattgtttggttggcagggtataacgcaactacccaggagatcgttcggccatcagaacttctcgctggtgtaaaggcatatattggctttattcagtctctggcgcagtttctgggagcggatgcttcccgggtaatccgtaacgccctcttacagcagacacagccactggatagctgtggtgaacaaactatcacgaccctgtataccaattggtatctcgaaagcctcctgaggcaagctagcagtggcaccatcatactgtctccagcgatgcaagcgttcgtgagcctgccgcgtgagggggagcagaatttcagtgccgaagaattcagcgatatatcggaaatgcgggccctggcagagctccttgggccttacggaatgaagtttctgtctgaaaacctcatgtggcatgtgacttctcaaatcgtggaactgaaaaaactggtggtggagaacatggatatcctcgtgcagatcagaagcaatttctctaagcccgatctgatggcttccctgctgcctcagttgacaggagccgagaacgtgctgaagcggatgacaataattggtgttattctgagttttcgggcaatggcccaggaagggcttagagaggttttcagcagtcactgcccattcctgatgggccctattgaatgtcttaaagaatttgtcacccccgacactgatatcaaggtgactctgagcatattcgagttagcttctgccgcgggggttggatgcgatatcgatcctgcactggtcgccgccatcgccaatctcaaggctgatacctcgtcaccagaggaggagtacaaagtggcttgcctcttgctgatattcttggcagtgtctttgcctctgctggctacagacccctcaagtttctacagcattgaaaaagacggttataacaataacattcactgtctgacaaaagcaataatccaggtgagcgctgcactctttaccctctataataaaaacatcgagacccacctgaaagagttcctcgtagtggcgtccgtgtccctcctgcagctgggacaggaaacggataaactaaaaactaggaaccgcgagtctatatccctgctcatgaggcttgttgtagaggagagctccttcctgactctcgacatgctagagagctgtttcccctacgtcttgctcagaaacgcttatagggaagtaagcagagccttccatctcaactag

SEQ ID NO: 72011 - DNA, 3234 bp, Artificial Sequence
  derived and/or modified sequence
atggagccctcattgaagtatattaataagaagtttccgaatatcgatgtgcgtaactccactcagcacttggggcctgtgcatagggagaaggccgaaataatccgtttcctgactaattattaccagtcctttgtggatgtaatggagtttagggaccatgtgtacgagctactgaatacaatcgatgcgtgtcagtgccactttgacatcaatttgaactttgattttacaagaagctatctagatctaattgtgacctacacaagtgtcattctgttgctgagccgtatcgaagatcggagaatcctgattggcatgtacaattgcgcccatgagatgctgcatgggcacggtgacccctccttcgctagactgggacagatggtgcttgagtacgaccaccctttgaaaaagttaaccgaggagtttggccctcatacaaaggcagtctctggagctcttttgtccttgcactttctgtttgtcagaagaaatcagggtgccgaacaatggcgcagtgcgcaattgctctcccttattagcaaccccccagctatgatcaacccagctaactccgataccatggcttgtgaatatctctcagtggaagtcatggagcgttggatcatcatcggctttctgctatgtcacggatgccttaacagcaactcccagtgccagaagttgtggaagctgtgcttgcagggaagcctgtatattacccttataagggaggatgtgctccaggtacacaaggtgacggaggacttattctcatcattaaagggctatgggaagcgcgtggcggatatcaaggagtcgaaggagcatgtaattgccaacagcggacagttccactgccagaggcggcaattcttaagaatggctgtcaaagagctcgagacagtgctggccgatgaacccggtctcctcggcccaaaagccctgttcgcatttatggccttgagttttattcgggatgaggtgacctggctggtgaggcataccgagaatgtgactaagactaaaaccccggaggactatgcagactcctcgatagccgaactactcttcttgctcgaaggcattcgctccctagtgagaagacatattaaggtgattcagcagtatcatctgcagtacctggcaaggttcgatgctttggtcctctccgacatcatccagaacttgtcagtctgtcctgaggaagagtcaatcattatgtctagcttcgtatccatcttgtcgtctctgaatctgaaacaagtcgacaacggggagaagttcgagttttccggattacgacttgattggtttcgtttgcaggcatatacttccgtagccaaggcccctcttcatctgcatgagaaccccgacctggctaaagtgatgaatctcatcgtcttccactcacgaatgctggatagcgttgagaagctcctcgtggagacctccgacctgtctacattctgcttccatctccgcatttttgaaaagatgttcgcaatgactctagaagaatctgccatgttgaggtatgctattgcttttccgctgatatgtgctcatttcgtccactgcacgcacgaaatgtgccctgaagagtatccccacctgaagaatcatgggcttcatcattgcaattccttccttgaagaattagccaaacaaaccagtaactgtgttttagagatatgcgcagaacaacgcaacctttctgagcagctccttccaaaacactgtgctaccactatatctaaagccaagaacaagaagaccagaaaacaacgccagaccccacgcaagggcgaacccgagcgcgacaaacccggtgctgagagccaccgaaagaacagatccatcgtgacgaacatggacaaattgcacttaaacctcaccgaactcgccctaacaatgaaccacgtgtacagcttcagtgtgttcgagcacacgatcttcccaagtgagtatctctcatcccacctcgaagcacgcctgaaccgggctatagtctggctggcgggatacaacgccaccacccaggagattgtgcgcccaagcgagcttctggccggagttaaggcatatataggcttcattcagagtctagcacagttcctgggtgccgatgcttcccgagtcatcagaaatgctctgctccagcagacccaacctcttgacagctgtggcgagcagactattacaacactctatacaaactggtacctggaatccctgctacggcaggcttccagtggaacaatcatcctcagccccgcaatgcaagccttcgttagcctgccaagagagggcgaacaaaacttctcagcagaggagttcagcgacataagtgaaatgagggcacttgcagaactcttgggaccatacggcatgaaattcttgtcagaaaacctaatgtggcatgtcacctcccagatcgtggaactgaagaaactcgtggtggaaaacatggatatcctggttcagataagatctaatttctcaaaacccgatctgatggcctcactcctgcctcagcttactggagccgaaaacgttctgaaacggatgactattattggcgtcatattgtccttcagggcaatggcccaggaggggctcagagaagttttttccagccattgtccattccttatgggaccaatcgagtgtctcaaggaattcgtgacccctgacacagatataaaggtcacactgtccatctttgagcttgcctccgctgctggagtgggctgcgatatagatccagccctggttgccgctatcgctaacctcaaagctgatacaagcagcccagaggaggaatataaagtcgcctgcctcctgctgattttcttagcagtgagtctgcccctcttggcaactgatccatctagtttttacagcatagagaaagacgggtataacaacaacattcactgcttaacaaaggctatcatacaggtgagtgccgctcttttcactctgtataataaaaacattgagacgcacctgaaggaattcttggtggtggcctcagtctccctgctgcagctgggacaggagactgacaaactgaaaacccggaatcgggagagtatcagtcttctcatgcgcttagtggttgaagagtcatcctttctgaccctcgacatgttagaaagctgcttcccctatgtgttgctccggaacgcctatagagaagtttcaagagcgtttcatctgaattag

SEQ ID NO: 72012 - protein, 231 aa, Artificial Sequence
  derived and/or modified sequence
MALLVRVLRNQTSISQWVPVCSRLIPVSPTQGQGDRALSRTSQKIKIAALRMYTSCVEKTDFEEFFLRCQMPDTFNSWFLITLLHVWMCLVRMKQEGRSGKYMCRIIVHFMWEDVQQRGRVMGVNPYILKKNMILMTNHFYAAILGYDEGILSDDHGLAAALWRTFFNRKCEDPRHLELLVEYVRKQIQYLDSMNGEDLLLTGEVSWRPLVEKNPQSILKPHSPTYNDEGL

SEQ ID NO: 72013 - DNA, 696 bp, Artificial Sequence
  derived and/or modified sequence
atggccctgctggtgagagtgctgagaaaccagaccagcatcagccagtgggtgcccgtgtgcagcagactgatccccgtgagccccacccagggccagggcgacagagccctgagcagaaccagccagaagatcaagatcgccgccctgagaatgtacaccagctgcgtggagaagaccgacttcgaggagttcttcctgagatgccagatgcccgacaccttcaacagctggttcctgatcaccctgctgcacgtgtggatgtgcctggtgagaatgaagcaggagggcagaagcggcaagtacatgtgcagaatcatcgtgcacttcatgtgggaggacgtgcagcagagaggcagagtgatgggcgtgaacccctacatcctgaagaagaacatgatcctgatgaccaaccacttctacgccgccatcctgggctacgacgagggcatcctgagcgacgaccacggcctggccgccgccctgtggagaaccttcttcaacagaaagtgcgaggaccccagacacctggagctgctggtggagtacgtgagaaagcagatccagtacctggacagcatgaacggcgaggacctgctgctgaccggcgaggtgagctggagacccctggtggagaagaacccccagagcatcctgaagccccacagccccacctacaacgacgagggcctgtag

SEQ ID NO: 72014 - DNA, 696 bp, Artificial Sequence
  derived and/or modified sequence
atggccttactcgtccgcgtcttgagaaaccaaaccagcatttcccaatgggtacctgtgtgtagccggctcatacctgtgtcgcctacacaaggtcagggagaccgcgctttgtctagaacctcacaaaagattaaaatagcggctcttagaatgtacacaagttgtgttgagaagacagattttgaagagtttttccttaggtgtcagatgcctgatacttttaacagctggttcttaattactctgctacatgtttggatgtgccttgtgcgtatgaaacaggagggcagaagcggtaagtatatgtgccggattatcgtgcacttcatgtgggaggatgtacagcagcgaggtagagtcatgggtgtcaacccatatattctgaaaaaaaacatgatacttatgaccaatcatttctacgccgctatcttgggatatgatgagggcattctttcagatgaccacggattggcggctgccttatggagaacatttttcaacagaaagtgcgaagaccccagacatttagaattactggtcgagtatgtgaggaagcaaatccagtatttggacagtatgaacggggaggatctgttactgactggggaggtttcatggagacccctggttgaaaaaaacccccaatccatccttaaaccccactctcctacatacaacgacgaagggctatag

SEQ ID NO: 72015 - DNA, 696 bp, Artificial Sequence
  derived and/or modified sequence
atggccctgctggtgcgggtgctgaggaaccagaccagcatcagccagtgggtgcctgtgtgcagccgcctcatccctgtgagccccacccagggccagggcgaccgggccctgagcaggaccagccagaagatcaagattgctgccctgaggatgtacaccagctgtgtggagaagacagactttgaggagttcttcctgcgctgccagatgccagacaccttcaacagctggttcctgatcaccctgctgcacgtgtggatgtgcctggtgaggatgaagcaggagggccgcagcggcaagtacatgtgccgcatcatcgtgcacttcatgtgggaggatgtgcagcagaggggccgggtgatgggcgtgaacccctacatcctgaagaagaacatgatcctgatgaccaaccacttctacgccgccatcctgggctatgatgagggcatcctgagtgatgaccacggcctggccgccgccctgtggaggaccttcttcaacagaaaatgtgaggaccccaggcacctggagctgctggtggagtatgtgaggaagcagatccagtacctggacagcatgaatggagaggacctgctgctgaccggggaggtgtcctggaggcccctggtggagaagaacccccagagcatcctgaagccccacagccccacctacaatgatgagggcctgtag

SEQ ID NO: 72016 - DNA, 696 bp, Artificial Sequence
  derived and/or modified sequence
atggccctgctggtgcgggtgctgcggaaccagaccagcatcagccaatgggtacccgtgtgttcacggctgataccggtatccccaacccaggggcagggcgacagggctctgtccagaaccagtcagaaaatcaagattgctgctttgcggatgtatactagctgcgttgaaaaaactgatttcgaagaatttttcctcaggtgtcagatgcccgatacttttaacagctggttcttaataaccctccttcacgtgtggatgtgcctcgttagaatgaagcaggaaggacgtagtggcaaatatatgtgtcggataattgtgcatttcatgtgggaggatgtccagcagcgggggagagtaatgggtgttaacccgtacatcctgaaaaaaaatatgatcctcatgaccaaccatttctacgccgctatcctcggctacgatgaagggatactttcagatgatcacggcctggcagctgccttgtggcgcacttttttcaacagaaagtgtgaggatccacgtcacctggaactactggtggaatacgttaggaagcagatccaatatcttgacagtatgaatggcgaggatctgcttctgaccggcgaggtttcttggaggcccttggtggagaagaaccctcagtccattttaaagccccactctcccacttataatgacgaaggcctgtag

SEQ ID NO: 72017 - DNA, 696 bp, Artificial Sequence
  derived and/or modified sequence
atggctcttctcgtccgggtgctccgcaatcagacatccattagtcagtgggtacccgtgtgcagccgtctcattccagtgagtcctacacaagggcaaggggatcgcgctctgtcccggacctcccagaaaatcaaaatagccgctttacgaatgtacacttcttgcgtggaaaaaacagatttcgaggaattttttctacggtgtcaaatgccagacactttcaattcctggttcctgatcacactgctccatgtctggatgtgcctggtccgcatgaaacaggaaggcagatccggcaagtacatgtgccggattatagtgcatttcatgtgggaggacgtgcagcagcgaggcagggtcatgggggtgaatccctatatcttgaaaaaaaacatgatactgatgaccaatcacttttatgcagccatactgggttatgatgaaggcatcctgtcagacgaccacgggctggcagccgcactctggcggactttttttaataggaaatgcgaagaccctcgacatcttgagctgcttgttgaatatgtgaggaagcagatccagtatctggattctatgaacggggaggatttattgctcaccggcgaggtgtcatggcggccactggtcgaaaagaatccccagagcattcttaaaccacactcccccacctacaatgacgaggggctctag

SEQ ID NO: 72018 - DNA, 2133 bp, Artificial Sequence
  derived and/or modified sequence
caaaaggaggacgtagaaaaggggacaccggaaactcactcttcacccggaaatggttattgaggaacatggcgttgctggtgcgagtccttaggaaccagactagcatttctcagtgggttccagtatgcagccgattgatacctgtgtctcctacccaaggacagggggacagggctctgtctcgcacttcccagaagattaagattgcggccctgcgcatgtatactagctgtgtggagaaaactgacttcgaggaattctttctaaggtgtcagatgcctgatacattcaattcatggtttcttataaccctactccacgtctggatgtgtctagtccgaatgaagcaggaaggccggagtgggaagtacatgtgtcgtatcatagttcattttatgtgggaggatgttcagcagcgcggcagagtcatgggggttaatccctatatcctgaagaagaacatgatcctcatgacaaatcatttctatgcagcgatcttgggatatgatgaggggatcctttcagatgatcatgggctggccgctgccctctggagaaccttcttcaaccggaaatgtgaagaccctcgacatcttgaattgctggtagagtatgtgaggaaacagatacagtacctggactccatgaacggggaggatctgcttctgacaggggaggtgagctggcgccctctagtggagaagaatcctcagagcatcctgaagccccattctccgacttacaacgacgagggactttgatgggctgggccctccgcacggcccgccagctggcttcgaggaacctccaggagagaagtgcctgttggtccaggaccctgcagaaagtggcctgaactgacctctgaacagcatctgtcaaatacctggccccatttgtgttgagtttcctcttagtgtgcccaggagtctgatctgctggggtacagggctgggagaacccctagctctcccggggtgtcctctcccttaggggaagccccgagtgagagtcccccagcacacactccccaaccccctccagcaactacatgtgactgatagcttttcccaaaggccaaggaagggatggtgtaggttcaaaagggaaaccccccagggcctgctgtggcctaggagcagattgtaatgctgccgagtccggtcggtgaccacgcgttgtccctcggctttcagccatggggttgagttggccattaaaagaaacagagacttctctctgccatggcccttctttattccagggacttagaaacttgcctgagatggtggacgcagtaatgagggcaccgcgcagctcagttagagacggagaaagggaagaggctgggatggtctctgctgctcttgcctctagttcatggagatgtgtctctgttcaggccaagatacagccagccaggcctgtcgtctgggacccaggaggcctctgatgaccaagggctttcacatcctaagtcatttggaaggaggccttgagaacaaagtcacctttgtcactcccagtgaactgaatgaggaacatgctgtctcctgtcttggcctcccctttcatgagatactggggagaagagaacattcctcctggcttagttgtagcagacccagacctgtgcccagctttggtcccccttcccaacttctgaagcacgtgctgcagagccaccttggtctgagcacctgaggaccagcccctcctccctcagtgcgggtcatctcttgggggattttcttaaagtgaagaaagggggtggggaaccatattgcccctccctcccccatcaaacttccttcatttaacttgctataaaatgagtcatataaagaaactctatatgggtgaggtatatcccacttctgtgaaaacattacaaatcaaaccgcttctctcagtttatttaagatgcttttgttgcgagcggagctctagagtgaagcctcctgtgtgtgtgtgagataataacaccttgtaactcattacagctgggcactatttacataaaccagagctgagccaggcaggaatttgctgattaatttatttttaatggagtgaagtataccatgcaccaaaataaactttactgtgtgtacctaactgctcctggaa

SEQ ID NO: 72019 - protein, 2642 aa, Artificial Sequence
  derived and/or modified sequence
MSGGAAEKQSSTPGSLFLSPPAPAPKNGSSSDSSVGEKLGAAAADAVTGRTEEYRRRRHTMDKDSRGAAATTTTTEHRFFRRSVICDSNATALELPGLPLSLPQPSIPAAVPQSAPPEPHREETVTATATSQVAQQPPAAAAPGEQAVAGPAPSTVPSSTSKDRPVSQPSLVGSKEEPPPARSGSGGGSAKEPQEERSQQQDDIEELETKAVGMSNDGRFLKFDIEIGRGSFKTVYKGLDTETTVEVAWCELQDRKLTKSERQRFKEEAEMLKGLQHPNIVRFYDSWESTVKGKKCIVLVTELMTSGTLKTYLKRFKVMKIKVLRSWCRQILKGLQFLHTRTPPIIHRDLKCDNIFITGPTGSVKIGDLGLATLKRASFAKSVIGTPEFMAPEMYEEKYDESVDVYAFGMCMLEMATSEYPYSECQNAAQIYRRVTSGVKPASFDKVAIPEVKEIIEGCIRQNKDERYSIKDLLNHAFFQEETGVRVELAEEDDGEKIAIKLWLRIEDIKKLKGKYKDNEAIEFSFDLERDVPEDVAQEMVESGYVCEGDHKTMAKAIKDRVSLIKRKREQRQLVREEQEKKKQEESSLKQQVEQSSASQTGIKQLPSASTGIPTASTTSASVSTQVEPEEPEADQHQQLQYQQPSISVLSDGTVDSGQGSSVFTESRVSSQQTVSYGSQHEQAHSTGTVPGHIPSTVQAQSQPHGVYPPSSVPQSMAHPCGGTPTYPESQIFFPTIHERPVSFSPPPTCPPKVAISQRRKSTSFLEAQTHHFQPLLRTVGQSLLPPGGSPTNWTPEAVVMLGTTASRVTGESCEIQVHPMFEPSQVYSDYRPGLVLPEEAHYFIPQEAVYVAGVHYQARVAEQYEGIPYNSSVLSSPMKQIPEQKPVQGGPTSSSVFEFPSGQAFLVGHLQNLRLDSGLGPGSPLSSISAPISTDATRLKFHPVFVPHSAPAVLTHNNESRSNCVFEFHVHTPSSSSGEGGGILPQRVYRNRQVAVDLNQEELPPQSVGLHGYLQPVTEEKHNYHAPELTVSVVEPIGQNWPIGSPEYSSDSSQITSSDPSDFQSPPPTGGAAAPFGSDVSMPFIHLPQTVLQESPLFFCFPQGTTSQQVLTASFSSGGSALHPQAQGQSQGQPSSSSLTGVSSSQPIQHPQQQQGIQQTAPPQQTVQYSLSQTSTSSEATTAQPVSQPQAPQVLPQVSAGKQGFPPRLPPQYPGDSNIAPSSNVASVCIHSTVLSPPMPTEVLATPGYFPTVVQPYVESNLLVPMGGVGGQVQVSQPGGSLAQAPTTSSQQAVLESTQGVSQVAPAEPVAVAQTQATQPTTLASSVDSAHSDVASGMSDGNENVPSSSGRHEGRTTKRHYRKSVRSRSRHEKTSRPKLRILNVSNKGDRVVECQLETHNRKMVTFKFDLDGDNPEEIATIMVNNDFILAIERESFVDQVREIIEKADEMLSEDVSVEPEGDQGLESLQGKDDYGFSGSQKLEGEFKQPIPASSMPQQIGIPTSSLTQVVHSAGRRFIVSPVPESRLRESKVFPSEITDTVAASTAQSPGMNLSHSASSLSLQQAFSELRRAQMTEGPNTAPPNFSHTGPTFPVVPPFLSSIAGVPTTAAATAPVPATSSPPNDISTSVIQSEVTVPTEEGIAGVATSTGVVTSGGLPIPPVSESPVLSSVVSSITIPAVVSISTTSPSLQVPTSTSEIVVSSTALYPSVTVSATSASAGGSTATPGPKPPAVVSQQAAGSTTVGATLTSVSTTTSFPSTASQLCIQLSSSTSTPTLAETVVVSAHSLDKTSHSSTTGLAFSLSAPSSSSSPGAGVSSYISQPGGLHPLVIPSVIASTPILPQAAGPTSTPLLPQVPSIPPLVQPVANVPAVQQTLIHSQPQPALLPNQPHTHCPEVDSDTQPKAPGIDDIKTLEEKLRSLFSEHSSSGAQHASVSLETSLVIESTVTPGIPTTAVAPSKLLTSTTSTCLPPTNLPLGTVALPVTPVVTPGQVSTPVSTTTSGVKPGTAPSKPPLTKAPVLPVGTELPAGTLPSEQLPPFPGPSLTQSQQPLEDLDAQLRRTLSPEMITVTSAVGPVSMAAPTAITEAGTQPQKGVSQVKEGPVLATSSGAGVFKMGRFQVSVAADGAQKEGKNKSEDAKSVHFESSTSESSVLSSSSPESTLVKPEPNGITIPGISSDVPESAHKTTASEAKSDTGQPTKVGRFQVTTTANKVGRFSVSKTEDKITDTKKEGPVASPPFMDLEQAVLPAVIPKKEKPELSEPSHLNGPSSDPEAAFLSRDVDDGSGSPHSPHQLSSKSLPSQNLSQSLSNSFNSSYMSSDNESDIEDEDLKLELRRLRDKHLKEIQDLQSRQKHEIESLYTKLGKVPPAVIIPPAAPLSGRRRRPTKSKGSKSSRSSSLGNKSPQLSGNLSGQSAASVLHPQQTLHPPGNIPESGQNQLLQPLKPSPSSDNLYSAFTSDGAISVPSLSAPGQGTSSTNTVGATVNSQAAQAQPPAMTSSRKGTFTDDLHKLVDNWARDAMNLSGRRGSKGHMNYEGPGMARKFSAPGQLCISMTSNLGGSAPISAASATSLGHFTKSMCPPQQYGFPATPFGAQWSGTGGPAPQPLGQFQPVGTASLQNFNISNLQKSISNPPGSNLRTT

SEQ ID NO: 72020 - DNA, 7929 bp, Artificial Sequence
  derived and/or modified sequence
atgagcggcggcgccgccgagaagcagagcagcacccccggcagcctgttcctgagcccccccgcccccgcccccaagaacggcagcagcagcgacagcagcgtgggcgagaagctgggcgccgccgccgccgacgccgtgaccggcagaaccgaggagtacagaagaagaagacacaccatggacaaggacagcagaggcgccgccgccaccaccaccaccaccgagcacagattcttcagaagaagcgtgatctgcgacagcaacgccaccgccctggagctgcccggcctgcccctgagcctgccccagcccagcatccccgccgccgtgccccagagcgccccccccgagccccacagagaggagaccgtgaccgccaccgccaccagccaggtggcccagcagccccccgccgccgccgcccccggcgagcaggccgtggccggccccgcccccagcaccgtgcccagcagcaccagcaaggacagacccgtgagccagcccagcctggtgggcagcaaggaggagcccccccccgccagaagcggcagcggcggcggcagcgccaaggagccccaggaggagagaagccagcagcaggacgacatcgaggagctggagaccaaggccgtgggcatgagcaacgacggcagattcctgaagttcgacatcgagatcggcagaggcagcttcaagaccgtgtacaagggcctggacaccgagaccaccgtggaggtggcctggtgcgagctgcaggacagaaagctgaccaagagcgagagacagagattcaaggaggaggccgagatgctgaagggcctgcagcaccccaacatcgtgagattctacgacagctgggagagcaccgtgaagggcaagaagtgcatcgtgctggtgaccgagctgatgaccagcggcaccctgaagacctacctgaagagattcaaggtgatgaagatcaaggtgctgagaagctggtgcagacagatcctgaagggcctgcagttcctgcacaccagaaccccccccatcatccacagagacctgaagtgcgacaacatcttcatcaccggccccaccggcagcgtgaagatcggcgacctgggcctggccaccctgaagagagccagcttcgccaagagcgtgatcggcacccccgagttcatggcccccgagatgtacgaggagaagtacgacgagagcgtggacgtgtacgccttcggcatgtgcatgctggagatggccaccagcgagtacccctacagcgagtgccagaacgccgcccagatctacagaagagtgaccagcggcgtgaagcccgccagcttcgacaaggtggccatccccgaggtgaaggagatcatcgagggctgcatcagacagaacaaggacgagagatacagcatcaaggacctgctgaaccacgccttcttccaggaggagaccggcgtgagagtggagctggccgaggaggacgacggcgagaagatcgccatcaagctgtggctgagaatcgaggacatcaagaagctgaagggcaagtacaaggacaacgaggccatcgagttcagcttcgacctggagagagacgtgcccgaggacgtggcccaggagatggtggagagcggctacgtgtgcgagggcgaccacaagaccatggccaaggccatcaaggacagagtgagcctgatcaagagaaagagagagcagagacagctggtgagagaggagcaggagaagaagaagcaggaggagagcagcctgaagcagcaggtggagcagagcagcgccagccagaccggcatcaagcagctgcccagcgccagcaccggcatccccaccgccagcaccaccagcgccagcgtgagcacccaggtggagcccgaggagcccgaggccgaccagcaccagcagctgcagtaccagcagcccagcatcagcgtgctgagcgacggcaccgtggacagcggccagggcagcagcgtgttcaccgagagcagagtgagcagccagcagaccgtgagctacggcagccagcacgagcaggcccacagcaccggcaccgtgcccggccacatccccagcaccgtgcaggcccagagccagccccacggcgtgtacccccccagcagcgtgccccagagcatggcccacccctgcggcggcacccccacctaccccgagagccagatcttcttccccaccatccacgagagacccgtgagcttcagccccccccccacctgcccccccaaggtggccatcagccagagaagaaagagcaccagcttcctggaggcccagacccaccacttccagcccctgctgagaaccgtgggccagagcctgctgccccccggcggcagccccaccaactggacccccgaggccgtggtgatgctgggcaccaccgccagcagagtgaccggcgagagctgcgagatccaggtgcaccccatgttcgagcccagccaggtgtacagcgactacagacccggcctggtgctgcccgaggaggcccactacttcatcccccaggaggccgtgtacgtggccggcgtgcactaccaggccagagtggccgagcagtacgagggcatcccctacaacagcagcgtgctgagcagccccatgaagcagatccccgagcagaagcccgtgcagggcggccccaccagcagcagcgtgttcgagttccccagcggccaggccttcctggtgggccacctgcagaacctgagactggacagcggcctgggccccggcagccccctgagcagcatcagcgcccccatcagcaccgacgccaccagactgaagttccaccccgtgttcgtgccccacagcgcccccgccgtgctgacccacaacaacgagagcagaagcaactgcgtgttcgagttccacgtgcacacccccagcagcagcagcggcgagggcggcggcatcctgccccagagagtgtacagaaacagacaggtggccgtggacctgaaccaggaggagctgcccccccagagcgtgggcctgcacggctacctgcagcccgtgaccgaggagaagcacaactaccacgcccccgagctgaccgtgagcgtggtggagcccatcggccagaactggcccatcggcagccccgagtacagcagcgacagcagccagatcaccagcagcgaccccagcgacttccagagccccccccccaccggcggcgccgccgcccccttcggcagcgacgtgagcatgcccttcatccacctgccccagaccgtgctgcaggagagccccctgttcttctgcttcccccagggcaccaccagccagcaggtgctgaccgccagcttcagcagcggcggcagcgccctgcacccccaggcccagggccagagccagggccagcccagcagcagcagcctgaccggcgtgagcagcagccagcccatccagcacccccagcagcagcagggcatccagcagaccgcccccccccagcagaccgtgcagtacagcctgagccagaccagcaccagcagcgaggccaccaccgcccagcccgtgagccagccccaggccccccaggtgctgccccaggtgagcgccggcaagcagggcttcccccccagactgcccccccagtaccccggcgacagcaacatcgcccccagcagcaacgtggccagcgtgtgcatccacagcaccgtgctgagcccccccatgcccaccgaggtgctggccacccccggctacttccccaccgtggtgcagccctacgtggagagcaacctgctggtgcccatgggcggcgtgggcggccaggtgcaggtgagccagcccggcggcagcctggcccaggcccccaccaccagcagccagcaggccgtgctggagagcacccagggcgtgagccaggtggcccccgccgagcccgtggccgtggcccagacccaggccacccagcccaccaccctggccagcagcgtggacagcgcccacagcgacgtggccagcggcatgagcgacggcaacgagaacgtgcccagcagcagcggcagacacgagggcagaaccaccaagagacactacagaaagagcgtgagaagcagaagcagacacgagaagaccagcagacccaagctgagaatcctgaacgtgagcaacaagggcgacagagtggtggagtgccagctggagacccacaacagaaagatggtgaccttcaagttcgacctggacggcgacaaccccgaggagatcgccaccatcatggtgaacaacgacttcatcctggccatcgagagagagagcttcgtggaccaggtgagagagatcatcgagaaggccgacgagatgctgagcgaggacgtgagcgtggagcccgagggcgaccagggcctggagagcctgcagggcaaggacgactacggcttcagcggcagccagaagctggagggcgagttcaagcagcccatccccgccagcagcatgccccagcagatcggcatccccaccagcagcctgacccaggtggtgcacagcgccggcagaagattcatcgtgagccccgtgcccgagagcagactgagagagagcaaggtgttccccagcgagatcaccgacaccgtggccgccagcaccgcccagagccccggcatgaacctgagccacagcgccagcagcctgagcctgcagcaggccttcagcgagctgagaagagcccagatgaccgagggccccaacaccgccccccccaacttcagccacaccggccccaccttccccgtggtgccccccttcctgagcagcatcgccggcgtgcccaccaccgccgccgccaccgcccccgtgcccgccaccagcagcccccccaacgacatcagcaccagcgtgatccagagcgaggtgaccgtgcccaccgaggagggcatcgccggcgtggccaccagcaccggcgtggtgaccagcggcggcctgcccatcccccccgtgagcgagagccccgtgctgagcagcgtggtgagcagcatcaccatccccgccgtggtgagcatcagcaccaccagccccagcctgcaggtgcccaccagcaccagcgagatcgtggtgagcagcaccgccctgtaccccagcgtgaccgtgagcgccaccagcgccagcgccggcggcagcaccgccacccccggccccaagccccccgccgtggtgagccagcaggccgccggcagcaccaccgtgggcgccaccctgaccagcgtgagcaccaccaccagcttccccagcaccgccagccagctgtgcatccagctgagcagcagcaccagcacccccaccctggccgagaccgtggtggtgagcgcccacagcctggacaagaccagccacagcagcaccaccggcctggccttcagcctgagcgcccccagcagcagcagcagccccggcgccggcgtgagcagctacatcagccagcccggcggcctgcaccccctggtgatccccagcgtgatcgccagcacccccatcctgccccaggccgccggccccaccagcacccccctgctgccccaggtgcccagcatcccccccctggtgcagcccgtggccaacgtgcccgccgtgcagcagaccctgatccacagccagccccagcccgccctgctgcccaaccagccccacacccactgccccgaggtggacagcgacacccagcccaaggcccccggcatcgacgacatcaagaccctggaggagaagctgagaagcctgttcagcgagcacagcagcagcggcgcccagcacgccagcgtgagcctggagaccagcctggtgatcgagagcaccgtgacccccggcatccccaccaccgccgtggcccccagcaagctgctgaccagcaccaccagcacctgcctgccccccaccaacctgcccctgggcaccgtggccctgcccgtgacccccgtggtgacccccggccaggtgagcacccccgtgagcaccaccaccagcggcgtgaagcccggcaccgcccccagcaagccccccctgaccaaggcccccgtgctgcccgtgggcaccgagctgcccgccggcaccctgcccagcgagcagctgccccccttccccggccccagcctgacccagagccagcagcccctggaggacctggacgcccagctgagaagaaccctgagccccgagatgatcaccgtgaccagcgccgtgggccccgtgagcatggccgcccccaccgccatcaccgaggccggcacccagccccagaagggcgtgagccaggtgaaggagggccccgtgctggccaccagcagcggcgccggcgtgttcaagatgggcagattccaggtgagcgtggccgccgacggcgcccagaaggagggcaagaacaagagcgaggacgccaagagcgtgcacttcgagagcagcaccagcgagagcagcgtgctgagcagcagcagccccgagagcaccctggtgaagcccgagcccaacggcatcaccatccccggcatcagcagcgacgtgcccgagagcgcccacaagaccaccgccagcgaggccaagagcgacaccggccagcccaccaaggtgggcagattccaggtgaccaccaccgccaacaaggtgggcagattcagcgtgagcaagaccgaggacaagatcaccgacaccaagaaggagggccccgtggccagcccccccttcatggacctggagcaggccgtgctgcccgccgtgatccccaagaaggagaagcccgagctgagcgagcccagccacctgaacggccccagcagcgaccccgaggccgccttcctgagcagagacgtggacgacggcagcggcagcccccacagcccccaccagctgagcagcaagagcctgcccagccagaacctgagccagagcctgagcaacagcttcaacagcagctacatgagcagcgacaacgagagcgacatcgaggacgaggacctgaagctggagctgagaagactgagagacaagcacctgaaggagatccaggacctgcagagcagacagaagcacgagatcgagagcctgtacaccaagctgggcaaggtgccccccgccgtgatcatcccccccgccgcccccctgagcggcagaagaagaagacccaccaagagcaagggcagcaagagcagcagaagcagcagcctgggcaacaagagcccccagctgagcggcaacctgagcggccagagcgccgccagcgtgctgcacccccagcagaccctgcacccccccggcaacatccccgagagcggccagaaccagctgctgcagcccctgaagcccagccccagcagcgacaacctgtacagcgccttcaccagcgacggcgccatcagcgtgcccagcctgagcgcccccggccagggcaccagcagcaccaacaccgtgggcgccaccgtgaacagccaggccgcccaggcccagccccccgccatgaccagcagcagaaagggcaccttcaccgacgacctgcacaagctggtggacaactgggccagagacgccatgaacctgagcggcagaagaggcagcaagggccacatgaactacgagggccccggcatggccagaaagttcagcgcccccggccagctgtgcatcagcatgaccagcaacctgggcggcagcgcccccatcagcgccgccagcgccaccagcctgggccacttcaccaagagcatgtgccccccccagcagtacggcttccccgccacccccttcggcgcccagtggagcggcaccggcggccccgccccccagcccctgggccagttccagcccgtgggcaccgccagcctgcagaacttcaacatcagcaacctgcagaagagcatcagcaacccccccggcagcaacctgagaaccacctag

SEQ ID NO: 72021 - DNA, 7929 bp, Artificial Sequence
  derived and/or modified sequence
atgagtggcggcgcagccgaaaaacagagctcaacgcctggaagtttatttctcagcccccccgcacccgcccctaagaatgggtctagctcagactctagtgttggagagaaacttggcgctgcagccgccgatgcggtaaccggtagaaccgaggagtataggaggcgtcggcacactatggacaaggattcccgcggcgcagccgccactacaaccacaacggagcacagattcttccgtcgctcggtcatctgcgactctaatgctaccgccttagagcttcctgggctgcccttaagtctgccacaaccctctattcccgcagccgtgcctcagtcagcacctcccgagccacaccgggaggaaaccgtgacagcaactgcaacttcccaggtggcacagcagccccccgctgccgccgccccaggggaacaggccgttgcgggacctgcaccttcaaccgtgcccagttccacctccaaggaccggccggtgtctcagccgagcctagtgggaagcaaagaggagccacctcccgcaaggtctgggagcggcggaggttccgcaaaggagccacaagaggaacgcagtcagcagcaagatgacatcgaggagctggagaccaaggcagtgggaatgagtaatgatggccggtttttgaaatttgacattgagatcggccgtggcagctttaagacagtgtataagggacttgatacggaaaccaccgtggaagtcgcgtggtgtgagctgcaggataggaagttaactaagagtgaaaggcaaagattcaaggaagaagcggagatgctgaaaggcctgcagcacccaaatattgtccgtttctacgactcctgggagtcgacagtcaaaggcaaaaaatgtatagtcctggtgactgaactcatgacctccggcacccttaagacctacctgaagaggtttaaagtcatgaagattaaagtccttcgttcgtggtgccggcaaattctcaaaggattacagttcctgcatacaaggacccccccaatcattcatcgggaccttaagtgcgacaacatttttatcacaggccccaccggttccgttaaaatcggcgatctggggctcgctactttgaagagagcatccttcgcgaaatccgtaatcggcacacccgaatttatggctccggagatgtacgaggaaaagtatgatgagtctgtggacgtgtatgcatttggcatgtgtatgctcgaaatggccacttcagagtacccctattctgagtgtcaaaacgctgctcagatttatcgccgcgtaacatcaggcgtcaagccagcatcctttgacaaggtggctatccccgaggttaaagaaattatcgaagggtgtatccgtcagaataaggacgagaggtacagcataaaggacctgcttaaccatgccttcttccaggaggaaactggggtccgcgtggaactggctgaggaagacgacggggagaagattgccatcaagctgtggctacgaatcgaagacataaagaaactgaagggaaagtacaaagataacgaagctattgagttcagctttgacttggagagagatgttccagaggacgttgcccaggagatggtggaatcggggtacgtgtgtgagggtgatcataaaactatggcgaaagcaattaaggatcgggtttcactaatcaaaagaaagcgtgagcagcgacaacttgtgagagaagaacaggagaaaaaaaaacaagaagagtcttccctgaaacagcaagtggagcagagcagtgcgtcacagactggcataaaacagcttccatcagcaagtacaggcattccgacggcgtcgacaacttcagcctctgtgtcaactcaggtcgagccggaagagcccgaagctgatcaacaccagcagttgcagtaccagcaacctagcatcagcgtgctaagcgacgggacagtggattccggccagggaagcagtgtgtttacagagtcacgagtttcatctcagcagactgttagttacggctctcaacatgagcaggcccactcaacaggcacagttcccggacacatcccttctacagtgcaggcccagagccaaccccacggcgtgtatccgccaagctctgttccccaatccatggctcacccctgtggcggcacaccaacttatcccgaatcgcaaattttttttcctactatccacgaaagacccgtatcattttctccacctcccacgtgcccccctaaagtcgccatcagccaacgacgaaaatccactagcttcttggaggctcaaactcaccactttcagcctctactcaggacagtgggccaaagcctcttgccccctgggggcagtccaacaaattggacccctgaagcagtggtcatgcttggcaccacggccagccgcgttaccggcgaatcctgtgaaattcaggtccacccgatgtttgagccgagtcaggtctattcagattacaggcccgggctagtgctcccagaggaggctcattattttatcccccaggaagcagtttatgtggcaggggtgcactatcaggcaagagttgctgagcagtacgaaggcattccatacaattccagcgttctttcctctcccatgaaacagattcctgagcagaagcccgttcagggcggacccacctcctcctccgtctttgagttcccaagtggacaggcttttctagttggccaccttcagaacctcagattagacagtggcctcggccccggatctcccctttctagcatcagcgctcccatttctacagatgctacacgactcaaattccaccccgtgttcgtcccacattctgcccccgccgtgcttactcacaacaatgaatccagatccaactgtgtttttgagttccatgttcatacaccctctagcagctcaggagagggcggaggtatcctgccacaacgggtgtaccgcaacaggcaggtcgccgttgatctgaatcaggaggagctcccaccccaaagcgtcggacttcacggatacttgcaaccagttaccgaggagaagcacaactatcacgccccagagctcacggtgtccgtggttgagcctatcggccagaactggcctatcgggtcccccgagtactccagcgattcatctcagataacctcaagcgacccgagcgactttcagagccccccacccacaggaggagctgctgccccattcggcagtgatgttagcatgcctttcatccatctcccgcagaccgtgctccaagagtccccattgtttttctgcttcccacagggtaccacttcccagcaggtcctaacggcttctttctcttcaggggggtctgccttgcatcctcaggcccaggggcagtcccagggacaaccttccagctcgagcctcacaggcgtctcttcctcacagcccatccagcatccacagcagcagcagggcatacagcaaacagcaccacctcaacagaccgtccagtactctctgtctcagacgtcgacatcatctgaagctactaccgcccaaccagttagtcagcctcaagcaccccaggtcttaccccaggtgagcgccggcaagcagggctttcctccccggctccctcctcagtacccaggagattcaaacattgccccttcatccaacgtcgcttctgtctgcatccactccacagtcctcagccctcccatgcctacggaggttctcgccactcccggttactttccaactgtggtccagccctacgtagagtcaaatctgcttgtgcctatggggggcgttggcggccaagtgcaagtctcacagcccggaggatccttggcccaggcacccactacctcctctcagcaggcagtactcgagtccacacagggcgtgtcacaagtcgcccccgcagagccagtcgcagtcgctcaaactcaggccacacagcccacaaccctggcttcaagcgtcgacagtgcacactccgacgtggccagcggaatgtcagatgggaacgagaatgtgccttccagttccggccgacacgaaggacgcactacgaagcgtcattaccgcaagagtgtgcgaagcagaagtagacatgaaaaaacctcaaggccaaaacttcgcattctgaatgtctccaataagggtgatcgggtcgtagagtgccagcttgagacacataatcgcaagatggttacttttaagtttgatctggatggcgacaatcccgaggaaatagctactatcatggtcaataatgattttatactcgccatcgagcgagaatccttcgtagaccaggtgcgcgagatcatcgagaaagcggatgagatgctctctgaggatgtgtctgtggagcccgagggagatcaaggtctagagtctctccagggcaaggacgactacggcttctccggaagccagaagctggagggcgagtttaagcagcctattccggcatccagcatgcctcagcagattggaatcccgacctcctccttaactcaggttgtgcacagtgccggccgccgcttcatagtgtctcccgtgccagagagtcgcctgcgcgaaagtaaagtgttcccatcggaaataaccgacacagtcgcagcctcaaccgcacagtcgccaggaatgaacctcagtcactctgcaagtagtctcagcctacaacaggcattttcggaactgcgacgagcccagatgaccgagggccccaatacggctccacccaatttctctcacactgggccgactttccccgtcgtgccaccctttctctcatctatcgccggcgtgcccaccacggctgccgccactgcaccagtgcccgccactagctccccacccaacgacatttcaacttcggtcatacagtcagaagtcaccgtaccgacagaagagggaatcgccggggtcgccaccagcaccggagtggtgacatcgggcggtctccccataccccccgtctcagaaagccccgttctgtcgtcagtcgtttcctcaataactatccctgcagtggtgtcaatctctacaacatccccctcccttcaggtgccaacttccacctcagaaattgtcgtgtcctctactgctctgtaccccagcgtgacagtcagcgccacttctgctagcgctgggggatccacggcgactcccggaccgaaaccacctgcagtggtcagccaacaggccgcagggagcaccaccgtcggggcgacgcttacctccgtctcaaccaccactagtttcccatctactgcttcccaactgtgcatccagttatcatcatctacttctactccgacactggcagaaacggtggtggtgtcagcccacagccttgacaagacgagccacagttcaaccacgggcctggccttttctctttcggcccctagctcttccagctcacctggcgctggagtaagctcgtatatcagtcagcctgggggcctccacccactcgtgatcccctccgtcatagcatcaaccccgattctgccgcaggctgctggcccaacatcgactcccttactgcctcaggtaccctcgatccccccactcgtgcagccagttgccaatgttcctgcagtgcagcagacactgatccactcacagcctcagccagcgcttctgccaaaccaaccacatacgcactgtcctgaggtggatagtgacacgcaaccgaaagctcccgggatcgacgacattaagactctcgaggagaagctgcgctcgctattctctgaacattccagttcaggtgcccaacacgcttccgtctctctggagaccagcctcgtaatcgaatctactgtcacgccagggattcctactacggccgttgcacccagcaaattgctgacctctacgacgtccacctgcctccctcccaccaatctgcccctgggaacagtcgctcttcctgtgacacccgtggtaacaccaggccaggtctctacaccagtttctaccacgacctccggcgtgaagcccggaacagccccgtcaaagccccccctgaccaaggctcccgtgctcccggttggcacagaactccctgcagggactctgccatccgagcagttgccaccctttccaggcccaagtctgacccagagccagcagcccttggaagatctggatgcacagctacggcggactctctcccccgaaatgatcactgtgactagcgccgtcggccctgtaagcatggccgctccaactgccatcacagaagctggcacccaaccacaaaagggggtgtcccaagtgaaagagggtcccgtactggccacaagcagcggggccggcgtttttaaaatgggtcgattccaggtctctgtggccgccgacggtgctcagaaagaaggcaagaacaagagcgaggacgccaaatctgtccatttcgagtcgtcaacttccgaatcctcagtgttgagttcctccagtcccgaaagcacactagtcaagcctgagcccaatggcataaccatccctgggattagctctgatgtgccagagtctgcacacaaaaccaccgcgtcagaagccaagtccgataccggccagcccactaaggtgggcagatttcaagtgacaactactgccaataaagtaggaaggttctccgtgtcaaagacggaagataagatcaccgataccaagaaggagggtccagtcgccagcccccctttcatggatctggaacaggctgtgttgccagccgtgatacccaagaaagagaagcctgagctgtctgagcccagccaccttaatggcccgagctcagatccagaagcagccttcctgagccgcgatgtggacgatgggtcaggatctccgcattccccacatcagttatcatcaaaatcactcccctctcaaaatctgtcccaatccctgagcaattctttcaactcaagctatatgtcaagcgataatgagtcagacatcgaagacgaagacctaaagctcgaacttaggagactgcgggataaacatttgaaggagattcaggatctccagtctcgtcagaagcacgagatagaatccctgtataccaaattggggaaagtgccaccggccgtgataatcccacctgctgcaccattgtcaggcagacgacgtcgacccacgaagtcaaagggttctaaatcctccagaagctccagcctgggaaacaaatcgccacagctctccggcaatttgtccggtcagagcgcagctagcgtgctgcatcctcagcagaccctgcacccacccggcaacatcccagaatccggccaaaaccagctcctgcagccattaaagcctagcccaagctctgataacctttattccgcttttaccagcgatggggccatttctgttccttcacttagcgccccgggccaggggacctcctcgacgaacaccgtcggtgctactgtaaactcccaggccgcgcaggcccagccccccgcaatgacatcttcccgcaaggggacctttacagacgatctccacaaactcgtggacaactgggccagggatgctatgaacctctcagggagacgcggaagtaaaggacacatgaattacgaaggccccggaatggcaaggaagttttctgctccaggccagctgtgtatcagcatgacgtctaacctgggaggatcggcacccatcagcgctgcatcagctaccagcctggggcactttaccaagtctatgtgtcccccacagcagtacggattcccggccactccattcggagcccagtggtcggggaccggcggacctgcccctcaacccctcggccagtttcagcctgtgggcacagctagcctgcagaattttaacatctcaaacctgcaaaagtccatcagcaatccccccggctccaacctacggactacctag

SEQ ID NO: 72022 - DNA, 7929 bp, Artificial Sequence
  derived and/or modified sequence
atgtctgggggcgctgctgagaagcagagcagcaccccaggcagcctcttcctgagccccccagccccagcccccaagaatggcagcagcagtgacagctctgtgggggagaagctgggcgctgctgctgctgatgctgtgacaggccgcacagaggagtacagaagaagaagacacaccatggacaaggacagcagaggagctgctgccaccaccaccaccacagagcaccgcttcttcagaagaagtgtcatctgtgacagcaatgccacagccctggagctgcccggcctgcccctgagcctgccccagcccagcatcccagctgctgtgccccagagcgcccctcctgagccccaccgggaggagaccgtgacagccacagccaccagccaggtggcccagcagcccccagctgctgctgcccctggagagcaggccgtggccggccctgcccccagcacagtgcccagcagcaccagcaaggacaggcctgtgtcccagcccagcctggtgggcagcaaggaggagcccccaccagcccggagcggcagcggcggcggcagcgccaaggagccccaggaggagaggagccagcagcaggatgacatcgaggagctggagaccaaggctgtgggcatgagcaatgatggccgcttcctgaagtttgatattgaaattggccggggcagcttcaagacagtgtacaagggcctggacacagagaccaccgtggaggtggcctggtgtgagctgcaggacaggaagctgaccaagtctgagcggcagcgcttcaaggaggaggccgagatgctgaagggcctgcagcaccccaacatcgtgcgcttctatgacagctgggagagcacagtgaagggcaagaagtgcatcgtgctggtgacagagctgatgaccagcggcaccctgaagacctacctgaagcgcttcaaggtgatgaagatcaaggtgctgcgctcctggtgccggcagatcctgaagggcctgcagttcctgcacaccaggaccccacccatcatccaccgggacctgaagtgtgacaacatcttcatcaccggccccactggatctgtgaagatcggggacctgggcctggccaccctgaagagggccagctttgccaagagcgtcatcggcaccccagagttcatggcccctgagatgtatgaggagaagtatgatgagagcgtggatgtgtatgccttcggcatgtgcatgctggagatggccaccagcgagtacccctacagcgagtgccagaatgctgcccagatctacagaagagtgaccagcggcgtgaagccagccagctttgacaaggtggccatccctgaggtgaaggagatcatcgagggctgcatccggcagaacaaggatgagcgctacagcatcaaggacctgctgaaccacgccttcttccaggaggagactggagtgcgggtggagctggccgaggaggatgatggagagaagatcgccatcaagctgtggctgagaattgaggacatcaagaagctgaagggcaagtacaaggacaatgaggccatcgagttctcctttgacctggagagagatgtgcctgaagatgtggcccaggagatggtggagagcggctacgtgtgtgagggggaccacaagaccatggccaaggccatcaaggacagagtgtccctcatcaagaggaagcgggagcagaggcagctggtgcgggaggagcaggagaagaagaagcaggaggagagcagcctgaagcagcaggtggagcagagcagcgccagccagacaggcatcaagcagctgcccagcgccagcacaggcatccccacagccagcaccaccagcgcctctgtgtccacccaggtggagcctgaggagcctgaggccgaccagcaccagcagctgcagtaccagcagcccagcatctctgtgctgagtgatggcaccgtggacagcggccagggcagcagcgtcttcacagagagccgggtgagcagccagcagacagtgtcctatggcagccagcacgagcaggcccacagcactggaacagtgcccggccacatccccagcacagtgcaggcccagagccagccccatggagtgtacccacccagctctgtgccccagagcatggcccacccctgtggcggcacccccacctacccagagagccagatcttcttccccaccatccacgagaggcctgtgtccttcagccccccacccacctgcccccccaaggtggccatcagccagaggaggaagagcaccagcttcctggaggcccagacccaccacttccagcccctgctgaggacagtgggccagagcctgctgcccccaggcggcagccccaccaactggaccccagaggccgtggtgatgctgggcaccacagccagccgggtgactggagagagctgtgagatccaggtgcaccccatgtttgagcccagccaggtgtacagcgactacagacctggcctggtgctgcctgaggaggcccactacttcatcccccaggaggccgtgtatgtggccggcgtgcactaccaggcccgggtggccgagcagtatgagggcatcccctacaacagctctgtgctgagcagccccatgaagcagatccctgagcagaagcctgtgcagggcggccccaccagcagctctgtgtttgagttccccagcggccaggccttcctggtgggccacctgcagaacctgcggctggacagcggcctgggccctggcagccccctgagcagcatcagcgcccccatcagcacagatgccacccggctgaagttccaccctgtgtttgtgccccacagcgccccagctgtgctgacccacaacaatgaaagccgcagcaactgtgtgtttgagttccacgtgcacacccccagcagcagcagcggggagggcggcggcatcctgccccagagggtgtacagaaaccggcaggtggccgtggacctgaaccaggaggagctgcccccccagagcgtgggcctgcacggctacctgcagcctgtgacagaggagaagcacaactaccacgcccctgagctgactgtgtctgtggtggagcccatcggccagaactggcccatcggcagccctgagtacagcagtgacagcagccagatcaccagcagtgaccccagcgacttccagagccccccacccaccggcggggccgccgccccctttggaagtgatgtgtccatgcccttcatccacctgccccagacagtgctgcaggagagccccctcttcttctgcttcccccagggcaccaccagccagcaggtgctgacagccagcttcagcagcggcggcagcgccctgcacccccaggcccagggccagagccagggccagcccagcagcagcagcctgactggagtgagcagcagccagcccatccagcacccccagcagcagcagggcatccagcagacagccccaccccagcagacagtgcagtacagcctgagccagaccagcaccagcagcgaggccaccacagcccagcctgtgtcccagccccaggccccccaggtgctgccccaggtgtctgctgggaagcagggcttccccccccggctgcccccccagtacccaggggacagcaacatcgcccccagcagcaatgtggcctctgtgtgcatccacagcacagtgctgagcccccccatgcccacagaggtgctggccaccccaggctacttccccaccgtggtgcagccctacgtggagagcaacctgctggtgcccatgggcggcgtgggcggccaggtgcaggtgtcccagcccggcggcagcctggcccaggcccccaccaccagcagccagcaggccgtgctggagagcacccagggcgtgtcccaggtggccccagctgagcctgtggccgtggcccagacccaggccacccagcccaccaccctggccagctctgtggacagcgcccacagtgatgtggccagcggcatgtctgatggaaatgaaaatgtgcccagcagcagcggcagacatgagggccgcaccaccaagaggcactacaggaagtctgtgcgcagccgcagcagacatgagaagaccagccggcccaagctgcgcatcctgaatgtgagcaacaagggggacagagtggtggagtgccagctggagacccacaacaggaagatggtgaccttcaagtttgacctggatggagacaaccctgaggagatcgccaccatcatggtgaacaatgacttcatcctggccatcgagcgggagagctttgtggaccaggtgcgggagatcatcgagaaggcagatgagatgctgtctgaagatgtgtctgtggagcctgagggggaccagggcctggagagcctgcagggcaaggatgattatggcttcagcggcagccagaagctggagggggagttcaagcagcccatcccagccagctccatgccccagcagatcggcatccccaccagcagcctgacccaggtggtgcacagcgctggccgccgcttcatcgtgtcccctgtgcctgagagccggctgcgggagagcaaggtgttccccagcgagatcacagacacagtggccgccagcacagcccagagccctggcatgaacctgagccacagcgccagcagcctgagcctgcagcaggccttcagcgagctgcggcgggcccagatgacagagggccccaacacagccccacccaacttcagccacacaggccccaccttccctgtggtgccccccttcctgagcagcattgctggggtgcccaccacagctgctgccacagcccctgtgcctgccaccagcagccccccaaatgacatcagcaccagcgtcatccagagcgaggtgacagtgcccacagaggagggcattgctggggtggccaccagcactggagtggtgaccagcggcggcctgcccatcccccctgtgtctgagagccctgtgctgagctctgtggtgagcagcatcaccatcccagctgtggtgtccatcagcaccaccagccccagcctgcaggtgcccaccagcaccagcgagatcgtggtgagcagcacagccctgtaccccagcgtgacagtgtctgccaccagcgccagcgctgggggcagcacagccaccccaggccccaagcccccagctgtggtgtcccagcaggccgccggcagcaccaccgtgggcgccaccctgacctctgtgtccaccaccaccagcttccccagcacagccagccagctgtgcatccagctgagcagcagcaccagcacccccaccctggccgagaccgtggtggtgtctgcccacagcctggacaagaccagccacagcagcaccaccggcctggccttcagcctgagcgcccccagcagcagcagcagccctggagctggggtgtcctcctacatcagccagcccggcggcctgcaccccctggtgatccccagcgtcatcgccagcacccccatcctgccccaggccgccggccccaccagcacccccctgctgccccaggtgcccagcatcccccccctggtgcagcctgtggccaacgtgcctgctgtgcagcagaccctcatccacagccagccccagcctgccctgctgcccaaccagccccacacccactgcccagaggtggacagcgacacccagcccaaggcccctggcattgatgacatcaagaccctggaggagaagctgcggagcctcttcagcgagcacagcagcagcggggcccagcacgcctctgtgtccctggagaccagcctggtgattgagagcacagtgaccccaggcatccccaccacagctgtggcccccagcaagctgctgaccagcaccaccagcacctgcctgccccccaccaacctgcccctgggcaccgtggccctgcctgtgacccctgtggtgaccccaggccaggtgtccacccctgtgtccaccaccaccagcggcgtgaagccaggcacagcccccagcaagccacccctgaccaaggcccctgtgctgcctgtgggcacagagctgcctgctggcaccctgcccagcgagcagctgccccccttccctggccccagcctgacccagagccagcagcccctggaggacctggatgcccagctgcggaggaccctgagccctgagatgatcaccgtgaccagcgctgtgggccctgtgtccatggccgcccccacagccatcacagaagctggcacccagccccagaagggcgtgtcccaggtgaaggagggccctgtgctggccaccagcagcggggccggggtcttcaagatgggccgcttccaggtgtctgtggccgcagatggagcccagaaggagggcaagaacaagtcagaagatgccaagtctgtgcactttgagagcagcaccagcgagagctctgtgctgagcagcagcagccctgagagcaccctggtgaagccagagcccaacggcatcaccatccctggcatcagcagtgatgtgcctgagagcgcccacaagaccacagccagcgaggccaagagtgacaccggccagcccaccaaggtgggccgcttccaggtgaccaccacagccaacaaggtgggccgcttctctgtgtccaagacagaggacaagatcacagacaccaagaaggagggccctgtggccagcccccccttcatggacctggagcaggccgtgctgcctgctgtgatccccaagaaggagaagccagagctgtctgagcccagccacctgaatggccccagcagtgaccctgaggccgccttcctgagcagagatgtggatgatggcagcggcagcccccacagcccccaccagctgagcagcaagagcctgcccagccagaacctgagccagagcctgagcaacagcttcaacagcagctacatgagcagtgacaatgaaagtgacattgaagatgaggacctgaagctggagctgcggcggctgcgggacaagcacctgaaggagatccaggacctgcagagccggcagaagcatgaaattgagagcctgtacaccaagctgggcaaggtgcccccagctgtgatcatccccccagctgcccccctgtctggaagaagaagaagacccaccaagagcaagggcagcaagagcagccgcagcagcagcctgggcaacaagagcccccagctgagcggcaacctgagcggccagagcgctgcctctgtgctgcacccccagcagaccctgcaccccccaggcaacatccctgagagcggccagaaccagctgctgcagcccctgaagcccagccccagcagtgacaacctgtacagcgccttcaccagtgatggagccatctctgtgcccagcctgagcgcccctggccagggcaccagcagcaccaacacagtgggcgccaccgtgaacagccaggccgcccaggcccagcccccagccatgaccagcagcaggaagggcaccttcacagatgacctgcacaagctggtggacaactgggccagagatgccatgaacctgtctggaagaagaggcagcaagggccacatgaactatgagggccctggcatggccaggaagttcagcgcccctggccagctgtgcatctccatgaccagcaacctgggcggcagcgcccccatctctgctgccagcgccaccagcctgggccacttcaccaagtccatgtgccccccccagcagtatggcttccctgccaccccatttggagcccagtggagcggcaccggcggccctgccccccagcccctgggccagttccagcctgtgggcacagccagcctgcagaacttcaacatcagcaacctgcagaagagcatcagcaaccccccaggcagcaacctgcggaccacctag

SEQ ID NO: 72023 - DNA, 7929 bp, Artificial Sequence
  derived and/or modified sequence
atgagcggcggcgccgccgagaagcagagcagcacccccggcagcttgtttctgtctcctccagcccccgctccaaagaatggatcctcgagtgatagctctgtgggcgaaaagctgggagccgccgcagccgacgcggtgactggtagaacagaagagtatcggcgtcggaggcacacaatggacaaggattcgagaggtgcggccgccaccacgacaaccacagagcatcgctttttcagacggtccgtgatatgcgattctaacgccaccgccctggagcttccgggtctgccactgtctttgccccaaccaagcattcctgcagcagtacctcagtctgccccccctgaaccccatcgggaggagaccgtgacggccaccgcaacatcgcaagtggcccagcagcccccagccgccgctgctccgggcgagcaggcagtggccggccctgctccctccaccgtccccagcagtacaagtaaggatcggccagtctcccaaccctcgttggtcggttcaaaggaagaaccaccgcccgccaggtcaggctccggcgggggttctgccaaggagcctcaagaggagaggtcgcagcagcaagacgatatcgaagaactcgaaacaaaagctgtaggcatgtcgaacgatgggcgatttctcaagttcgatatcgaaatcggtcggggctcctttaagacggtgtacaagggcttagacacagagaccaccgtcgaggtggcatggtgcgagcttcaagacagaaagctaactaagagcgaaagacagcggtttaaagaagaggctgagatgcttaaagggctgcagcaccccaacattgtgcgcttttacgatagctgggagtcaaccgtgaaaggaaaaaagtgcatcgtccttgtaaccgagcttatgacgtcagggactctgaagacatacctgaaacggtttaaagtgatgaagatcaaggtgctgcgttcttggtgtaggcaaatattgaagggcttgcaattcctgcacaccaggacaccgccaattattcacagagatcttaaatgtgacaatatcttcatcacaggaccaactggctctgtgaagatcggtgacctgggcctagctactctgaaacgcgccagcttcgctaaatcggtaatcggtactcctgagttcatggcccctgagatgtatgaggagaaatatgacgagtctgtggatgtctacgcctttggaatgtgcatgctggagatggctaccagcgagtacccttattcagaatgccaaaacgctgcgcaaatttatcgtcgtgtcacctccggtgtgaagccagcttcatttgataaagtggccatcccggaagtaaaagagatcatcgagggctgtatccggcagaataaagatgaaaggtatagcatcaaggatctcttgaaccacgcttttttccaagaagaaaccggagtgagagtggaactggcggaggaggatgacggcgaaaaaatagctatcaagctgtggctgagaatagaagatataaagaaactgaaaggaaaatacaaggacaatgaggctatcgagtttagcttcgacctggagcgggacgtgcccgaggatgttgcgcaagaaatggtggagtccgggtacgtgtgtgaaggggatcataaaactatggctaaagctataaaagatagggtttccctcatcaagcggaaacgggaacagcgtcagctcgtacgtgaagaacaagagaaaaagaagcaagaggaatcaagtcttaagcagcaggtggaacagtcctctgcctctcagaccggcatcaaacagttgcctagtgcatctactgggatccccactgcttcaaccacgtccgcctccgtgtccacgcaggtggaacctgaagagcctgaggctgaccagcaccagcagcttcaataccagcagccatccatcagcgtactgagtgacggaacagttgacagtggtcaggggtcatcagtgttcaccgaaagccgcgttagcagtcagcaaacggtttcctacggtagtcaacatgaacaagcccacagcaccggcacagtgccaggacatatccctagcactgtgcaagctcagagccagccgcatggtgtctatcccccctcgagtgtacctcaaagcatggcacacccctgtggcggcacacctacatatcctgagagccagattttcttccctaccatacacgagaggcccgtgagcttctctccccctcccacgtgtccccccaaagtggcaatttcccagagacgcaaatccacatcatttctcgaagcccagactcatcactttcagccactactgcgaacggtgggacagtcactgttaccccccgggggcagtcctaccaactggaccccggaggcggtcgttatgcttgggaccaccgcttcaagggttactggagaaagttgtgagatccaggtccatcccatgtttgagcccagccaggtgtattctgactatcgccccggactggtgctacctgaagaggctcactattttattccacaggaggcggtttatgttgcaggcgtccactaccaggctagagtggctgagcagtacgagggaatcccctacaattcttcagtcttgagctccccaatgaaacagattcccgaacagaagccagttcagggtggtccaaccagctcctccgtgtttgagttcccctcagggcaggccttcctggttgggcatctgcagaacttacggctggattccggattgggcccgggatcgcccttgagctcaatcagcgcaccaatttccacggacgccacaaggcttaaatttcacccagtgtttgtgccccacagtgctcccgctgtgctgacccataataacgagagcagatcgaattgcgtcttcgagtttcacgttcataccccctctagcagctcgggcgaggggggaggaattctaccgcagagggtttaccgcaaccgccaagtggcagtcgatctcaatcaggaggagctaccgcctcagtcagtgggacttcatggatacctgcagcccgtgactgaagaaaagcataactaccacgctcctgagttgactgtgagcgtcgtcgagcctattggccagaactggccaattgggtcacccgaatactcgagcgacagttcccaaattacgtctagcgaccccagtgactttcagagccctccgcccacaggtggtgctgcagcaccgtttgggagcgatgtgagtatgcctttcattcatttgcctcagaccgtcctccaggaatcacctctcttcttctgtttcccacagggaacaacttcccagcaggtcctgaccgcgagcttcagtagcggcggatctgccctccatccccaagctcagggacagagccagggacagccaagtagtagctccctcaccggggtgagttcgagccagcctatccagcacccacaacaacagcaaggcatccagcagacggctcccccccagcagacagtgcagtacagcctgtcacagacttccacaagttccgaggctaccacggcgcagcctgtgagccaaccccaggccccacaggtactgccccaggtctctgcaggcaaacagggttttcccccaagattgcctccccaatacccaggggacagtaatattgcacctagttccaatgtagccagcgtctgcatacattccaccgtgctgtcacctccgatgcccacagaagtactggccacgccgggatatttcccaactgtggtccagccctacgtggaaagcaatctcctggtgcccatgggtggggttggtggacaggtgcaggtttctcagcccggcggaagcctggcccaagcccctacaacttcatcacaacaggccgtactagagtctactcagggagtgtcccaggtggcccctgcagaacccgttgcagtggcccagacacaggctacccagcccacaacactcgcctcttcagtggattccgcgcactctgatgtggcttccggtatgagcgacggtaatgagaatgtccctagttcttctggccgccacgagggacgcaccacgaaacgccattaccgtaagtccgtccgctccagatcccgtcacgagaaaacaagtcgcccaaaactaaggattctgaacgtgagtaacaagggtgacagggtggtggaatgccagcttgagacccataatagaaaaatggtgaccttcaaatttgatctggacggggataaccctgaagaaatcgccacgattatggtcaataatgactttattctcgctatcgaaagagagtctttcgtcgaccaggtcagagagatcatcgagaaggctgacgagatgctcagcgaggacgtgtcagttgaaccggagggcgatcaggggttagaaagcctgcagggcaaagatgactatggcttttccggatctcagaaattagaaggggagtttaagcagcccatcccggcatctagcatgcctcagcagattggcattccaacctcctccctcacacaggtggtgcacagcgctggtcgcagattcattgtcagtcctgtcccagagtcacgcctccgtgagagcaaagtcttcccatcagagatcaccgatacagtggcagctagcacagctcagtcacctggcatgaatctgtcccacagcgcaagctccctgtcgctgcagcaggcctttagcgagctcaggcgggctcaaatgaccgaaggaccaaacaccgccccgcctaattttagccatacaggacctacattccccgttgtgcccccattcctgtcctccattgcaggggtccctaccaccgccgcagccacagcgcctgtgccagctacatcatctccacctaatgacatctccacatcagttattcagagcgaagttactgtcccaactgaggaaggtattgctggagtggctacctccaccggcgtagttacctctgggggcctgcccattcccccagtatctgagagccctgtactcagttccgttgtttcatccatcactatacccgccgtggtttccatcagtactaccagtccttctctgcaggtgccaacttcgactagcgaaattgtggtctcttccactgctctttatcccagcgtgacagtctccgcgacttcagcgtccgcgggtggaagcactgctacccctggccctaagccaccagctgtcgtgagtcagcaggcggcaggatccactaccgttggcgccaccctcacatctgttagcaccactacatccttccctagcacagccagccagctgtgcatacaactgagcagcagcacctcaacacccacactcgcagagaccgttgtcgtatccgcccacagcctcgacaaaaccagccactcgtcaactacaggactcgccttttcactgtccgctccctcctcgtcttcttcccccggagctggggtgtcaagttacatctcgcagccagggggtctgcatccgctggtcatccctagtgtcatcgcatccacgcctatactcccgcaggccgccggcccaacctccacgcctctgttacctcaggtgcctagcattccgccactcgtgcagcccgtggctaatgttccagctgtccagcagacactgatccacagtcagcctcaacctgctctgctgcccaaccagccccacacccattgtccagaagtggacagtgacacacaaccgaaggccccaggcatcgacgatattaaaacgctggaagaaaagttgcgcagtctctttagtgaacactccagctccggcgcgcaacacgcatcggtgagtctggagaccagtctcgtgatcgaatcgactgttacaccaggcattcctacgacagcagtagcgcctagtaaactgcttacttcgacaaccagtacatgtctgcctcctacaaatctcccgcttggcacagtggcgctcccagtaacccccgttgtaacccctgggcaggtgagcacacctgtgagcaccacgactagtggggtgaaacccggcacagcccccagtaaaccccccttaacaaaagcccccgtgctgccagtgggcacggagctacccgccggtaccctgccatcagaacaactccctccattcccaggcccatcgctgactcagtctcaacagcctctcgaggatcttgacgcccagctgaggcggaccttatcccccgaaatgattactgtgactagtgcagttggacctgttagcatggcggcccctacagcaattacagaggctggaactcagccacagaagggagtgagtcaggtcaaagaaggaccagtgttagcaacctcgagcggggctggtgtatttaaaatgggtcggttccaggtgagcgtcgccgcagacggggctcagaaggaaggcaagaacaagagcgaagacgcaaaatcagtacacttcgaaagctctacatcggaaagcagtgtactgagctcttcttctccagaaagcactctagttaaacctgaacccaatgggattaccattcccggaatcagtagcgacgtgcccgagtcagcacacaaaacaactgccagcgaagcgaaatccgatactgggcagcccaccaaagttggtcgtttccaggtgaccacaactgcaaacaaagtgggtagatttagcgtttccaagacagaggacaagattacagacactaagaaggaaggtccggtggcctcaccccccttcatggacctggaacaggccgtgctgcctgccgtcatacctaagaaagagaaacctgagctgagcgagcccagtcaccttaatgggccatccagcgaccccgaggcagcatttttatcgagggacgtggatgatggcagcggttctccacattccccgcaccaactgagcagcaaatcactgccctctcagaacttgtcccagtccctgagtaatagtttcaatagttcctacatgtcatcagataacgaatccgacattgaagacgaggacctgaagctggagctccgacggctccgggataagcatcttaaggagatccaggacctccagtccagacagaaacacgagatagaatctctgtacaccaagctaggcaaggttccccccgccgtgatcatccccccagccgcccccttgtcgggaagacggcgcagacccaccaaatccaagggctccaagtctagcagatcctcttccctaggtaacaagagtccccaactaagcggcaatctgagtggtcagtccgccgctagcgtgctgcatccacagcagactctccacccccctggaaatataccggagtcaggccagaaccaattgctccagcccttgaagccttccccttcatcggacaacctgtatagtgcattcacatccgacggcgccatctctgtcccgtcccttagcgccccgggacagggaacgtctagcacaaacaccgtcggagctaccgtgaacagccaagctgctcaagcccagccgcctgctatgacctcctctcgaaaaggcactttcacagacgacctgcacaagctcgtcgataattgggctcgggacgccatgaacctcagcggccgccggggttcaaaaggccacatgaattacgaagggcctggcatggcgaggaagttcagcgcccccggccaactctgtatttccatgaccagtaacctcgggggtagcgctcctatctctgcagccagcgccacgtcactgggacattttactaagtcaatgtgtccccctcagcagtatggcttcccagccacccctttcggcgctcagtggtcaggtaccggaggaccagcgcctcagcccctcgggcagttccagccggttggcacggcttcactgcagaacttcaatataagcaaccttcagaagtccatcagtaatccccctgggagtaacctacgcaccacctag

SEQ ID NO: 72024 - DNA, 7928 bp, Artificial Sequence
  derived and/or modified sequence
atgagtggaggtgcggcagagaagcaatcttctactcctggatcactttttctgagcccccctgcccctgcaccgaagaacggttcctccagcgattctagcgtgggcgaaaagctgggtgccgctgccgcagacgctgtaaccggccgaaccgaagagtacagaagacgtagacatactatggacaaagattctcgcggtgccgctgcaaccaccacaacgacggagcataggttttttcgtagaagtgtgatctgcgactctaatgccacagccctggagctccccggacttcccctttcgttgcctcaaccgtctattccggcagccgtcccccaatcagccccacctgaaccacacagagaagaaacagttacggcaactgcaactagccaggtggctcaacagccccctgcggcagctgcccctggcgagcaggccgtcgcgggacccgctcccagcacggttcctagttctacatcgaaagatagaccggtgtcacagccctctctggtcggttcgaaggaggagcccccacccgcacggtccggcagcggcggtggatcggccaaagaaccccaagaggaacggtctcagcaacaggatgacattgaagagttagaaactaaggcggttggcatgtcaaatgacggacggtttctgaagtttgatatcgaaataggcaggggcagctttaaaactgtttataagggcctggacaccgaaacgactgtcgaagttgcgtggtgtgagcttcaggaccggaagctgacaaaatccgagaggcagagatttaaagaggaggccgaaatgctcaaaggcttacagcaccctaacatagttcgattttatgacagctgggaatctacagtcaagggcaagaagtgtatcgtgttagttacggaactaatgacatctggcacgctgaagacctacctgaagcggtttaaggtcatgaagatcaaagtgctgcgctcatggtgtcgccaaatcctgaaaggcctacagttcctgcatacaaggaccccgcctatcatacatagggacctgaaatgtgacaacatatttataaccggaccaaccggctccgtgaaaatcggggatttaggtttggctaccttgaaacgtgcaagcttcgctaagtccgtgataggcacacccgaattcatggcacccgagatgtatgaggagaagtacgatgaaagtgtcgacgtgtacgcattcggcatgtgtatgttagagatggccacttccgaatatccgtatagcgagtgccaaaatgcagcgcaaatctacaggagagtgactagcggcgtaaaacccgcttcatttgacaaagtcgccatccccgaggtgaaagagattatagagggatgcattaggcagaacaaggatgaacgctactccatcaaagatctgcttaatcacgcattctttcaagaggagaccggtgtgagggtggagctcgctgaggaagatgacggcgagaaaattgcaataaaactgtggctgaggattgaggacattaaaaagctgaaggggaagtacaaggacaacgaagctattgagttcagcttcgatttggagagagatgtcccggaggacgttgctcaagagatggtggagtctggatatgtctgcgagggagaccacaaaacgatggcaaaagctatcaaggatagagtaagccttataaagcgtaagagggaacagcgtcagctggtaagagaggagcaggaaaaaaaaaagcaagaggagtctagtctgaaacaacaggtcgaacaatcttctgcaagtcaaaccggcattaaacagttaccatcagcttctaccggaattcccaccgccagtaccacctccgcgtctgtttccacccaagtcgagcccgaagaacctgaagcagaccagcatcagcagctgcagtaccagcaacccagtatctccgtgctatccgacggaactgtggattccggacagggttccagcgtgttcacggagtccagagtatcctctcagcaaactgttagttacggctcccagcacgagcaggctcattcaacaggtacggtgccaggccatatcccaagcacagtccaagcccaaagccaacctcacggcgtatatcccccttcaagcgtgcctcagagtatggctcacccttgcggtggaacccctacctaccccgaaagccagattttcttcccaacgattcatgagcggcctgtgtctttctcacctccacccacctgcccaccgaaagtagctatttcccaacggcgaaagagtacaagctttctggaggcccagactcatcactttcagccccttttgaggacagtgggccaaagcctgctgcctccagggggttcacctaccaattggacgccagaagcggtggtgatgcttgggactaccgcctccagagtcacgggcgagagctgtgagattcaggttcatccaatgtttgagcctagccaggtgtactctgattaccgtcccggattagttctccccgaggaagcccattatttcattccccaggaggccgtatacgtcgcaggtgttcattaccaggctagagttgccgagcaatatgaaggcatcccctataacagctcagtgttgtccagccccatgaaacagattccagagcagaagcctgttcaaggcggtcctacgagctcctctgtgttcgagttcccctccggccaagccttcctggtgggccatctgcagaacttaagactggattccgggcttggacccggttcacctctgagctcaatctccgcaccaatcagcactgatgcaacccgtctgaaatttcaccccgtattcgtcccccactccgctcctgcggtcctgacgcataacaacgagtcaagaagtaattgcgtttttgaatttcatgtacatacaccatcatcctcttcaggtgaggggggtggcattctaccacagcgcgtttaccggaatcgtcaggtggcagtggatcttaaccaggaagagctgccgcctcaatccgtgggactgcatggatacctccagcctgtcacagaggaaaagcataactaccacgcccctgagttaaccgtttcagtggttgaaccgatcggccagaattggcccataggttcccctgaatattcatctgattccagtcagatcactagttctgatccttcggacttccagtctcccccacccactgggggtgcagcagcaccctttggatccgatgtatctatgccttttatccatctcccccagactgtactccaggagtcacccctgtttttctgtttcccccaaggtaccacctcacagcaggtcctcaccgctagttttagctctggtggttccgccctgcaccctcaggctcagggtcagtctcaaggccaaccgagcagcagcagcctgaccggtgtgagttcgtcccaacccatacagcacccgcaacaacagcaggggatacagcagaccgccccaccgcagcagacagttcagtatagcctgtcgcagactagcaccagtagcgaggcaacgactgcccagcccgtgtctcagcctcaggcccctcaggttctgcctcaagtgtccgctgggaaacaggggttccccccaaggctccccccacagtatccaggagattccaatatcgccccaagtagtaatgttgcttccgtgtgtatccactcaactgtcctgtcccctccaatgcccacagaggtgctcgccacacccggatatttccccactgtcgtgcagccctacgtagaaagtaatctcctggtccccatggggggtgtagggggtcaggttcaggtgtctcagcctgggggatctctggcccaggcccctactacaagcagtcagcaggcggtgctggagagcacccagggcgtctcccaggtggcaccagctgagcctgtggcagttgcacaaacacaggctacccagcctaccacactggcaagctcagtcgattcagcacacagcgatgttgcttcgggcatgagcgatgggaacgaaaacgtgcccagctcctctgggcgtcatgaaggcaggactaccaagcgacactaccggaagtcggtgagatccagatccagacatgaaaaaacatcaaggcccaagctgcggatcctgaatgtatccaataaaggagatagagtagttgagtgccagctggagacccataaccgcaaaatggtgacattcaaattcgacttggatggggacaatccagaggagatcgccacaattatggtgaacaatgatttcatcttggcaatagaaagggagtctttcgtagatcaggtaagggagatcatagaaaaggctgacgagatgctttctgaggatgttagcgtcgagcccgagggggatcagggactcgaaagtctgcaaggaaaagatgattacggattttctggcagtcagaagttggaaggagaattcaagcaacccattcctgccagctctatgccgcagcagattgggatacccaccagctcactgactcaggtcgtgcattcagccggtagaagattcattgtgtccccggtgcccgaaagcaggctccgagaatcaaaggttttcccctccgagatcacggataccgtcgctgcctcgaccgcacagtctcccggaatgaacctatcccactctgcttcatcactgtccttgcagcaggcctttagcgagctgagacgggcacaaatgacagaaggccctaatacagcaccgccaaatttctcccacacagggccaacatttcctgtagtccccccattcttgtcaagcattgccggtgtgcctaccacggctgctgccaccgcaccagtgccagccacatcgagcccacccaatgatatctctacctctgtgatccagtctgaggtcaccgtgcctaccgaggagggcatagctggagttgctacctctacaggagtcgtcacgtccggagggctgccgatcccgcctgtgtcagaaagtcccgtgctgtcttctgtagtctcatctatcactatccctgccgttgtctcaatctcaacaacttctccaagtctgcaggtcccaacatccacctccgagattgtagtttcttcgacagctctgtatccatcggtgacggtgagcgctacatccgctagtgctgggggttcaaccgccacacccggacccaagcctcctgcagtggtaagccagcaggccgctggcagcaccacagtaggagcgacattgacctccgtctccacaaccacgtcattccctagtactgcctctcaactgtgcatccagctgagctcctccacctccacacctactctcgccgagactgtggtggtcagtgcccacagtcttgacaagactagccacagctccacaacagggttggctttttcgttatctgctccatcatcaagtagctctcctggtgctggtgttagttcttacatctcccagcccggaggactccacccactcgtcatcccatccgtaattgcaagtacacctatcctccctcaggccgctggtcccacgtcaactccactcctccctcaggtgccgtccatcccaccactggttcagccggttgctaacgtgcctgcagtgcagcaaaccttaatccactcccagccacagcccgctctgctccccaaccagccccacacacactgtcccgaagttgattccgacacccaacctaaagcgcctggaattgatgacattaaaacgctggaagaaaagcttagatccctttttagcgagcacagctcgtctggagcccagcatgccagtgtttccctggagaccagtctagtgatcgaatcgactgtgacccccggtatccccacaaccgcagttgccccatcaaagcttctgacatctaccacatcaacttgtcttccaccaaccaacctgccacttgggactgtagccctgcccgtgactccggtggtgacaccaggacaggtgagcaccccagtcagcactacaacttctggcgtcaaaccaggcactgcaccttctaagccccctcttacaaaagccccagtactcccagtaggtaccgaactgcctgcgggaactcttccctccgagcagttgccaccctttccaggcccatccctcacccaatcccaacagcctctggaagatctagatgctcagctccggcgtaccctgagccctgagatgatcacggtgacctcagctgtgggtcctgtcagtatggcagctcccacagcaattaccgaagcaggtacgcagccacagaagggcgtgtcacaggtgaaggagggaccggtcctagcaaccagtagcggcgcaggcgtgtttaagatgggaaggtttcaggtcagtgtggcagccgatggggcacagaaggagggcaaaaataaatcagaggacgccaaatcagttcatttcgaaagttccacctctgaatcttccgttctttcttcctcgtctcctgagtcaactttggtaaagcctgagcccaatgggatcaccatcccaggtatcagctccgacgtcccagagtcggcacacaagacgaccgccagcgaagcaaaatcagatacaggccagcctactaaggtcggtagattccaggtcaccacaaccgccaataaggtgggccgattcagtgtgtcaaaaacagaagataagattacagacacaaaaaaggaaggacccgtggcctccccgccatttatggacctggagcaagccgtgctgccagctgttattccaaaaaaggagaagcctgagctctccgaaccttcccacctgaatgggccatcttctgacccggaggccgcttttttaagccgtgacgtcgacgatggctccggtagtcctcactcccctcaccaattaagttcaaaaagcctgccgtcacagaatctgagccaatcactgagcaattcttttaattcctcttacatgagctcagacaatgagagtgacatcgaagatgaagacctgaaactggaattgcgcaggctgagagataagcacctcaaggaaatacaggatttacagagccgccaaaaacatgagatcgaatctctctataccaagctaggcaaggttccgcctgcagtgatcatccctcctgcagctcctctctctggacggaggagaagacctacaaagagtaagggatccaaatcctcccggagttcatccctgggaaacaagagcccacagctgagcgggaatctgagcggtcagtcagccgcttccgtgctgcacccccaacagactctccacccgcctggcaacatccccgagtctggccagaaccagctgttacagcctctcaagccttcaccctcaagcgacaacctgtattccgcatttacctccgacggagcgatatcagtgcctagtctgtccgctccaggtcagggaacatcctccaccaatactgtaggcgcaactgtgaacagtcaggccgctcaggctcaaccccctgccatgacctctagccggaaggggacctttacggacgatttgcacaagctagtggataactgggctcgagatgcaatgaatctgtctggtcgaaggggcagtaaaggacacatgaattacgagggacccggaatggccaggaaattcagtgcacccggacagttgtgtatttccatgacctctaacctgggcggtagcgctcccatttccgccgctagcgcaacttcactaggacatttcaccaaatccatgtgtcccccacaacagtacggtttccctgctactccgttcggggctcagtggtctgggaccggagggcctgctccccagccactggggcagtttcagcctgtaggaaccgctagcctgcaaaatttcaacataagtaatttgcagaaaagcatttccaatcctccgggtagcaatctccgaactactta

SEQ ID NO: 72025 - DNA, 11232 bp, Artificial Sequence
  derived and/or modified sequence
ccggcccttcgcctctgggcgatgggcgacctgtgaggccggtccccatcgctgggggcgcgtgtgggaggaggcggccgcccgagtgaccgggagccgggccgcggccttccctcgcccgcctcggcccctcccactcctctgccccggggccgccaccgcccgggcgtcggacctggtcccgtgctcgcggtgccgccgccctctgggcctagcccgcccagctcggcgagcggcggcagtgggagccgcgtccgccgcatccgcctcgactcggtgccggcccctggccctcccctcatgactgcggcgcctctgctgccaccgcccgcccggccgccgctcgccgcaggatggatgcggaccgtgcggcgctaacccccgtggctcagctcccgaatcgcccgccttcgagccctcctcgtgagccgcagcagcctcggtgccagcccccgccgcagctgggcccagcggtccgcctgtccctcgttgcggcttgtcggtgctgagtgaggcgtcgtccgggtcggcgcgaacccgcccggccgcggttccctgcagacctctgcgcgggcggctcggcccttcacgcccttttcgttcacgaatccgagcccgctcgcctctctccagcgaaccgaccatgtctggcggcgccgcagagaagcagagcagcactcccggttccctgttcctctcgccgccggctcctgcccccaagaatggctccagctccgattcctccgtgggggagaaactgggagccgcggccgccgacgctgtgaccggcaggaccgaggagtacaggcgccgccgccacactatggacaaggacagccgtggggcggccgcgaccactaccaccactgagcaccgcttcttccgccggagcgtcatctgtgactccaatgccactgcactggagcttcccggccttcctctttccctgccccagcccagcatccccgcggctgtcccgcagagtgctccaccggagccccaccgggaagagaccgtgaccgccaccgccacttcccaggtagcccagcagcctccagccgctgccgcccctggggaacaggccgtcgcgggccctgccccctcgactgtccccagcagtaccagcaaagaccgcccagtgtcccagcctagccttgtggggagcaaagaggagccgccgccggcgagaagtggcagcggcggcggcagcgccaaggagccacaggaggaacggagccagcagcaggatgatatcgaagagctggagaccaaggccgtgggaatgtctaacgatggccgctttctcaagtttgacatcgaaatcggcagaggctcctttaagacggtctacaaaggtctggacactgaaaccaccgtggaagtcgcctggtgtgaactgcaggatcgaaaattaacaaagtctgagaggcagagatttaaagaagaagctgaaatgttaaaaggtcttcagcatcccaatattgttagattttatgattcctgggaatccacagtaaaaggaaagaagtgcattgttttggtgactgaacttatgacgtctggaacacttaaaacgtatctgaaaaggtttaaagtgatgaagatcaaagttctaagaagctggtgccgtcagatccttaaaggtcttcagtttcttcatactcgaactccacctatcattcaccgcgatcttaaatgtgacaacatctttatcaccggccctactggctcagtcaagattggagacctcggtctggcaaccctgaagcgggcttcttttgccaagagtgtgataggtaccccagagttcatggcccctgagatgtatgaggagaaatatgatgaatccgttgacgtttatgcttttgggatgtgcatgcttgagatggctacatctgaatatccttactcggagtgccaaaatgctgcacagatctaccgtcgcgtgaccagtggggtgaagccagccagttttgacaaagtagcaattcctgaagtgaaggaaattattgaaggatgcatacgacaaaacaaagatgaaagatattccatcaaagaccttttgaaccatgccttcttccaagaggaaacaggagtacgggtagaattagcagaagaagatgatggagaaaaaatagccataaaattatggctacgtattgaagatattaagaaattaaagggaaaatacaaagataatgaagctattgagttttcttttgatttagagagagatgtcccagaagatgttgcacaagaaatggtagagtctgggtatgtctgtgaaggtgatcacaagaccatggctaaagctatcaaagacagagtatcattaattaagaggaaacgagagcagcggcagttggtacgggaggagcaagaaaaaaaaaagcaggaagagagcagtctcaaacagcaggtagaacaatccagtgcttcccagacaggaatcaagcagctcccttctgctagcaccggcatacctactgcttctaccacttcagcttcagtttctacacaagtagaacctgaagaacctgaggcagatcaacatcaacaactacagtaccagcaacccagtatatctgtgttatctgatgggacggttgacagtggtcagggatcctctgtcttcacagaatctcgagtgagcagccaacagacagtttcatatggttcccaacatgaacaggcacattctacaggcacagtcccagggcatataccttctactgtccaagcacagtctcagccccatggggtatatccaccctcaagtgtgcctcagtccatggcgcatccgtgtggggggaccccaacatacccagaatcacagatatttttcccaactattcatgaacgtccagtttctttttcaccacctcccacctgcccaccgaaagtagccatttcccagcggcgtaagagcacctccttcctggaagcccaaactcaccacttccaacccctgctgaggactgttggccaaagtcttcttccacctggtggcagcccaactaactggacaccagaggccgtagttatgttgggtactacagccagtagagtaactggagagtcatgtgagatacaggtccatcctatgtttgaaccatctcaagtttacagtgactatagacctggactagtacttccagaagaagctcactattttattcctcaggaagcagtgtatgtagctggggtacattaccaggcccgggtggcagaacagtatgagggcattccatacaactcatcagtactgtcaagtcctatgaaacagatacctgaacagaagccagtacaagggggccctacttcaagttctgtctttgaatttccatctggacaggctttcctggtaggacaccttcagaatctaagattagattctggattgggtccgggatctcccctctctagtatttctgcacctatcagtacagatgctacacgtttgaaatttcaccctgtctttgttcctcattctgcgcctgctgtgttaactcataacaatgagagcagaagcaactgtgtatttgaatttcatgttcacacaccaagctcctcttcaggagaaggaggtggaattttacctcagcgtgtttaccgaaatcggcaggttgcagtggacttgaatcaagaagaactgcctcctcaatcagttggattacatggctacttgcagcctgtgactgaagaaaagcataattaccatgccccagaattgaccgtttctgtggtagagcctatcggacagaactggccaataggaagcccagaatattccagtgattcctcacaaatcacttcttcagaccccagtgattttcagtcacctccccctacagggggagcagctgcaccttttggctctgacgtctcaatgccctttatccatctgcctcagacagtgttacaagaatccccacttttcttctgtttcccccaaggaaccacatctcagcaggtcttaactgcctcattttcttcaggaggatctgcacttcatccacaggcacaggggcagagccagggtcagccatcctcaagtagcttaacaggggtttcatcttcccaacccatacaacatcctcagcagcagcagggaatacagcagacagcccctcctcaacagacagtgcagtattcactttcacagacatcaacctccagtgaggccactactgcacagccagtgagtcagcctcaagctccacaagtcttgcctcaagtatcagctggaaaacagggcttcccacctcgactgccaccacagtacccaggagattcaaatattgctccctcttccaacgtggcttctgtttgcatccattctacagtcctatcccctcccatgccgacagaagtactggctacacctgggtactttcccacagtggtgcagccttatgtggaatcaaatcttttagttcctatgggtggtgtaggaggacaggttcaagtgtcccagccaggagggagtttagcacaagcccccactacatcctcccagcaagcagttttggagagtactcagggagtctctcaggttgctcctgcagagccagttgcagtagcacagacccaagctacccagccgaccactttggcttcctctgtagacagtgcacattcagatgttgcttcaggtatgagtgatggcaatgagaacgtcccatcttccagtggaaggcatgaaggaagaactacaaaacggcattaccgaaaatctgtaaggagtcgctctcgacatgaaaaaacttcacgcccaaaattaagaattttgaatgtttcaaataaaggagaccgagtagtagaatgtcaattagagactcataataggaaaatggttacattcaaatttgacctagatggtgacaaccccgaggagatagcaacaattatggtgaacaatgactttattctagcaatagagagagagtcgtttgtggatcaagtgcgagaaattattgaaaaagctgatgaaatgctcagtgaggatgtcagtgtggaaccagagggtgatcagggattggagagtctacaaggaaaggatgactatggcttttcaggttctcagaaattggaaggagagttcaaacaaccaattcctgcgtcttccatgccacagcaaataggcattcctaccagttctttaactcaagttgttcattctgcgggaaggcggtttatagtgagtcctgtgccagaaagccgattacgagaatcaaaagttttccccagtgaaataacagatacagttgctgcctctacagctcagagccctggaatgaacttgtctcactctgcatcatcccttagtctacaacaggccttttctgaacttagacgtgcccaaatgacagaaggacccaacacagcacctccaaactttagtcatacaggaccaacatttccagtagtacctcctttcttaagtagcattgctggagtcccaaccacagcagcagccacagcaccagtccctgcaacaagcagccctcctaatgacatttccacatcagtaattcagtctgaggttacagtgcccactgaagaggggattgctggagttgccaccagcacaggtgtggtaacttcaggtggtctccccataccacctgtgtctgaatcaccagtactttccagcgtagtttcaagtatcacaatacctgcagttgtctcaatatctactacatccccgtcacttcaagtccccacatccacatctgagatcgttgtttctagtacagcactgtatccttcagtaacagtttcagcaacttcagcctctgcagggggcagtactgctaccccaggtcctaagcctccagctgtagtatctcagcaggcagcaggcagcactactgtgggagccacattaacatcagtttctaccaccacttcattcccaagcacagcttcacagctgtgcattcagcttagcagcagtacttctactcctactttagctgaaaccgtggtagttagcgcacactcactagataagacatctcatagcagtacaactggattggctttctccctctctgcaccatcttcctcttcctctcctggagcaggagtgtctagttatatttctcagcctggtgggctgcatcctttggtcattccatcagtgatagcttctactcctattcttccccaagcagcaggacctacttctacacctttattaccccaagtacctagtatcccacccttggtacagcctgttgccaatgtgcctgctgtacagcagacactaattcatagtcagcctcaaccagctttgcttcccaaccagccccatactcattgtcctgaagtagattctgatacacaacccaaagctcctggaattgatgacataaagactctagaagaaaagctgcggtctctgttcagtgaacacagctcatctggagctcagcatgcctctgtctcactggagacctcactagtcatagagagcactgtcacaccaggcatcccaactactgctgttgcaccaagcaaactcctgacttctaccacaagtacttgcttaccaccaaccaatttaccactaggaacagttgctttgccagttacaccagtggtcacacctgggcaagtttctaccccagtcagcactactacatcaggagtgaaacctggaactgctccctccaagccacctctaactaaggctccggtgctgccagtgggtactgaacttccagcaggtactctacccagcgagcagctgccaccttttccaggaccttctctaacccagtcccagcaacctctagaggatcttgatgctcaattgagaagaacacttagtccagagatgatcacagtgacttctgcggttggtcctgtgtccatggcggctccaacagcaatcacagaagcaggaacacagcctcagaagggtgtttctcaagtcaaagaaggccctgtcctagcaactagttcaggagctggtgtttttaagatgggacgatttcaggtttctgttgcagcagacggtgcccagaaagagggtaaaaataagtcagaagatgcaaagtctgttcattttgaatccagcacctcagagtcctcagtgctatcaagtagtagtccagagagtaccttggtgaaaccagagccgaatggcataaccatccctggtatctcttcagatgtgccagagagtgcccacaaaactactgcctcagaggcaaagtcagacactgggcagcctaccaaggttggacgttttcaggtgacaactacagcaaacaaagtgggtcgtttctctgtatcaaaaactgaggacaagatcactgacacaaagaaagaaggaccagtggcatctcctccttttatggatttggaacaagctgttcttcctgctgtgataccaaagaaagagaagcctgaactgtcagagccttcacatctaaatgggccgtcttctgacccggaggccgcttttttaagtagggatgtggatgatggttccggtagtccacactcgccccatcagctgagctcaaagagccttcctagccagaatctaagtcaaagccttagtaattcatttaactcctcttacatgagtagcgacaatgagtcagatatcgaagatgaagacttaaagttagagctgcgacgactacgagataaacatctcaaagagattcaggacctgcagagtcgccagaagcatgaaattgaatctttgtataccaaactgggcaaggtgccccctgctgttattattcccccagctgctcccctttcagggagaagacgacgacccactaaaagcaaaggcagcaaatctagtcgaagcagttccttggggaataaaagcccccagctttcaggtaacctgtctggtcagagtgcagcttcagtcttgcacccccagcagaccctccaccctcctggcaacatcccagagtccgggcagaatcagctgttacagccccttaagccatctccctccagtgacaacctctattcagccttcaccagtgatggtgccatttcagtaccaagcctttctgctccaggtcaaggaaccagcagcacaaacactgttggggcaacagtgaacagccaagccgcccaagctcagcctcctgccatgacgtccagcaggaagggcacattcacagatgacttgcacaagttggtagacaattgggcccgagatgccatgaatctctcaggcaggagaggaagcaaagggcacatgaattacgagggccctggaatggcaaggaagttctctgcacctgggcaactgtgcatctccatgacctcgaacctgggtggctctgcccccatctctgcagcatcagctacctctctaggtcacttcaccaagtctatgtgccccccacagcagtatggctttccagctaccccatttggcgctcaatggagtgggacgggtggcccagcaccacagccacttggccagttccaacctgtgggaactgcctccttgcagaatttcaacatcagcaatttgcagaaatccatcagcaaccccccaggctccaacctgcggaccacttagacctagagacattaactgaatagatctgggggcaggagatggaatgctgagggggtgggtgggggtgggaagtagcctatatactaactactagtgctgcatttaactggttatttcttgccagaggggaatgtttttaatactgcattgagccctcagaatggagagtctcccccgctccagttattggaatgggagaggaaggaaagaacagcttttttgtcaaggggcagcttcagaccatgctttcctgtttatctatactcagtaatgaggatgagggctaggaaagtcttgttcataaggaagctggagaactcaatgtaaaatcaaacccatctgtaatttcgagtgggtggagctcttgcttttggtacatgccctgaatccctcactccctcaagaatccgaaccacaggacaaaaaccacctactgggctctctcctaccctgccctcctcccttttttttacccctctcttttttattttttctttgctctttagaacccagtgaaaaataccagggtactggggtgcaactctttcttatgataggtcattagtgctttaagcaaaagatattagcagctttgactgcagcattagcaattaggaaaaaaaaaaaattaagttccctgcggacatgtaactttgccatcagttttgatgtggaaacactgtgatatataaaatgttgttggacaacagtagttttaagagtaaaatatgaaacgtttaaaaagttccaaaaaaagctagctctgtcctttacttattgagacactttaactttttcctttgtatttccattgtattagataaataaatgtgaatgtaaaattgtataaattactgtacttgaatacttctgtttcccagtgttgcttgctggacattttagtgccttggacttctattgcttctgccattagcatcaacttaccagaccccagatcaataaagggcatgtggaaggaaatcgtaggtccatgtgaccccagcagtccagcagtggttatgccaaagggaaattgaaaaagtatttttttaagtcattcaacaactttgtctagagcaggtgtaagatgagtagggtgggaagttaggttggcatcagtggttaaaaacagaaagttctgtttcgggaatagtgaggagggggtgttgtaacaaaattggacaacttaaaagaatggtgtgtgctgggtgaaagacaaagactaaagaatgaggaaacaaacgtgatgcctggccagtgactgtcatataaacctttcttatttgagctaggcttgaacagacgtgacctagaagaaactgaacataaagagaagggggtggggggctagttttcaagttggggaacctgatagtgaaaagtcacagatggagaaaattgctctcagaaaaactgtttggattgctttcctcttgttgcacatgtaccatgcatttctcagcttggggtactacattttgtggaaagttaatctatctatctttccacatctgaattaatcattctaggaaagaatacttattcctactcatttcctttatgatgtccaaatggttgcaggatcataatctattgtgccacctttatttctagaagtacaactaatatgttcacattttcaaataaataatactccccgtaagtaataactgcaaccaatcagtgttattcagtgctatgcctccttgtaatgggtagttattaattattttcagagctttccggaaatactgtcctaactggctatgtttaggatctttgttatctctgaagacaaagaaagaagctaggactcttaattttggggtgcttcttgactcttagttgggaaactgaaaatatttccaaccttttacccacgtcaatggcatattctgggaatcaccaccaccaccaccactaccacagaaagaggctggaggctcctgtaccctgttcattccttaagggccctgcttcccttagtaagtaagtaagttggtctacggccctaaatatgcaaatgagagctgaaggtttttaaaaggtagaaaggaaaagggcaagggcttccacccctgctttaaaatgatttatttattctctgcttgtatttcttgtggagagagtaaggatagaaccaacaaggggctgagtagctgagaaaggggccacccaagagtgaaacatactttataccagaggagcagtggagcctcatgcagcacattatcatttgttatttgggtttaataataattttgacatcttttcactcatacacaaaaaaagtcagaactggtgttatttactgttgatttcatcctcctgtgtatgaaataacaagcctagaggaatgaactagtgctactgaactgtttaaattatttttgtgttaatagtacactttgagtatctttttccacattaaaaactttctgaattataaatgttttccttacattatttaacaatgtacactgttaaaaataaaaataaaaattcaaactttgggggtttctcagcagccgttaattgtacattttgcactaactctgggtgttgcgcttcttgtaagattgcgctttgtgcttcagtttgttacctttgtagacttatttaatgaaaccattcaaataaaccaaacttgcttttgttga

SEQ ID NO: 72026 - protein, 84 aa, Artificial Sequence
  derived and/or modified sequence
  misc_feature (1)..(1): Xaa can be any naturally occurring amino acid
XKEAPEAQMQGSLLPRLECSGTITAASISQAQENSWKPRLPPHAHCLTRATLHSGELLGLLSVPPRGELIAKAKQVETLDPRAL

SEQ ID NO: 72027 - protein, 286 aa, Artificial Sequence
  derived and/or modified sequence
MAGLGLGSAVPVWLAEDDLGCIICQGLLDWPATLPCGHSFCRHCLEALWGARDARRWACPTCRQGAAQQPHLRKNTLLQDLADKYRRAAREIQAGSDPAHCPCPGSSSLSSAAARPRRRPELQRVAVEKSITEVAQELTELVEHLVDIVRSLQNQRPLSESGPDNELSILGKAFSSGVDLSMASPKLVTSDTAAGKIRDILHDLEEIQEKLQESVTWKEAPEAQMQGSLLPRLECSGTITAASISQAQENSWKPRLPPHAHCLTRATLHSGELLGLLSGPSIQPLT

SEQ ID NO: 72028 - DNA, 255 bp, Artificial Sequence
  derived and/or modified sequence
tagaaagaagccccagaggcccagatgcagggaagcttgctcccgagactggaatgttctggtacaatcacggcggcaagcatctcccaggcgcaggagaattcttggaagccccggctgccaccccacgcccactgtctgactcgagctaccctgcattcaggggaattactgggtttgctcagcgtgcccccccgcggtgaattaatcgcaaaagctaaacaggtcgagactttggatcctagagccctttag

SEQ ID NO: 72029 - DNA, 861 bp, Artificial Sequence
  derived and/or modified sequence
atggctgggcttggactgggcagtgccgtgccagtctggcttgcagaggacgatctcggctgtatcatatgtcagggcttactggactggcctgcgacgttaccatgcggccactctttttgtagacactgtctggaggcattgtggggcgcaagggacgctagacggtgggcctgtcccacatgtaggcagggcgcagcacagcagccacacttgagaaagaacacactgctgcaagacttagccgataaatatagaagagccgcaagagagatccaagcaggaagcgacccagcccactgcccttgccccggatcctcaagcctttcaagcgccgcagcccgcccccgccggcgtcccgagctgcaaagggtcgctgtggagaaaagcatcacagaggtcgctcaagaactcaccgaactggttgaacacctagtcgacattgtgagaagtcttcagaaccagcgacccctgtctgagagcgggcctgataacgaattgtccatcctcggcaaggccttctctagtggagtagacctctccatggccagtccaaagctggtgacctcggacacagcggctggaaagattcgcgacatcttgcatgacttggaggaaatacaggaaaagcttcaggaatcagtcacttggaaggaggcccccgaagctcaaatgcagggttctctgttaccccggctggagtgtagtggaaccatcacggctgcaagtattagccaggcacaggagaactcttggaagccaagactgccccctcacgcacactgcctgacaagagccacattgcattcaggagaattgttaggactgctgagcggaccttccatccagccgctcacttag

SEQ ID NO: 72030 - DNA, 255 bp, Artificial Sequence
  derived and/or modified sequence
tgaaaggaggcccctgaggcccagatgcagggcagcctgctgccccggctggagtgcagcggcaccatcacagctgccagcatcagccaggcccaggagaacagctggaagccccggctgccccctcatgcccactgcctgacccgggccaccctgcacagcggggagctgctgggcctgctgtctgtgcccccaagaggagagctgattgccaaggccaagcaggtggagaccctggacccccgggccctgtag

SEQ ID NO: 72031 - DNA, 861 bp, Artificial Sequence
  derived and/or modified sequence
atggccggcctgggcctgggcagcgctgtgcctgtgtggctggccgaggatgacctgggctgcatcatctgccagggcctgctggactggccagccaccctgccctgtggccacagcttctgccgccactgcctggaggccctgtggggcgccagagatgcccggcgctgggcctgccccacctgccggcagggcgccgcccagcagccccacctgaggaagaacaccctgctgcaggacctggccgacaagtaccgccgggccgcccgggagatccaggccggcagtgaccctgcccactgcccctgccccggcagcagcagcctgagcagcgctgctgcccggccccggcggcggcctgagctgcagagggtggccgtggagaagagcatcacagaggtggcccaggagctgacagagctggtggagcacctggtggacatcgtgcgcagcctgcagaaccagaggcccctgtctgagagcggccctgacaatgagctgagcatcctgggcaaggccttcagcagcggcgtggacctgtccatggccagccccaagctggtgaccagtgacacagctgctgggaagatccgggacatcctgcatgacctggaggagatccaggagaagctgcaggagagcgtgacctggaaggaggcccctgaggcccagatgcagggcagcctgctgccccggctggagtgcagcggcaccatcacagctgccagcatcagccaggcccaggagaacagctggaagccccggctgccccctcatgcccactgcctgacccgggccaccctgcacagcggggagctgctgggcctgctgagcggccccagcatccagcccctgacctag

SEQ ID NO: 72032 - DNA, 255 bp, Artificial Sequence
  derived and/or modified sequence
tgaaaggaggcccccgaggcccagatgcagggcagcctgctgcccagactggaatgttcgggtacaataaccgccgcctccatcagtcaggctcaggagaatagctggaaaccccggctgccccctcacgcgcactgcctgaccagggcgactcttcattctggcgagctgctgggcctattgtctgtgcctcccaggggcgaacttatcgctaaggccaaacaagtggagacactagaccctagagctctgtag

SEQ ID NO: 72033 - DNA, 861 bp, Artificial Sequence
  derived and/or modified sequence
atggccggcctgggcctgggcagcgccgtgcccgtgtggctggccgaggatgatttgggatgcatcatatgtcagggactcctggattggccggctactctgccctgcggccattcattctgccggcactgcctggaggcgttgtggggcgcccgcgatgcccgcaggtgggcctgccccacatgccgacagggggctgctcaacagccccacctgcggaagaataccctgctacaggacctcgctgataagtaccggcgcgcagcacgagagatccaagccgggagcgacccagcccactgcccctgtccaggctcatcctcattatcttccgccgctgcacggcctcgcagaaggccagaactgcagcgggtggccgtggagaagagcattacagaggtggcccaggagttaacggaactggttgagcatctggtagacatcgtgcgatctctgcagaatcagcgaccactaagcgaatctggaccagacaacgaactgtccattctggggaaggcattttcttccggtgtcgacctttcaatggcttcacccaaattggttacctccgataccgctgcaggaaaaatccgggacatcctccacgacttggaagagatccaggagaagctgcaggaatccgtcacctggaaagaggcgcctgaggctcaaatgcaagggagcctgctgcctcgtctcgaatgtagcggaacgattaccgcggcttctataagccaggctcaggagaattcctggaaaccacgactcccccctcatgctcactgtcttacccgggccactctacacagcggcgagttattggggctactttctggcccctcaatccagcctctgacatag

SEQ ID NO: 72034 - DNA, 255 bp, Artificial Sequence
  derived and/or modified sequence
tgaaaggaagcgcctgaagcacagatgcagggaagcctcttgccaaggctcgagtgctcagggacgataacagctgccagcattagccaggcccaggaaaactcctggaagccccgtctacctcctcacgctcactgcctcacacgcgctacgttgcacagtggtgagctgctgggcctgctgagtgttccccctcgcggagagcttatcgctaaagcaaaacaggttgagacccttgatccacgggctctgtag

SEQ ID NO: 72035 - DNA, 861 bp, Artificial Sequence
  derived and/or modified sequence
atggccggtctgggcctcggtagtgccgtgcctgtatggctggccgaggatgaccttggctgtatcatttgccaaggtctcctcgactggcctgctacgctaccctgcggccactccttctgccgccactgcctggaagcactgtggggagcaagagacgccagaaggtgggcctgccctacctgtcgccagggggctgcccagcagccccacttgcgtaaaaacacacttctgcaagacctggcggacaaataccggagagccgctcgggaaattcaagccggaagcgaccctgctcactgtccatgtccaggctccagcagcctgagcagcgcggctgcgaggccaagacgccgtccggagctccaaagggtggctgtggagaaatccatcacagaggtggcgcaagagttgacggagctggtggagcatctggttgatattgtgcggtcactgcaaaatcaacgacccctgagcgagagcgggcctgataacgagctctctatcctgggcaaagcattctcctccggggtcgatcttagcatggccagccccaaactagtcacaagcgacaccgcagcaggcaagatccgcgatatcctccacgacctggaggaaatccaggagaagttgcaggaaagtgtgacgtggaaggaagccccagaagctcaaatgcagggcagcttgctgcctaggctcgaatgttctggaacgatcactgctgcttcgatttcgcaggcccaggagaacagttggaaaccacgactgcctcctcacgcacattgtctcactcgcgctacgttgcattcaggtgagcttctgggcctcctgagcggccctagtattcaaccgctgacttag

SEQ ID NO: 72036 - DNA, 251 bp, Artificial Sequence
  derived and/or modified sequence
ggaaagaggctcctgaagcacaaatgcagggttctctgttgcccaggctggagtgcagtggcacaatcactgcagcctcgatctctcaggctcaggagaactcctggaagccccgtcttcctcctcatgcccattgcctgaccagagccaccctgcactcaggagagcttctcggtttgctcagtgtccctccacggggggagctgattgcaaaggcaaagcaggttgagactctagacccaagagcactc

SEQ ID NO: 72037 - DNA, 255 bp, Artificial Sequence
  derived and/or modified sequence
tgaaaggaggcccccgaggcccagatgcagggcagcctgctgcccagactggagtgcagcggcaccatcaccgccgccagcatcagccaggcccaggagaacagctggaagcccagactgcccccccacgcccactgcctgaccagagccaccctgcacagcggcgagctgctgggcctgctgagcgtgccccccagaggcgagctgatcgccaaggccaagcaggtggagaccctggaccccagagccctgtag

SEQ ID NO: 72038 - DNA, 861 bp, Artificial Sequence
  derived and/or modified sequence
atggccggcctgggcctgggcagcgccgtgcccgtgtggctggccgaggacgacctgggctgcatcatctgccagggcctgctggactggcccgccaccctgccctgcggccacagcttctgcagacactgcctggaggccctgtggggcgccagagacgccagaagatgggcctgccccacctgcagacagggcgccgcccagcagccccacctgagaaagaacaccctgctgcaggacctggccgacaagtacagaagagccgccagagagatccaggccggcagcgaccccgcccactgcccctgccccggcagcagcagcctgagcagcgccgccgccagacccagaagaagacccgagctgcagagagtggccgtggagaagagcatcaccgaggtggcccaggagctgaccgagctggtggagcacctggtggacatcgtgagaagcctgcagaaccagagacccctgagcgagagcggccccgacaacgagctgagcatcctgggcaaggccttcagcagcggcgtggacctgagcatggccagccccaagctggtgaccagcgacaccgccgccggcaagatcagagacatcctgcacgacctggaggagatccaggagaagctgcaggagagcgtgacctggaaggaggcccccgaggcccagatgcagggcagcctgctgcccagactggagtgcagcggcaccatcaccgccgccagcatcagccaggcccaggagaacagctggaagcccagactgcccccccacgcccactgcctgaccagagccaccctgcacagcggcgagctgctgggcctgctgagcggccccagcatccagcccctgacctag

SEQ ID NO: 72039 - protein, 54 aa, Artificial Sequence
  derived and/or modified sequence
MSTRKRRGGAINSRQAQKRTREATSTPEISLEAEPIELVETAGDEIVDLTCESL

SEQ ID NO: 72040 - protein, 114 aa, Artificial Sequence
  derived and/or modified sequence
MSTRKRRGGAINSRQAQKRTREATSTPEISLEAEPIELVETAGDEIVDLTCESLEPVVVDLTHNDSVVVSVGVPQVLSVVPSAWTDTQRSCRMDVSSFPQNAAMSSVASASVIP

SEQ ID NO: 72041 - protein, 113 aa, Artificial Sequence
  derived and/or modified sequence
MSTRKRRGGAINSRQAQKRTREATSTPEISLEAEPIELVETAGDEIVDLTCESLEPVVVDLTHNDSVVIVDGPQVLSVVPSAWTDTQRSCRMDVSSFPQNAAMSSVASASVIP

SEQ ID NO: 72042 - DNA, 165 bp, Artificial Sequence
  derived and/or modified sequence
atgtcaactaggaaaaggcgtggaggtgcgatcaacagtcggcaggcacagaaacgtactagagaagccacttccacgcccgagatttcactggaagctgagcctatcgaactggtcgagaccgctggtgatgaaatcgtcgatttaacctgcgaatctctgtag

SEQ ID NO: 72043 - DNA, 345 bp, Artificial Sequence
  derived and/or modified sequence
atgtctacccggaaaagacgggggggtgccataaactcacggcaggcccaaaaacgtacacgggaagctacatctaccccggaaatatccctcgaagcggaacctatcgagctcgtggaaacagcaggcgatgaaatcgtcgaccttacctgtgagtcactggagcccgttgtggtcgatctcactcacaatgattctgtcgttgtatccgtgggcgtcccacaggtgctgtccgtcgtcccgtcagcttggaccgacacccaaagatcatgccgtatggacgtttcatcttttccccaaaatgccgcaatgtctagtgtcgcttctgcaagcgtgatcccttag

SEQ ID NO: 72044 - DNA, 342 bp, Artificial Sequence
  derived and/or modified sequence
atgtccacgcggaaacggcgggggggagctattaatagtagacaggctcagaaacggacacgtgaggctacgtctacaccggaaatctccttggaggctgaacctatagagctggtggagactgccggtgacgaaatcgtcgacttaacatgcgagtctctggagcctgtggtcgtggacctgacccataatgattcagtggttatcgtcgacggtccacaggttctctccgtggtcccatccgcttggacagatacccagaggtcttgtcgcatggacgtctccagcttcccccaaaatgctgctatgagtagcgtggcttcggcctccgtgataccatag

SEQ ID NO: 72045 - DNA, 165 bp, Artificial Sequence
  derived and/or modified sequence
atgagcaccaggaagaggcggggcggggccatcaacagccggcaggcccagaagaggacccgggaggccaccagcaccccagagatcagcctggaggccgagcccatcgagctggtggagacagctggagatgagatcgtggacctgacctgtgagagcctgtag

SEQ ID NO: 72046 - DNA, 345 bp, Artificial Sequence
  derived and/or modified sequence
atgagcaccaggaagaggcggggcggggccatcaacagccggcaggcccagaagaggacccgggaggccaccagcaccccagagatcagcctggaggccgagcccatcgagctggtggagacagctggagatgagatcgtggacctgacctgtgagagcctggagcctgtggtggtggacctgacccacaatgacagcgtggtggtgtctgtgggcgtgccccaggtgctgtctgtggtgcccagcgcctggacagacacccagaggagctgcaggatggatgtgtcctccttcccccagaatgctgccatgagctctgtggccagcgccagcgtcatcccctag

SEQ ID NO: 72047 - DNA, 342 bp, Artificial Sequence
  derived and/or modified sequence
atgagcaccaggaagaggcggggcggggccatcaacagccggcaggcccagaagaggacccgggaggccaccagcaccccagagatcagcctggaggccgagcccatcgagctggtggagacagctggagatgagatcgtggacctgacctgtgagagcctggagcctgtggtggtggacctgacccacaatgacagcgtggtgattgtggatggcccccaggtgctgtctgtggtgcccagcgcctggacagacacccagaggagctgcaggatggatgtgagcagcttcccccagaatgctgccatgagctctgtggccagcgccagcgtcatcccctag

SEQ ID NO: 72048 - DNA, 165 bp, Artificial Sequence
  derived and/or modified sequence
atgagcacccggaagcggcggggcggcgccatcaacagccggcaggcacagaaacggactcgtgaagcaacctcaacaccagaaattagcctggaggctgagccaatcgagctggtcgagactgctggagatgaaatagtggacctcacatgcgaatccctctag

SEQ ID NO: 72049 - DNA, 345 bp, Artificial Sequence
  derived and/or modified sequence
atgagcacccggaagcggcggggcggcgccatcaacagccggcaggcccagaaacgcacaagggaagctacatctacccctgaaatctccctggaggcagagcccattgaactagtggagaccgcaggggacgagatcgttgacctcacctgcgaaagcctggagcctgttgtggtggaccttactcacaatgactccgtcgttgtgagcgtcggggttccccaagtgctgtctgtggtgccctccgcctggactgatacccagcgctcctgtagaatggacgtctcatcattcccacaaaacgcggccatgagtagcgtcgccagtgcaagtgtgattccatag

SEQ ID NO: 72050 - DNA, 342 bp, Artificial Sequence
  derived and/or modified sequence
atgagcacccggaagcggcggggcggcgccatcaacagccggcaggcacagaagcggactagagaagctaccagcaccccggagatcagcttggaggcagaaccaatagagctggtggaaacagcgggcgatgagattgtggatttgacatgtgagtctctggagcctgtagtagtggacctaactcataatgacagcgttgtgattgtcgatggtcctcaggttctgtccgtggtcccctccgcgtggaccgatactcaacggagctgcaggatggatgtgagcagtttcccccagaacgctgcaatgagttcagttgcctccgctagtgtaattccgtag

SEQ ID NO: 72051 - DNA, 165 bp, Artificial Sequence
  derived and/or modified sequence
atgtctacccggaaacggagaggcggagctatcaactctaggcaagcgcagaaacgcacacgcgaagcgacctcaacaccagaaatttctctcgaggccgagcctattgaactcgtggagacggctggtgacgagatcgtagatcttacgtgcgagagtctctag

SEQ ID NO: 72052 - DNA, 345 bp, Artificial Sequence
  derived and/or modified sequence
atgtccacccgtaaacgcagaggaggtgcaattaattctcggcaagctcaaaaaaggactagagaggctacctcgacaccagagatttccctcgaggcagagccaattgagttggtggagactgccggtgatgagatagtggacctgacctgcgaaagcctcgagcccgtcgtggtggacttaacccacaatgacagtgtggttgttagtgtcggcgtgccgcaagtactctcagttgtgcctagtgcatggaccgatacccagagatcatgtaggatggatgtgagttccttccctcagaacgcggcaatgtcctcagtggcctccgcttcagtcattccttag

SEQ ID NO: 72053 - DNA, 342 bp, Artificial Sequence
  derived and/or modified sequence
atgagcacacggaaacggagagggggagctatcaacagccgtcaggcccagaaacgaacaagggaagctacctctacaccggagattagcctcgaagcagagcccatagagttggtagaaacagctggcgacgagattgtggacttgacctgcgaatccctggaaccagtggtggttgacttgacacataatgacagcgtagtgattgtcgacggtcctcaggttctgtcagtagtgccttccgcatggacagatacacagcgtagctgtaggatggacgttagctctttccctcagaacgccgcaatgtcgtccgtggctagcgcgtccgtaatcccatag

SEQ ID NO: 72054 - DNA, 416 bp, Artificial Sequence
  derived and/or modified sequence
gcttctgcttggctgcctagtccacagcctcccgattcaccattcacctggtcccagcaacagaagtctcagctggacacacaacatgctttagagacttgaaaatactggaaatctgtccggatccaaattattttgcaagccagatgagtaaccagagggcatgaaaggttgagaacatttgacttccctgcaaaccttggtatagatcacttccttttctgtaggaaaggaaaggcaccaaagagcacaatgagtacaagaaagcgtcgtggtggagcaataaattctagacaagctcagaagcgaactcgggaagcaacctccacccccgagatctccttggaagcagaacccatagaactcgtggaaactgctggagatgaaattgtggacctcacttgtgaatctttaga

SEQ ID NO: 72055 - DNA, 2799 bp, Artificial Sequence
  derived and/or modified sequence
aatggggacatgatggggggcggagccgaggcctccgaagcggaagtgggttgctgttgaggcggcggcatctttctcgaggagctctcctgggcggctgaagaaggagcttcttctccggagtgcgccggcggtggcgcctgcggacctaactagctccaggttaggccgagctttgcgggaaagcagcggacttgaaaatactggaaatctgtccggatccaaattattttgcaagccagatgagtaaccagagggcatgaaaggttgagaacatttgacttccctgcaaaccttggtatagatcacttccttttctgtaggaaaggaaaggcaccaaagagcacaatgagtacaagaaagcgtcgtggtggagcaataaattctagacaagctcagaagcgaactcgggaagcaacctccacccccgagatctccttggaagcagaacccatagaactcgtggaaactgctggagatgaaattgtggacctcacttgtgaatctttagagcctgtggtggttgatctgactcacaatgactctgttgtggtaagtgttggagtccctcaggtactgtcagttgtcccatctgcatggacggatactcagagatcgtgcagaatggacgtctcatcgtttccacagaatgcggccatgtcttctgtagccagtgcctccgtgattccctgaagaatgctaatacttgcccaacttgtaggaaaaagatcaaccacaaacggtaccaccccatttatatatgaagtattcagagccccccaggagagacggatggacagacagacagccaggttctccagtggtatctgcctccattttcctgagatcaaaaagactgtttcgaaaccaacatctgatatgtaaactgctcttttgtttccaaccccttccttttgttatctccagtttgatgctatggcgctggacccagggccctcccaggccatctctgttcctctggggtggtccagttctagagtgggagaaagggagtcaggcgcattgggaatcgtggttccagtctggttgcagaatctgcacatttgccaagaaattttccctgtttggaaagtttgccccagctttcccgggcacaccaccttttgtcccaagtgtctgccggtcgaccaatctgcctgccacacattgaccaagccagacccggttcacccagctcgaggatcccaggttgaagagtggccccttgaggccctggaaagaccaatcactggacttcttcccttgagagtcagaggtcacccgtgattctgcctgcaccttatcattgatctgcagtgatttctgcaaatcaagagaaactctgcagggcactcccctgtttcctaagaacgaaaaagtgcaataaaggccattcgttacctacttttcagcagcccacaagatgtagcactattagtgtccccctcagaggcttaatgttgcctgtggagcagtgcccatcccagcccgtttctgcccaccagttgttctcaggaaccttacccatgctccagcgtccttcacctggcacaggacatgcaagataaatagggcaggcacgtgtttgggtgtcctctcttttctgataaaatccatcccgtgtttgccacacgccctccagtcctcagttcccactgcctaacgtctgcccccgtgtagatactgagaggtggtggcagtaattgtggccttatcagccgctcagttccaggcttttgcccaggtcactgttgccccatgttcggagaacctggcccacctgtcttggctttctcatccttcccaacccagtgccgtttatttcagaagcttcctggccactgggcttggatgcttcgggcttctgactgctccataggttttgactggtgaaacaggggcccagatgacaacctctccttcgctccacaggtacgcgggagcctcaggttctctcaggggcagcaaagtggcccaagctgcccctgacagcacagggcctggggggtggctaacgagagaggccttacagtgccggcatgcctcctcttccactgtcgtccttcctcagagggcctcacgccaaacaaacggccttttcgtgtgaaacatcttcagggcgggaaaggggccacttctggctttgttagcaataactgaccttcagtttacccttctgaaggagcagggactcagcacagaattcactttagacggggctgaaggagtgtccctcctctatgtgaaaagaaaattgttttattcttcattctgactttttaactgtttggctcacttccagttagtttgaatgaaaataataattttctacttggagttgaagagggcagaatccgcagctctcatcattgtgatgtgtagcatgtctgccctctgactggacatcattgccattaactttcttctgggcatcacggcaatgtcacgatgcccagacttggagcaaggcaaccttggagtcagtccactcataaaatatggtaacacccattttaaaatttaagttttgtccttaaagacaacttcagtggttaattataaaagttgtgttacttcgtcctaaattaaattgatagaaagatttaaaaatgtgttttgtttctactattcagaaactgcgaactagggaaaggttggtatgaagaaatgtctttccttttttcaatgtacatagttcaactctttctttgttacatttaaactatatccatggatatcagtctgctttggactcctctgctagtgttacagatggaaataaaaccattaatttgaacc

SEQ ID NO: 72056 - DNA, 1373 bp, Artificial Sequence
  derived and/or modified sequence
tttctcgaggagctctcctgggcggctgaagaaggagcttcttctccggagtgcgccggcggtggcgcctgcggacctaactagctccaggttaggccgagctttgcgggaaagcagcggacttgaaaatactggaaatctgtccggatccaaattattttgcaagccagatgagtaaccagagggcatgaaaggttgagaacatttgacttccctgcaaaccttggtatagatcacttccttttctgtaggaaaggaaaggcaccaaagagcacaatgagtacaagaaagcgtcgtggtggagcaataaattctagacaagctcagaagcgaactcgggaagcaacctccacccccgagatctccttggaagcagaacccatagaactcgtggaaactgctggagatgaaattgtggacctcacttgtgaatctttagagcctgtggtggttgatctgactcacaatgactctgttgtgattgttgacggccctcaggtactgtcagttgtcccatctgcatggacggatactcagagatcgtgcagaatggacgtctcatcgtttccacagaatgcggccatgtcttctgtagccagtgcctccgtgattccctgaagaatgctaatacttgcccaacttgtaggaaaaagatcaaccacaaacggtaccaccccatttatatatgaagtattcagagccccccaggagagacggatggacagacagacagccaggttctccagtggtatctgcctccattttcctgagatcaaaaagactgtttcgaaaccaacatctgatatgtaaactgctcttttgtttccaaccccttccttttgttatctccagtttgatgctatggcgctggacccagggccctcccaggccatctctgttcctctggggtggtccagttctagagtgggagaaagggagtcaggcgcattgggaatcgtggttccagtctggttgcagaatctgcacatttgccaagaaattttccctgtttggaaagtttgccccagctttcccgggcacaccaccttttgtcccaagtgtctgccggtcgaccaatctgcctgccacacattgaccaagccagacccggttcacccagctcgaggatcccaggttgaagagtggccccttgaggccctggaaagaccaatcactggacttcttcccttgagagtcagaggtcacccgtgattctgcctgcaccttatcattgatctgcagtgatttctgcaaatcaagagaaactctgcagggcactcccctgtttcctaagaacgaaaaagtgcaataaaggccattcgttacctacttttcagcagcccacaagatgtagcactattagtgtccccctc

SEQ ID NO: 72057 - DNA, 165 bp, Artificial Sequence
  derived and/or modified sequence
atgagcaccagaaagagaagaggcggcgccatcaacagcagacaggcccagaagagaaccagagaggccaccagcacccccgagatcagcctggaggccgagcccatcgagctggtggagaccgccggcgacgagatcgtggacctgacctgcgagagcctgtag

SEQ ID NO: 72058 - DNA, 345 bp, Artificial Sequence
  derived and/or modified sequence
atgagcaccagaaagagaagaggcggcgccatcaacagcagacaggcccagaagagaaccagagaggccaccagcacccccgagatcagcctggaggccgagcccatcgagctggtggagaccgccggcgacgagatcgtggacctgacctgcgagagcctggagcccgtggtggtggacctgacccacaacgacagcgtggtggtgagcgtgggcgtgccccaggtgctgagcgtggtgcccagcgcctggaccgacacccagagaagctgcagaatggacgtgagcagcttcccccagaacgccgccatgagcagcgtggccagcgccagcgtgatcccctag

SEQ ID NO: 72059 - DNA, 342 bp, Artificial Sequence
  derived and/or modified sequence
atgagcaccagaaagagaagaggcggcgccatcaacagcagacaggcccagaagagaaccagagaggccaccagcacccccgagatcagcctggaggccgagcccatcgagctggtggagaccgccggcgacgagatcgtggacctgacctgcgagagcctggagcccgtggtggtggacctgacccacaacgacagcgtggtgatcgtggacggcccccaggtgctgagcgtggtgcccagcgcctggaccgacacccagagaagctgcagaatggacgtgagcagcttcccccagaacgccgccatgagcagcgtggccagcgccagcgtgatcccctag

SEQ ID NO: 72060 - protein, 76 aa, Artificial Sequence
  derived and/or modified sequence
MAAAAASRGVGAKLGLREIRIHLCQRSPGSQGVRDFIEKRYVELKKANPDLPILIRECSDVQPKLWARYASRVQNS

SEQ ID NO: 72061 - DNA, 231 bp, Artificial Sequence
  derived and/or modified sequence
atggcggcagctgctgcttcacgaggtgtgggggccaaactgggcctgcgggaaattagaatacatttgtgccaaaggtctccagggtctcagggggtgcgggatttcattgaaaagagatatgtcgaactgaagaaggcaaacccagatctgccaatcctgatcagagagtgcagcgatgtacaaccaaaattgtgggctaggtacgccagtagagtacaaaattcatag

SEQ ID NO: 72062 - DNA, 231 bp, Artificial Sequence
  derived and/or modified sequence
atggctgctgctgctgccagcagaggagtgggcgccaagctgggcctgcgggagatccgcatccacctgtgccagaggagccctggcagccagggcgtgcgggacttcatcgagaagagatatgtggagctgaagaaggccaacccagacctgcccatcctgatcagagaatgttctgatgtgcagcccaagctgtgggcccgctatgccagccgggtgcagaacagctag

SEQ ID NO: 72063 - DNA, 627 bp, Artificial Sequence
  derived and/or modified sequence
gttggtcagaccggagcacttggcctgaagacctggaattggcgacttcgatattaacaaggatggcggcggccgcagcaagtcgaggagtcggggcaaagctgggcctgcgtgagattcgcatccacttatgtcagcgctcgcccggcagccagggcgtcagggacttcattgagaaacgctacgtggagctgaagaaggcgaatcccgacctacccatcctaatccgcgaatgctccgatgtgcagcccaagctctgggcccgctacgcctccagggtgcagaatagttaaagacacctccctctctctcttcagcatttggccaagagacgaatgtccctttgaacaacttcagtgctgatcaggtaaccagagccctggagaacgttctaagtggtaaagcctgaagcctccactgaggattaagagcaacagccccagagcctgggctctgctggacttagtataatgtgaaaaaaatgtgttctcctattcctcataaagcttgtgctgtaaaatactttctcagggtgttcttgtcctcatctaccctctaccccttactgtgcaaccactgaggcaaagtagcttaatataaaaataaaactttattctgtctcatcaa

SEQ ID NO: 72064 - DNA, 231 bp, Artificial Sequence
  derived and/or modified sequence
atggccgccgccgccgccagccggggcgtgggcgccaagctgggcctgcgcgaaatcagaatccatctatgccaacgatcaccagggagccagggggtgagagactttatagagaaacgttacgttgagctgaaaaaagccaaccccgacctgcctatcctgattcgcgagtgcagtgatgtccagcccaaactgtgggcccgatacgcctcacgggtccagaattcctag

SEQ ID NO: 72065 - DNA, 231 bp, Artificial Sequence
  derived and/or modified sequence
atggcagccgctgccgcatcaaggggcgtgggggcaaaactgggcctgcgggagatccgaatccacctgtgccagaggtctcctgggagccagggcgtcagagactttattgaaaagagatatgtcgaactgaaaaaggccaatcctgatctccctattctgatccgcgagtgcagcgatgtccagccgaaattgtgggctaggtacgcatcgcgggtccagaactcctag

SEQ ID NO: 72066 - DNA, 231 bp, Artificial Sequence
  derived and/or modified sequence
atggccgccgccgccgccagcagaggcgtgggcgccaagctgggcctgagagagatcagaatccacctgtgccagagaagccccggcagccagggcgtgagagacttcatcgagaagagatacgtggagctgaagaaggccaaccccgacctgcccatcctgatcagagagtgcagcgacgtgcagcccaagctgtgggccagatacgccagcagagtgcagaacagctag

SEQ ID NO: 72067 - protein, 549 aa, Artificial Sequence
  derived and/or modified sequence
MFTMTRAMEEALFQHFMHQKLGIAYAIHKPFPFFEGLLDNSIITKRMYMESLEACRNLIPVSRVVHNILTQLERTFNLSLLVTLFSQINLREYPNLVTIYRSFKRVGASYEWQSRDTPILLEAPTGLAEGSSLHTPLALPPPQPPQPSCSPCAPRVSEPGTSSQQSDEILSESPSPSDPVLPLPALIQEGRSTSVTNDKLTSKMNAEEDSEEMPSLLTSTVQVASDNLIPQIRDKEDPQEMPHSPLGSMPEIRDNSPEPNDPEEPQEVSSTPSDKKGKKRKRCIWSTPKRRHKKKSLPGGTASSRHGIQKKLKRVDQVPQKKDDSTCNSTVETRAQKARTECARKSRSEEIIDGTSEMNEGKRSQKTPSTPRRVTQGAASPGHGIQEKLQVVDKVTQRKDDSTWNSEVMMRVQKARTKCARKSRLKEKKKEKDICSSSKRRFQKNIHRRGKPKSDTVDFHCSKLPVTCGEAKGILYKKKMKHGSSVKCIRNEDGTWLTPNEFEVEGKGRNAKNWKRNIRCEGMTLGELLKSGLLLCPPRINLKRELNSK

SEQ ID NO: 72068 - protein, 251 aa, Artificial Sequence
  derived and/or modified sequence
MPEIRDNSPEPNDPEEPQEVSSTPSDKKGKKRKRCIWSTPKRRHKKKSLPGEIIDGTSEMNEGKRSQKTPSTPRRVTQGAASPGHGIQEKLQVVDKVTQRKDDSTWNSEVMMRVQKARTKCARKSRLKEKKKEKDICSSSKRRFQKNIHRRGKPKSDTVDFHCSKLPVTCGEAKGILYKKKMKHGSSVKCIRNEDGTWLTPNEFEVEGKGRNAKNWKRNIRCEGMTLGELLKSGLLLCPPRINLKRELNSK

SEQ ID NO: 72069 - protein, 547 aa, Artificial Sequence
  derived and/or modified sequence
MFTMTRAMEEALFQHFMHQKLGIAYAIHKPFPFFEGLLDNSIITKRMYMESLEACRNLIPVSRVVHNILTQLERTFNLSLLVTLFSQINLREYPNLVTIYRSFKRVGASYEWQSRDTPILLEAPTGLAEGSSLHTPLALPPPQPPQPSCSPCAPRVSEPGTSSQQSDEILSESPSPSDPVLPLPALIQEGRSTSVTNDKLTSKMNAEEDSEEMPSLLTSTVQVASDNLIPQIRDKEDPQEMPHSPLGSMPEIRDNSPEPNDPEEPQEVSSTPSDKKGKKRKRCIWSTPKRRHKKKSLPGASSRHGIQKKLKRVDQVPQKKDDSTCNSTVETRAQKARTECARKSRSEEIIDGTSEMNEGKRSQKTPSTPRRVTQGAASPGHGIQEKLQVVDKVTQRKDDSTWNSEVMMRVQKARTKCARKSRLKEKKKEKDICSSSKRRFQKNIHRRGKPKSDTVDFHCSKLPVTCGEAKGILYKKKMKHGSSVKCIRNEDGTWLTPNEFEVEGKGRNAKNWKRNIRCEGMTLGELLKSGLLLCPPRINLKRELNSK

SEQ ID NO: 72070 - protein, 221 aa, Artificial Sequence
  derived and/or modified sequence
MFTMTRAMEEALFQHFMHQKLGIAYAIHKPFPFFEGLLDNSIITKRMYMESLEACRNLIPVSRVVHNILTQLERTFNLSLLVTLFSQINLREYPNLVTIYRSFKRVGASYEWQSRDTPILLEAPTGLAEGSSLHTPLALPPPQPPQPSCSPCAPRVSEPGTSSQQSDEILSESPSPSDPVLPLPALIQEGRSTSVTNDKLTSKMNAEEDSEEMPSLLTSTV

SEQ ID NO: 72071 - protein, 555 aa, Artificial Sequence
  derived and/or modified sequence
MGRGFRMFTMTRAMEEALFQHFMHQKLGIAYAIHKPFPFFEGLLDNSIITKRMYMESLEACRNLIPVSRVVHNILTQLERTFNLSLLVTLFSQINLREYPNLVTIYRSFKRVGASYEWQSRDTPILLEAPTGLAEGSSLHTPLALPPPQPPQPSCSPCAPRVSEPGTSSQQSDEILSESPSPSDPVLPLPALIQEGRSTSVTNDKLTSKMNAEEDSEEMPSLLTSTVQVASDNLIPQIRDKEDPQEMPHSPLGSMPEIRDNSPEPNDPEEPQEVSSTPSDKKGKKRKRCIWSTPKRRHKKKSLPGGTASSRHGIQKKLKRVDQVPQKKDDSTCNSTVETRAQKARTECARKSRSEEIIDGTSEMNEGKRSQKTPSTPRRVTQGAASPGHGIQEKLQVVDKVTQRKDDSTWNSEVMMRVQKARTKCARKSRLKEKKKEKDICSSSKRRFQKNIHRRGKPKSDTVDFHCSKLPVTCGEAKGILYKKKMKHGSSVKCIRNEDGTWLTPNEFEVEGKGRNAKNWKRNIRCEGMTLGELLKSGLLLCPPRINLKRELNSK

SEQ ID NO: 72072 - DNA, 1650 bp, Artificial Sequence
  derived and/or modified sequence
atgttcaccatgaccagagccatggaggaggccctgttccagcacttcatgcaccagaagctgggcatcgcctacgccatccacaagcccttccccttcttcgagggcctgctggacaacagcatcatcaccaagagaatgtacatggagagcctggaggcctgcagaaacctgatccccgtgagcagagtggtgcacaacatcctgacccagctggagagaaccttcaacctgagcctgctggtgaccctgttcagccagatcaacctgagagagtaccccaacctggtgaccatctacagaagcttcaagagagtgggcgccagctacgagtggcagagcagagacacccccatcctgctggaggcccccaccggcctggccgagggcagcagcctgcacacccccctggccctgccccccccccagcccccccagcccagctgcagcccctgcgcccccagagtgagcgagcccggcaccagcagccagcagagcgacgagatcctgagcgagagccccagccccagcgaccccgtgctgcccctgcccgccctgatccaggagggcagaagcaccagcgtgaccaacgacaagctgaccagcaagatgaacgccgaggaggacagcgaggagatgcccagcctgctgaccagcaccgtgcaggtggccagcgacaacctgatcccccagatcagagacaaggaggacccccaggagatgccccacagccccctgggcagcatgcccgagatcagagacaacagccccgagcccaacgaccccgaggagccccaggaggtgagcagcacccccagcgacaagaagggcaagaagagaaagagatgcatctggagcacccccaagagaagacacaagaagaagagcctgcccggcggcaccgccagcagcagacacggcatccagaagaagctgaagagagtggaccaggtgccccagaagaaggacgacagcacctgcaacagcaccgtggagaccagagcccagaaggccagaaccgagtgcgccagaaagagcagaagcgaggagatcatcgacggcaccagcgagatgaacgagggcaagagaagccagaagacccccagcacccccagaagagtgacccagggcgccgccagccccggccacggcatccaggagaagctgcaggtggtggacaaggtgacccagagaaaggacgacagcacctggaacagcgaggtgatgatgagagtgcagaaggccagaaccaagtgcgccagaaagagcagactgaaggagaagaagaaggagaaggacatctgcagcagcagcaagagaagattccagaagaacatccacagaagaggcaagcccaagagcgacaccgtggacttccactgcagcaagctgcccgtgacctgcggcgaggccaagggcatcctgtacaagaagaagatgaagcacggcagcagcgtgaagtgcatcagaaacgaggacggcacctggctgacccccaacgagttcgaggtggagggcaagggcagaaacgccaagaactggaagagaaacatcagatgcgagggcatgaccctgggcgagctgctgaagagcggcctgctgctgtgcccccccagaatcaacctgaagagagagctgaacagcaagtag

SEQ ID NO: 72073 - DNA, 1644 bp, Artificial Sequence
  derived and/or modified sequence
atgttcaccatgaccagagccatggaggaggccctgttccagcacttcatgcaccagaagctgggcatcgcctacgccatccacaagcccttccccttcttcgagggcctgctggacaacagcatcatcaccaagagaatgtacatggagagcctggaggcctgcagaaacctgatccccgtgagcagagtggtgcacaacatcctgacccagctggagagaaccttcaacctgagcctgctggtgaccctgttcagccagatcaacctgagagagtaccccaacctggtgaccatctacagaagcttcaagagagtgggcgccagctacgagtggcagagcagagacacccccatcctgctggaggcccccaccggcctggccgagggcagcagcctgcacacccccctggccctgccccccccccagcccccccagcccagctgcagcccctgcgcccccagagtgagcgagcccggcaccagcagccagcagagcgacgagatcctgagcgagagccccagccccagcgaccccgtgctgcccctgcccgccctgatccaggagggcagaagcaccagcgtgaccaacgacaagctgaccagcaagatgaacgccgaggaggacagcgaggagatgcccagcctgctgaccagcaccgtgcaggtggccagcgacaacctgatcccccagatcagagacaaggaggacccccaggagatgccccacagccccctgggcagcatgcccgagatcagagacaacagccccgagcccaacgaccccgaggagccccaggaggtgagcagcacccccagcgacaagaagggcaagaagagaaagagatgcatctggagcacccccaagagaagacacaagaagaagagcctgcccggcgccagcagcagacacggcatccagaagaagctgaagagagtggaccaggtgccccagaagaaggacgacagcacctgcaacagcaccgtggagaccagagcccagaaggccagaaccgagtgcgccagaaagagcagaagcgaggagatcatcgacggcaccagcgagatgaacgagggcaagagaagccagaagacccccagcacccccagaagagtgacccagggcgccgccagccccggccacggcatccaggagaagctgcaggtggtggacaaggtgacccagagaaaggacgacagcacctggaacagcgaggtgatgatgagagtgcagaaggccagaaccaagtgcgccagaaagagcagactgaaggagaagaagaaggagaaggacatctgcagcagcagcaagagaagattccagaagaacatccacagaagaggcaagcccaagagcgacaccgtggacttccactgcagcaagctgcccgtgacctgcggcgaggccaagggcatcctgtacaagaagaagatgaagcacggcagcagcgtgaagtgcatcagaaacgaggacggcacctggctgacccccaacgagttcgaggtggagggcaagggcagaaacgccaagaactggaagagaaacatcagatgcgagggcatgaccctgggcgagctgctgaagagcggcctgctgctgtgcccccccagaatcaacctgaagagagagctgaacagcaagtag

SEQ ID NO: 72074 - DNA, 666 bp, Artificial Sequence
  derived and/or modified sequence
atgttcaccatgaccagagccatggaggaggccctgttccagcacttcatgcaccagaagctgggcatcgcctacgccatccacaagcccttccccttcttcgagggcctgctggacaacagcatcatcaccaagagaatgtacatggagagcctggaggcctgcagaaacctgatccccgtgagcagagtggtgcacaacatcctgacccagctggagagaaccttcaacctgagcctgctggtgaccctgttcagccagatcaacctgagagagtaccccaacctggtgaccatctacagaagcttcaagagagtgggcgccagctacgagtggcagagcagagacacccccatcctgctggaggcccccaccggcctggccgagggcagcagcctgcacacccccctggccctgccccccccccagcccccccagcccagctgcagcccctgcgcccccagagtgagcgagcccggcaccagcagccagcagagcgacgagatcctgagcgagagccccagccccagcgaccccgtgctgcccctgcccgccctgatccaggagggcagaagcaccagcgtgaccaacgacaagctgaccagcaagatgaacgccgaggaggacagcgaggagatgcccagcctgctgaccagcaccgtgtag

SEQ ID NO: 72075 - DNA, 1668 bp, Artificial Sequence
  derived and/or modified sequence
atgggcagaggcttcagaatgttcaccatgaccagagccatggaggaggccctgttccagcacttcatgcaccagaagctgggcatcgcctacgccatccacaagcccttccccttcttcgagggcctgctggacaacagcatcatcaccaagagaatgtacatggagagcctggaggcctgcagaaacctgatccccgtgagcagagtggtgcacaacatcctgacccagctggagagaaccttcaacctgagcctgctggtgaccctgttcagccagatcaacctgagagagtaccccaacctggtgaccatctacagaagcttcaagagagtgggcgccagctacgagtggcagagcagagacacccccatcctgctggaggcccccaccggcctggccgagggcagcagcctgcacacccccctggccctgccccccccccagcccccccagcccagctgcagcccctgcgcccccagagtgagcgagcccggcaccagcagccagcagagcgacgagatcctgagcgagagccccagccccagcgaccccgtgctgcccctgcccgccctgatccaggagggcagaagcaccagcgtgaccaacgacaagctgaccagcaagatgaacgccgaggaggacagcgaggagatgcccagcctgctgaccagcaccgtgcaggtggccagcgacaacctgatcccccagatcagagacaaggaggacccccaggagatgccccacagccccctgggcagcatgcccgagatcagagacaacagccccgagcccaacgaccccgaggagccccaggaggtgagcagcacccccagcgacaagaagggcaagaagagaaagagatgcatctggagcacccccaagagaagacacaagaagaagagcctgcccggcggcaccgccagcagcagacacggcatccagaagaagctgaagagagtggaccaggtgccccagaagaaggacgacagcacctgcaacagcaccgtggagaccagagcccagaaggccagaaccgagtgcgccagaaagagcagaagcgaggagatcatcgacggcaccagcgagatgaacgagggcaagagaagccagaagacccccagcacccccagaagagtgacccagggcgccgccagccccggccacggcatccaggagaagctgcaggtggtggacaaggtgacccagagaaaggacgacagcacctggaacagcgaggtgatgatgagagtgcagaaggccagaaccaagtgcgccagaaagagcagactgaaggagaagaagaaggagaaggacatctgcagcagcagcaagagaagattccagaagaacatccacagaagaggcaagcccaagagcgacaccgtggacttccactgcagcaagctgcccgtgacctgcggcgaggccaagggcatcctgtacaagaagaagatgaagcacggcagcagcgtgaagtgcatcagaaacgaggacggcacctggctgacccccaacgagttcgaggtggagggcaagggcagaaacgccaagaactggaagagaaacatcagatgcgagggcatgaccctgggcgagctgctgaagagcggcctgctgctgtgcccccccagaatcaacctgaagagagagctgaacagcaagtag

SEQ ID NO: 72076 - DNA, 1650 bp, Artificial Sequence
  derived and/or modified sequence
atgttcaccatgactcgcgccatggaagaagcgctgtttcagcattttatgcaccagaaactggggatcgcatacgccatccataagcctttcccattcttcgaagggcttctggataactctattattactaagagaatgtatatggaaagcttagaagcctgccgaaacttaatccccgtctcccgagtcgtccacaatatcctgacccaactcgagcgcacctttaacctttcactattggtgacacttttctcacagataaacctaagggaataccctaatctggtcacgatctacagatcatttaagagggtcggggcgtcttatgaatggcagtcaagggatacacccattctgctggaagcccctaccggcctagcagaggggtccagtctgcacacccctctcgccctgcctccccctcaacctcctcagccttcttgtagcccttgcgcccccagggtcagcgagccaggtacgtcctcacaacagtccgacgagattctgtcagagtctcccagtccatctgatccagtattacctctgcccgccctgatccaggagggcaggagcacttcagtgactaatgataagttgacttccaagatgaacgccgaggaagactctgaagagatgccttccctgttaacaagcactgtccaggtagccagtgataatttaatccctcagatcagagacaaggaggatcctcaagagatgccacactctccactagggagtatgccggagatcagagataactctccggaacctaatgatccggaagagccccaagaggtgagctcaacgcctagtgacaagaaaggcaaaaagcggaagcgttgcatttggagcaccccaaagcggcgacataagaagaaaagcctgcccggcggtaccgcctcttcccggcatggtattcagaaaaagctgaagcgcgtggaccaagtgcctcagaagaaagatgattcaacatgcaattcaacagttgagaccagggcccaaaaagccagaactgaatgtgcaaggaagtctagatccgaggagatcattgatgggactagcgagatgaacgaggggaagcggtcccagaagactccctcgacccctaggcgggttactcagggggctgcctctccaggacatggaatccaggagaagctgcaggtggtcgataaggtcactcagcgtaaggacgactcgacttggaattccgaagtaatgatgcgcgtccagaaggccagaacaaagtgtgcccggaaatctcgccttaaggagaagaaaaaggaaaaggatatatgctcttcctctaagaggcgatttcagaagaacattcatcggagagggaagcccaaatccgacacagtggacttccattgctctaaacttcctgtgacctgcggggaggccaagggtattttgtacaaaaagaaaatgaagcacgggtcatcggtgaaatgtattcggaatgaggatggcacctggcttacgcccaatgaattcgaagtcgagggcaaggggcgaaatgccaagaattggaaaagaaatatacgctgtgagggaatgacgctgggtgagctgttaaagtctggcctgctgctgtgcccccctagaataaacttgaaacgcgagctcaactctaagtag

SEQ ID NO: 72077 - DNA, 1644 bp, Artificial Sequence
  derived and/or modified sequence
atgtttactatgacacgtgcaatggaagaggccctgtttcagcacttcatgcatcagaaactgggcatcgcatatgccatccacaagccttttccttttttcgaaggtttactggacaactctatcatcaccaagagaatgtacatggaatccctggaggcttgcagaaacctcatacccgtgtcccgggtcgtacacaacattctgacgcagctcgagcggacctttaatctttcgctgctagtgaccctcttcagccaaatcaatttgcgcgaatacccaaatcttgtgactatttatcggtctttcaagagagtcggagccagctatgaatggcagagtagagacactccaattctgctggaagcgccgactggcctggctgaagggtcttccctgcacacccctcttgcactgccccctccccagccacctcagcccagttgtagcccatgtgctcccagagtgtcagagcctggcactagcagccagcaaagcgatgagatactatcggagtcaccatccccatcagaccctgtgctgcccttgccagctctcatccaggagggcagatctacctccgtcacgaacgataaactgacatctaagatgaatgctgaggaagatagtgaggagatgccaagcctcctgacatcgacggtacaggttgccagcgataatctcatcccacaaatccgggataaagaggatccccaagagatgccacattccccactgggttccatgcccgagatccgagacaattcccccgaacccaatgatcccgaagaaccacaggaagtgagcagcacacccagcgataaaaagggcaaaaagaggaaacgttgtatttggtccaccccgaaacgacgccataaaaagaaatccctaccgggggctagctccaggcatgggatacagaaaaaattaaagagagttgaccaagtgccccagaagaaggatgactctacatgcaactcaacagttgagaccagggcacagaaggccagaaccgagtgcgccagaaagtctaggagtgaggaaatcatagacggcaccagtgaaatgaatgaaggcaagcgtagccaaaaaactccaagtacaccacgcagggttacccagggagctgcctcaccaggccacgggattcaggaaaaactgcaggttgtggacaaggtcacacagcggaaagacgatagcacttggaatagtgaggtgatgatgcgggtgcaaaaggcgcgtaccaaatgtgcccggaagtctagactgaaagaaaagaagaaggaaaaggatatatgtagttccagcaaaagaagattccagaagaacatacatagaagggggaagccgaagagcgataccgtggacttccactgtagcaagctgcctgtgacctgcggagaggccaagggcatcctgtataaaaaaaaaatgaagcatggtagctctgtgaagtgtatccggaacgaagatggcacatggctgactcctaacgaatttgaggtggagggaaaaggcagaaacgccaagaattggaaacggaacattagatgcgaaggcatgactctgggagaattactcaagtccggattgctgctgtgtcccccccgcattaacctgaagagagagctgaactcaaagtag

SEQ ID NO: 72078 - DNA, 666 bp, Artificial Sequence
  derived and/or modified sequence
atgttcacaatgacacgcgctatggaagaggccctgttccagcatttcatgcaccaaaagctggggattgcttacgcgattcacaagccatttccattctttgaaggtttgctcgacaacagcataattacgaagcggatgtatatggagtccttggaagcctgtaggaatttgatccctgtgtccagggtggtccacaatattctgacgcagctggagagaacatttaacctctctctgctcgttactctgtttagccagatcaacctgagggagtatcccaacctggtcacgatttatcgttctttcaagcgggtgggggcatcgtatgagtggcagagccgggatacccccatcctgctggaggcacctactggactagcggaaggcagctccctccacactccgcttgcgctgcccccccctcaacctccccagccgtcttgctctccttgcgctcctagggtttcagagccaggtacgtcttctcagcaaagcgatgaaatcttgtcagagtcaccttctccctctgacccagtccttcccctcccagccctgatacaagagggacggtctacttccgtcaccaacgacaaacttacgagtaaaatgaatgcggaggaggacagcgaagagatgccttccctgctcactagcactgtttag

SEQ ID NO: 72079 - DNA, 1668 bp, Artificial Sequence
  derived and/or modified sequence
atgggccgcggcttcagaatgttcacaatgacccgggcgatggaggaggctttatttcaacacttcatgcatcagaagctcggcatcgcttacgcaatacataagccatttcccttcttcgagggactgctggataatagcataattactaaacgtatgtacatggagtcgctggaagcctgtagaaaccttatccctgtgtcaagagtcgtacacaatatactcacccagttggaaaggactttcaacctctccctgctggtgacactgttcagtcaaatcaatctcagggagtatcccaacttagttactatctatcgctctttcaaacgtgtgggcgcctcttacgagtggcaaagcagagacacaccgatcctgctggaagctcctaccggcctcgcggaaggtagctcattgcataccccactggctctccctccaccccagccaccccagccttcctgttccccctgcgcaccccgggtatcagagcccgggacttcaagccagcagtccgatgagatcttgagtgagtcaccaagcccatctgatcccgtcctgccattgcctgctctcatacaggagggtcggtccacttccgtgactaacgacaagctgacctctaagatgaatgcagaggaagatagcgaagaaatgccttcattgttgacctccaccgtgcaggtggcctctgacaacttgatcccacagatacgggataaggaagacccccaggagatgccgcacagcccccttgggtccatgcctgagatcagggataatagtcctgagccgaatgatcctgaggaaccacaggaagtgtccagcacaccttctgacaaaaagggaaagaagagaaaaaggtgcatatggtccactccaaaaagaagacacaagaagaaatctctgcccggaggtacagcgtcctcgagacacgggatccagaagaaattgaaacgagttgatcaggttcctcagaaaaaggacgactctacctgtaactcaacagtggaaacccgagcccagaaggcacggacagaatgcgcaaggaagtccaggtcggaagaaatcattgacggaaccagtgagatgaatgaaggcaaaaggtcccagaagaccccgagcacacctaggagagtaacgcagggggccgcctctccaggacacggtattcaggagaagcttcaggtggtcgataaagtgactcagagaaaagacgacagtacatggaatagcgaggttatgatgcgcgttcagaaggccaggaccaagtgcgcgaggaagtctcgccttaaagaaaagaagaaggaaaaagacatctgtagtagcagcaagaggcggtttcagaagaatattcatcgtcgaggaaagcccaagtccgataccgtggacttccactgctcgaagcttcccgtgacatgcggtgaagcaaaggggatcctgtataagaagaaaatgaaacatggaagcagcgtcaaatgcattagaaacgaggacggtacttggctgactccgaatgagttcgaggtggaaggtaaaggcaggaatgctaagaattggaaacgcaacatcagatgtgaggggatgacccttggagagcttctgaagagtggtctgttgctttgtccgccacgaattaacctcaagcgtgaattgaactccaaatag

SEQ ID NO: 72080 - DNA, 1650 bp, Artificial Sequence
  derived and/or modified sequence
atgttcaccatgacccgggccatggaggaggccctcttccagcacttcatgcaccagaagctgggcatcgcctatgccatccacaagcccttccccttctttgagggcctgctggacaacagcatcatcaccaagaggatgtacatggagagcctggaggcctgcaggaacctgatccctgtgtcccgggtggtgcacaacatcctgacccagctggagaggaccttcaacctgagcctgctggtgaccctcttcagccagatcaacctgcgggagtaccccaacctggtgaccatctaccgctccttcaagagggtgggcgccagctatgagtggcagagccgggacacccccatcctgctggaggcccccaccggcctggccgagggcagcagcctgcacacccccctggccctgcccccaccccagcccccccagcccagctgcagcccctgtgccccccgggtgtctgagcccggcaccagcagccagcagagtgatgagatcctgtctgagagccccagccccagcgaccctgtgctgcccctgcctgccctgatccaggagggccgcagcacctctgtgaccaatgacaagctgaccagcaagatgaatgctgaggaggacagcgaggagatgcccagcctgctgaccagcacagtgcaggtggccagtgacaacctgatcccccagatccgggacaaggaggacccccaggagatgccccacagccccctgggctccatgcctgagatccgggacaacagccctgagcccaatgaccctgaggagccccaggaggtgagcagcacccccagcgacaagaagggcaagaagaggaagcgctgcatctggagcacccccaagaggaggcacaagaagaagagcctgcccggcggcacagccagcagccgccacggcatccagaagaagctgaagagggtggaccaggtgccccagaagaaggatgacagcacctgcaacagcacagtggagacccgggcccagaaggccaggacagaatgtgccaggaagagccgctctgaggagatcattgatggcaccagcgagatgaatgaaggcaagaggagccagaagacccccagcaccccccggcgggtgacccagggcgccgccagccctggccacggcatccaggagaagctgcaggtggtggacaaggtgacccagaggaaggatgacagcacctggaacagcgaggtgatgatgagggtgcagaaggcccggaccaagtgtgccaggaagagccggctgaaggagaagaagaaggagaaggacatctgcagcagcagcaagaggcgcttccagaagaacatccaccggcggggcaagcccaagagtgacacagtggacttccactgcagcaagctgcctgtgacctgtggggaggccaagggcatcctgtacaagaagaagatgaagcacggcagctctgtgaagtgcatcagaaatgaagatggcacctggctgaccccaaatgaatttgaggtggagggcaaaggaagaaatgccaagaactggaagaggaacatccgctgtgagggcatgaccctgggggagctgctgaagagcggcctgctgctgtgccccccacgcatcaacctgaagcgggagctgaacagcaagtag

SEQ ID NO: 72081 - DNA, 1644 bp, Artificial Sequence
  derived and/or modified sequence
atgttcaccatgacccgggccatggaggaggccctcttccagcacttcatgcaccagaagctgggcatcgcctatgccatccacaagcccttccccttctttgagggcctgctggacaacagcatcatcaccaagaggatgtacatggagagcctggaggcctgcaggaacctgatccctgtgtcccgggtggtgcacaacatcctgacccagctggagaggaccttcaacctgagcctgctggtgaccctcttcagccagatcaacctgcgggagtaccccaacctggtgaccatctaccgctccttcaagagggtgggcgccagctatgagtggcagagccgggacacccccatcctgctggaggcccccaccggcctggccgagggcagcagcctgcacacccccctggccctgcccccaccccagcccccccagcccagctgcagcccctgtgccccccgggtgtctgagcccggcaccagcagccagcagagtgatgagatcctgtctgagagccccagccccagcgaccctgtgctgcccctgcctgccctgatccaggagggccgcagcacctctgtgaccaatgacaagctgaccagcaagatgaatgctgaggaggacagcgaggagatgcccagcctgctgaccagcacagtgcaggtggccagtgacaacctgatcccccagatccgggacaaggaggacccccaggagatgccccacagccccctgggctccatgcctgagatccgggacaacagccctgagcccaatgaccctgaggagccccaggaggtgagcagcacccccagcgacaagaagggcaagaagaggaagcgctgcatctggagcacccccaagaggaggcacaagaagaagagcctgcccggggccagcagccgccacggcatccagaagaagctgaagagggtggaccaggtgccccagaagaaggatgacagcacctgcaacagcacagtggagacccgggcccagaaggccaggacagaatgtgccaggaagagccgctctgaggagatcattgatggcaccagcgagatgaatgaaggcaagaggagccagaagacccccagcaccccccggcgggtgacccagggcgccgccagccctggccacggcatccaggagaagctgcaggtggtggacaaggtgacccagaggaaggatgacagcacctggaacagcgaggtgatgatgagggtgcagaaggcccggaccaagtgtgccaggaagagccggctgaaggagaagaagaaggagaaggacatctgcagcagcagcaagaggcgcttccagaagaacatccaccggcggggcaagcccaagagtgacacagtggacttccactgcagcaagctgcctgtgacctgtggggaggccaagggcatcctgtacaagaagaagatgaagcacggcagctctgtgaagtgcatcagaaatgaagatggcacctggctgaccccaaatgaatttgaggtggagggcaaaggaagaaatgccaagaactggaagaggaacatccgctgtgagggcatgaccctgggggagctgctgaagagcggcctgctgctgtgccccccacgcatcaacctgaagcgggagctgaacagcaagtag

SEQ ID NO: 72082 - DNA, 666 bp, Artificial Sequence
  derived and/or modified sequence
atgttcaccatgacccgggccatggaggaggccctcttccagcacttcatgcaccagaagctgggcatcgcctatgccatccacaagcccttccccttctttgagggcctgctggacaacagcatcatcaccaagaggatgtacatggagagcctggaggcctgcaggaacctgatccctgtgtcccgggtggtgcacaacatcctgacccagctggagaggaccttcaacctgagcctgctggtgaccctcttcagccagatcaacctgcgggagtaccccaacctggtgaccatctaccgctccttcaagagggtgggcgccagctatgagtggcagagccgggacacccccatcctgctggaggcccccaccggcctggccgagggcagcagcctgcacacccccctggccctgcccccaccccagcccccccagcccagctgcagcccctgtgccccccgggtgtctgagcccggcaccagcagccagcagagtgatgagatcctgtctgagagccccagccccagcgaccctgtgctgcccctgcctgccctgatccaggagggccgcagcacctctgtgaccaatgacaagctgaccagcaagatgaatgctgaggaggacagcgaggagatgcccagcctgctgaccagcacagtgtag

SEQ ID NO: 72083 - DNA, 1668 bp, Artificial Sequence
  derived and/or modified sequence
atgggccggggcttcaggatgttcaccatgacccgggccatggaggaggccctcttccagcacttcatgcaccagaagctgggcatcgcctatgccatccacaagcccttccccttctttgagggcctgctggacaacagcatcatcaccaagaggatgtacatggagagcctggaggcctgcaggaacctgatccctgtgtcccgggtggtgcacaacatcctgacccagctggagaggaccttcaacctgagcctgctggtgaccctcttcagccagatcaacctgcgggagtaccccaacctggtgaccatctaccgctccttcaagagggtgggcgccagctatgagtggcagagccgggacacccccatcctgctggaggcccccaccggcctggccgagggcagcagcctgcacacccccctggccctgcccccaccccagcccccccagcccagctgcagcccctgtgccccccgggtgtctgagcccggcaccagcagccagcagagtgatgagatcctgtctgagagccccagccccagcgaccctgtgctgcccctgcctgccctgatccaggagggccgcagcacctctgtgaccaatgacaagctgaccagcaagatgaatgctgaggaggacagcgaggagatgcccagcctgctgaccagcacagtgcaggtggccagtgacaacctgatcccccagatccgggacaaggaggacccccaggagatgccccacagccccctgggctccatgcctgagatccgggacaacagccctgagcccaatgaccctgaggagccccaggaggtgagcagcacccccagcgacaagaagggcaagaagaggaagcgctgcatctggagcacccccaagaggaggcacaagaagaagagcctgcccggcggcacagccagcagccgccacggcatccagaagaagctgaagagggtggaccaggtgccccagaagaaggatgacagcacctgcaacagcacagtggagacccgggcccagaaggccaggacagaatgtgccaggaagagccgctctgaggagatcattgatggcaccagcgagatgaatgaaggcaagaggagccagaagacccccagcaccccccggcgggtgacccagggcgccgccagccctggccacggcatccaggagaagctgcaggtggtggacaaggtgacccagaggaaggatgacagcacctggaacagcgaggtgatgatgagggtgcagaaggcccggaccaagtgtgccaggaagagccggctgaaggagaagaagaaggagaaggacatctgcagcagcagcaagaggcgcttccagaagaacatccaccggcggggcaagcccaagagtgacacagtggacttccactgcagcaagctgcctgtgacctgtggggaggccaagggcatcctgtacaagaagaagatgaagcacggcagctctgtgaagtgcatcagaaatgaagatggcacctggctgaccccaaatgaatttgaggtggagggcaaaggaagaaatgccaagaactggaagaggaacatccgctgtgagggcatgaccctgggggagctgctgaagagcggcctgctgctgtgccccccacgcatcaacctgaagcgggagctgaacagcaagtag

SEQ ID NO: 72084 - DNA, 1650 bp, Artificial Sequence
  derived and/or modified sequence
atgttcaccatgacccgggccatggaggaggccctgttccagcacttcatgcatcagaaactggggatcgcatatgcaattcacaagcccttcccttttttcgaaggcctcctggataattctataatcacaaaacggatgtatatggagtccctggaggcttgcagaaacctgattcctgtgagtcgcgtcgtgcacaacattctcactcagttggagcgcactttcaatcttagtttactggtcactctcttcagccagataaatctgcgtgagtatccgaatctggtgaccatttaccgcagctttaagcgggtgggcgcgtcctacgagtggcagtctcgagatactcccattctcctagaggctccgacaggcctagctgagggttcaagcttgcatacccccctggccctcccacccccgcagccgccacaacctagctgtagcccttgcgcgccacgggtgtccgagcctggaacatccagtcagcagtcggatgagatcctgtccgagtccccatcaccgagcgatccggtgctcccactgcctgctctgatacaagagggccggagcacaagtgtcactaatgacaaattgacttctaaaatgaatgccgaggaggactcagaggagatgccttccctgctaacttcaaccgtgcaggtagctagcgataacctgattccacaaatccgagacaaagaggatcctcaggaaatgccgcactcacctctcggctccatgcccgaaatccgggacaactcaccggaaccaaatgatccagaggaaccacaggaagttagctctacgcctagcgacaaaaagggcaaaaagagaaaaaggtgcatttggagtaccccaaagaggcgacacaagaagaaatcactacctggaggaaccgcctctagtagacacggcattcagaaaaagcttaagcgggtggatcaggtcccacagaaaaaagacgactccacatgcaactcaacggtcgagactagggcacaaaaggcacgcacagaatgtgcaagaaaatcacggtcggaagaaatcatcgatggaactagtgagatgaacgaaggtaaacggtcccagaagacaccctctaccccaagaagggtgactcaaggcgcagcctcaccaggacacggaatacaagagaagttgcaggtggtcgacaaagtgactcagaggaaggatgacagcacttggaacagcgaagtgatgatgcgtgtgcagaaagcgcggaccaagtgtgcaaggaagagtcggcttaaggagaaaaaaaaagaaaaagatatttgttccagctccaaaagaaggttccagaagaacatacaccgcagaggcaaaccaaaatccgatacggtggatttccactgctctaaattgccagtgacctgcggcgaggccaagggcatactttataagaaaaagatgaagcacggcagtagcgttaagtgtatcaggaatgaagatggaacgtggctgaccccaaacgaattcgaggttgagggaaaaggaaggaatgcaaaaaactggaagcgcaacatacggtgcgagggtatgaccctaggggaactgctaaagtccggccttctgctttgtccgccgcgaattaacctgaagcgggagctgaactcaaaatag

SEQ ID NO: 72085 - DNA, 1644 bp, Artificial Sequence
  derived and/or modified sequence
atgttcaccatgacccgggccatggaggaggccctgttccagcactttatgcaccagaaacttggcatagcgtacgctattcacaagccttttccattctttgaaggcctcctggataatagcatcatcactaagaggatgtatatggagagcctggaggcgtgccgaaacctgatccctgttagtcgagttgtgcacaatatcttgactcagttggaacgcactttcaacttgtcgctcctcgtcactctgttcagccagatcaacctgcgcgaatacccaaatttagttactatataccggagctttaaaagagtgggcgcatcctacgagtggcagtccagggatacaccgatcctcctggaagcgcctactgggctggccgaaggatcctctctgcacactcccctcgccctcccccctcctcaaccccctcaaccgtcatgctctccttgcgctcctcgggtgtccgaacctggcacctcatcacagcaatctgacgagattctctctgaatcgccgagcccatctgaccccgtgttaccccttcctgccctgatacaggagggacggagcaccagtgtgacaaatgacaaacttaccagcaagatgaacgccgaggaggacagcgaggagatgccatcattgctcacctcgactgtgcaggtggcatcagataatctgataccccagatcagggataaggaagacccgcaggaaatgcctcattctcccctcggatcgatgccagaaatcagagacaattctccagaacccaatgatcctgaggaaccccaggaggtctcatctactccctctgataagaaaggcaagaagcggaagcggtgcatttggtccacgccaaagaggagacacaagaagaaaagcctccctggggcaagttcccggcacggcatccagaaaaaattaaaacgtgttgaccaggtcccccagaaaaaggatgattccacatgtaattccacagttgaaacaagagcgcagaaagcccgaaccgaatgcgccagaaaaagcaggtctgaagagattatagatgggacgtccgagatgaacgaaggaaaacgctcgcaaaagaccccctcaacaccacggcgagtgacccagggcgctgcgtcccctggccacggtattcaagaaaaactgcaagtggtcgataaggtgactcagcggaaggatgactctacttggaactccgaggtcatgatgagagttcaaaaggcccggacaaagtgtgcccggaaatcccgtctgaaggaaaagaaaaaggagaaagatatctgtagctcgtcaaagcgccgctttcagaaaaacatccatagaagggggaaaccgaagagcgacacagtggacttccattgttcaaaattgcctgtgacatgcggggaggctaaggggatactttacaagaagaagatgaagcacggcagcagtgtgaagtgcatcagaaacgaggatggcacctggctgactcctaacgagttcgaggtagagggcaaaggtaggaacgccaagaactggaagaggaacatacgatgcgaagggatgactctcggcgagttactgaaaagcggcctgcttctttgtcctcccagaatcaatctcaagcgtgagctcaacagcaaatag

SEQ ID NO: 72086 - DNA, 666 bp, Artificial Sequence
  derived and/or modified sequence
atgttcaccatgacccgggccatggaggaggccctgttccagcacttcatgcatcagaagttaggaattgcctacgcaattcacaagcccttcccattcttcgagggactgctcgataacagtatcattacgaagagaatgtatatggaatctctggaggcctgtaggaatctgatcccagtcagcagggtcgtacacaatattctgacccaacttgagcgaacttttaacctttcacttctcgtgaccctgttcagccagattaacctaagagaatatcccaacttagttactatatacaggagctttaagagagttggagcttcgtacgaatggcaaagcagggatactccaatccttctggaagcccccacaggactggccgaggggtctagcttacacacacccctcgcactcccacctcctcagccgcctcagccctcttgtagcccgtgtgcaccccgcgtcagcgagccagggacatcgtctcagcagagcgacgagatcctcagcgaatccccctccccaagcgatccagtgctgccgctgcctgctctcatccaggagggcagatctaccagtgtaactaacgataagctgaccagtaaaatgaacgccgaagaagattcagaagagatgccatcactgctcacctccaccgtctag

SEQ ID NO: 72087 - DNA, 1668 bp, Artificial Sequence
  derived and/or modified sequence
atgggccggggcttccggatgttcaccatgacccgggccatggaggaagccctttttcagcactttatgcaccaaaagttagggatagcctacgcgatccataagccattccccttctttgaaggcttgctagacaacagcataatcacaaaacgcatgtacatggagtctttagaggcctgccgcaatttgatcccagtgagcagagtcgtgcacaatattctgactcagctggagcgaaccttcaacctgtccctcctcgttaccctcttctcacagatcaacctaagagaataccccaatctggtgaccatttacagatcttttaagcgggtcggggcaagctatgaatggcagagccgcgatacccctatacttttagaagcaccaaccgggctggctgagggatcatccctgcacacacccctggccctaccacccccgcagcctccccagcccagttgtagtccctgtgctccaagagtgagcgagccaggaaccagcagccaacagtctgatgaaatactctcagaaagtccgtccccaagtgacccagtgttaccactgccagcactcatccaggaagggcgttctacaagcgtgacgaacgacaaattgaccagcaaaatgaatgctgaggaggactccgaggagatgccctcactcctgacctcaactgtgcaggtggctagtgataatttaatcccacagattcgcgataaagaagacccgcaggaaatgccacactcccccctgggatcaatgcctgaaatccgcgacaacagtcccgaacccaacgaccccgaagagcctcaggaggtgtcctctaccccgagcgataagaaagggaaaaaaaggaaaaggtgcatttggtccactccaaagcgtcggcacaaaaagaagtcattacctggaggtacggcaagctcacggcatggaatccagaagaagctgaagagagtggaccaggtgccacagaaaaaggatgattctacgtgtaatagcacagtcgagacaagggcccagaaggccaggacagagtgtgcccgtaagtcaagatctgaggaaataatagacgggactagtgagatgaatgagggcaaacgaagccagaaaacccccagcacgccaaggcgcgtgacccaaggagccgcttcacctgggcatggcatccaagaaaagttgcaagtcgtggacaaggtaacacagcgcaaggatgactctacgtggaatagtgaagtcatgatgcgggtgcagaaggcccggacaaaatgcgcaagaaagtcaaggctcaaggaaaagaagaaagaaaaagacatttgcagctcttctaagaggcggtttcagaagaatattcaccgcagaggtaaacctaaaagcgataccgttgacttccactgcagcaagctccccgttacctgcggggaggcaaaggggatcctgtataagaagaagatgaagcatgggagctccgttaagtgcattcgtaatgaggacggtacctggttaacgcctaatgagttcgaggtagaaggaaaagggcgtaacgctaagaactggaagcggaatatcaggtgtgagggaatgacactgggagaactattaaagagcggactgctcctgtgcccgcctcgcattaatctgaagagagagctaaattccaagtag

SEQ ID NO: 72088 - DNA, 1650 bp, Artificial Sequence
  derived and/or modified sequence
atgtttacaatgactagggccatggaggaagcactgtttcaacatttcatgcaccagaagcttggtattgcgtatgcaattcacaagccttttccctttttcgaaggacttctggacaactccatcatcactaagaggatgtacatggagtccctcgaagcatgtcggaacctgattccagtctcaagagtcgttcataatattcttactcagctcgagagaacattcaatcttagcctactggtgacccttttctcccagattaatctgagggagtatccaaatttagtaactatatacaggtcttttaaacgagtgggggcttcctacgagtggcagtccagggacacccccattttgctagaggccccaaccggtctggctgagggttccagtctgcacactcctctcgcactgcccccacctcagccccctcagccctcttgtagcccctgtgctcccagagtgtctgaacctggtacttcctctcaacaaagcgatgagattttgagcgaatcaccttccccttccgatcctgtactaccattacccgctttgattcaagaggggaggtctacttccgtgactaacgataagctgacgagtaagatgaatgccgaagaagattcagaagaaatgcccagtctgctgacatctaccgtgcaggtggcctctgataacctcatcccgcagatccgagataaggaggacccccaggaaatgccacacagcccgctcggcagcatgcctgagattagggacaactctcctgagcctaacgaccccgaggagccacaggaggtcagttcaacaccatcagacaagaaaggtaagaaacgcaaaagatgcatctggagtacccccaagaggcgccacaagaagaaaagcctcccaggcggaactgcttcttcgaggcatgggatacagaaaaaactcaaacgcgtggatcaagtgcctcaaaagaaggacgatagcacctgtaacagcacggtcgaaacacgggcacaaaaggcgcgaacagaatgtgctcggaagagtcgcagcgaggagattattgacggcaccagcgagatgaacgaaggcaagcggagccagaagaccccaagcacaccccgacgcgtgacccagggcgcagcttcccctggtcatggtatccaagagaagctgcaggtcgtcgataaggttacccagcggaaagatgactcgacttggaatagtgaggtcatgatgcgagtgcagaaagctaggaccaaatgtgctagaaaaagtagactcaaagagaaaaagaaggaaaaggacatctgctcctcctccaaacgccgattccagaagaatatccatcgaagggggaagcccaagtcagatacagttgactttcactgtagcaagttacccgtgacctgcggcgaggctaaggggatcctctacaagaagaagatgaaacatgggtcaagcgtgaaatgtatcagaaacgaggatggaacttggctcacccctaatgaatttgaggttgaggggaaaggccgtaatgctaagaattggaagcgaaacattcgctgcgaaggcatgaccctgggcgaattgctcaagagtggcctacttctttgccccccaagaataaatctaaagcgggagctcaactcaaagtag

SEQ ID NO: 72089 - DNA, 1644 bp, Artificial Sequence
  derived and/or modified sequence
atgtttacaatgacaagggcaatggaggaggctttgtttcaacattttatgcaccagaaactgggcatagcttacgctatccacaagcccttcccctttttcgaagggctgctggataacagtattatcactaagcggatgtacatggagtctttagaggcttgtcgaaatctgatccccgttagtagagtagtgcataacattttgacacagctcgaaagaacttttaacctatcgctactagtgacgttattcagccagatcaatctccgtgaataccccaacctggtcacaatttaccgctcattcaaacgagtgggggcttcatatgagtggcaatcccgggatactccgatcctgctcgaagccccaactggcctcgctgaaggcagtagcttgcacacccccctggccctgcctcccccacagccaccacagcccagctgttctccatgcgccccaagagtcagcgagcccggaacctccagccagcagagcgacgagatactctccgaatcaccttctccctctgatcctgtcttacctcttcctgcactgattcaggaggggaggagcaccagtgtgactaatgacaagctgacaagcaagatgaacgcagaagaggacagcgaagagatgccatcactgctcactagcactgttcaggtggctagcgacaacctcatcccccagattagagataaggaggaccctcaagaaatgccgcactctccccttgggtccatgcccgaaattagggacaacagcccagagccaaatgaccccgaggagcctcaggaagttagttctaccccgtcagacaaaaagggcaagaagaggaaacgatgcatctggtcaacacctaaacgtcgccacaaaaaaaagtcacttccaggagcatcatcaaggcacgggatccaaaagaaattgaaaagggtggatcaagtgccacaaaaaaaagacgatagtacttgtaactccacagttgagacccgagcccagaaagccagaaccgaatgcgctcggaagtcacggagtgaagaaatcatcgacggcaccagtgagatgaatgaaggtaagcggtcacagaagactcccagtacgccgcgtcgggttacacagggggctgcttctcctgggcacggcattcaggaaaagctccaggttgttgacaaagtgacacagcgaaaggacgattccacctggaattcagaagttatgatgagggtacagaaagctagaacgaaatgtgcccgtaagagtcgccttaaagaaaagaagaaggagaaagacatctgtagcagctcaaaaagaagattccaaaagaacatccaccggaggggaaaaccaaagtcagatacagttgactttcactgtagtaagctgccggttacatgcggtgaagccaagggcattttgtacaaaaagaagatgaagcatgggagcagcgtcaagtgtattaggaatgaagacggcacctggctgaccccaaacgaattcgaggtggagggcaaaggcaggaacgccaaaaattggaagagaaacattcgctgtgagggaatgaccctaggagagcttctgaaaagcggccttcttctatgccctcccagaattaatctgaaaagagagctgaactcaaagtag

SEQ ID NO: 72090 - DNA, 666 bp, Artificial Sequence
  derived and/or modified sequence
atgttcaccatgacccgtgcgatggaggaggctctgtttcagcatttcatgcatcagaagctcggaatcgcctatgctattcataagccgtttcctttcttcgaaggtttactagacaactcgatcattacaaaacgcatgtacatggaatcattggaagcatgccgcaatttgatcccggtcagtagggtcgtccataatatcctaacacaactcgagcggacatttaacctgtctcttctcgtgaccctgttttcccaaattaatctgcgcgaatatcctaatctggtgacaatttaccggagtttcaagagggtgggggcatcttacgaatggcagagcagggatacccccattttgctggaggcacccacaggtctggcggagggttcatcactgcacacacccctggcactgccgcctcctcaaccccctcagcctagctgctcaccctgcgcccctcgtgtgtccgagcctgggacgtcttcacaacagtcagatgaaatcctgtccgaaagcccttcgccctcagaccccgtgcttcctttaccagccttaatccaggaaggaaggagcactagcgtcacaaacgataagctgacatccaaaatgaacgcggaggaggactcagaagagatgccgagcctcctcacgtccacagtttag

SEQ ID NO: 72091 - DNA, 1668 bp, Artificial Sequence
  derived and/or modified sequence
atgggtcgcggatttcgcatgtttacgatgaccagagccatggaagaggccctctttcagcattttatgcatcaaaaactcggcatcgcttacgccatccataaaccattcccttttttcgaaggtcttctggataacagtattatcaccaaaagaatgtacatggagtcactggaagcctgcagaaatctgataccagttagcagggttgtgcacaatatcctgacacagttggaacgcacgttcaacctgtcccttctcgtaaccctgtttagccagattaatctgagggagtaccctaacctcgtcactatttaccgatcctttaaacgggtcggagcctcatacgagtggcagagccgggacacgcctatcctactagaggctccaactggtttagctgaaggaagctccctgcacaccccactggccctccccccacctcagcctccccagccaagctgcagcccgtgtgctccgagggtttctgagcctggtacttcaagtcagcagtccgacgagatcctatctgagagtccaagtcctagtgaccctgtactccctttgccagctttgattcaggaggggcgaagtacgagtgtgactaatgataaattgacgagcaagatgaacgccgaggaagactccgaagagatgccatccctgctgacttctaccgtgcaggtagcatcagacaacctcatacctcagattagggacaaggaagacccccaggagatgccacattcacccttggggagcatgccagagatccgagataattccccagagccaaatgatcccgaggagccgcaggaggtgagctcaaccccgagcgataagaagggcaagaagcgcaagcggtgcatctggtctaccccaaagcgacggcataagaaaaagagcctccccggagggacagccagcagcaggcatggtattcagaaaaaacttaaacgggttgaccaagtgccgcagaaaaaggatgacagcacatgcaattcgacagtcgagaccagagcccagaaggcacgtactgagtgtgctcgcaagtcccgctccgaggagattatcgacggcacgtcagagatgaatgagggtaaacgcagtcagaaaacaccttccactcctcgcagagttactcagggcgctgcctccccaggacatgggattcaggaaaaactgcaggtcgtggacaaggttacacagcggaaagacgactctacctggaactccgaggtgatgatgcgagtgcagaaggctcgtaccaagtgcgcacgaaaaagccggcttaaggagaagaagaaggaaaaagatatatgtagcagctccaaacgacggttccaaaagaacatccaccggagaggcaagcccaaaagtgatacagtcgactttcattgcagcaagttaccggtaacctgtggtgaagcaaaagggatactgtacaaaaagaagatgaagcacggctccagtgtgaagtgcatcaggaatgaggatggcacctggctgacccctaacgagttcgaggtagaaggcaaggggcgaaatgccaagaactggaaacgtaacatccggtgtgaggggatgactctgggcgagttgctgaagtccggtctgttgctatgtccaccaagaattaacttaaagcgcgaactaaattccaagtag

SEQ ID NO: 72092 - DNA, 2080 bp, Artificial Sequence
  derived and/or modified sequence
aagtgcccatgaggaggtggagagaggctgcaggcaccgacctgccttcagcttccggcttggcaaactccgaaaactttcacttttcttttctcggaagcccggccccttactgcgtttgtcaaagcacagacttcctgttttgcctgctagcatctccctgtaactctcccaatcttgaggagtgatccctgtcccagcccctggaaaggggcaggaacgacaaactcaaagtccaggatgttcaccatgacaagagccatggaagaggctctttttcagcacttcatgcaccagaagctggggatcgcctatgccatacacaagccatttcccttctttgaaggcctcctagacaactccatcatcactaagagaatgtacatggaatctctggaagcctgtagaaatttgatccctgtatccagagtggtgcacaacattctcacccaactggagaggacttttaacctgtctcttctggtgacattgttcagtcaaattaacctgcgtgaatatcccaatctggtgacgatttacagaagcttcaaacgtgttggtgcttcctatgaatggcagagcagagacacaccaatcctacttgaagccccaactggcctagcagaaggaagctccctccataccccactggcgctgcccccaccacaaccccctcaaccaagctgttcaccctgtgcgccaagagtcagtgagcctggaacatcctcccagcaaagcgatgagatcctgagtgagtcgcccagcccatctgaccctgtcctgcctctccctgcactcatccaggaaggaagaagcacttcagtgaccaatgacaagttaacatccaaaatgaatgcggaagaagactcagaagagatgcccagcctcctcactagcactgtgcaagtggccagtgacaacctgatcccccaaataagagataaagaagaccctcaagagatgccccactctcccttgggctctatgccagagataagagataattctccagaaccaaatgacccagaagagccccaggaggtgtccagcacaccttcagacaagaaaggaaagaaaagaaaaagatgtatctggtcaactccaaaaaggagacataagaaaaaaagcctcccaggagggacagcctcatctagacacggaatccaaaagaagctcaaaagggtggatcaggttcctcaaaagaaagatgactcaacttgtaactccacggtagagacaagggcccaaaaggcgagaactgaatgtgcccgaaagtcgagatcagaggagatcattgatggcacttcagaaatgaatgaaggaaagaggtcccagaagacgcctagtacaccacgaagggtcacacaaggggcagcctcacctgggcatggcatccaagagaagctccaagtggtggataaggtgactcaaaggaaagacgactcaacctggaactcagaggtcatgatgagggtccaaaaggcaagaactaaatgtgcccgaaagtccagattgaaagaaaagaaaaaggagaaagatatctgttcaagctcaaaaaggagatttcagaaaaatattcaccgaagaggaaaacccaaaagtgacactgtggattttcactgttctaagctccccgtgacctgtggtgaggcgaaagggattttatataagaagaaaatgaaacacggatcctcagtgaagtgcattcggaatgaggatggaacttggttaacaccaaatgaatttgaagtcgaaggaaaaggaaggaacgcaaagaactggaaacggaatatacgttgtgaaggaatgaccctaggagagctgctgaagagtggacttttgctctgtcctccaagaataaatctcaagagagagttaaatagcaagtgaatttctactaccctctcagtcaccatgttgcagactttccctgtctggaggctcaccttagagcttctgagtttccaagctctgagtcacctccacatttgggcatggcatcttcaaaacaattaatttgcatagttaatttgggatggggaagcaaatgactctaaaataaaaattaaatgaaaaagct

SEQ ID NO: 72093 - DNA, 1740 bp, Artificial Sequence
  derived and/or modified sequence
aagtgcccatgaggaggtggagagaggctgcaggcaccgacctgccttcagcttccggcttggcaaactccgaaaactttcacttttcttttctcggaagcccggccccttactgcgtttgtcaaagcacagacttcctgttttgcctgctagcatctccctgtaactctcccaatcttgaggagtgatccctgtcccagcccctggaaaggggcaggaacgacaaactcaaagtccaggatgttcaccatgacaagagccatggaagaggctctttttcagcacttcatgcaccagaagctggggatcgcctatgccatacacaagccatttcccttctttgaaggcctcctagacaactccatcatcactaagagaatgtacatggaatctctggaagcctgtagaaatttgatccctgtatccagagtggtgcacaacattctcacccaactggagaggacttttaacctgtctcttctggtgacattgttcagtcaaattaacctgcgtgaatatcccaatctggtgacgatttacagaagcttcaaacgtgttggtgcttcctatgaatggcagagcagagacacaccaatcctacttgaagccccaactggcctagcagaaggaagctccctccataccccactggcgctgcccccaccacaaccccctcaaccaagctgttcaccctgtgcgccaagagtcagtgagcctggaacatcctcccagcaaagcgatgagatcctgagtgagtcgcccagcccatctgaccctgtcctgcctctccctgcactcatccaggaaggaagaagcacttcagtgaccaatgacaagttaacatccaaaatgaatgcggaagaagactcagaagagatgcccagcctcctcactagcactgtgcaagtggccagtgacaacctgatcccccaaataagagataaagaagaccctcaagagatgccccactctcccttgggctctatgccagagataagagataattctccagaaccaaatgacccagaagagccccaggaggtgtccagcacaccttcagacaagaaaggaaagaaaagaaaaagatgtatctggtcaactccaaaaaggagacataagaaaaaaagcctcccaggagagatcattgatggcacttcagaaatgaatgaaggaaagaggtcccagaagacgcctagtacaccacgaagggtcacacaaggggcagcctcacctgggcatggcatccaagagaagctccaagtggtggataaggtgactcaaaggaaagacgactcaacctggaactcagaggtcatgatgagggtccaaaaggcaagaactaaatgtgcccgaaagtccagattgaaagaaaagaaaaaggagaaagatatctgttcaagctcaaaaaggagatttcagaaaaatattcaccgaagaggaaaacccaaaagtgacactgtggattttcactgttctaagctccccgtgacctgtggtgaggcgaaagggattttatataagaagaaaatgaaacacggatcctcagtgaagtgcattcggaatgaggatggaacttggttaacaccaaatgaatttgaagtcgaaggaaaaggaaggaacgcaaagaactggaaacggaatatacgttgtgaaggaatgaccctaggagagctgctgaagagtggacttttgctctgtcctccaagaataaatctcaagagagagttaaatagcaagtga

SEQ ID NO: 72094 - DNA, 1937 bp, Artificial Sequence
  derived and/or modified sequence
gttttgcctgctagcatctccctgtaactctcccaatcttgaggagtgatccctgtcccagcccctggaaaggggcaggaacgacaaactcaaagtccaggatgttcaccatgacaagagccatggaagaggctctttttcagcacttcatgcaccagaagctggggatcgcctatgccatacacaagccatttcccttctttgaaggcctcctagacaactccatcatcactaagagaatgtacatggaatctctggaagcctgtagaaatttgatccctgtatccagagtggtgcacaacattctcacccaactggagaggacttttaacctgtctcttctggtgacattgttcagtcaaattaacctgcgtgaatatcccaatctggtgacgatttacagaagcttcaaacgtgttggtgcttcctatgaatggcagagcagagacacaccaatcctacttgaagccccaactggcctagcagaaggaagctccctccataccccactggcgctgcccccaccacaaccccctcaaccaagctgttcaccctgtgcgccaagagtcagtgagcctggaacatcctcccagcaaagcgatgagatcctgagtgagtcgcccagcccatctgaccctgtcctgcctctccctgcactcatccaggaaggaagaagcacttcagtgaccaatgacaagttaacatccaaaatgaatgcggaagaagactcagaagagatgcccagcctcctcactagcactgtgcaagtggccagtgacaacctgatcccccaaataagagataaagaagaccctcaagagatgccccactctcccttgggctctatgccagagataagagataattctccagaaccaaatgacccagaagagccccaggaggtgtccagcacaccttcagacaagaaaggaaagaaaagaaaaagatgtatctggtcaactccaaaaaggagacataagaaaaaaagcctcccaggagcctcatctagacacggaatccaaaagaagctcaaaagggtggatcaggttcctcaaaagaaagatgactcaacttgtaactccacggtagagacaagggcccaaaaggcgagaactgaatgtgcccgaaagtcgagatcagaggagatcattgatggcacttcagaaatgaatgaaggaaagaggtcccagaagacgcctagtacaccacgaagggtcacacaaggggcagcctcacctgggcatggcatccaagagaagctccaagtggtggataaggtgactcaaaggaaagacgactcaacctggaactcagaggtcatgatgagggtccaaaaggcaagaactaaatgtgcccgaaagtccagattgaaagaaaagaaaaaggagaaagatatctgttcaagctcaaaaaggagatttcagaaaaatattcaccgaagaggaaaacccaaaagtgacactgtggattttcactgttctaagctccccgtgacctgtggtgaggcgaaagggattttatataagaagaaaatgaaacacggatcctcagtgaagtgcattcggaatgaggatggaacttggttaacaccaaatgaatttgaagtcgaaggaaaaggaaggaacgcaaagaactggaaacggaatatacgttgtgaaggaatgaccctaggagagctgctgaagagtggacttttgctctgtcctccaagaataaatctcaagagagagttaaatagcaagtgaatttctactaccctctcagtcaccatgttgcagactttccctgtctggaggctcaccttagagcttctgagtttccaagctctgagtcacctccacatttgggcatggcatcttcaaaacaattaatttgcatagttaatttgggatggggaagcaaatgactctaaaataaaaattaaatgaaaaagctca

SEQ ID NO: 72095 - DNA, 813 bp, Artificial Sequence
  derived and/or modified sequence
ggggcaggaacgacaaactcaaagtccagagtccagcctgttattgtgaatggagccgagatttgccctctaccctcacctaagctctgatccttcagtgcccgcaataggcggctcatctgttatccattgtgtaaatgactagaggatgttcaccatgacaagagccatggaagaggctctttttcagcacttcatgcaccagaagctggggatcgcctatgccatacacaagccatttcccttctttgaaggcctcctagacaactccatcatcactaagagaatgtacatggaatctctggaagcctgtagaaatttgatccctgtatccagagtggtgcacaacattctcacccaactggagaggacttttaacctgtctcttctggtgacattgttcagtcaaattaacctgcgtgaatatcccaatctggtgacgatttacagaagcttcaaacgtgttggtgcttcctatgaatggcagagcagagacacaccaatcctacttgaagccccaactggcctagcagaaggaagctccctccataccccactggcgctgcccccaccacaaccccctcaaccaagctgttcaccctgtgcgccaagagtcagtgagcctggaacatcctcccagcaaagcgatgagatcctgagtgagtcgcccagcccatctgaccctgtcctgcctctccctgcactcatccaggaaggaagaagcacttcagtgaccaatgacaagttaacatccaaaatgaatgcggaagaagactcagaagagatgcccagcctcctcactagcactgtgca

SEQ ID NO: 72096 - DNA, 580 bp, Artificial Sequence
  derived and/or modified sequence
gaaattgcctaactagctgacgtgggtgcaccaactctacagtcctccctccacccaatctccatgacgtctctcagtcaagggaggaggagcagagccagccccacgaggccacggaagacagggtcacttgttcctgccaaggaaagagggtggaaaagtcattcaactcaagcagatcaaagttgttttgagatctaaaggaagaagttcttgctgccaggatcctcagatgcccatgaaggggctttccaggtgatggggaggggcttcaggatgttcaccatgacaagagccatggaagaggctctttttcagcacttcatgcaccagaagctggggatcgcctatgccatacacaagccatttcccttctttgaaggcctcctagacaactccatcatcactaagagaatgtacatggaatctctggaagcctgtagaaatttgatccctgtatccagagtggtgcacaacattctcacccaactggagaggacttttaacctgtctcttctggtgacattgttcagtcaaattaacctgcgtgaatatcccaatctggtgacgatttacagaa

SEQ ID NO: 72097 - DNA, 2032 bp, Artificial Sequence
  derived and/or modified sequence
gaaattgcctaactagctgacgtgggtgcaccaactctacagtcctccctccacccaatctccatgacgtctctcagtcaagggaggaggagcagagccagccccacgaggccacggaagacagggtcacttgttcctgccaaggaaagagggtggaaaagtcattcaactcaagcagatcaaagttgttttgagatctaaaggaagaagttcttgctgccaggatcctcagatgcccatgaaggggctttccaggtgatggggaggggcttcaggatgttcaccatgacaagagccatggaagaggctctttttcagcacttcatgcaccagaagctggggatcgcctatgccatacacaagccatttcccttctttgaaggcctcctagacaactccatcatcactaagagaatgtacatggaatctctggaagcctgtagaaatttgatccctgtatccagagtggtgcacaacattctcacccaactggagaggacttttaacctgtctcttctggtgacattgttcagtcaaattaacctgcgtgaatatcccaatctggtgacgatttacagaagcttcaaacgtgttggtgcttcctatgaatggcagagcagagacacaccaatcctacttgaagccccaactggcctagcagaaggaagctccctccataccccactggcgctgcccccaccacaaccccctcaaccaagctgttcaccctgtgcgccaagagtcagtgagcctggaacatcctcccagcaaagcgatgagatcctgagtgagtcgcccagcccatctgaccctgtcctgcctctccctgcactcatccaggaaggaagaagcacttcagtgaccaatgacaagttaacatccaaaatgaatgcggaagaagactcagaagagatgcccagcctcctcactagcactgtgcaagtggccagtgacaacctgatcccccaaataagagataaagaagaccctcaagagatgccccactctcccttgggctctatgccagagataagagataattctccagaaccaaatgacccagaagagccccaggaggtgtccagcacaccttcagacaagaaaggaaagaaaagaaaaagatgtatctggtcaactccaaaaaggagacataagaaaaaaagcctcccaggagggacagcctcatctagacacggaatccaaaagaagctcaaaagggtggatcaggttcctcaaaagaaagatgactcaacttgtaactccacggtagagacaagggcccaaaaggcgagaactgaatgtgcccgaaagtcgagatcagaggagatcattgatggcacttcagaaatgaatgaaggaaagaggtcccagaagacgcctagtacaccacgaagggtcacacaaggggcagcctcacctgggcatggcatccaagagaagctccaagtggtggataaggtgactcaaaggaaagacgactcaacctggaactcagaggtcatgatgagggtccaaaaggcaagaactaaatgtgcccgaaagtccagattgaaagaaaagaaaaaggagaaagatatctgttcaagctcaaaaaggagatttcagaaaaatattcaccgaagaggaaaacccaaaagtgacactgtggattttcactgttctaagctccccgtgacctgtggtgaggcgaaagggattttatataagaagaaaatgaaacacggatcctcagtgaagtgcattcggaatgaggatggaacttggttaacaccaaatgaatttgaagtcgaaggaaaaggaaggaacgcaaagaactggaaacggaatatacgttgtgaaggaatgaccctaggagagctgctgaagagtggacttttgctctgtcctccaagaataaatctcaagagagagttaaatagcaagtgaatttctactaccctctcagtcaccatgttgcagactttccctgtctggaggctcaccttagagcttctgagtttccaagctctgagtcacctccacatttgggcat

SEQ ID NO: 72098 - protein, 145 aa, Artificial Sequence
  derived and/or modified sequence
MANSGLQLLGFSMALLGWVGLVACTAIPQWQMSSYAGDNIITAQAMYKGLWMDCVTQSTGMMSCKMYDSVLALSAALQATRALMVVSLVLGFLAMFVATMGMKCTRCGGDDKVKKARIAMGGGIIFIVAGMSLALPSLLAGQGLP

SEQ ID NO: 72099 - DNA, 438 bp, Artificial Sequence
  derived and/or modified sequence
atggccaacagcggcctgcagctgctgggcttcagcatggccctgctgggctgggtgggcctggtggcctgcaccgccatcccccagtggcagatgagcagctacgccggcgacaacatcatcaccgcccaggccatgtacaagggcctgtggatggactgcgtgacccagagcaccggcatgatgagctgcaagatgtacgacagcgtgctggccctgagcgccgccctgcaggccaccagagccctgatggtggtgagcctggtgctgggcttcctggccatgttcgtggccaccatgggcatgaagtgcaccagatgcggcggcgacgacaaggtgaagaaggccagaatcgccatgggcggcggcatcatcttcatcgtggccggcatgagcctggccctgcccagcctgctggccggccagggcctgccctag

SEQ ID NO: 72100 - DNA, 438 bp, Artificial Sequence
  derived and/or modified sequence
atggccaacagcggtttgcagctgctggggttttctatggccctcctggggtgggtggggctggtggcctgcactgcaatacctcagtggcagatgtcttcgtacgccggcgacaacattattacagcccaagccatgtacaaaggtctgtggatggattgtgtgacccagagtacagggatgatgtcctgcaagatgtatgactccgttttggctctctccgccgccttgcaggccacacgggccctgatggtggtgagcctggtgttgggtttcctggccatgtttgtggcaaccatgggaatgaaatgtaccaggtgcggcggagacgacaaggtgaagaaagccaggatcgccatggggggcggaattatcttcattgttgctggcatgtccctcgccctcccgtccctcctggcgggacaggggctgccctag

SEQ ID NO: 72101 - DNA, 438 bp, Artificial Sequence
  derived and/or modified sequence
atggccaacagcggcctgcagctgctgggcttctccatggccctgctgggctgggtgggcctggtggcctgcacagccatcccccagtggcagatgagcagctatgctggggacaacatcatcacagcccaggccatgtacaagggcctgtggatggactgtgtgacccagagcacaggcatgatgagctgcaagatgtatgattctgtgctggccctgtctgctgccctgcaggccacccgggccctgatggtggtgtccctggtgctgggcttcctggccatgtttgtggccaccatgggcatgaagtgcacccgctgtggaggagatgacaaggtgaagaaggcccgcatcgccatgggcggcggcatcatcttcatcgtggccggcatgagcctggccctgcccagcctgctggccggccagggcctgccctag

SEQ ID NO: 72102 - DNA, 438 bp, Artificial Sequence
  derived and/or modified sequence
atggccaacagcggcctgcagctgctgggcttcagcatggccctgctggggtgggtagggctcgtagcctgtactgcaatcccgcaatggcaaatgagtagctacgctggcgacaacataataaccgcacaggccatgtacaagggcctgtggatggattgtgtgacccagtctacgggcatgatgtcctgtaagatgtatgatagcgtgttggccttgtccgcagctctgcaggccactcgtgcactcatggttgtcagcctcgtgctgggttttctggccatgttcgtcgccacgatgggaatgaaatgtaccagatgtgggggcgacgacaaggtgaaaaaggcccggatcgcaatgggggggggtatcattttcattgtcgccggcatgagtctcgcactgccatcactgctagccggtcagggcctgccgtag

SEQ ID NO: 72103 - DNA, 438 bp, Artificial Sequence
  derived and/or modified sequence
atggccaacagcggtcttcagctgttaggattcagcatggctctcctcggctgggtcgggctagtcgcatgtacagccatcccccaatggcagatgtctagctatgcgggagacaatatcatcacggctcaagctatgtacaaggggctgtggatggattgtgtgactcaaagcaccggaatgatgtcctgcaagatgtacgactcagtccttgccctgagtgcagcactccaagcaacccgcgctttgatggttgtgtcattggtactgggtttcctggccatgtttgtcgcgacaatgggaatgaagtgtacccgctgtggcggtgacgataaggtgaagaaagcgcgtattgccatgggcggtggcattatctttattgtggcaggtatgagtctcgcactgccatcacttctggccggacaaggtctgccgtag

SEQ ID NO: 72104 - protein, 622 aa, Artificial Sequence
  derived and/or modified sequence
MILNDPDFQHEDLNFLTRSQRYEVAVRKSAIMVKKMREFGIADPDEIMWFKNFVHRGRPEPLDLHLGMFLPTLLHQATAEQQERFFMPAWNLEIIGTYAQTEMGHGTHLRGLETTATYDPETQEFILNSPTVTSIKWWPGGLGKTSNHAIVLAQLITKGKCYGLHAFIVPIREIGTHKPLPGITVGDIGPKFGYDEIDNGYLKMDNHRIPRENMLMKYAQVKPDGTYVKPLSNKLTYGTMVFVRSFLVGEAARALSKACTIAIRYSAVRHQSEIKPGEPEPQILDFQTQQYKLFPLLATAYAFQFVGAYMKETYHRINEGIGQGDLSELPELHALTAGLKAFTSWTANTGIEACRMACGGHGYSHCSGLPNIYVNFTPSCTFEGENTVMMLQTARFLMKSYDQVHSGKLVCGMVSYLNDLPSQRIQPQQVAVWPTMVDINSPESLTEAYKLRAARLVEIAAKNLQKEVIHRKSKEVAWNLTSVDLVRASEAHCHYVVVKLFSEKLLKIQDKAIQAVLRSLCLLYSLYGISQNAGDFLQGSIMTEPQITQVNQRVKELLTLIRSDAVALVDAFDFQDVTLGSVLGRYDGNVYENLFEWAKNSPLNKAEVHESYKHLKSLQSKL

SEQ ID NO: 72105 - DNA, 1869 bp, Artificial Sequence
  derived and/or modified sequence
atgatcctgaacgatcctgattttcaacacgaggatttgaattttctaacacgttcacagcgctatgaagttgctgttaggaagtcagcaatcatggtcaagaagatgcgggaattcggaatcgcagatcccgacgagatcatgtggtttaagaatttcgtgcaccgtggcagacccgaacctctggacttacacctgggaatgtttttgcccaccctcctgcatcaggctaccgctgaacagcaagagaggttttttatgcctgcctggaatctggagatcataggaacttacgcccagacggaaatgggtcacggtacccacctgcgaggtctagagaccaccgctacatatgacccagagacacaggaattcattctgaacagtcccactgtgacatcaattaaatggtggcctgggggactgggaaaaacatctaaccatgcaattgtgcttgcccagctcataactaaggggaaatgttatggcctgcatgctttcattgtccctatcagagaaatcgggacccataaacccctaccaggaatcactgtgggcgatataggaccaaaattcggatacgacgagatcgacaacggataccttaagatggacaatcacagaattcctagggagaatatgctcatgaagtacgcgcaagttaagccggacgggacctatgtgaaacctctgagtaacaaactgacttacggaaccatggtctttgtccgatccttcctggtaggagaggccgcccgcgccctgagcaaggcttgcacaatcgcaatccggtactccgcagttcggcatcagtctgaaattaagccaggagagcctgaaccacagatcctcgattttcaaacacagcaatacaagttgtttccccttctggccacagcatacgcattccagttcgtgggggcctacatgaaagagacatatcacagaattaacgaaggaatcgggcagggggatttgagcgaactgccggagttgcacgccctgacagccggcctaaaagcctttacatcgtggacagctaatactggcatcgaggcttgccgcatggcctgcggaggacatggttattctcactgctccgggctgcccaacatctacgttaacttcacccccagctgcactttcgaaggagagaacaccgtgatgatgctgcaaacagcgcggtttctgatgaaaagttacgatcaggtgcactctggcaaactggtgtgcggaatggtcagctacctgaatgatctacccagtcaacgaatacagccccaacaggtggccgtgtggcctactatggtcgacatcaattctcccgagtcattaactgaggcatacaaactgcgcgctgcccgactcgtggaaatagctgctaagaatctacagaaggaggttatccataggaagtccaaagaagttgcctggaacctaacttctgtggacctggtgcgggctagcgaggcacactgtcattatgtcgtggtgaaactcttctcggaaaaactgctcaagattcaggacaaagccatccaggctgtactgaggtctctctgcctcctctactctctgtatggcatcagtcagaatgccggcgacttcctgcaagggtcaattatgacagagcctcagatcacacaggtgaaccagagagttaaggagctcctcacattgatcagaagtgacgctgtcgccctggtggacgcctttgattttcaggacgttaccctcggatctgtcctagggaggtacgacggcaatgtatatgagaatctgtttgagtgggctaaaaactcccctctgaacaaggccgaggtacatgagagttacaagcacttgaaaagccttcaatcaaagctgtag

SEQ ID NO: 72106 - DNA, 1869 bp, Artificial Sequence
  derived and/or modified sequence
atgatcctgaatgaccctgacttccagcacgaggacctgaacttcctgaccaggagccagagatatgaggtggccgtgaggaagagcgccatcatggtgaagaagatgagggagtttggaattgctgaccctgatgagatcatgtggttcaagaactttgtgcaccggggccggcctgagcccctggacctgcacctgggcatgttcctgcccaccctgctgcaccaggccacagctgagcagcaggagcgcttcttcatgcctgcctggaacctggagatcatcggcacctacgcccagacagagatgggccacggcacccacctgcggggcctggagaccacagccacctatgaccctgagacccaggagttcatcctgaacagccccaccgtgaccagcatcaagtggtggccaggcggcctgggcaagaccagcaaccacgccatcgtgctggcccagctgatcaccaagggcaagtgctacggcctgcacgccttcatcgtgcccatccgggagatcggcacccacaagcccctgcccggcatcaccgtgggggacatcggccccaagtttggctatgatgaaattgacaatggctacctgaagatggacaaccaccgcatcccccgggagaacatgctgatgaagtatgcccaggtgaagccagatggcacctacgtgaagcccctgagcaacaagctgacctacggcaccatggtgtttgtgcgctccttcctggtgggggaggccgcccgggccctgagcaaggcctgcaccatcgccatccgctacagcgctgtgcgccaccagagcgagatcaagccaggagagcctgagccccagatcctggacttccagacccagcagtacaagctgttccccctgctggccacagcctatgccttccagtttgtgggcgcctacatgaaggagacctaccaccgcatcaatgaaggaattggccagggcgacctgtctgagctgcctgagctgcacgccctgacagctggcctgaaggccttcacctcctggacagccaacacaggaattgaggcctgcaggatggcctgtggcggccacggctacagccactgcagcggcctgcccaacatctacgtgaacttcacccccagctgcacctttgaaggagaaaatacagtgatgatgctgcagacagcccgcttcctgatgaagagctatgaccaggtgcacagcggcaagctggtgtgtggcatggtgtcctacctgaatgacctgcccagccagaggatccagccccagcaggtggccgtgtggcccaccatggtggacatcaacagccctgagagcctgacagaggcctacaagctgcgggccgcccggctggtggagattgctgccaagaacctgcagaaggaggtgatccacaggaagagcaaggaggtggcctggaacctgacctctgtggacctggtgcgggccagcgaggcccactgccactacgtggtggtgaagctgttcagcgagaagctgctgaagatccaggacaaggccatccaggccgtgctgcggagcctgtgcctgctgtacagcctgtatggcatcagccagaatgctggggacttcctgcagggcagcatcatgacagagccccagatcacccaggtgaaccagagggtgaaggagctgctgaccctcatccgcagtgatgctgtggccctggtggatgcctttgacttccaggatgtgaccctgggctctgtgctgggccgctatgatggaaatgtgtatgagaacctgtttgagtgggccaagaacagccccctgaacaaggccgaggtgcatgagagctacaagcacctgaagagcctgcagagcaagctgtag

SEQ ID NO: 72107 - DNA, 1869 bp, Artificial Sequence
  derived and/or modified sequence
atgatcctgaacgaccccgacttccagcacgaggacctgaacttcttgacacggagccagagatatgaggtggccgtgcgcaaatccgctatcatggttaagaagatgcgcgaattcggtatcgcagacccagatgaaatcatgtggtttaaaaattttgtgcaccgcgggaggccagaacccctggacttgcacctgggcatgtttttgcctacattgttgcaccaggcgaccgcagaacagcaggagagattctttatgcccgcctggaacttagagattatcggaacatatgctcaaacggagatgggtcatggaactcatctgagagggctggagacaactgccacatatgatccagagacgcaggagtttatcctgaattcccctactgtgacctcaatcaaatggtggccgggaggactaggtaagactagtaaccacgctatagtgcttgctcagttgattacgaaaggaaagtgctatgggctccacgcatttatcgtgcccattcgcgaaatcggaacacacaagcccctacccggtattaccgtgggcgatattggcccaaagttcgggtacgacgagatcgataacggctatctcaaaatggacaaccatcggatccctcgcgaaaatatgctcatgaagtacgcacaggtaaaacccgacggcacatatgtgaaaccactttcaaataagctaacatacggcaccatggtgtttgtgcgcagcttcctggtgggtgaggcagcccgggccctgtcaaaagcgtgtacaatcgctattagatactccgcagtccgccaccagtcagaaatcaaacctggagagcccgagccgcaaatcttggactttcagacccaacaatacaagttatttccgcttctggccaccgcatacgccttccaatttgtaggagcctatatgaaggaaacttaccatcgtattaatgagggtatcggacaaggtgacttatctgagctgccagagctccatgccctcacagcaggtcttaaagctttcactagctggacagccaacaccgggattgaagcgtgtcggatggcttgtggaggacatggctacagccattgcagtggcctgcccaacatatacgtgaactttaccccgtcatgcacttttgaaggagaaaatactgtaatgatgttacagactgccagatttttgatgaagtcgtacgatcaagtccactcagggaagctcgtttgtggaatggttagctaccttaatgatttgcccagtcaacgtatccagccccagcaggtcgctgtctggcctaccatggtggacattaatagccctgagtctttaaccgaggcctacaagctcagggctgccaggctcgtggagattgcggctaagaaccttcagaaagaagttatccacagaaagagcaaggaagtggcgtggaacctcacttcggttgatctagtacgagcctctgaggctcactgtcactatgtggtcgtaaaactctttagtgagaaattgctgaagatacaggataaagctatacaggcagtgctgaggagtctctgtcttctttactctctatacggaattagccaaaatgccggcgactttctgcagggctctataatgactgaaccgcaaatcactcaagtgaatcagcgagtgaaggaactgttgactctgattaggtctgatgcagtcgctctggtggacgcttttgactttcaggacgtcaccttaggatctgtgctaggtaggtatgatggtaatgtatatgagaacctgttcgagtgggccaagaactcccctttaaataaagctgaagtccatgaaagctacaagcacttgaagagtctccagtctaaactttag

SEQ ID NO: 72108 - DNA, 1869 bp, Artificial Sequence
  derived and/or modified sequence
atgattctgaatgatcccgatttccagcacgaggatctcaacttccttaccagatcccaaagatacgaggtcgccgtccgcaaatcagccatcatggtgaagaaaatgagggagttcgggatagcagatcctgacgagattatgtggttcaagaattttgtacacaggggacgacccgagcccttagacctgcacctgggaatgtttttgcctaccctgctgcaccaggcgacagctgagcagcaagagcggttcttcatgcctgcatggaatttggagattataggaacatacgctcaaaccgagatgggacatggaacccacctccgtggcttagaaactacagctacttacgaccctgaaacccaggaattcatccttaactcccccacagtaacatccattaaatggtggcccggagggcttggtaaaaccagcaaccatgcaattgtccttgcacagttgattacaaagggtaaatgctacggacttcacgctttcattgtgcctattagggaaatcggtacacacaagccgctcccagggatcacagttggcgatatcgggccaaaatttggatatgacgagattgataacggatacctgaagatggacaaccacagaatcccacgcgagaacatgctcatgaagtatgctcaagttaagccagacggcacctatgtgaaaccacttagcaacaagttaacatacggtactatggtcttcgtgaggagctttttggtgggagaagctgccagggctctgtcgaaggcttgcacaatagcaatccggtactcagccgtgaggcaccagtcagaaatcaaaccaggcgaaccagagccacaaattttggacttccagactcagcagtataaactgtttccactcctcgctacagcctacgcctttcaatttgtgggggcatacatgaaggagacatatcataggatcaacgagggaattggacagggggacctaagcgaactgcccgagctgcacgccttgacagccggacttaaggccttcaccagttggacggcaaacaccggcatagaagcatgtcggatggcttgcggcggtcatggttacagtcattgtagtgggctccctaatatttatgtaaatttcaccccctcatgcacttttgagggggagaacactgtgatgatgctgcagacagctcgatttctgatgaaatcctacgatcaagtgcacagcgggaagctcgtgtgcggaatggtatcctacctaaacgatttgccttcccaacggatccaaccacaacaagtggcggtgtggcccactatggtcgacatcaattctccggaaagtctcacagaggcgtataagctgcgggcagcacgcttggtcgaaattgctgccaagaacttgcagaaggaagtgattcatcgcaagtccaaggaagtggcatggaacctaacatccgtggacctcgtgcgcgcttcggaggcccattgccactacgttgtagtcaagttgtttagcgagaaacttttaaaaatacaggacaaagctattcaggccgtgctgcggtctctgtgcctgctatacagcctatatgggatctcccagaatgccggtgactttctgcaaggctccattatgacagagccacagattacacaggtgaaccagcgggttaaggagttgttaaccttgattcgtagcgatgcggtcgcattggtggacgcgttcgacttccaggatgtaaccctgggttctgtcctggggagatacgatgggaatgtctatgagaacctgtttgaatgggcaaagaacagccccctgaacaaagctgaggtccacgaatcctacaagcatctcaagtcactacagagtaagttatag

SEQ ID NO: 72109 - DNA, 1869 bp, Artificial Sequence
  derived and/or modified sequence
atgatcctgaacgaccccgacttccagcacgaggacctgaacttcctgaccagaagccagagatacgaggtggccgtgagaaagagcgccatcatggtgaagaagatgagagagttcggcatcgccgaccccgacgagatcatgtggttcaagaacttcgtgcacagaggcagacccgagcccctggacctgcacctgggcatgttcctgcccaccctgctgcaccaggccaccgccgagcagcaggagagattcttcatgcccgcctggaacctggagatcatcggcacctacgcccagaccgagatgggccacggcacccacctgagaggcctggagaccaccgccacctacgaccccgagacccaggagttcatcctgaacagccccaccgtgaccagcatcaagtggtggcccggcggcctgggcaagaccagcaaccacgccatcgtgctggcccagctgatcaccaagggcaagtgctacggcctgcacgccttcatcgtgcccatcagagagatcggcacccacaagcccctgcccggcatcaccgtgggcgacatcggccccaagttcggctacgacgagatcgacaacggctacctgaagatggacaaccacagaatccccagagagaacatgctgatgaagtacgcccaggtgaagcccgacggcacctacgtgaagcccctgagcaacaagctgacctacggcaccatggtgttcgtgagaagcttcctggtgggcgaggccgccagagccctgagcaaggcctgcaccatcgccatcagatacagcgccgtgagacaccagagcgagatcaagcccggcgagcccgagccccagatcctggacttccagacccagcagtacaagctgttccccctgctggccaccgcctacgccttccagttcgtgggcgcctacatgaaggagacctaccacagaatcaacgagggcatcggccagggcgacctgagcgagctgcccgagctgcacgccctgaccgccggcctgaaggccttcaccagctggaccgccaacaccggcatcgaggcctgcagaatggcctgcggcggccacggctacagccactgcagcggcctgcccaacatctacgtgaacttcacccccagctgcaccttcgagggcgagaacaccgtgatgatgctgcagaccgccagattcctgatgaagagctacgaccaggtgcacagcggcaagctggtgtgcggcatggtgagctacctgaacgacctgcccagccagagaatccagccccagcaggtggccgtgtggcccaccatggtggacatcaacagccccgagagcctgaccgaggcctacaagctgagagccgccagactggtggagatcgccgccaagaacctgcagaaggaggtgatccacagaaagagcaaggaggtggcctggaacctgaccagcgtggacctggtgagagccagcgaggcccactgccactacgtggtggtgaagctgttcagcgagaagctgctgaagatccaggacaaggccatccaggccgtgctgagaagcctgtgcctgctgtacagcctgtacggcatcagccagaacgccggcgacttcctgcagggcagcatcatgaccgagccccagatcacccaggtgaaccagagagtgaaggagctgctgaccctgatcagaagcgacgccgtggccctggtggacgccttcgacttccaggacgtgaccctgggcagcgtgctgggcagatacgacggcaacgtgtacgagaacctgttcgagtgggccaagaacagccccctgaacaaggccgaggtgcacgagagctacaagcacctgaagagcctgcagagcaagctgtag

SEQ ID NO: 72110 - protein, 575 aa, Artificial Sequence
  derived and/or modified sequence
MPRRRVPGANCKPTGKMSEETVPEAASPPPPQGQPYFDRFSEDDPEYMRLRNRAADLRQDFNLMEQKKRVTMILQSPSFREELEGLIQEQMKKGNNSSNIWALRQIADFMASTSHAVFPTSSMNVSMMTPINDLHTADSLNLAKGERLMRCKISSVYRLLDLYGWAQLSDTYVTLRVSKEQDHFLISPKGVSCSEVTASSLIKVNILGEVVEKGSSCFPVDTTGFCLHSAIYAARPDVRCIIHLHTPATAAVSAMKWGLLPVSHNALLVGDMAYYDFNGEMEQEADRINLQKCLGPTCKILVLRNHGVVALGDTVEEAFYKIFHLQAACEIQVSALSSAGGVENLILLEQEKHRPHEVGSVQWAGSTFGPMQKSRLGEHEFEALMRMLDNLGYRTGYTYRHPFVQEKTKHKSEVEIPATVTAFVFEEDGAPVPALRQHAQKQQKEKTRWLNTPNTYLRVNVADEVQRSMGSPRPKTTWMKADEVEKSSSGMPIRIENPNQFVPLYTDPQEVLEMRNKIREQNRQDVKSAGPQSQLLASVIAEKSRSPVEQRLPLTGGETCLPSGSSVPGAGLQDP

SEQ ID NO: 72111 - DNA, 1728 bp, Artificial Sequence
  derived and/or modified sequence
atgccccgacgccgagtgcctggcgccaattgcaagcctaccggcaaaatgagcgaggagacagttccagaagccgcaagcccccccccgcctcaaggccagccctattttgacagatttagtgaggatgatcccgaatacatgaggctccggaaccgcgcagcggacctaagacaggattttaacctgatggagcagaagaagagagtgaccatgatcctgcagtccccatcatttcgagaagaactcgaaggcctaatccaagaacagatgaagaaggggaataatagcagtaacatctgggcactgaggcagattgccgattttatggcctctacctcccacgccgtctttccaactagcagtatgaatgtgtctatgatgacgcccattaacgacctgcacacagcggacagcctcaaccttgcgaagggggagagactgatgaggtgcaagatatccagcgtgtatcgcctgctggatctctatggctgggcacagctcagcgatacttatgtcacgttgagggttagcaaggaacaggaccacttcctgatctccccaaaaggggtttcttgttccgaagtgactgcatcaagccttattaaggtgaacatcttgggggaggtggttgagaaaggctcaagctgcttccccgtggatactaccggcttctgcctacactcagcaatctatgcagcccggccggacgtccgctgcattattcacctgcacaccccggctactgctgcagtcagcgcgatgaagtggggcctgctgcccgttagccacaacgccctcctggtcggggatatggcctactatgactttaatggcgagatggaacaggaagccgacaggatcaacctgcagaaatgcctgggccccacatgcaaaattttagttctgaggaatcacggggtcgttgccctgggcgatacagttgaggaggccttttacaaaattttccacctgcaggctgcatgcgaaatccaggtgagcgccctaagctcggcgggaggtgtcgagaacctgatactgttggagcaggaaaaacaccggcctcatgaagtgggctccgttcagtgggcagggtcgacattcggaccaatgcagaaatccaggctgggcgaacatgaattcgaggcactcatgcgcatgcttgataacctcgggtataggaccggctatacgtaccgccatccatttgtgcaggagaagacaaagcacaagtctgaggttgagatcccagccacagtcacagctttcgtgtttgaggaggacggcgcccctgtacctgccctgcgccaacatgcccagaagcagcagaaagagaagacacggtggctgaacacgcctaacacctatctgcgggtgaatgttgcagatgaggtacagcgaagtatgggctccccgcgacccaaaactacctggatgaaggccgatgaagtggaaaaaagttcatcaggcatgcccatcaggattgagaatccgaatcagttcgtgcccctgtacacagacccgcaggaggtgctcgagatgcggaacaagatcagggaacagaacagacaggacgttaaaagcgcagggcctcagtcccagttgctggcctcggtgattgctgagaagtctagaagccccgtcgagcagcgcctgcctttgacaggcggtgagacttgtctccccagcggatcttccgtgccaggagcaggcctgcaagatccttag

SEQ ID NO: 72112 - DNA, 739 bp, Artificial Sequence
  derived and/or modified sequence
gggaaatggctttaattctgacggcagggctgtgagggactagcgggaacccgagccttttgtcaaggaactgcggcgtcggtggccagtcatccccgccgccgcggagccgctgcactgctgggggatctcccagcagctctgacgagcgcgggctgcagcatgggcagaaaacgctgccctgcagattagctgggtggattttttaagcgcaccccaccccccaaacccataaaataacaaaaccaacccgcagtggccgaccggagatagctaagatgccgcgcaggagtttccacctggatgtttgaggttgtgtagatgtggccggcacccttgagagtggagctagggggtgcagactgagcagtgaacagaaggagccttggacagggctgggccagcctcccgagttccaggagcgaattgcaaacccaccgggaaaatgagcgaagagacggtccccgaggctgcctcgccgccgcccccgcaggggcagccttactttgaccgcttctcagaggacgaccccgagtacatgcgccttcgcaaccgggcggcggacctgcggcaggacttcaacctgatggagcagaagaagcgcgtcaccatgatcctgcagagtccctctttcagggaggagctggaaggcctcatccaggagcagatgaagaaggagtacaagaaagaggtggagaggaagaaactagaacttgatgctcctggctggttctcttca

SEQ ID NO: 72113 - DNA, 3776 bp, Artificial Sequence
  derived and/or modified sequence
gccaggagagctctcatttcctcccagcctcgtgcgggaaatggctttaattctgacggcagggctgtgagggactagcgggaacccgagccttttgtcaaggaactgcggcgtcggtggccagtcatccccgccgccgcggagccgctgcactgctgggggatctcccagcagctctgacgagcgcgggctgcagcatgggcagaaaacgctgccctgcagattagctgggtggattttttaagcgcaccccaccccccaaacccataaaataacaaaaccaacccgcagtggccgaccggagatagctaagatgccgcgcaggagtttccacctggatgtttgaggttgtgtagatgtggccggcacccttgagagtggagctagggggtgcagactgagcagtgaacagaaggagccttggacagggctgggccagcctcccgagttccaggagcgaattgcaaacccaccgggaaaatgagcgaagagacggtccccgaggctgcctcgccgccgcccccgcaggggcagccttactttgaccgcttctcagaggacgaccccgagtacatgcgccttcgcaaccgggcggcggacctgcggcaggacttcaacctgatggagcagaagaagcgcgtcaccatgatcctgcagagtccctctttcagggaggagctggaaggcctcatccaggagcagatgaagaaggggaacaactcctccaacatctgggccctgcgacagatcgcggacttcatggccagcacctcccacgcagtcttcccgacatcttccatgaatgtctccatgatgacgcctatcaatgacctccacacagctgactccctgaacctggccaaaggggagcggctcatgcggtgcaagatcagcagtgtctaccgactcctggacctctatggctgggcccagctgagtgacacctatgtcacgttgagagtcagcaaggagcaggaccacttcctgatcagccctaagggagtttcttgcagtgaagtcacagcgtccagcctgatcaaggtgaacattctgggagaggtggtggagaagggcagcagctgcttcccagtggacaccacaggcttctgtctgcactcggccatctatgcagcgaggcccgacgtgcgctgcatcatccacctgcacacaccggccacagcagcggtgtcggccatgaagtggggcctcctgcctgtctcccacaatgccctgctggtgggggacatggcctattatgacttcaatggggaaatggagcaggaagccgatcggatcaacctgcagaagtgccttggacccacctgcaagatcctggtgctaagaaaccatggagtggttgctctgggtgacacggtagaggaggcattttacaagatcttccacctgcaggctgcatgtgagatacaggtgtcggctctgtccagtgccgggggagtggagaacctcatcctcctggagcaggagaagcaccggccccatgaggtgggctccgtgcagtgggccgggagcacctttgggcctatgcagaagagtcggctgggggagcatgagtttgaggccctcatgaggatgctggacaacctgggctacagaacaggttacacgtatcgccacccctttgttcaagagaaaaccaaacacaaaagtgaggtggagattccagccacggtcacagccttcgtgtttgaggaggacggtgccccggtgcccgccctgcgacagcatgcccagaagcagcagaaggagaagacccgctggctcaatacgcccaacacctacctgcgggtcaatgtggccgatgaggtccagaggagcatgggcagcccccgacccaagaccacgtggatgaaggctgacgaggtggagaaatccagcagtggcatgccgattcgcatcgaaaacccaaaccaatttgtgcctctctatactgacccccaggaagtactggagatgaggaacaagattcgagaacaaaaccgacaagatgtgaagtcagcggggcctcagtcccagctcctggcgagcgtcattgccgagaagagccgaagcccggtagagcagaggctgcccctgactggcggggaaacgtgtttgccttcggggtcttctgtgcctggggctgggttgcaggacccctgagtcctcatacccaccttcccctgtgatcttgggtgccggtgctcttgctgcaaaatggaggccaacctcacaggggtgctgtgaggaccagggaggacaatgtctgatggcccctgtgggcactgggctggagaacagcagcccagcctgcctgcaggagtgatgcggccggcttccgtacctcctgccatggaactccactctgtcctcccttactaccccgtgaagtggggactcataggcttggggctggagactcccaggtgccccaggtgtgcccagccctgagagtctctgacctctgagcctggtatgacatcatccaaccagagctctggaaagatgatcatgtacccatagagaaggggtatatagacaggacccatgctcctacaggatgggaagggacaatattacccacacaaacccacattgagttagaaagtattgtaattgtttttgtgcttgagatagaacagtgttttgtctagtgcttagcaaaaggggtgaagttcagaattctggcatgtgtttgaaatcactgctgctccttgcaaggtagcaatgggcatgacattttccttagcagtaaaaattggggaaatacaggaaatgttcctctctgcagggcaaattgtgatgatgcaatgatttcaggtcaagactgcagcccacagggtgggtgcccattggcaggagaagtgtgaaagttgtatcatcacacttacctccccccaaccccaactcagccaagatggggaacactgaatatcccgcagggtcaagtatagaaatagccatgttctggcgggaggtgagagttcattacaatgagcaacactgttaaaaaaacaaacaaaaatctcccctgccatttataccaagtgctcttctcggagtccctcttcttgggtttttggtcttggattctcggttgactccatgattccctacattaggcctactgtggcctcccttttggaaggggcccaggggcagaagacctggcgggccagggcagggaggactggcagcctccaggctcacctccctttggcttcactctctttgctcctcagcttcagagcactgcatcctcaaaggccaagatgaggatgctgaattaggaaaaaaggctgtggagtctgaattttagttcctatcttgggctagaggggtcaaagaattcctgaagcttatgtaagggccggctggtcagctccctagaaccacgggctccacagaggtggcaaaacccagtgattttgccagtatccctgcagggacctgcggtacaggcaggttgaagatctgagactcaggaaccttggcccctttgtcacttacaactgtgtgtgaaacaggactaacagtttggactgagagcactgaagctgctgtgtgttgtgcatataacttaatgctgtgtgttgtggcttgcactgctgtgggggcggggagggcagtggtggggaatggctggcatgaagcttgcttgagccaatgctatgcttgctgggctttggctgactggctttgggccaccaactgtatttgcatagtgatggcttggaagtgtccatagaagggattgcaataaaggtgtgtcttccttc

SEQ ID NO: 72114 - DNA, 930 bp, Artificial Sequence
  derived and/or modified sequence
tcccttattcaactgtcttcatttattctgtaaaagtagcagcagctcagccctgaccatctcctctctcacttgtgggagtctcatttagggatcgtttccacctggatgtttgaggttgtgtagatgtggccggcacccttgagagtggagctagggggtgcagactgagcagtgaacagaaggagccttggacagggctgggccagcctcccgagttccaggagcgaattgcaaacccaccgggaaaatgagcgaagagacggtccccgaggctgcctcgccgccgcccccgcaggggcagccttactttgaccgcttctcagaggacgaccccgagtacatgcgccttcgcaaccgggcggcggacctgcggcaggacttcaacctgatggagcagaagaagcgcgtcaccatgatcctgcagagtccctctttcagggaggagctggaaggcctcatccaggagcagatgaagaaggggaacaactcctccaacatctgggccctgcgacagatcgcggacttcatggccagcacctcccacgcagtcttcccgacatcttccatgaatgtctccatgatgacgcctatcaatgacctccacacagctgactccctgaacctggccaaaggggagcggctcatgcggtgcaagatcagcagtgtctaccgactcctggacctctatggctgggcccagctgagtgacacctatgtcacgttgagagtcagcaaggagcaggaccacttcctgatcagccctaagggagtttcttgcagtgaagtcacagcgtccagcctgatcaaggtgaacattctgggagaggtggtggagaagggcagcagctgcttcccagtggacaccacaggcttctgtctgcactcggccatctatgcagcgaggcccgacgtgcgctgcatcatcca

SEQ ID NO: 72115 - DNA, 721 bp, Artificial Sequence
  derived and/or modified sequence
cggtgcgaggcgggcttggcggggctgggcgcgtcccccggggcctcgcgatcgctggctgcgcggcgctcagccgcagtggccggccgagcaggtgcggcgtcggcagccgcctacattgagatcggggcaaccggcactttccacctggatgtttgaggttgtgtagatgtggccggcacccttgagagtggagctagggggtgcagactgagcagtgaacagaaggagccttggacagggctgggccagcctcccgagttccaggagcgaattgcaaacccaccgggaaaatgagcgaagagacggtccccgaggctgcctcgccgccgcccccgcaggggcagccttactttgaccgcttctcagaggacgaccccgagtacatgcgccttcgcaaccgggcggcggacctgcggcaggacttcaacctgatggagcagaagaagcgcgtcaccatgatcctgcagagtccctctttcagggaggagctggaaggcctcatccaggagcagatgaagaaggggaacaactcctccaacatctgggccctgcgacagatcgcggacttcatggccagcacctcccacgcagtcttcccgacatcttccatgaatgtctccatgatgacgcctatcaatgacctccacacagctgactccctgaacctggccaaaggggagcggctcatgcggtgcaagatcagcagtgtctaccgact

SEQ ID NO: 72116 - DNA, 2332 bp, Artificial Sequence
  derived and/or modified sequence
atttcctcccagcctcgtgcgggaaatggctttaattctgacggcagggctgtgagggactagcgggaacccgagccttttgtcaaggaactgcggcgtcggtggccagtcatccccgccgccgcggagccgctgcactgctgggggatctcccagcagctctgacgagcgcgggctgcagcatgggcagaaaacgctgccctgcagattagctgggtggattttttaagcgcaccccaccccccaaacccataaaataacaaaaccaacccgcagtggccgaccggagatagctaagatgccgcgcaggagagttccaggagcgaattgcaaacccaccgggaaaatgagcgaagagacggtccccgaggctgcctcgccgccgcccccgcaggggcagccttactttgaccgcttctcagaggacgaccccgagtacatgcgccttcgcaaccgggcggcggacctgcggcaggacttcaacctgatggagcagaagaagcgcgtcaccatgatcctgcagagtccctctttcagggaggagctggaaggcctcatccaggagcagatgaagaaggggaacaactcctccaacatctgggccctgcgacagatcgcggacttcatggccagcacctcccacgcagtcttcccgacatcttccatgaatgtctccatgatgacgcctatcaatgacctccacacagctgactccctgaacctggccaaaggggagcggctcatgcggtgcaagatcagcagtgtctaccgactcctggacctctatggctgggcccagctgagtgacacctatgtcacgttgagagtcagcaaggagcaggaccacttcctgatcagccctaagggagtttcttgcagtgaagtcacagcgtccagcctgatcaaggtgaacattctgggagaggtggtggagaagggcagcagctgcttcccagtggacaccacaggcttctgtctgcactcggccatctatgcagcgaggcccgacgtgcgctgcatcatccacctgcacacaccggccacagcagcggtgtcggccatgaagtggggcctcctgcctgtctcccacaatgccctgctggtgggggacatggcctattatgacttcaatggggaaatggagcaggaagccgatcggatcaacctgcagaagtgccttggacccacctgcaagatcctggtgctaagaaaccatggagtggttgctctgggtgacacggtagaggaggcattttacaagatcttccacctgcaggctgcatgtgagatacaggtgtcggctctgtccagtgccgggggagtggagaacctcatcctcctggagcaggagaagcaccggccccatgaggtgggctccgtgcagtgggccgggagcacctttgggcctatgcagaagagtcggctgggggagcatgagtttgaggccctcatgaggatgctggacaacctgggctacagaacaggttacacgtatcgccacccctttgttcaagagaaaaccaaacacaaaagtgaggtggagattccagccacggtcacagccttcgtgtttgaggaggacggtgccccggtgcccgccctgcgacagcatgcccagaagcagcagaaggagaagacccgctggctcaatacgcccaacacctacctgcgggtcaatgtggccgatgaggtccagaggagcatgggcagcccccgacccaagaccacgtggatgaaggctgacgaggtggagaaatccagcagtggcatgccgattcgcatcgaaaacccaaaccaatttgtgcctctctatactgacccccaggaagtactggagatgaggaacaagattcgagaacaaaaccgacaagatgtgaagtcagcggggcctcagtcccagctcctggcgagcgtcattgccgagaagagccgaagcccggtagagcagaggctgcccctgactggcggggaaacgtgtttgccttcggggtcttctgtgcctggggctgggttgcaggacccctgagtcctcatacccaccttcccctgtgatcttgggtgccggtgctcttgctgcaaaatggaggccaacctcacaggggtgctgtgaggaccagggaggacaatgtctgatggcccctgtgggcactgggctggagaacagcagcccagcctgcctgcaggagtgatgcggccggcttccgtacctcctgccatggaactccactctgtcctcccttactaccccgtgaagtggggactcataggcttggggctggagactcccaggtgccccaggtgtgcccagccctgagagtctctgacctctgag

SEQ ID NO: 72117 - DNA, 580 bp, Artificial Sequence
  derived and/or modified sequence
tttcctcccagcctcgtgcgggaaatggctttaattctgacggcagggctgtgagggactagcgggaacccgagccttttgtcaaggaactgcggcgtcggtggccagtcatccccgccgccgcggagccgctgcactgctgggggatctcccagcagctctgacgagcgcgggctgcagcatgggcagaaaacgctgccctgcagattagctgggtggattttttaagcgcaccccaccccccaaacccataaaataacaaaaccaacccgcagtggccgaccggagatagctaagatgccgcgcaggagagcaccactaacacgaagctcttctgcacatcagactcttaatcaaaggattgggcatatcagaagtttccacctggatgtttgaggttgtgtagatgtggccggcacccttgagagtggagctagggggtgcagactgagcagtgaacagaaggagccttggacagggctgggccagcctcccgttccaggagcgaattgcaaacccaccgggaaaatgagcgaagagacggtccccgaggctgcctcgccgccgcccccgcaggggc

SEQ ID NO: 72118 - DNA, 1308 bp, Artificial Sequence
  derived and/or modified sequence
atttcctcccagcctcgtgcgggaaatggctttaattctgacggcagggctgtgagggactagcgggaacccgagccttttgtcaaggaactgcggcgtcggtggccagtcatccccgccgccgcggagccgctgcactgctgggggatctcccagcagctctgacgagcgcgggctgcagcatgggcagaaaacgctgccctgcagattagctgggtggattttttaagcgcaccccaccccccaaacccataaaataacaaaaccaacccgcagtggccgaccggagatagctaagatgccgcgcaggagtttccacctggatgtttgaggttgtgtagatgtggccggcacccttgagagtggagctagggggtgcagactgagcagtgaacagaaggagccttggacagggctgggccagcctcccgagttccaggagcgaattgcaaacccaccgggaaaatgagcgaagagacggtccccgaggctgcctcgccgccgcccccgcaggggcagccttactttgaccgcttctcagaggacgaccccgagtacatgcgccttcgcaaccgggcggcggacctgcggcaggacttcaacctgatggagcagaagaagcgcgtcaccatgatcctgcagagtccctctttcagggaggagctggaaggcctcatccaggagcagatgaagaaggggaacaactcctccaacatctgggccctgcgacagatcgcggacttcatggccagcacctcccacgcagtcttcccgacatcttccatgaatgtctccatgatgacgcctatcaatgacctccacacagctgactccctgaacctggccaaaggggagcggctcatgcggtgcaagatcagcagtgtctaccgactcctggacctctatggctgggcccagctgagtgacacctatgtcacgttgagagtcagcaaggagcaggaccacttcctgatcagccctaagggagtttcttgcagtgaagtcacagcgtccagcctggtgagtgaagtactggagatgaggaacaagattcgagaacaaaaccgacaagatgtgaagtcagcggggcctcagtcccagctcctggcgagcgtcattgccgagaagagccgaagcccgtctacagagagccagctgatgtccaagggagacgaggataccaaagacgattcagaggagacggtgcccaaccccttcagccaactcactgaccaggagttggaggagtacaagaaagaggtggagaggaagaaactagaacttgatgctcctggctggttctcttca

SEQ ID NO: 72119 - DNA, 1728 bp, Artificial Sequence
  derived and/or modified sequence
atgccccggcggcgggtgcctggggccaactgcaagcccaccgggaagatgtctgaggagaccgtgcctgaggccgccagccccccaccaccccagggccagccctactttgaccgcttctctgaagatgatcctgagtacatgaggctgaggaacagagctgctgacctgcggcaggacttcaacctgatggagcagaagaagagggtgaccatgatcctgcagagccccagcttccgggaggagctggagggcctcatccaggagcagatgaagaagggcaacaacagcagcaacatctgggccctgcggcagattgctgacttcatggccagcaccagccatgctgtgttccccaccagctccatgaatgtgtccatgatgacccccatcaatgacctgcacacagctgacagcctgaacctggccaagggggagcggctgatgcgctgcaagatcagctctgtgtaccgcctgctggacctgtatggctgggcccagctgagtgacacctacgtgaccctgcgggtgtccaaggagcaggaccacttcctgatcagccccaagggcgtgtcctgcagcgaggtgacagccagcagcctcatcaaggtgaacatcctgggggaggtggtggagaagggcagcagctgcttccctgtggacaccaccggcttctgcctgcacagcgccatctatgctgcccggccagatgtgcgctgcatcatccacctgcacaccccagccacagctgctgtgtctgccatgaagtggggcctgctgcctgtgagccacaatgccctgctggtgggggacatggcctactatgacttcaacggggagatggagcaggaggccgaccgcatcaacctgcagaagtgcctgggccccacctgcaagatcctggtgctgaggaaccacggcgtggtggccctgggggacacagtggaggaggccttctacaagatcttccacctgcaggccgcctgtgagatccaggtgtctgccctgagcagcgctggaggagtggagaacctgatcctgctggagcaggagaagcaccggccccatgaggtgggctctgtgcagtgggccggcagcaccttcggccccatgcagaagagccggctgggggagcatgaatttgaggccctgatgaggatgctggacaacctgggctacagaacaggctacacctaccgccacccctttgtgcaggagaagaccaagcacaagtctgaggtggagatcccagccaccgtgacagcctttgtgtttgaagaagatggagcccctgtgcctgccctgcggcagcacgcccagaagcagcagaaggagaagacccgctggctgaacacccccaacacctacctgcgggtgaatgtggctgatgaggtgcagaggtccatgggcagcccccggcccaagaccacctggatgaaggcagatgaggtggagaagagcagcagcggcatgcccatcagaattgagaaccccaaccagtttgtgcccctgtacacagacccccaggaggtgctggagatgaggaacaagatccgggagcagaaccggcaggatgtgaagtctgctggcccccagagccagctgctggcctctgtgattgctgagaagagccgcagccctgtggagcagaggctgcccctgactggaggagagacctgcctgcccagcggcagctctgtgcctggggccggcctgcaggacccctag

SEQ ID NO: 72120 - DNA, 1728 bp, Artificial Sequence
  derived and/or modified sequence
atgccccggcggcgggtgcccggcgccaactgcaagcccaccggcaaaatgtcagaggagaccgtgccagaagctgccagcccccctccgccgcaggggcagccttatttcgacaggttctcagaggacgacccagagtacatgcgactgaggaaccgagccgccgacctgcgtcaagactttaaccttatggaacagaaaaaacgtgtgaccatgatcctccagtccccatctttcagggaggagctcgagggtctaatacaggaacagatgaagaaaggcaacaactcatccaacatctgggcattacggcaaatagccgattttatggcctcaacatctcacgcggtgttccccacaagcagcatgaatgtttccatgatgacacctatcaatgatctgcatactgctgactctcttaatcttgctaaaggagaaagacttatgcggtgcaaaattagttccgtgtacagattgctggacctgtacggctgggcgcaactcagcgatacatatgttaccctgcgcgtatctaaagagcaggaccacttccttatttccccgaagggagtgtcctgttctgaggttaccgcttcatctctcattaaagtgaatatcctgggtgaggtagtagagaaaggtagctcctgctttccagtggacactacagggttttgtcttcacagcgcaatctacgctgcgcgccccgacgtgagatgcatcatccacctgcatacccctgcaaccgcggcggttagcgcaatgaagtggggcttgttacctgtgagccataacgccctgctcgtcggcgacatggcctactacgacttcaacggtgagatggagcaagaggcggacagaattaatctccaaaagtgcctaggcccaacctgcaaaatcctggtgctgcgtaatcatggggtcgtcgccctgggtgatactgtggaggaggcattctataagattttccatctccaggccgcctgtgagatccaggttagtgcgctatccagcgctggaggcgtggagaacctgatcctcctcgaacaggagaaacaccggcctcatgaggtgggatcagtccaatgggctgggtcgaccttcggccccatgcagaagtcgcggttgggtgaacatgagtttgaggcgctaatgcggatgctcgacaatttggggtacagaaccggttacacctatcgccaccctttcgttcaggagaagactaagcataaaagcgaagtagaaattccagccaccgtaacggcctttgtttttgaagaagatggcgctccagtgcccgccttacgacagcacgcccagaagcaacaaaaagaaaaaacacgctggctcaacacaccaaatacctatttgcgcgtgaacgtggccgacgaagtacagcggagtatgggcagtcctcgaccaaagaccacttggatgaaagctgatgaggtcgagaaatctagttccggaatgccaatccgcattgagaacccaaaccagtttgtccctctgtatacagatccccaggaggtgctcgaaatgcgcaacaagattagggaacagaataggcaagatgtcaagagtgcggggccccaatcccaactactggcatctgtaatcgccgagaagtcccgaagtcctgttgagcagcgactgcccctgaccgggggcgagacctgcctgcccagcggttccagcgttcctggagcaggcctccaagacccctag

SEQ ID NO: 72121 - DNA, 1728 bp, Artificial Sequence
  derived and/or modified sequence
atgcccaggagaagagtcccgggtgccaactgcaaaccaaccggtaagatgtcagaggagaccgtgcctgaggccgcttccccaccacccccacaaggtcagccctacttcgaccgcttcagcgaggacgaccctgaatacatgcggctcagaaatcgtgccgctgaccttcggcaggactttaaccttatggagcaaaaaaaaagggtgaccatgattcttcaatccccttcgttcagagaggaactagaggggcttatccaggaacagatgaaaaaagggaacaattcatcgaatatctgggccttaagacagattgcggactttatggcctccacatcacacgcggtgttccctacaagttcaatgaatgtctccatgatgactcctatcaatgatctccatacagctgattctcttaacctggccaagggcgagcgattaatgcgctgtaaaatcagctccgtgtaccgattattggatctttatggatgggctcagctgagcgatacatacgtcactctccgggtgagtaaagaacaggatcactttctgattagccccaagggagtgtcctgtagcgaagtaaccgctagctccctgattaaagtgaacatcctcggcgaggtggtagaaaaaggcagctcttgctttccagtagatactaccggattctgtttacatagcgcgatttatgctgcccgaccagatgtgcggtgcatcatccacttacacactcccgcaaccgctgccgtcagtgctatgaaatggggactgctgccagtttcccacaacgcacttctggtgggtgacatggcctattacgactttaacggtgagatggagcaggaggcagataggatcaatctccagaagtgcctgggacctacctgtaagatccttgtgctgagaaaccatggagtcgtggccctgggagacactgtggaggaggccttctataagatcttccacctccaggccgcatgtgagatacaggtcagcgcactctcctctgccggaggcgtagagaatttgatcttactggagcaagaaaagcatcgaccccatgaagtgggctcagtgcaatgggccggatctacatttgggccaatgcagaagagcagactcggggagcacgaatttgaggctctgatgcgaatgctggataacttgggataccgaacaggctatacataccgccatccttttgtgcaagagaagaccaaacacaagtcggaggtcgagatcccggctaccgtcaccgcattcgtttttgaggaagacggtgcacctgtccccgcactgaggcaacatgcccagaagcagcagaaggagaaaacaaggtggctgaacacgccgaacacttacctgcgggttaacgtggcagacgaggtccagagaagcatggggtctcctcggccaaagacaacgtggatgaaagcagatgaagtcgaaaagagcagctctggcatgccgatacgaatcgaaaaccccaaccagttcgttccactgtatacagatccccaagaggttctcgaaatgaggaataagatcagagaacagaacaggcaggacgtgaaaagtgcaggtccacagagccagttactggcttccgtaattgctgaaaagagtcgcagtccagtcgagcagaggcttcctctgacaggtggcgagacatgtctacctagtggctcatccgtacctggagctgggctgcaggacccatag

SEQ ID NO: 72122 - DNA, 1728 bp, Artificial Sequence
  derived and/or modified sequence
atgcccagaagaagagtgcccggcgccaactgcaagcccaccggcaagatgagcgaggagaccgtgcccgaggccgccagccccccccccccccagggccagccctacttcgacagattcagcgaggacgaccccgagtacatgagactgagaaacagagccgccgacctgagacaggacttcaacctgatggagcagaagaagagagtgaccatgatcctgcagagccccagcttcagagaggagctggagggcctgatccaggagcagatgaagaagggcaacaacagcagcaacatctgggccctgagacagatcgccgacttcatggccagcaccagccacgccgtgttccccaccagcagcatgaacgtgagcatgatgacccccatcaacgacctgcacaccgccgacagcctgaacctggccaagggcgagagactgatgagatgcaagatcagcagcgtgtacagactgctggacctgtacggctgggcccagctgagcgacacctacgtgaccctgagagtgagcaaggagcaggaccacttcctgatcagccccaagggcgtgagctgcagcgaggtgaccgccagcagcctgatcaaggtgaacatcctgggcgaggtggtggagaagggcagcagctgcttccccgtggacaccaccggcttctgcctgcacagcgccatctacgccgccagacccgacgtgagatgcatcatccacctgcacacccccgccaccgccgccgtgagcgccatgaagtggggcctgctgcccgtgagccacaacgccctgctggtgggcgacatggcctactacgacttcaacggcgagatggagcaggaggccgacagaatcaacctgcagaagtgcctgggccccacctgcaagatcctggtgctgagaaaccacggcgtggtggccctgggcgacaccgtggaggaggccttctacaagatcttccacctgcaggccgcctgcgagatccaggtgagcgccctgagcagcgccggcggcgtggagaacctgatcctgctggagcaggagaagcacagaccccacgaggtgggcagcgtgcagtgggccggcagcaccttcggccccatgcagaagagcagactgggcgagcacgagttcgaggccctgatgagaatgctggacaacctgggctacagaaccggctacacctacagacaccccttcgtgcaggagaagaccaagcacaagagcgaggtggagatccccgccaccgtgaccgccttcgtgttcgaggaggacggcgcccccgtgcccgccctgagacagcacgcccagaagcagcagaaggagaagaccagatggctgaacacccccaacacctacctgagagtgaacgtggccgacgaggtgcagagaagcatgggcagccccagacccaagaccacctggatgaaggccgacgaggtggagaagagcagcagcggcatgcccatcagaatcgagaaccccaaccagttcgtgcccctgtacaccgacccccaggaggtgctggagatgagaaacaagatcagagagcagaacagacaggacgtgaagagcgccggcccccagagccagctgctggccagcgtgatcgccgagaagagcagaagccccgtggagcagagactgcccctgaccggcggcgagacctgcctgcccagcggcagcagcgtgcccggcgccggcctgcaggacccctag

SEQ ID NO: 72123 - protein, 395 aa, Artificial Sequence
  derived and/or modified sequence
MTINGLETAEGLDCVRTIEELARVLRKHSGLRNILPITTAKVPIVKFFHLRSGLEVDISLYNTLALHNTRLLSAYSAIDPRVKYLCYTMKVFTKIYKGEKKPEIFVDGWNIYFFDQIDELPTYWSECGKNTESVGQLWLGLLRFYTEEFDFKEHVISIRRKSLLTTFKKQWTSKYIVIEDPFDLNHNLGAGLSRKMTNFIMKAFINGRRVFGIPVKGFPKDYPSKMEYFFDPDVLTEGELAPNDRCCRICGKIGHFMKDCPMRRKVRRRRDQEDALNQRYPENKEKRSKEDKEIHNKYTEREVSTKEDKPIQCTPQKAKPMRAAADLGREKILRPPVEKWKRQDDKDLREKRCFICGREGHIKKECPQFKGSSGSLSSKYMTQGKASAKRTQQES

SEQ ID NO: 72124 - protein, 1495 aa, Artificial Sequence
  derived and/or modified sequence
MGDTAKPYFVKRTKDRGTMDDDDFRRGHPQQDYLIIDDHAKGHGSKMEKGLQKKKITPGNYGNTPRKGPCAVSSNPYAFKNPIYSQPAWMNDSHKDQSKRWLSDEHTGNSDNWREFKPGPRIPVINRQRKDSFQENEDGYRWQDTRGCRTVRRLFHKDLTSLETTSEMEAGSPENKKQRSRPRKPRKTRNEENEQDGDLEGPVIDESVLSTKELLGLQQAEERLKRDCIDRLKRRPRNYPTAKYTCRLCDVLIESIAFAHKHIKEKRHKKNIKEKQEEELLTTLPPPTPSQINAVGIAIDKVVQEFGLHNENLEQRLEIKRIMENVFQHKLPDCSLRLYGSSCSRLGFKNSDVNIDIQFPAIMSQPDVLLLVQECLKNSDSFIDVDADFHARVPVVVCREKQSGLLCKVSAGNENACLTTKHLTALGKLEPKLVPLVIAFRYWAKLCSIDRPEEGGLPPYVFALMAIFFLQQRKEPLLPVYLGSWIEGFSLSKLGNFNLQDIEKDVVIWEHTDSAAGDTGITKEEAPRETPIKRGQVSLILDVKHQPSVPVGQLWVELLRFYALEFNLADLVISIRVKELVSRELKDWPKKRIAIEDPYSVKRNVARTLNSQPVFEYILHCLRTTYKYFALPHKITKSSLLKPLNAITCISEHSKEVINHHPDVQTKDDKLKNSVLAQGPGATSSAANTCKVQPLTLKETAESFGSPPKEEMGNEHISVHPENSDCIQADVNSDDYKGDKVYHPETGRKNEKEKVGRKGKHLLTVDQKRGEHVVCGSTRNNESESTLDLEGFQNPTAKECEGLATLDNKADLDGESTEGTEELEDSLNHFTHSVQGQTSEMIPSDEEEEDDEEEEEEEEPRLTINQREDEDGMANEDELDNTYTGSGDEDALSEEDDELGEAAKYEDVKECGKHVERALLVELNKISLKEENVCEEKNSPVDQSDFFYEFSKLIFTKGKSPTVVCSLCKREGHLKKDCPEDFKRIQLEPLPPLTPKFLNILDQVCIQCYKDFSPTIIEDQAREHIRQNLESFIRQDFPGTKLSLFGSSKNGFGFKQSDLDVCMTINGLETAEGLDCVRTIEELARVLRKHSGLRNILPITTAKVPIVKFFHLRSGLEVDISLYNTLALHNTRLLSAYSAIDPRVKYLCYTMKVFTKMCDIGDASRGSLSSYAYTLMVLYFLQQRNPPVIPVLQEIYKGEKKPEIFVDGWNIYFFDQIDELPTYWSECGKNTESVGQLWLGLLRFYTEEFDFKEHVISIRRKSLLTTFKKQWTSKYIVIEDPFDLNHNLGAGLSRKMTNFIMKAFINGRRVFGIPVKGFPKDYPSKMEYFFDPDVLTEGELAPNDRCCRICGKIGHFMKDCPMRRKVRRRRDQEDALNQRYPENKEKRSKEDKEIHNKYTEREVSTKEDKPIQCTPQKAKPMRAAADLGREKILRPPVEKWKRQDDKDLREKRCFICGREGHIKKECPQFKGSSGSLSSKYMTQGKASAKRTQQES

SEQ ID NO: 72125 - DNA, 2355 bp, Artificial Sequence
  derived and/or modified sequence
atgggcaacgagcacatcagcgtgcaccccgagaacagcgactgcatccaggccgacgtgaacagcgacgactacaagggcgacaaggtgtaccaccccgagaccggcagaaagaacgagaaggagaaggtgggcagaaagggcaagcacctgctgaccgtggaccagaagagaggcgagcacgtggtgtgcggcagcaccagaaacaacgagagcgagagcaccctggacctggagggcttccagaaccccaccgccaaggagtgcgagggcctggccaccctggacaacaaggccgacctggacggcgagagcaccgagggcaccgaggagctggaggacagcctgaaccacttcacccacagcgtgcagggccagaccagcgagatgatccccagcgacgaggaggaggaggacgacgaggaggaggaggaggaggaggagcccagactgaccatcaaccagagagaggacgaggacggcatggccaacgaggacgagctggacaacacctacaccggcagcggcgacgaggacgccctgagcgaggaggacgacgagctgggcgaggccgccaagtacgaggacgtgaaggagtgcggcaagcacgtggagagagccctgctggtggagctgaacaagatcagcctgaaggaggagaacgtgtgcgaggagaagaacagccccgtggaccagagcgacttcttctacgagttcagcaagctgatcttcaccaagggcaagagccccaccgtggtgtgcagcctgtgcaagagagagggccacctgaagaaggactgccccgaggacttcaagagaatccagctggagcccctgccccccctgacccccaagttcctgaacatcctggaccaggtgtgcatccagtgctacaaggacttcagccccaccatcatcgaggaccaggccagagagcacatcagacagaacctggagagcttcatcagacaggacttccccggcaccaagctgagcctgttcggcagcagcaagaacggcttcggcttcaagcagagcgacctggacgtgtgcatgaccatcaacggcctggagaccgccgagggcctggactgcgtgagaaccatcgaggagctggccagagtgctgagaaagcacagcggcctgagaaacatcctgcccatcaccaccgccaaggtgcccatcgtgaagttcttccacctgagaagcggcctggaggtggacatcagcctgtacaacaccctggccctgcacaacaccagactgctgagcgcctacagcgccatcgaccccagagtgaagtacctgtgctacaccatgaaggtgttcaccaagatgtgcgacatcggcgacgccagcagaggcagcctgagcagctacgcctacaccctgatggtgctgtacttcctgcagcagagaaacccccccgtgatccccgtgctgcaggagatctacaagggcgagaagaagcccgagatcttcgtggacggctggaacatctacttcttcgaccagatcgacgagctgcccacctactggagcgagtgcggcaagaacaccgagagcgtgggccagctgtggctgggcctgctgagattctacaccgaggagttcgacttcaaggagcacgtgatcagcatcagaagaaagagcctgctgaccaccttcaagaagcagtggaccagcaagtacatcgtgatcgaggaccccttcgacctgaaccacaacctgggcgccggcctgagcagaaagatgaccaacttcatcatgaaggccttcatcaacggcagaagagtgttcggcatccccgtgaagggcttccccaaggactaccccagcaagatggagtacttcttcgaccccgacgtgctgaccgagggcgagctggcccccaacgacagatgctgcagaatctgcggcaagatcggccacttcatgaaggactgccccatgagaagaaaggtgagaagaagaagagaccaggaggacgccctgaaccagagataccccgagaacaaggagaagagaagcaaggaggacaaggagatccacaacaagtacaccgagagagaggtgagcaccaaggaggacaagcccatccagtgcaccccccagaaggccaagcccatgagagccgccgccgacctgggcagagagaagatcctgagaccccccgtggagaagtggaagagacaggacgacaaggacctgagagagaagagatgcttcatctgcggcagagagggccacatcaagaaggagtgcccccagttcaagggcagcagcggcagcctgagcagcaagtacatgacccagggcaaggccagcgccaagagaacccagcaggagagctag

SEQ ID NO: 72126 - DNA, 1188 bp, Artificial Sequence
  derived and/or modified sequence
atgaccatcaacggcctggagaccgccgagggcctggactgcgtgagaaccatcgaggagctggccagagtgctgagaaagcacagcggcctgagaaacatcctgcccatcaccaccgccaaggtgcccatcgtgaagttcttccacctgagaagcggcctggaggtggacatcagcctgtacaacaccctggccctgcacaacaccagactgctgagcgcctacagcgccatcgaccccagagtgaagtacctgtgctacaccatgaaggtgttcaccaagatctacaagggcgagaagaagcccgagatcttcgtggacggctggaacatctacttcttcgaccagatcgacgagctgcccacctactggagcgagtgcggcaagaacaccgagagcgtgggccagctgtggctgggcctgctgagattctacaccgaggagttcgacttcaaggagcacgtgatcagcatcagaagaaagagcctgctgaccaccttcaagaagcagtggaccagcaagtacatcgtgatcgaggaccccttcgacctgaaccacaacctgggcgccggcctgagcagaaagatgaccaacttcatcatgaaggccttcatcaacggcagaagagtgttcggcatccccgtgaagggcttccccaaggactaccccagcaagatggagtacttcttcgaccccgacgtgctgaccgagggcgagctggcccccaacgacagatgctgcagaatctgcggcaagatcggccacttcatgaaggactgccccatgagaagaaaggtgagaagaagaagagaccaggaggacgccctgaaccagagataccccgagaacaaggagaagagaagcaaggaggacaaggagatccacaacaagtacaccgagagagaggtgagcaccaaggaggacaagcccatccagtgcaccccccagaaggccaagcccatgagagccgccgccgacctgggcagagagaagatcctgagaccccccgtggagaagtggaagagacaggacgacaaggacctgagagagaagagatgcttcatctgcggcagagagggccacatcaagaaggagtgcccccagttcaagggcagcagcggcagcctgagcagcaagtacatgacccagggcaaggccagcgccaagagaacccagcaggagagctag

SEQ ID NO: 72127 - DNA, 4374 bp, Artificial Sequence
  derived and/or modified sequence
atgggcgacaccgccaagccctacttcgtgaagagaaccaaggacagaggcaccatggacgacgacgacttcagaagaggccacccccagcaggactacctgatcatcgacgaccacgccaagggccacggcagcaagatggagaagggcctgcagaagaagaagatcacccccggcaactacggcaacacccccagaaagggcccctgcgccgtgagcagcaacccctacgccttcaagaaccccatctacagccagcccgcctggatgaacgacagccacaaggaccagagcaagagatggctgagcgacgagcacaccggcaacagcgacaactggagagagttcaagcccggccccagaatccccgtgatcaacagacagagaaaggacagcttccaggagaacgaggacggctacagatggcaggacaccagaggctgcagaaccgtgagaagactgttccacaaggacctgaccagcctggagaccaccagcgagatggaggccggcagccccgagaacaagaagcagagaagcagacccagaaagcccagaaagaccagaaacgaggagaacgagcaggacggcgacctggagggccccgtgatcgacgagagcgtgctgagcaccaaggagctgctgggcctgcagcaggccgaggagagactgaagagagactgcatcgacagactgaagagaagacccagaaactaccccaccgccaagtacacctgcagactgtgcgacgtgctgatcgagagcatcgccttcgcccacaagcacatcaaggagaagagacacaagaagaacatcaaggagaagcaggaggaggagctgctgaccaccctgcccccccccacccccagccagatcaacgccgtgggcatcgccatcgacaaggtggtgcaggagttcggcctgcacaacgagaacctggagcagagactggagatcaagagaatcatggagaacgtgttccagcacaagctgcccgactgcagcctgagactgtacggcagcagctgcagcagactgggcttcaagaacagcgacgtgaacatcgacatccagttccccgccatcatgagccagcccgacgtgctgctgctggtgcaggagtgcctgaagaacagcgacagcttcatcgacgtggacgccgacttccacgccagagtgcccgtggtggtgtgcagagagaagcagagcggcctgctgtgcaaggtgagcgccggcaacgagaacgcctgcctgaccaccaagcacctgaccgccctgggcaagctggagcccaagctggtgcccctggtgatcgccttcagatactgggccaagctgtgcagcatcgacagacccgaggagggcggcctgcccccctacgtgttcgccctgatggccatcttcttcctgcagcagagaaaggagcccctgctgcccgtgtacctgggcagctggatcgagggcttcagcctgagcaagctgggcaacttcaacctgcaggacatcgagaaggacgtggtgatctgggagcacaccgacagcgccgccggcgacaccggcatcaccaaggaggaggcccccagagagacccccatcaagagaggccaggtgagcctgatcctggacgtgaagcaccagcccagcgtgcccgtgggccagctgtgggtggagctgctgagattctacgccctggagttcaacctggccgacctggtgatcagcatcagagtgaaggagctggtgagcagagagctgaaggactggcccaagaagagaatcgccatcgaggacccctacagcgtgaagagaaacgtggccagaaccctgaacagccagcccgtgttcgagtacatcctgcactgcctgagaaccacctacaagtacttcgccctgccccacaagatcaccaagagcagcctgctgaagcccctgaacgccatcacctgcatcagcgagcacagcaaggaggtgatcaaccaccaccccgacgtgcagaccaaggacgacaagctgaagaacagcgtgctggcccagggccccggcgccaccagcagcgccgccaacacctgcaaggtgcagcccctgaccctgaaggagaccgccgagagcttcggcagcccccccaaggaggagatgggcaacgagcacatcagcgtgcaccccgagaacagcgactgcatccaggccgacgtgaacagcgacgactacaagggcgacaaggtgtaccaccccgagaccggcagaaagaacgagaaggagaaggtgggcagaaagggcaagcacctgctgaccgtggaccagaagagaggcgagcacgtggtgtgcggcagcaccagaaacaacgagagcgagagcaccctggacctggagggcttccagaaccccaccgccaaggagtgcgagggcctggccaccctggacaacaaggccgacctggacggcgagagcaccgagggcaccgaggagctggaggacagcctgaaccacttcacccacagcgtgcagggccagaccagcgagatgatccccagcgacgaggaggaggaggacgacgaggaggaggaggaggaggaggagcccagactgaccatcaaccagagagaggacgaggacggcatggccaacgaggacgagctggacaacacctacaccggcagcggcgacgaggacgccctgagcgaggaggacgacgagctgggcgaggccgccaagtacgaggacgtgaaggagtgcggcaagcacgtggagagagccctgctggtggagctgaacaagatcagcctgaaggaggagaacgtgtgcgaggagaagaacagccccgtggaccagagcgacttcttctacgagttcagcaagctgatcttcaccaagggcaagagccccaccgtggtgtgcagcctgtgcaagagagagggccacctgaagaaggactgccccgaggacttcaagagaatccagctggagcccctgccccccctgacccccaagttcctgaacatcctggaccaggtgtgcatccagtgctacaaggacttcagccccaccatcatcgaggaccaggccagagagcacatcagacagaacctggagagcttcatcagacaggacttccccggcaccaagctgagcctgttcggcagcagcaagaacggcttcggcttcaagcagagcgacctggacgtgtgcatgaccatcaacggcctggagaccgccgagggcctggactgcgtgagaaccatcgaggagctggccagagtgctgagaaagcacagcggcctgagaaacatcctgcccatcaccaccgccaaggtgcccatcgtgaagttcttccacctgagaagcggcctggaggtggacatcagcctgtacaacaccctggccctgcacaacaccagactgctgagcgcctacagcgccatcgaccccagagtgaagtacctgtgctacaccatgaaggtgttcaccaagatctacaagggcgagaagaagcccgagatcttcgtggacggctggaacatctacttcttcgaccagatcgacgagctgcccacctactggagcgagtgcggcaagaacaccgagagcgtgggccagctgtggctgggcctgctgagattctacaccgaggagttcgacttcaaggagcacgtgatcagcatcagaagaaagagcctgctgaccaccttcaagaagcagtggaccagcaagtacatcgtgatcgaggaccccttcgacctgaaccacaacctgggcgccggcctgagcagaaagatgaccaacttcatcatgaaggccttcatcaacggcagaagagtgttcggcatccccgtgaagggcttccccaaggactaccccagcaagatggagtacttcttcgaccccgacgtgctgaccgagggcgagctggcccccaacgacagatgctgcagaatctgcggcaagatcggccacttcatgaaggactgccccatgagaagaaaggtgagaagaagaagagaccaggaggacgccctgaaccagagataccccgagaacaaggagaagagaagcaaggaggacaaggagatccacaacaagtacaccgagagagaggtgagcaccaaggaggacaagcccatccagtgcaccccccagaaggccaagcccatgagagccgccgccgacctgggcagagagaagatcctgagaccccccgtggagaagtggaagagacaggacgacaaggacctgagagagaagagatgcttcatctgcggcagagagggccacatcaagaaggagtgcccccagttcaagggcagcagcggcagcctgagcagcaagtacatgacccagggcaaggccagcgccaagagaacccagcaggagagctag

SEQ ID NO: 72128 - DNA, 4488 bp, Artificial Sequence
  derived and/or modified sequence
atgggcgacaccgccaagccctacttcgtgaagagaaccaaggacagaggcaccatggacgacgacgacttcagaagaggccacccccagcaggactacctgatcatcgacgaccacgccaagggccacggcagcaagatggagaagggcctgcagaagaagaagatcacccccggcaactacggcaacacccccagaaagggcccctgcgccgtgagcagcaacccctacgccttcaagaaccccatctacagccagcccgcctggatgaacgacagccacaaggaccagagcaagagatggctgagcgacgagcacaccggcaacagcgacaactggagagagttcaagcccggccccagaatccccgtgatcaacagacagagaaaggacagcttccaggagaacgaggacggctacagatggcaggacaccagaggctgcagaaccgtgagaagactgttccacaaggacctgaccagcctggagaccaccagcgagatggaggccggcagccccgagaacaagaagcagagaagcagacccagaaagcccagaaagaccagaaacgaggagaacgagcaggacggcgacctggagggccccgtgatcgacgagagcgtgctgagcaccaaggagctgctgggcctgcagcaggccgaggagagactgaagagagactgcatcgacagactgaagagaagacccagaaactaccccaccgccaagtacacctgcagactgtgcgacgtgctgatcgagagcatcgccttcgcccacaagcacatcaaggagaagagacacaagaagaacatcaaggagaagcaggaggaggagctgctgaccaccctgcccccccccacccccagccagatcaacgccgtgggcatcgccatcgacaaggtggtgcaggagttcggcctgcacaacgagaacctggagcagagactggagatcaagagaatcatggagaacgtgttccagcacaagctgcccgactgcagcctgagactgtacggcagcagctgcagcagactgggcttcaagaacagcgacgtgaacatcgacatccagttccccgccatcatgagccagcccgacgtgctgctgctggtgcaggagtgcctgaagaacagcgacagcttcatcgacgtggacgccgacttccacgccagagtgcccgtggtggtgtgcagagagaagcagagcggcctgctgtgcaaggtgagcgccggcaacgagaacgcctgcctgaccaccaagcacctgaccgccctgggcaagctggagcccaagctggtgcccctggtgatcgccttcagatactgggccaagctgtgcagcatcgacagacccgaggagggcggcctgcccccctacgtgttcgccctgatggccatcttcttcctgcagcagagaaaggagcccctgctgcccgtgtacctgggcagctggatcgagggcttcagcctgagcaagctgggcaacttcaacctgcaggacatcgagaaggacgtggtgatctgggagcacaccgacagcgccgccggcgacaccggcatcaccaaggaggaggcccccagagagacccccatcaagagaggccaggtgagcctgatcctggacgtgaagcaccagcccagcgtgcccgtgggccagctgtgggtggagctgctgagattctacgccctggagttcaacctggccgacctggtgatcagcatcagagtgaaggagctggtgagcagagagctgaaggactggcccaagaagagaatcgccatcgaggacccctacagcgtgaagagaaacgtggccagaaccctgaacagccagcccgtgttcgagtacatcctgcactgcctgagaaccacctacaagtacttcgccctgccccacaagatcaccaagagcagcctgctgaagcccctgaacgccatcacctgcatcagcgagcacagcaaggaggtgatcaaccaccaccccgacgtgcagaccaaggacgacaagctgaagaacagcgtgctggcccagggccccggcgccaccagcagcgccgccaacacctgcaaggtgcagcccctgaccctgaaggagaccgccgagagcttcggcagcccccccaaggaggagatgggcaacgagcacatcagcgtgcaccccgagaacagcgactgcatccaggccgacgtgaacagcgacgactacaagggcgacaaggtgtaccaccccgagaccggcagaaagaacgagaaggagaaggtgggcagaaagggcaagcacctgctgaccgtggaccagaagagaggcgagcacgtggtgtgcggcagcaccagaaacaacgagagcgagagcaccctggacctggagggcttccagaaccccaccgccaaggagtgcgagggcctggccaccctggacaacaaggccgacctggacggcgagagcaccgagggcaccgaggagctggaggacagcctgaaccacttcacccacagcgtgcagggccagaccagcgagatgatccccagcgacgaggaggaggaggacgacgaggaggaggaggaggaggaggagcccagactgaccatcaaccagagagaggacgaggacggcatggccaacgaggacgagctggacaacacctacaccggcagcggcgacgaggacgccctgagcgaggaggacgacgagctgggcgaggccgccaagtacgaggacgtgaaggagtgcggcaagcacgtggagagagccctgctggtggagctgaacaagatcagcctgaaggaggagaacgtgtgcgaggagaagaacagccccgtggaccagagcgacttcttctacgagttcagcaagctgatcttcaccaagggcaagagccccaccgtggtgtgcagcctgtgcaagagagagggccacctgaagaaggactgccccgaggacttcaagagaatccagctggagcccctgccccccctgacccccaagttcctgaacatcctggaccaggtgtgcatccagtgctacaaggacttcagccccaccatcatcgaggaccaggccagagagcacatcagacagaacctggagagcttcatcagacaggacttccccggcaccaagctgagcctgttcggcagcagcaagaacggcttcggcttcaagcagagcgacctggacgtgtgcatgaccatcaacggcctggagaccgccgagggcctggactgcgtgagaaccatcgaggagctggccagagtgctgagaaagcacagcggcctgagaaacatcctgcccatcaccaccgccaaggtgcccatcgtgaagttcttccacctgagaagcggcctggaggtggacatcagcctgtacaacaccctggccctgcacaacaccagactgctgagcgcctacagcgccatcgaccccagagtgaagtacctgtgctacaccatgaaggtgttcaccaagatgtgcgacatcggcgacgccagcagaggcagcctgagcagctacgcctacaccctgatggtgctgtacttcctgcagcagagaaacccccccgtgatccccgtgctgcaggagatctacaagggcgagaagaagcccgagatcttcgtggacggctggaacatctacttcttcgaccagatcgacgagctgcccacctactggagcgagtgcggcaagaacaccgagagcgtgggccagctgtggctgggcctgctgagattctacaccgaggagttcgacttcaaggagcacgtgatcagcatcagaagaaagagcctgctgaccaccttcaagaagcagtggaccagcaagtacatcgtgatcgaggaccccttcgacctgaaccacaacctgggcgccggcctgagcagaaagatgaccaacttcatcatgaaggccttcatcaacggcagaagagtgttcggcatccccgtgaagggcttccccaaggactaccccagcaagatggagtacttcttcgaccccgacgtgctgaccgagggcgagctggcccccaacgacagatgctgcagaatctgcggcaagatcggccacttcatgaaggactgccccatgagaagaaaggtgagaagaagaagagaccaggaggacgccctgaaccagagataccccgagaacaaggagaagagaagcaaggaggacaaggagatccacaacaagtacaccgagagagaggtgagcaccaaggaggacaagcccatccagtgcaccccccagaaggccaagcccatgagagccgccgccgacctgggcagagagaagatcctgagaccccccgtggagaagtggaagagacaggacgacaaggacctgagagagaagagatgcttcatctgcggcagagagggccacatcaagaaggagtgcccccagttcaagggcagcagcggcagcctgagcagcaagtacatgacccagggcaaggccagcgccaagagaacccagcaggagagctag

SEQ ID NO: 72129 - DNA, 2355 bp, Artificial Sequence
  derived and/or modified sequence
atggggaatgagcacatatccgtccaccctgagaacagtgattgtattcaggccgatgtgaatagcgacgattataagggggataaagtctaccaccccgaaacgggaaggaaaaacgagaaagaaaaggttgggagaaagggcaagcaccttcttaccgtggatcagaagagaggagagcacgtcgtgtgtggttctacaagaaataatgaaagcgagagcaccctcgacctggaaggtttccagaatccaacagcgaaggaatgcgaggggctcgccacattagacaacaaggccgatcttgatggcgagagtacagagggcaccgaggagcttgaggattcactaaaccactttacccattccgtgcaagggcagactagcgagatgataccatcagatgaggaggaagaggatgatgaggaggaggaagaagaagaagagcccagactcaccatcaatcaacgagaggacgaagacggaatggcgaatgaggatgaacttgataacacctataccgggagtggcgacgaggacgctctgtctgaagaagatgacgagctgggtgaggccgctaagtacgaggatgtcaaagaatgtggaaagcatgtcgaaagggcgcttctggtggagttgaacaaaatcagtcttaaggaggaaaacgtgtgtgaggaaaaaaacagtcctgtggatcaaagtgactttttttacgaattctcgaaactgatcttcacgaagggaaagagcccgacggtggtctgcagtctatgcaaaagggagggccatctgaaaaaggattgtccggaagattttaagcgaatccaactggaaccgctccctcccctgacacccaagttcctgaacattctggaccaggtgtgcatccagtgctataaggacttttccccgacgatcatcgaggaccaggccagagagcatatacgccagaatctggaatctttcatcagacaggacttccctggaacgaagctgtccctgttcgggagttcaaaaaatggctttggttttaaacaaagtgacctcgacgtgtgcatgactattaacgggctggagacagcggaggggcttgattgcgtgaggacaatcgaggaactggcccgcgtgctccggaagcattcaggactccgaaacatcctacctattactaccgcaaaggttcctatcgtgaaattcttccaccttaggagcggtctggaggttgacatctctctgtataacaccttggcactgcacaatacacggctcttatccgcttacagtgctatagacccccgcgtgaagtacctctgttacacaatgaaggtttttaccaaaatgtgcgacattggtgacgcttcacgcggttcactgtcatcttacgcttacacgctcatggtactctattttctgcagcaacgtaaccctccagtcattcctgtactgcaggagatctataaaggtgaaaagaagcccgagatcttcgtggacgggtggaacatttacttcttcgatcagatcgatgaactaccaacgtattggtcagagtgcggcaagaataccgagtctgtggggcagctgtggctcggactgctcagattctacaccgaagagttcgattttaaggagcatgttatctccatcagaagaaaaagcctgcttaccactttcaaaaaacagtggaccagcaagtatatcgttatcgaggatccgtttgatctcaatcacaatctgggcgcaggattgagccggaaaatgacaaatttcattatgaaggcattcattaacgggcgcagggtgttcggcatcccggtgaagggttttcccaaggattatccatccaagatggagtactttttcgatcctgacgtgctcacggagggagagcttgcccccaatgatagatgttgcagaatctgtgggaagatcggtcactttatgaaagattgccccatgcgccgcaaggtacgccggagacgggaccaggaagacgcgctcaatcaacgctatcctgagaacaaagaaaagagatcaaaagaggataaggagatccacaacaaatacaccgaaagggaggtgtctacgaaagaagacaaaccaatacagtgtacgccacaaaaagccaaacccatgagagctgctgccgacttgggccgcgagaaaatactgaggcctcccgtcgaaaaatggaagcgccaggatgacaaggatctgcgagagaagagatgttttatttgtggccgggagggccacatcaaaaaagagtgtccacagttcaaaggctcctctggaagtctgtcatccaagtacatgacacagggaaaggcaagcgccaaacgaacccaacaggagtcatag

SEQ ID NO: 72130 - DNA, 1188 bp, Artificial Sequence
  derived and/or modified sequence
atgactattaatggactcgagaccgccgaggggctggactgtgttcgaaccattgaggagctagcccgggtgctgcgcaagcactctgggctacgaaatattctaccgatcaccaccgccaaagttcccatcgttaaatttttccatctccgttccggcctggaagtggacattagtctatataatacattggccctgcataatacccgcctgctttcagcgtacagtgcaattgatccaagggtgaaatatctgtgctatacgatgaaagtgtttaccaagatatacaaaggggagaagaaacctgaaatcttcgtcgatggatggaatatctacttcttcgaccagatcgatgaactgcccacctattggtctgaatgtggaaagaacactgagtcagtcggacagctgtggctgggattgctgcgattctacaccgaggagttcgatttcaaggaacatgtaatcagcattaggaggaagagccttctgaccactttcaagaaacaatggacttccaagtacattgtcatcgaggatcccttcgatttgaaccacaacttaggcgcggggctctcacggaagatgacaaactttatcatgaaggcgttcataaatggccggcgggtttttggtatccctgtgaaaggatttcctaaagattatccctccaagatggaatatttctttgaccccgacgtgttgacagagggagaactggctcctaacgatagatgttgccggatatgcggaaagattggtcacttcatgaaagactgcccaatgcggcgtaaagtgcgtcgccgccgcgaccaggaggatgctcttaatcagagataccctgaaaacaaggaaaagaggagcaaagaggataaggagatacacaataagtacacagaaagggaagtgtcaacaaaagaagataagcccatacagtgcacccctcagaaagccaagccgatgagggccgccgctgacctgggtcgggaaaaaatcttaaggcctcccgttgagaaatggaagcgacaagacgataaggacctgcgcgaaaaacggtgctttatttgtggaagagagggccatatcaagaaagaatgcccgcagttcaaaggctcctctggcagtctttcctctaagtacatgacgcaaggaaaagcatccgccaagagaacacaacaagaatcctag

SEQ ID NO: 72131 - DNA, 4374 bp, Artificial Sequence
  derived and/or modified sequence
atgggagacaccgcgaagccctatttcgtgaagcgaaccaaggatcgcggaaccatggatgatgatgactttcgcagggggcacccccagcaagactacctgattatcgatgaccacgctaagggccacggctccaaaatggagaaaggcttgcagaagaagaaaatcactccagggaattacggaaacactcctaggaaagggccttgcgcggttagctctaatccctacgcattcaagaatcctatatattcccaaccagcgtggatgaacgactcccacaaagaccagtccaaaaggtggttgagtgacgagcacacaggaaacagcgataactggagggagttcaagccaggacccagaattcccgtaatcaacaggcagagaaaagatagctttcaggaaaatgaggacgggtatcgatggcaggacacccgggggtgtcgcacagtcaggcggctattccataaagatttgacctcactagagacgaccagcgaaatggaagcagggtccccggaaaataaaaaacaaagatcgagacctaggaaacccaggaaaactcgtaatgaagagaacgagcaggacggtgacttggagggccccgtaatcgatgagtctgtgctgtctaccaaggaattgctcgggttgcaacaagccgaggaacgactaaagcgagactgcatcgaccgtttgaaaagacggccccggaactacccgaccgcgaagtacacatgccgcctatgcgatgtcctcattgagtctatagcgtttgcgcataaacatatcaaggagaagcggcacaagaaaaacattaaagagaaacaggaagaggagttattgacaacccttcctccacccacccctagccagattaatgcggtcggcattgcaattgataaggtggtgcaagagttcgggctccacaatgaaaatttggagcagagattggagataaaaaggatcatggaaaacgttttccaacacaagctcccggattgtagcttgaggctttacggctcgtcttgctcccgcctaggattcaagaactccgacgtgaatatcgatattcaatttcctgccatcatgagccagccagacgtgctgctgttagtgcaggaatgtcttaaaaatagcgacagctttatcgacgtggatgcagactttcacgccagagtacccgtggtcgtttgccgtgagaagcagagtggactcctgtgcaaagtgagcgcggggaacgagaatgcctgtctgacaacgaaacacctgactgccctgggtaaactggagcccaagctcgtcccgctggttatcgcattcaggtattgggcaaagttgtgttcaatagatcggccagaagaaggagggctcccaccctatgtgtttgctcttatggcgatattttttcttcagcagcggaaggagcctctgttgcccgtataccttggatcatggattgagggcttctctttgtcaaaattgggcaacttcaatctccaggacatcgagaaagatgtagtgatatgggagcacacagatagtgctgctggagacaccggcatcactaaggaggaagcaccacgggagacacctataaagcgaggtcaggtttctttgattcttgatgtcaagcatcaaccaagcgtgcctgtaggccagttatgggttgagctgctgcgcttttacgccctggaatttaatctggccgacttggtgatcagcatcagggttaaggaacttgtgagcagggaattaaaagactggcccaaaaagcggattgcaatcgaagatccgtactcggtgaagcgcaatgtggcgaggacactgaacagccagcccgtgttcgaatacattctgcactgtttgcgaaccacttacaaatatttcgcgctcccccacaagataactaagtcaagcctgctgaaaccgcttaatgctatcacatgtatcagcgagcacagtaaggaagttatcaatcatcaccccgatgttcagaccaaagacgataagctgaagaattcggtcttggctcagggccccggagccacatcttccgccgctaacacatgcaaggtgcagccgctaactctaaaagagaccgccgaatcattcggtagcccaccgaaggaagagatgggcaacgaacacattagcgtccatcctgagaattcagactgtattcaggctgacgtaaacagcgacgactacaagggtgataaagtgtaccatccggagacaggccgcaaaaatgagaaagagaaggtggggagaaaggggaagcacctccttaccgttgatcaaaaacgaggcgagcacgtcgtctgcgggtcgacgcgtaacaacgaatccgagagtacattggacctcgaaggattccagaatcccaccgcgaaagaatgtgagggtctggcgaccttggataacaaagccgatctggacggagagtccaccgaaggaaccgaggagctagaagatagtcttaatcatttcacacacagcgtgcagggacagacctctgagatgattcctagtgacgaggaggaggaagacgatgaagaagaggaggaggaggaggagccccgtctcactatcaatcaaagggaagatgaggacggtatggccaacgaggacgaacttgacaacacctacacaggttcaggcgacgaagacgccttgtccgaagaagacgacgagttgggcgaagctgctaagtatgaagacgtgaaggaatgtggtaaacacgtggaacgcgccctgttggtcgagctgaacaagatcagcttgaaggaggaaaacgtctgtgaagagaagaatagccccgtggatcagagtgacttcttttatgagtttagtaagctgatctttactaaggggaagtcccctacagtcgtttgttctctgtgcaagcgcgagggacatctgaaaaaggactgccctgaggatttcaaacgaattcaacttgaaccactgccaccgctaacccccaaatttctcaatatactggatcaggtttgtattcagtgctacaaggattttagccccactataattgaagaccaggcacgagaacacattcgccagaatttagaaagctttatcagacaggatttccctggaaccaaactgagcctatttggtagcagtaaaaacggcttcggattcaagcaaagcgatctcgacgtgtgtatgactatcaacgggctcgaaaccgccgagggtttagattgcgtgcgcaccatcgaggagctggctcgtgttctccggaagcattcaggcctgcgaaacattcttccaatcacaaccgctaaagtgcctatcgtgaagttctttcatcttcgctctgggcttgaagtggacatcagcctgtacaatacactcgccctgcacaatactaggctgctgtcggcgtattctgccattgatcctcgggtgaagtatctctgctacaccatgaaagtattcacaaagatttacaagggtgagaagaagccagaaatcttcgtggacgggtggaacatctattttttcgaccagatcgatgaactgcctacctattggagcgagtgcgggaagaataccgaaagcgtgggtcagctgtggctgggactcctgagattctatacagaagagttcgattttaaggaacatgtaattagtatccgacgcaagtcactcctgacaacttttaagaaacaatggacatcgaaatatatcgtgatagaggacccgttcgatcttaatcacaacctgggcgccgggctgagcagaaagatgactaactttatcatgaaggcattcatcaatgggcggagggtcttcggtattccggtcaaaggcttcccgaaagactacccctcaaagatggagtatttttttgatcctgacgtcctcaccgagggcgaactcgcccctaacgatcggtgttgcaggatctgtggcaagattggccatttcatgaaggactgtcccatgcgccggaaagtgaggcgccgaagggatcaggaggatgctcttaatcagcggtatccagagaacaaggaaaaacggagcaaggaggataaagaaattcacaacaagtataccgagagagaagtgagcacgaaggaggataaacccatccagtgcaccccacagaaggcaaagccaatgagagcagccgccgatctgggcagggaaaagattctgagacctcccgttgagaaatggaagaggcaagacgacaaagacttgagagagaagcggtgctttatttgcggcagggaggggcacatcaagaaggaatgccctcagtttaaggggagttccgggagcttgtcctccaaatatatgacccaaggcaaggcctctgctaagcgcacacagcaggagagttag

SEQ ID NO: 72132 - DNA, 4488 bp, Artificial Sequence
  derived and/or modified sequence
atgggtgatacggcaaagccttactttgtgaaacgaactaaggatagaggcaccatggatgatgatgattttagacgcggacacccgcaacaggattatttaataatcgatgaccatgccaaagggcacggctcaaaaatggagaaggggctgcagaagaagaaaataactccaggcaactacggtaatactccaagaaaaggtccctgcgcggtcagtagcaatccatacgccttcaagaatccgatctactctcagccagcctggatgaatgactcacacaaggaccagtcaaaacgctggcttagcgatgaacataccggaaactccgacaattggcgtgagttcaagccggggccgagaattcctgtaatcaatcgccagaggaaggattcatttcaagaaaacgaagacggttacaggtggcaggatactcgcggatgcaggacagtgcgcaggctttttcataaagatctgacatctctcgagaccacttctgagatggaagcaggcagcccagaaaacaaaaaacaaagaagcaggccaaggaagcctcggaagacacgcaacgaggagaatgaacaagacggcgatttagaaggaccggtcattgacgagtcggtgttgagcaccaaggaacttctggggctgcaacaggcagaggaacgcctcaagagagattgcatcgacagactgaaacgacgcccgcgcaactatccaaccgccaagtatacctgtcggttgtgcgacgtactgatcgagtctatcgcttttgcccataagcacatcaaggaaaaaagacacaagaagaacattaaggagaaacaggaagaggaactcctcacgacccttccaccaccaactccctcacagatcaacgccgtcggaattgctatagacaaagttgtgcaggaatttggcttgcacaatgagaaccttgagcagcggttggagatcaagagaatcatggaaaatgtgtttcaacataaactgcccgactgttccctgaggctgtacggatcttcctgctcgaggcttggattcaaaaatagtgatgtgaatattgacattcagtttccagccattatgtctcaaccagatgttctcctgttggtccaggagtgcctcaagaactccgactccttcatcgacgtggacgccgattttcacgctcgcgtgcccgttgtggtgtgtcgagagaaacagtccggacttctgtgcaaagtgtcagccgggaatgagaacgcctgcctgactactaaacaccttaccgcccttgggaaactcgaaccgaagcttgtgccactggtgattgcattcagatattgggctaaactgtgctccatcgatagacccgaagagggcgggttgccaccatatgtgtttgctctaatggccatatttttcttgcagcaacggaaggagcctttactacccgtgtacctaggcagctggattgagggattctcactctcaaaattgggaaattttaaccttcaggatatcgaaaaagatgtggtgatctgggaacacactgacagcgccgcaggggatactggcattaccaaagaagaagcaccccgtgagactcccatcaagcgcggccaggtgagcctgatactggatgtgaagcaccagccctcagtaccagtgggacagctgtgggtggaattactcaggttctacgccctcgagtttaatcttgctgatttggtgatttctatccgggtgaaagaactggtttctagagagctaaaagactggcccaagaagcggatcgcaattgaggatccctattctgtgaaaagaaatgtggccagaactctcaattctcagcccgtgttcgaatacatcttacactgcctacggactacctataaatacttcgcactgcctcacaagattacgaaaagctccttgctcaagcctctcaatgcaattacttgtatctccgaacactctaaagaagtcattaaccaccacccggatgtccagacaaaagatgacaaactgaaaaatagcgtgttagcccagggcccaggggctacctctagcgcggcaaacacctgcaaggtgcagccgctcaccttaaaggaaaccgcagagtccttcgggtccccccccaaggaggagatggggaatgagcacatctccgtccatcctgagaattcagactgtattcaggctgacgtgaattctgacgactacaaaggagacaaagtgtaccatccggagaccggtcggaaaaatgagaaggagaaggttggaagaaaaggaaaacacctgctgaccgtcgaccaaaagcgaggcgaacacgttgtgtgcggctccacaagaaataatgaatctgaatccaccttggaccttgaaggctttcagaatccaaccgctaaggagtgtgagggattggcaacccttgacaataaagcagacctcgacggggagagtaccgaaggaacagaggagctcgaggactccttaaaccattttacacactccgtgcaaggccaaacatcggaaatgattccttcagacgaggaggaggaggacgatgaggaggaagaggaggaggaggaaccgcggctgaccatcaaccaacgtgaggatgaggacggcatggctaacgaggacgaattagacaatacttatacgggcagcggcgatgaggacgcactgtctgaggaggacgacgaactgggggaggctgcaaaatacgaagatgtcaaagagtgcgggaaacacgtagaaagagcccttctcgttgaactgaacaagatttcgttaaaagaggaaaacgtgtgtgaagagaaaaattctccagtcgatcagagcgactttttttacgagttctccaagttgatctttacaaagggaaagagccccacagtggtttgcagtctttgtaagcgcgaaggccacttgaaaaaggactgtccagaggactttaagaggattcagttagagcccttgcctcccctgacaccaaagtttctgaatatcctagaccaggtatgtatccagtgctacaaggacttctcgcctaccattattgaggaccaagcaagggagcatattagacagaatctggagtcgttcattagacaggattttccaggtacaaagttatcacttttcgggtcttctaagaatggctttggatttaagcagtccgacttggacgtgtgcatgactatcaacgggttggagacggcagagggccttgactgtgtgagaaccattgaagagcttgcccgggtgctccgtaaacactccggattgcgcaatatattgcccattacaacagctaaggtgcctattgtgaagtttttccaccttagaagcgggttggaagtggacatcagtctctacaatacactcgcactccacaatactaggctgctgagcgcctacagcgctatagacccgagagtcaaatatctgtgctatacgatgaaagttttcactaagatgtgtgacatcggcgacgcatcccgaggatctctatcctcatatgcgtatactctgatggtgctgtactttctgcagcagcgcaaccccccagtgatccccgttttgcaggaaatttacaagggcgaaaaaaaaccggagatctttgtcgacgggtggaacatttacttctttgaccaaatcgacgagctgcccacctactggagtgagtgcggaaaaaacacagaaagcgtgggacagctgtggcttggactgctacgattctacacagaggaattcgatttcaaggagcatgttatatctattaggagaaagagcttgcttacaacatttaagaaacagtggacttcgaaatatattgtgattgaagatccattcgacctaaatcacaacctgggggctggactgtctcggaagatgaccaatttcataatgaaggccttcataaacgggcgacgggtgttcggtatccctgtgaagggctttcccaaagattaccccagtaaaatggagtacttcttcgaccctgacgttcttaccgaaggtgagctggcccccaacgaccgctgctgccgtatctgcgggaaaatcggacacttcatgaaggactgtccaatgcgccgaaaagtacgacgccgcagagatcaggaagatgctctgaaccagcggtaccccgaaaacaaagaaaagcggtctaaggaggacaaagagattcacaataagtacaccgaaagagaagtgtctacgaaggaggataagcctatccagtgtaccccacagaaggctaagccaatgcgagccgctgccgaccttggcagagagaagatactcaggccaccggtcgaaaaatggaaaagacaagacgataaagacctccgtgaaaaacgctgtttcatctgcggtagagaggggcatatcaagaaagaatgtcctcagttcaaagggtccagcggatccctgagctccaagtatatgacccaggggaaggcttctgccaaaaggacacagcaggagagctag

SEQ ID NO: 72133 - DNA, 2355 bp, Artificial Sequence
  derived and/or modified sequence
atgggaaatgagcacatctctgtgcacccagaaaattctgactgcatccaggctgatgtgaacagtgatgactacaagggggacaaggtgtaccaccctgagactggaaggaagaatgagaaggagaaggtgggcaggaagggcaagcacctgctgactgtggaccagaagagaggagaacatgtggtgtgtggcagcaccaggaacaatgaaagtgagagcaccctggacctggagggcttccagaaccccacagccaaggaatgtgagggcctggccaccctggacaacaaggctgacctggatggagagagcacagagggcacagaggagctggaggacagcctgaaccacttcacccacagcgtgcagggccagaccagcgagatgatccccagtgatgaggaggaggaggatgatgaggaggaggaggaggaggaggagccccggctgaccatcaaccagagagaagatgaagatggcatggccaatgaagatgagctggacaacacctacacaggcagcggagatgaagatgccctgtctgaggaggatgatgagctgggggaggccgccaagtatgaagatgtgaaggaatgtgggaagcacgtggagcgggccctgctggtggagctgaacaagatcagcctgaaggaggagaatgtgtgtgaggagaagaacagccctgtggaccagagcgacttcttctatgagttcagcaagctgatcttcaccaagggcaagagccccaccgtggtgtgcagcctgtgcaagcgggagggccacctgaagaaggactgcccagaggacttcaagaggatccagctggagcccctgccccccctgacccccaagttcctgaacatcctggaccaggtgtgcatccagtgctacaaggacttcagccccaccatcatcgaggaccaggcccgggagcacatccggcagaacctggagagcttcatccggcaggacttccctggcaccaagctgagcctgtttggcagcagcaagaatggatttggcttcaagcagagcgacctggatgtgtgcatgaccatcaatggcctggagacagctgagggcctggactgtgtgaggaccatcgaggagctggcccgggtgctgaggaagcacagcggcctgaggaacatcctgcccatcaccacagccaaggtgcccatcgtgaagttcttccacctgcggagcggcctggaggtggacatcagcctgtacaacaccctggccctgcacaacacccggctgctgagcgcctacagcgccatcgacccccgggtgaagtacctgtgctacaccatgaaggtgttcaccaagatgtgtgacattggagatgccagccggggcagcctgagcagctatgcctacaccctgatggtgctgtacttcctgcagcagagaaatcctcctgtgattcctgtgctgcaggagatctacaagggggagaagaagccagagatctttgtggatggctggaacatctacttctttgaccagattgatgagctgcccacctactggagcgaatgtgggaagaacacagagagcgtgggccagctgtggctgggcctgctgcgcttctacacagaggagtttgacttcaaggagcacgtgatcagcatccggaggaagagcctgctgaccaccttcaagaagcagtggaccagcaagtacatcgtgattgaggacccctttgacctgaaccacaacctgggcgccggcctgagcaggaagatgaccaacttcatcatgaaggccttcatcaatggaagaagagtgtttggcatccctgtgaagggcttccccaaggactaccccagcaagatggagtacttctttgatcctgatgtgctgacagaaggagagctggccccaaatgaccgctgctgccgcatctgtgggaagattggccacttcatgaaggactgccccatgaggaggaaggtgagaagaagaagagaccaggaggatgccctgaaccagcgctacccagagaacaaggagaagaggagcaaagaagacaaggagatccacaacaagtacacagagcgggaggtgtccaccaaggaggacaagcccatccagtgcaccccccagaaggccaagcccatgagagctgctgctgacctgggccgggagaagatcctgcggccccctgtggagaagtggaagaggcaggatgacaaggacctgcgggagaagcgctgcttcatctgtggccgggagggccacatcaagaaggagtgcccccagttcaagggcagcagcggcagcctgagcagcaagtacatgacccagggcaaggccagcgccaagaggacccagcaggagagctag

SEQ ID NO: 72134 - DNA, 1188 bp, Artificial Sequence
  derived and/or modified sequence
atgaccatcaatggcctggagacagctgagggcctggactgtgtgaggaccatcgaggagctggcccgggtgctgaggaagcacagcggcctgaggaacatcctgcccatcaccacagccaaggtgcccatcgtgaagttcttccacctgcggagcggcctggaggtggacatcagcctgtacaacaccctggccctgcacaacacccggctgctgagcgcctacagcgccatcgacccccgggtgaagtacctgtgctacaccatgaaggtgttcaccaagatctacaagggggagaagaagccagagatctttgtggatggctggaacatctacttctttgaccagattgatgagctgcccacctactggagcgaatgtgggaagaacacagaatctgtgggccagctgtggctgggcctgctgcgcttctacacagaggagtttgacttcaaggagcacgtgatcagcatccggaggaagagcctgctgaccaccttcaagaagcagtggaccagcaagtacatcgtgattgaggacccctttgacctgaaccacaacctgggcgccggcctgagcaggaagatgaccaacttcatcatgaaggccttcatcaatggccggcgggtgtttggcatccctgtgaagggcttccccaaggactaccccagcaagatggagtacttctttgatcctgatgtgctgacagaaggagagctggccccaaatgaccgctgctgccgcatctgtgggaagattggccacttcatgaaggactgccccatgaggaggaaggtgagaagaagaagagaccaggaggatgccctgaaccagcgctacccagagaacaaggagaagaggagcaaggaggacaaggagatccacaacaagtacacagagcgggaggtgtccaccaaggaggacaagcccatccagtgcaccccccagaaggccaagcccatgagagctgctgctgacctgggccgggagaagatcctgcggccccctgtggagaagtggaagaggcaggatgacaaggacctgcgggagaagcgctgcttcatctgtggccgggagggccacatcaagaaggaatgtccccagttcaagggcagcagcggcagcctgagcagcaagtacatgacccagggcaaggccagcgccaagaggacccagcaggagagctag

SEQ ID NO: 72135 - DNA, 4374 bp, Artificial Sequence
  derived and/or modified sequence
atgggagacacagccaagccctactttgtgaagaggaccaaggaccggggcaccatggatgatgatgacttcagaagaggccacccccagcaggactacctgatcattgatgaccacgccaagggccacggcagcaagatggagaagggcctgcagaagaagaagatcaccccaggcaactacggcaacacccccaggaagggcccctgtgctgtgagcagcaacccctatgccttcaagaaccccatctacagccagcctgcctggatgaatgacagccacaaggaccagagcaagcgctggctgagtgatgagcacactggaaacagcgacaactggagggagttcaagccaggcccccgcatccctgtgatcaaccggcagaggaaggacagcttccaggagaatgaagatggctaccgctggcaggacacccggggctgcaggacagtgcggcggctcttccacaaggacctgaccagcctggagaccaccagcgagatggaggccggcagccctgagaacaagaagcagaggagccggcccaggaagcccaggaagaccagaaatgaggagaatgagcaggatggagacctggagggccctgtgattgatgaatctgtgctgagcaccaaggagctgctgggcctgcagcaggccgaggagcggctgaagagggactgcatcgaccggctgaagaggcggcccaggaactaccccacagccaagtacacctgccgcctgtgtgatgtgctgattgagagcatcgcctttgcccacaagcacatcaaggagaagaggcacaagaagaacatcaaggagaagcaggaggaggagctgctgaccaccctgcccccacccacccccagccagatcaatgctgtgggcatcgccatcgacaaggtggtgcaggagtttggcctgcacaatgaaaacctggagcagaggctggagatcaagaggatcatggagaatgtgttccagcacaagctgcctgactgcagcctgcggctgtatggcagcagctgcagccggctgggcttcaagaacagtgatgtgaacatcgacatccagtttcctgccatcatgagccagccagatgtgctgctgctggtgcaggagtgcctgaagaacagcgacagcttcattgatgtggatgctgacttccacgcccgggtgcctgtggtggtgtgccgggagaagcagagcggcctgctgtgcaaggtgtctgctggaaatgaaaatgcctgcctgaccaccaagcacctgacagccctgggcaagctggagcccaagctggtgcccctggtgattgccttccgctactgggccaagctgtgcagcattgacaggcctgaggagggcggcctgcccccctacgtgtttgccctgatggccatcttcttcctgcagcagaggaaggagcccctgctgcctgtgtacctgggctcctggattgagggcttcagcctgagcaagctgggcaacttcaacctgcaggacatcgagaaggatgtggtgatctgggagcacacagacagcgctgctggggacaccggcatcaccaaggaggaggccccccgggagacccccatcaagaggggccaggtgtccctcatcctggatgtgaagcaccagcccagcgtgcctgtgggccagctgtgggtggagctgctgcgcttctacgccctggagttcaacctggccgacctggtgatcagcatccgggtgaaggagctggtgtcccgggagctgaaggactggcccaagaagagaattgccatcgaggacccctacagcgtgaagagaaatgtggcccggaccctgaacagccagcctgtgtttgagtacatcctgcactgcctgcggaccacctacaagtactttgccctgccccacaagatcaccaagagcagcctgctgaagcccctgaatgccatcacctgcatcagcgagcacagcaaggaggtgatcaaccaccacccagatgtgcagaccaaggatgacaagctgaagaacagcgtgctggcccagggccctggggccaccagcagcgctgccaacacctgcaaggtgcagcccctgaccctgaaggagacagctgagagctttggcagcccccccaaggaggagatgggaaatgagcacatctctgtgcaccctgagaacagcgactgcatccaggctgatgtgaacagtgatgactacaagggggacaaggtgtaccaccctgagaccggcaggaagaatgagaaggagaaggtgggcaggaagggcaagcacctgctgactgtggaccagaagagaggagagcacgtggtgtgtggcagcaccagaaataatgaaagtgagagcaccctggacctggagggcttccagaaccccacagccaaggaatgtgagggcctggccaccctggacaacaaggctgacctggatggagagagcacagagggcacagaggagctggaggacagcctgaaccacttcacccacagcgtgcagggccagaccagcgagatgatccccagtgatgaggaggaggaggatgatgaggaggaggaggaggaggaggagccccggctgaccatcaaccagcgggaggatgaagatggcatggccaatgaagatgagctggacaacacctacacaggcagcggagatgaagatgccctgtctgaagaagatgatgagctgggggaggccgccaagtatgaagatgtgaaggaatgtgggaagcacgtggagcgggccctgctggtggagctgaacaagatcagcctgaaggaggagaatgtgtgtgaggagaagaacagccctgtggaccagagcgacttcttctatgagttcagcaagctgatcttcaccaagggcaagagccccaccgtggtgtgcagcctgtgcaagcgggagggccacctgaagaaggactgcccagaggacttcaagaggatccagctggagcccctgccccccctgacccccaagttcctgaacatcctggaccaggtgtgcatccagtgctacaaggacttcagccccaccatcatcgaggaccaggcccgggagcacatccggcagaacctggagagcttcatccggcaggacttccctggcaccaagctgagcctgtttggcagcagcaagaatggcttcggcttcaagcagagcgacctggatgtgtgcatgaccatcaatggcctggagacagctgagggcctggactgtgtgaggaccatcgaggagctggcccgggtgctgaggaagcacagcggcctgaggaacatcctgcccatcaccacagccaaggtgcccatcgtgaagttcttccacctgcggagcggcctggaggtggacatcagcctgtacaacaccctggccctgcacaacacccggctgctgagcgcctacagcgccatcgacccccgggtgaagtacctgtgctacaccatgaaggtgttcaccaagatctacaagggggagaagaagccagagatctttgtggatggctggaacatctacttctttgaccagattgatgagctgcccacctactggagcgaatgtgggaagaacacagaatctgtgggccagctgtggctgggcctgctgcgcttctacacagaggagtttgacttcaaggagcacgtgatcagcatccggaggaagagcctgctgaccaccttcaagaagcagtggaccagcaagtacatcgtgattgaggacccctttgacctgaaccacaacctgggcgccggcctgagcaggaagatgaccaacttcatcatgaaggccttcatcaatggccggcgggtgtttggcatccctgtgaagggcttccccaaggactaccccagcaagatggagtacttctttgatcctgatgtgctgacagaaggagagctggccccaaatgaccgctgctgccgcatctgtgggaagattggccacttcatgaaggactgccccatgaggaggaaggtgagaagaagaagagaccaggaggatgccctgaaccagcgctacccagagaacaaggagaagaggagcaaggaggacaaggagatccacaacaagtacacagagcgggaggtgtccaccaaggaggacaagcccatccagtgcaccccccagaaggccaagcccatgagagctgctgctgacctgggccgggagaagatcctgcggccccctgtggagaagtggaagaggcaggatgacaaggacctgcgggagaagcgctgcttcatctgtggccgggagggccacatcaagaaggaatgtccccagttcaagggcagcagcggcagcctgagcagcaagtacatgacccagggcaaggccagcgccaagaggacccagcaggagagctag

SEQ ID NO: 72136 - DNA, 4488 bp, Artificial Sequence
  derived and/or modified sequence
atgggagacacagccaagccctactttgtgaagaggaccaaggaccggggcaccatggatgatgatgacttcagaagaggccacccccagcaggactacctgatcattgatgaccacgccaagggccacggcagcaagatggagaagggcctgcagaagaagaagatcaccccaggcaactacggcaacacccccaggaagggcccctgtgctgtgagcagcaacccctatgccttcaagaaccccatctacagccagcctgcctggatgaatgacagccacaaggaccagagcaagcgctggctgagtgatgagcacactggaaacagcgacaactggagggagttcaagccaggcccccgcatccctgtgatcaaccggcagaggaaggacagcttccaggagaatgaagatggctaccgctggcaggacacccggggctgcaggacagtgcggcggctcttccacaaggacctgaccagcctggagaccaccagcgagatggaggccggcagccctgagaacaagaagcagaggagccggcccaggaagcccaggaagaccagaaatgaggagaatgagcaggatggagacctggagggccctgtgattgatgaatctgtgctgagcaccaaggagctgctgggcctgcagcaggccgaggagcggctgaagagggactgcatcgaccggctgaagaggcggcccaggaactaccccacagccaagtacacctgccgcctgtgtgatgtgctgattgagagcatcgcctttgcccacaagcacatcaaggagaagaggcacaagaagaacatcaaggagaagcaggaggaggagctgctgaccaccctgcccccacccacccccagccagatcaatgctgtgggcatcgccatcgacaaggtggtgcaggagtttggcctgcacaatgaaaacctggagcagaggctggagatcaagaggatcatggagaatgtgttccagcacaagctgcctgactgcagcctgcggctgtatggcagcagctgcagccggctgggcttcaagaacagtgatgtgaacatcgacatccagtttcctgccatcatgagccagccagatgtgctgctgctggtgcaggagtgcctgaagaacagcgacagcttcattgatgtggatgctgacttccacgcccgggtgcctgtggtggtgtgccgggagaagcagagcggcctgctgtgcaaggtgtctgctggaaatgaaaatgcctgcctgaccaccaagcacctgacagccctgggcaagctggagcccaagctggtgcccctggtgattgccttccgctactgggccaagctgtgcagcattgacaggcctgaggagggcggcctgcccccctacgtgtttgccctgatggccatcttcttcctgcagcagaggaaggagcccctgctgcctgtgtacctgggctcctggattgagggcttcagcctgagcaagctgggcaacttcaacctgcaggacatcgagaaggatgtggtgatctgggagcacacagacagcgctgctggggacaccggcatcaccaaggaggaggccccccgggagacccccatcaagaggggccaggtgtccctcatcctggatgtgaagcaccagcccagcgtgcctgtgggccagctgtgggtggagctgctgcgcttctacgccctggagttcaacctggccgacctggtgatcagcatccgggtgaaggagctggtgtcccgggagctgaaggactggcccaagaagagaattgccatcgaggacccctacagcgtgaagagaaatgtggcccggaccctgaacagccagcctgtgtttgagtacatcctgcactgcctgcggaccacctacaagtactttgccctgccccacaagatcaccaagagcagcctgctgaagcccctgaatgccatcacctgcatcagcgagcacagcaaggaggtgatcaaccaccacccagatgtgcagaccaaggatgacaagctgaagaacagcgtgctggcccagggccctggggccaccagcagcgctgccaacacctgcaaggtgcagcccctgaccctgaaggagacagctgagagctttggcagcccccccaaggaggagatgggaaatgagcacatctctgtgcaccctgagaacagcgactgcatccaggctgatgtgaacagtgatgactacaagggggacaaggtgtaccaccctgagaccggcaggaagaatgagaaggagaaggtgggcaggaagggcaagcacctgctgactgtggaccagaagagaggagagcacgtggtgtgtggcagcaccagaaataatgaaagtgagagcaccctggacctggagggcttccagaaccccacagccaaggaatgtgagggcctggccaccctggacaacaaggctgacctggatggagagagcacagagggcacagaggagctggaggacagcctgaaccacttcacccacagcgtgcagggccagaccagcgagatgatccccagtgatgaggaggaggaggatgatgaggaggaggaggaggaggaggagccccggctgaccatcaaccagcgggaggatgaagatggcatggccaatgaagatgagctggacaacacctacacaggcagcggagatgaagatgccctgtctgaagaagatgatgagctgggggaggccgccaagtatgaagatgtgaaggaatgtgggaagcacgtggagcgggccctgctggtggagctgaacaagatcagcctgaaggaggagaatgtgtgtgaggagaagaacagccctgtggaccagagcgacttcttctatgagttcagcaagctgatcttcaccaagggcaagagccccaccgtggtgtgcagcctgtgcaagcgggagggccacctgaagaaggactgcccagaggacttcaagaggatccagctggagcccctgccccccctgacccccaagttcctgaacatcctggaccaggtgtgcatccagtgctacaaggacttcagccccaccatcatcgaggaccaggcccgggagcacatccggcagaacctggagagcttcatccggcaggacttccctggcaccaagctgagcctgtttggcagcagcaagaatggcttcggcttcaagcagagcgacctggatgtgtgcatgaccatcaatggcctggagacagctgagggcctggactgtgtgaggaccatcgaggagctggcccgggtgctgaggaagcacagcggcctgaggaacatcctgcccatcaccacagccaaggtgcccatcgtgaagttcttccacctgcggagcggcctggaggtggacatcagcctgtacaacaccctggccctgcacaacacccggctgctgagcgcctacagcgccatcgacccccgggtgaagtacctgtgctacaccatgaaggtgttcaccaagatgtgtgacattggagatgccagccggggcagcctgagcagctatgcctacaccctgatggtgctgtacttcctgcagcagaggaacccccctgtgattcctgtgctgcaggagatctacaagggggagaagaagccagagatctttgtggatggctggaacatctacttctttgaccagattgatgagctgcccacctactggagcgaatgtgggaagaacacagaatctgtgggccagctgtggctgggcctgctgcgcttctacacagaggagtttgacttcaaggagcacgtgatcagcatccggaggaagagcctgctgaccaccttcaagaagcagtggaccagcaagtacatcgtgattgaggacccctttgacctgaaccacaacctgggcgccggcctgagcaggaagatgaccaacttcatcatgaaggccttcatcaatggccggcgggtgtttggcatccctgtgaagggcttccccaaggactaccccagcaagatggagtacttctttgatcctgatgtgctgacagaaggagagctggccccaaatgaccgctgctgccgcatctgtgggaagattggccacttcatgaaggactgccccatgaggaggaaggtgagaagaagaagagaccaggaggatgccctgaaccagcgctacccagagaacaaggagaagaggagcaaggaggacaaggagatccacaacaagtacacagagcgggaggtgtccaccaaggaggacaagcccatccagtgcaccccccagaaggccaagcccatgagagctgctgctgacctgggccgggagaagatcctgcggccccctgtggagaagtggaagaggcaggatgacaaggacctgcgggagaagcgctgcttcatctgtggccgggagggccacatcaagaaggaatgtccccagttcaagggcagcagcggcagcctgagcagcaagtacatgacccagggcaaggccagcgccaagaggacccagcaggagagctag

SEQ ID NO: 72137 - DNA, 2355 bp, Artificial Sequence
  derived and/or modified sequence
atgggcaacgagcacatcagcgtgcaccccgagaacagcgactgcatccaagccgatgtgaacagcgacgattacaaaggagacaaggtgtatcatcctgagacaggtaggaaaaacgaaaaagaaaaggtcgggaggaagggaaaacatcttctgacagttgatcagaagcgcggggaacacgtcgtgtgcggatcgacacggaacaatgaaagcgaaagtactcttgatttagagggattccagaatcctacagccaaggagtgcgaaggactggcaactctcgacaacaaagccgacttagacggggagagtactgaggggactgaggaactggaagactcactcaaccatttcacacacagcgtgcagggtcagacctcggagatgatccccagcgatgaggaagaagaagacgacgaggaggaggaggaagaggaggagcctcgcctgacgattaatcagcgtgaagacgaagacgggatggctaatgaggacgagctggataacacatataccggcagcggggacgaagacgcattgtctgaggaggatgatgaattgggagaggcggctaaatatgaagacgtgaaggaatgcggcaagcacgtcgaacgggccctgcttgtggaactcaacaagatctcactgaaggaggagaatgtctgcgaggaaaagaatagccccgtcgaccaatccgactttttctatgaatttagcaagttgatattcacgaagggcaagtccccgacggtcgtctgtagcctgtgcaagagggaaggtcacctcaaaaaagactgccctgaggattttaagaggatccagttggaaccattaccacccctgactccaaaattccttaatattctcgaccaagtctgcatccagtgctataaggattttagccccactatcatcgaagatcaagcgcgagaacacatcaggcaaaatttggagagtttcattcgacaggatttcccgggcaccaaactgtccttatttggaagctcaaagaacggctttggcttcaagcagtccgaccttgatgtctgtatgaccatcaatggtctcgagaccgctgagggcctggattgcgtgcggactatcgaagaactggcccgggtgctgaggaaacattcaggcctgcgcaatatcctccctatcaccaccgccaaggtgccaatcgtgaaattctttcaccttcgctcaggcctggaggtggacatcagtttgtacaacaccctcgctctgcacaatacaagattgttgagcgcctatagtgcgatcgacccacgggtcaagtacctctgttacactatgaaggtttttactaaaatgtgcgacatcggcgatgcctcacggggttccctgtcgtcatatgcatatacgctaatggtgctgtactttcttcaacagcggaatccaccagtcatacctgtgcttcaggaaatatacaagggcgaaaagaaacccgagatctttgtagacgggtggaatatttacttttttgatcagattgatgagctccccacatactggtcagagtgtggaaagaataccgagtccgtggggcagctgtggctcgggctgctgaggttttacaccgaggagttcgatttcaaggagcatgtcatcagtatcagaaggaagtcacttctcacgacatttaaaaagcagtggactagcaagtatatcgtgatcgaggacccattcgatctgaatcacaacctaggagcaggactgtccagaaagatgacaaattttatcatgaaggccttcatcaatggcaggcgtgtgttcggtatacctgtgaaaggcttccccaaggactacccaagcaaaatggagtatttcttcgatcctgacgtcctgactgagggggagctggcccccaatgaccgttgttgcaggatttgtggtaagataggccatttcatgaaggattgtcctatgcgcagaaaggtgcgccgaaggcgggaccaagaggacgctctgaatcagagataccccgagaataaggaaaagcgttccaaggaagacaaggaaatccacaacaaatacaccgagcgagaggtgtccactaaggaagataagccaatccaatgtacgcctcagaaggccaagcctatgagggctgccgctgacctcggacgcgagaaaattcttaggccacccgtggagaaatggaaacgccaggacgacaaggacctccgggagaagcggtgcttcatatgtggacgggagggccacataaagaaagaatgccctcagttcaaaggcagcagcggtagtttgtccagcaagtacatgacgcaagggaaggcttcagccaaacgcactcaacaggaatcatag

SEQ ID NO: 72138 - DNA, 1188 bp, Artificial Sequence
  derived and/or modified sequence
atgaccatcaacggcctggagaccgccgagggcctggactgcgtgcgcactatcgaagaacttgcaagggtgctcagaaaacacagcggactgcgcaacatactaccaatcactactgctaaggtgccaatcgttaaattctttcatctgcgcagcggcctcgaagtggatataagtctgtacaataccctcgctctgcataacactcgcttgctgtccgcctacagtgccatcgatccgcgggtgaagtacctgtgttacacaatgaaagtgttcactaaaatatataaaggcgagaagaagcctgaaattttcgtggatggctggaatatctactttttcgaccagatcgacgagctgccgacttactggagtgaatgcggcaaaaacaccgagtcggtcggccagctgtggttgggactgctccgcttctacacagaggaatttgatttcaaagaacatgtcataagtattcgccggaaatccctgctgaccacatttaaaaagcagtggaccagcaaatacattgttatagaggatccattcgatttgaaccataatctaggcgcgggactgtctcgaaagatgacaaattttatcatgaaggctttcatcaatgggcggcgggtgtttgggatacccgttaaagggtttcctaaggattatccctcgaagatggaatatttttttgatccggacgtgcttactgaaggagagttggccccgaatgatcgatgttgtcgcatttgcggcaagatcgggcactttatgaaagactgccctatgaggaggaaggtacgcaggaggcgcgatcaggaagatgccctgaaccagcggtacccagaaaacaaggagaaacgatccaaggaggacaaggaaattcacaacaaatatactgagcgggaggtgagtactaaagaggataagcccattcaatgcactcctcagaaagcgaaaccaatgcgcgcagcagctgatctcggaagggagaaaattctgcggccccctgtggagaaatggaagaggcaggatgacaaggatctgcgggagaagcgttgttttatctgcggccgggagggccacatcaagaaagagtgcccacagtttaaggggagcagcggaagcctcagctccaagtatatgacccagggaaaagccagcgccaagcgaacacagcaggaaagctag

SEQ ID NO: 72139 - DNA, 4374 bp, Artificial Sequence
  derived and/or modified sequence
atgggcgacaccgccaagccctacttcgtgaagcggaccaaggaccgggggacaatggacgacgacgatttcaggagagggcatccgcagcaggattacctcatcatagacgatcatgctaaagggcatggttccaaaatggaaaaagggctacagaagaaaaagataaccccgggaaactatggcaacaccccccgtaaggggccatgtgcggtgtcctctaacccatatgcgtttaaaaaccccatctactcccagcccgcatggatgaatgattcccacaaagatcagtcgaaacgttggctgtccgacgagcataccggcaacagcgacaactggcgcgagttcaagcccggccctcgtatccccgttatcaacaggcagagaaaggattcttttcaggaaaacgaggacggataccgctggcaggacacgcgagggtgtcgcactgttagacgtctttttcataaagacttgacctcccttgaaaccactagcgaaatggaggctggttcaccagagaataagaagcagcggagtaggccccgtaagcctagaaaaaccaggaacgaggagaatgagcaggacggagatctggaaggacccgtgatcgacgagagcgtactgtcaactaaggagctgctggggctacagcaagcagaagaaagactcaagagggattgtattgaccgactaaagcgaaggcctcgaaactatccaaccgctaaatatacttgtaggctgtgcgacgtgctaattgaaagcatcgcctttgctcataagcacatcaaggagaaacgacacaaaaagaatattaaggaaaagcaagaagaggagttgcttacaacgcttcctcctccaacaccatctcagattaatgccgtgggcattgctatcgacaaagtggtgcaagagttcggcttgcataacgagaacctggagcaacgtttggagattaaacgtattatggaaaatgtgttccaacacaaacttcccgattgcagcttgcggttgtacgggtcctcttgttcccggctggggttcaaaaatagcgatgtcaacattgacattcaatttccggcgatcatgagccaacccgatgtgcttcttctagtgcaagagtgtctcaagaactcggactcgttcatcgacgtggatgctgacttccatgctagggtaccggtcgttgtctgtcgggagaagcagagcggattactatgtaaagtgtcagcaggtaacgagaacgcctgtctgactactaagcacctgacagctctcggaaagctagagcctaaactcgtcccactggtaatcgccttccgatactgggccaagctttgcagtatcgatcggcccgaggaaggaggtttgcccccatatgttttcgccctcatggctatcttctttttgcagcaacggaaggaacctctgctgcccgtgtacctcggatcttggatcgaaggcttttcattgtcgaagttgggtaattttaatttgcaagatattgagaaagatgtagtgatttgggaacacaccgactctgccgcaggcgatacagggatcaccaaggaggaggcccccagagaaacgcccattaagcgtgggcaggtctccctcattttggacgtgaaacatcaacctagcgtgcctgtgggccagttgtgggtggaactgttgaggttctacgctctggagttcaatttggctgacctggtaatctccatacgcgtgaaggaactggtctccagggaacttaaggattggcccaaaaaacgcatcgctatcgaagatccctattccgtgaagagaaacgtggcccgaaccctaaacagccaacccgtcttcgagtatatactgcattgtctcaggacaacctacaaatatttcgccctacctcataagatcactaaatcctccttactgaaaccattgaatgcaatcacatgtatttccgaacattcaaaggaggtgataaatcaccaccctgatgtgcaaacaaaagatgacaaattgaagaattctgtgctggcacagggccccggagcgacaagcagtgctgcaaatacatgcaaagtgcagcctctgaccctcaaggaaactgcggaatccttcggctcccctcccaaggaggaaatgggtaacgaacatatttccgtgcaccctgaaaacagcgattgtattcaggccgacgtaaatagtgatgattacaagggagacaaagtctaccatccggaaaccggaaggaagaatgagaaagaaaaggtgggacgaaagggaaaacatcttttaactgtggatcagaagagaggcgagcacgttgtgtgtggcagcactcgtaacaatgagagtgaatcaacattagacctggaaggatttcaaaaccccaccgcaaaggagtgcgaaggcctggccacactagataacaaagccgacttggatggagagagtactgaaggcactgaggagctagaagattctctcaaccactttacccatagtgtgcaggggcagaccagtgaaatgatcccgtcagatgaggaggaagaagacgacgaagaagaagaggaggaggaagagcccagattgacaatcaatcaacgggaggatgaagatggcatggctaatgaagatgaactggacaatacctatacagggagtggggatgaagatgccctgtccgaggaggacgacgagttgggggaagccgcaaagtacgaagatgtcaaagaatgcggaaagcatgttgagcgcgccctgctcgtggagctcaacaagatttccttaaaggaggaaaatgtgtgtgaagaaaagaactcccctgtagaccagtccgacttcttctatgaattctctaaacttatattcaccaaaggaaagagtccaaccgtagtgtgcagcctatgtaaacgggaagggcacctgaagaaagattgtcctgaggactttaaaaggattcagctggagcctcttccccccctgacgcccaagttcttgaacatattggaccaggtctgtatccagtgttacaaagacttttctcctaccataattgaggatcaagccagagagcacatccgtcagaacctagagtcattcatacggcaagatttcccaggtacaaagttgagcctgtttggttcatctaaaaatggcttcggctttaagcagagcgacctggacgtctgtatgaccattaatgggctcgagaccgccgaaggcctggattgtgtaagaacaatcgaggagctcgcacgggtactgaggaagcatagtgggcttagaaacatcttacccatcacaaccgccaaagtgccaatcgtgaaattttttcatctgaggtctggacttgaagtggatatctccctgtacaatacattggcactacacaatacccgactcctctctgcctactccgcaatcgaccctcgcgtcaaatacctctgctacacaatgaaggtgtttacaaaaatatataagggagagaaaaaaccagaaatcttcgtggatggatggaatatctatttcttcgatcagatcgatgaactgcccacatactggtccgaatgcggcaagaataccgagtctgttggacaactatggctcgggcttcttagattctatacggaagaatttgacttcaaggagcacgtaataagcatcaggcgcaagtccttactgaccacattcaagaagcaatggacatctaagtacattgttatcgaggatcctttcgaccttaatcataatttaggagcaggattgagtcgaaaaatgaccaacttcatcatgaaagccttcataaacggcagacgcgtttttggaatacctgtgaaaggttttccaaaagactacccatcaaagatggaatatttctttgatcctgacgtccttacagagggggagctggccccaaacgacagatgctgcagaatctgtggcaagatcgggcatttcatgaaggactgccctatgagacggaaagtcaggcgccggcgtgaccaggaagatgccttgaaccagcgctaccctgagaataaagaaaagcgctctaaggaggacaaagagattcacaacaagtacacagaaagggaggtatctaccaaagaagataaaccgattcaatgtactccgcagaaggctaaaccgatgcgggcggctgccgatctgggtcgagaaaagattctacggcccccagtggagaaatggaaacggcaagatgataaagatttgcgcgaaaaacggtgctttatttgtggacgagagggacacatcaagaaggagtgcccgcaatttaagggctcatctggctcactcagttctaagtacatgacacagggcaaggcctccgcaaagaggacccagcaagaaagctag

SEQ ID NO: 72140 - DNA, 4488 bp, Artificial Sequence
  derived and/or modified sequence
atgggcgacaccgccaagccctacttcgtgaagcggaccaaggaccggggcaccatggatgatgacgactttaggaggggtcaccctcagcaggactatttaatcattgacgatcatgctaaaggccatggcagtaagatggagaagggccttcaaaagaagaaaattacccctgggaattacggtaataccccaaggaagggcccttgcgcagtctcctccaatccttacgcttttaagaaccctatctactctcaaccagcttggatgaacgatagccacaaggatcagtcaaagagatggctaagtgacgaacacactggaaacagcgataattggagggagtttaagcctgggccaagaatcccggttatcaaccgtcagcgcaaggacagctttcaggaaaacgaggatggatatcggtggcaggacaccaggggatgccggacagtacgtagactgttccacaaggacttaacatccctggagaccacttccgagatggaggctggctcacctgagaataagaagcaaaggtcgaggccgcgaaagccaagaaagacacgaaatgaagaaaatgagcaggacggtgatctggaagggccagtgatcgatgagagcgtacttagcaccaaagaactgctgggcctgcagcaggccgaagaacgactgaaacgtgactgcattgataggcttaagcggagaccacgaaattaccctacagctaagtatacctgtcggctatgcgatgtcctgatcgaatccatcgcctttgcacataaacacatcaaggaaaaacggcacaagaagaacattaaagagaagcaggaggaggaactgttgaccactctgccaccaccaacgccctcacaaatcaacgccgtaggcatcgcaatcgacaaggtggtccaagaatttggactgcataatgaaaatctggaacagcggcttgagatcaagagaattatggagaatgtttttcagcataagctgccagattgcagtctgagattatacggttctagctgttcaaggctgggatttaaaaactctgacgttaacattgacatccagttcccagccattatgtctcaacctgacgtgctcttactggttcaggaatgcttgaaaaacagtgactcctttatcgacgtcgatgcagatttccatgccagggtcccagttgtagtctgtagagagaagcagagtggtctcttgtgtaaagtgtcagccggaaatgaaaatgcttgcttgaccacaaagcaccttacggctctggggaaacttgagcccaagctggtgccattagtaatcgccttccgctactgggcaaaactttgcagcatcgataggccagaggaaggaggtttgcccccctatgtgttcgcactcatggctatcttcttcttgcagcaaaggaaggaacctctgctaccagtctaccttggttcttggatcgaaggattcagcctgtccaagctcggaaactttaacctccaggatatcgagaaggacgtggttatctgggagcataccgacagtgccgctggagatactgggatcacaaaagaagaggctccgcgggaaactccaatcaagcggggccaggtctcattaatcctggacgtcaaacatcagccttccgtgccagtcgggcagctgtgggtggaactccttcggttctatgcgttggaatttaatctggccgatctggtcatatccatccgagtgaaggagcttgtgtcacgggaactcaaggactggccgaaaaaacggattgctatcgaggatccttactcagtgaaacgcaatgtcgcccgtacactgaatagccagcccgtgtttgagtatatcctgcactgtctcaggaccacttacaaatacttcgcactgcctcataaaataacaaaaagctccctgctgaagccgctgaacgcaatcacctgcatttcagagcattctaaagaggtcattaatcaccacccagatgtgcaaacgaaagatgacaaattgaaaaatagcgtgctcgctcaggggcccggcgccacatcttctgccgccaacacctgcaaggtgcagcccctgacactgaaagagaccgccgagtcctttggcagtcccccaaaagaggagatggggaacgagcacatctcagttcaccccgaaaattcagactgtatccaggccgatgtcaatagcgatgactacaaaggtgacaaggtttaccatccagagaccggtaggaaaaacgagaaagagaaagtaggcagaaaaggcaagcacttactgactgttgatcagaagcgaggcgagcacgtggtgtgtggatcaacccgcaacaacgagagtgaaagtaccttggacctcgaaggcttccagaatcctaccgccaaagagtgcgaagggctcgccactttggataataaggccgatctcgatggcgagtctacagagggtaccgaggaactcgaggatagtcttaaccatttcacccatagtgtacagggccagacaagcgaaatgatcccttccgacgaggaggaggaagatgacgaggaggaagaagaagaggaggagcctagactcactattaatcagagggaggatgaggatgggatggccaatgaggacgagctggacaatacgtatacaggctccggcgacgaggatgccctatccgaggaagatgacgaactaggcgaagcggccaagtatgaggatgtgaaagagtgcggaaagcatgtggaacgagctctgctggtagagctgaataagataagtttgaaagaggaaaatgtgtgtgaagaaaaaaatagccctgtggaccagtctgatttcttctatgaatttagcaagcttatttttactaagggcaagtctccaacagtggtttgctctctgtgcaagagggagggccacctgaagaaagactgcccggaggactttaagcggatccagctggagcccctcccgccccttactcccaagttcttgaacattcttgaccaggtatgtatccagtgttataaagattttagccctacgatcattgaagaccaggcccgggagcacatccgccagaacctggagtcattcattcggcaggacttcccaggcaccaagctttccctgttcggctctagtaagaacggctttgggtttaagcagtccgatctggatgtgtgcatgaccatcaatgggctggagactgccgaaggcctcgattgtgtgcggaccatagaggaactggcgcgcgtactgcgaaagcactccggcctgaggaatatccttcctataacgacagctaaggtcccaatcgttaagttttttcacctgcgctctgggttagaggtggatatcagcttatataacacactggccctccacaatacacggctgcttagcgcttattccgccattgacccccgagtgaaatacttgtgctataccatgaaggtatttacgaagatgtgcgatatcggagacgcatctaggggctctctgtcctcatatgcatataccctgatggtgctgtatttcctgcagcaacggaatccccctgtgatcccagtactgcaagagatctataaaggcgagaaaaaacctgagatcttcgttgatggttggaatatctactttttcgaccagatagacgaattgcctacctattggtccgaatgcggaaagaatacagagagcgtgggacagttgtggttgggtctcctgcgcttctacacagaagagtttgactttaaggaacatgtgatatctattcggcgcaaatctctgctcaccactttcaagaagcaatggacatcaaaatatatagtgatagaagacccgtttgatttgaaccataatctgggcgccgggctctccaggaaaatgactaactttattatgaaggcgttcattaacggacggcgcgtgtttggaatacccgtcaagggatttcccaaggattatccgtccaagatggaatacttcttcgatcctgacgttctaaccgaaggcgagctggcccctaacgatagatgctgccgtatttgtggcaaaatcggtcacttcatgaaggactgccccatgcggcgcaaggttcgccgacgccgggatcaggaggacgctcttaatcagagataccccgaaaacaaagagaagagatcaaaagaagacaaggagattcacaacaagtataccgagcgggaggtctcaactaaagaagacaagcccatccagtgcactccccagaaagctaaaccaatgcgggctgctgccgatctggggagggaaaaaattcttaggccgcccgtcgaaaaatggaaacgccaggacgataaagatctccgggagaagagatgcttcatatgcggcagggagggacacattaagaaggagtgccctcagttcaaaggatcatctgggagcctgagtagcaagtacatgacacaggggaaggcatctgcaaagcgcacccagcaggaaagctag

SEQ ID NO: 72141 - DNA, 2355 bp, Artificial Sequence
  derived and/or modified sequence
atgggcaacgagcatataagcgttcacccggagaattcagattgtatccaagccgatgtcaacagtgacgactacaagggggacaaagtttaccatccagagactggcaggaaaaacgaaaaagaaaaggtgggcagaaaaggaaaacacttgcttaccgtcgatcagaaacgaggggagcatgtcgtgtgcgggtccactaggaataatgaatctgaatccacgctggacctcgagggtttccagaatccaactgctaaggaatgtgaggggttggcaactttggataacaaagcagatctggacggagaatcaacagagggcactgaagaactggaagattcgctgaatcattttacacactcagtccagggacaaacctccgagatgataccatcggacgaagaagaggaggacgacgaagaggaggaggaagaggaagaaccccgactaacaattaaccagcgggaggatgaagacggtatggctaatgaggacgaactggataacacatatacagggagcggcgacgaggatgctttaagcgaggaagacgacgagctgggggaagctgcgaagtatgaggacgtcaaggaatgtggaaagcacgttgaaagagcattgctggtcgaacttaacaagattagcctgaaggaagaaaatgtctgcgaggaaaaaaactctccagtcgaccagtcggacttcttttacgaattttctaagctcatcttcaccaaaggcaaatcaccaaccgtcgtctgcagcttgtgtaagcgcgagggccatctcaagaaggactgcccagaggatttcaagaggatccagctggaacctctgccgcctctgactccaaagttcttgaatattttagaccaagtgtgtatccagtgttataaggacttttcccctacaatcatagaagaccaagctcgagaacacattcgccaaaatctagaaagcttcattaggcaggactttcctggcactaagctgtctctctttggttcttctaaaaatggctttggctttaagcagtccgacctggatgtgtgcatgaccattaatgggctggagacagcagagggcctggattgcgtaagaacgatcgaggagctggccagagttcttagaaaacactcaggtctgaggaatatcctgcctatcacaactgccaaggtgccgattgtgaagtttttccacctcagaagcgggctcgaggtagacatatctttgtataataccctggctctccacaacacccggttattatccgcttatagtgccatcgaccctcgagtcaaatacctatgctatacaatgaaagtgttcaccaaaatgtgcgacattggagacgcttcccggggaagtctgagcagttatgcctataccctgatggtgctgtattttctccagcaacggaatccaccagtaatcccggtgcttcaggagatatataaaggggagaagaaaccggagatctttgtagacgggtggaacatttacttcttcgaccagatcgatgagctgccaacttattggagcgaatgtggcaagaataccgagtctgtcggccagctgtggttggggctcttgagattctacacagaagaattcgacttcaaggaacatgtcattagcatccgcagaaagagtttgctgactactttcaaaaaacagtggacatccaaatacatagtgattgaggatccttttgacttgaatcataatctaggcgcaggccttagcaggaagatgacgaatttcataatgaaagcatttattaacgggcgtcgtgtcttcggaatccctgtgaaagggttcccaaaggattatcccagcaaaatggaatatttctttgaccctgacgttcttaccgagggcgaactggccccaaacgatcgttgttgccgcatctgtggtaagatcggccactttatgaaggactgccccatgagacggaaagtgaggcgtaggcgtgaccaggaagacgcccttaatcagcgttacccagagaataaggaaaaacggagcaaggaggataaagaaatccataacaaatataccgagagagaagtttctactaaagaggacaaaccaatccagtgtacgccccagaaagccaaacccatgcgagccgctgctgacctcggcagagagaagattctcaggcctccagtggaaaaatggaaaaggcaggacgacaaggatctgagagagaagagatgctttatctgcggacgcgaaggccacattaagaaagagtgtcctcagttcaaagggtcctccggttccctcagctctaagtatatgactcaagggaaagcaagcgccaagagaactcagcaagaaagctag

SEQ ID NO: 72142 - DNA, 1188 bp, Artificial Sequence
  derived and/or modified sequence
atgaccattaacgggctggaaacagccgaggggctcgattgcgtgaggacgatcgaggaactcgcaagggtgttgcgcaagcattctggcctccgcaatattctccccatcaccaccgctaaggtgccaatcgtgaaattttttcacctgcggagcggtctcgaagtggatatttcattatataatacccttgcactccacaacacacggctgctgtccgcctacagcgctattgatcccagagttaagtacctgtgttatactatgaaggtgttcactaaaatctataagggcgagaagaagcccgaaatttttgtagacggatggaatatatacttctttgatcaaatcgacgaacttccaacatactggtcagaatgcgggaaaaacacagaatccgtcgggcaactgtggctagggttgcttcggttttacacagaggagttcgactttaaagagcacgtgattagtatccgtcgtaagtcactacttactaccttcaagaaacagtggacctcaaaatatatcgtgattgaagacccattcgacctaaatcacaatctgggtgccggtctgtcccgaaagatgacaaattttattatgaaggccttcatcaacggaagacgcgtgttcggcattcctgttaagggcttccccaaagactacccctctaagatggagtactttttcgatcctgacgtcctgaccgaaggtgagttagcgcctaacgacagatgttgcagaatctgcggcaaaattgggcatttcatgaaagactgtccaatgcggagaaaggtgcgcaggaggcgcgatcaggaagacgcactgaatcagcggtatccagagaataaagagaaaaggagcaaggaagataaggagattcataataaatataccgagcgcgaggttagtaccaaagaagataaacccatacaatgtacgcctcagaaggcgaagccaatgcgggcagccgcagacctcggacgcgagaaaatccttagaccgccagtggaaaagtggaagcggcaggacgacaaggacctgagggagaagcgatgctttatttgtggaagggaaggccatatcaagaaagagtgtccccagtttaaagggtcatcggggagtctgtctagtaagtatatgactcaagggaaggcctctgcaaaaagaactcaacaggagagctag

SEQ ID NO: 72143 - DNA, 4374 bp, Artificial Sequence
  derived and/or modified sequence
atgggagataccgccaaaccttacttcgtaaagcggacgaaggacagaggcactatggatgacgatgactttagaagaggccaccctcagcaagactatctgattattgacgatcatgccaagggacatgggtcgaagatggagaagggcctgcagaaaaagaagataactcccggtaactacggcaacaccccgaggaaaggcccatgtgcagtttcgagtaacccctatgcgttcaagaatcctatatacagccagccggcatggatgaatgacagccacaaagatcaatcaaaacgctggttgtccgacgaacacacaggaaatagtgacaactggagggaattcaagccgggacctcgcatacctgtcatcaatcgacagcggaaagacagcttccaggagaacgaagacggttaccgttggcaggacactcgaggctgtcgaactgtgcgtaggctctttcataaagatctgacgtccttagaaaccacttccgaaatggaggcgggatcacctgaaaacaaaaaacagcggtcccgcccaaggaagcccaggaaaactagaaatgaggaaaacgagcaagatggagaccttgaaggacccgttatcgatgagtctgtgttatcaaccaaggagcttctcggactccagcaagcggaggagcgtctaaaacgggactgcattgatagattaaagcgtcgccctaggaactatcccactgccaagtatacatgcaggctatgtgatgtattaatcgagtccatcgcatttgcacacaagcacattaaggagaaaagacataagaagaacatcaaggagaaacaagaggaggaactgttaactacactaccacccccaactccctcccagatcaacgcagttggcatcgccatagacaaggtggtgcaggaatttggccttcataacgagaacttggagcagaggctggagataaaacgcatcatggaaaacgtgtttcagcacaaactcccagattgctctctccgcttatatggtagcagctgctctcggctcgggttcaagaattcagacgtcaacatcgatatccagttccctgccattatgtcccagccagacgtgctgttactcgtgcaggaatgcctgaagaactcagacagcttcatcgatgttgatgcagatttccacgctcgcgtccccgtggtcgtgtgtagggagaagcaaagtggactgctgtgcaaggtctcagccggaaatgaaaacgcatgcctgacaactaaacatcttaccgcattagggaaacttgaacccaagctcgtgcccctggtaattgcattcagatactgggctaaactttgctcaattgacaggcctgaagaggggggattgcccccatatgtcttcgccctgatggctatcttctttttacagcagcggaaagagcccctactgccggtgtacctcggttcgtggatcgagggcttctctctgagcaaactggggaactttaatctccaggatatcgaaaaggacgtcgtcatatgggagcatactgacagcgctgccggtgacaccggtatcaccaaggaagaggctcctagggaaacacccataaaacggggtcaagtgagtctcatactggacgtcaagcatcagccatcagtacccgttggccagctttgggttgagctgctgaggttttatgccctggagtttaatcttgcagaccttgtgatctctattagagttaaagagttagtatctagggagctgaaagattggcctaagaagcgcatagctatagaggacccttactccgttaagaggaatgtggcacgaacgctgaactctcagcctgtgtttgaatacatcctgcattgtctgagaactacgtacaagtattttgcccttccacacaaaattactaagtctagcttattaaaacctttgaacgctattacttgcatatctgaacacagcaaggaagtaatcaatcaccatcccgatgtgcagacgaaggacgacaagctgaaaaacagtgtgctggcacaaggccctggagcaacatcatccgcagcgaacacatgcaaggtgcagcctcttactctgaaggaaaccgctgagtcctttgggtcgcctcctaaggaagagatggggaatgagcacatcagtgtgcacccggagaattcagactgtatccaggctgatgtgaatagcgacgactacaaaggggataaagtatatcaccccgagactggacgcaaaaacgaaaaggaaaaagtggggagaaaggggaagcaccttctgactgtggaccagaagcggggagaacatgtcgtgtgcggctccacaagaaacaacgaatctgaaagtactttggacctcgaggggtttcagaatcctacagccaaagagtgcgaagggcttgccactctggacaataaggcagatctggacggtgaatctacagagggaaccgaggagctagaagattccctcaatcacttcacacattcagtccagggacagacctcagagatgataccatccgatgaggaagaagaagacgacgaggaagaggaggaagaggaagagccacgtttaaccattaatcagagagaagacgaggatgggatggcgaacgaggacgaactggacaatacatataccgggtcaggcgatgaagacgcactctcagaggaggacgatgaactgggcgaggcagcaaagtacgaggatgttaaggaatgcgggaaacacgtggaaagggccctgctggtggagttaaacaagatttccctgaaagaggaaaacgtgtgcgaggagaaaaatagcccggtggaccagagcgatttcttttatgaattttctaagctgatcttcacaaaggggaaaagtcctaccgtggtatgcagtttgtgcaagcgcgagggccatttgaaaaaagattgccctgaagatttcaagaggatccagctcgaaccactgcctcctctcacgcctaagttcttaaacatcctggatcaagtctgcatacagtgttacaaggacttcagcccgacaatcatagaggaccaggcacgtgagcacatccggcagaatctggaatcttttatccggcaggactttccgggtacaaaattgagcctgttcggatcaagtaaaaacggatttgggtttaaacaaagcgacctggacgtttgcatgaccattaatggattggagacagccgagggcctcgattgcgtgcgcaccatcgaggaactggctagggtgctgcggaaacactccggcctgcggaatattcttcccatcacgactgctaaggtgcccatagtaaaattttttcatctccggtcgggtctggaggttgacatctccttgtataacactctcgcactgcacaacactagactgctgagcgcatatagcgccatcgacccgcgagtaaaatatttgtgctacaccatgaaggtgttcaccaaaatttacaaaggggagaaaaagccggagattttcgtggacggatggaatatatatttttttgaccaaattgatgaattacccacatattggtccgaatgcggcaagaacacggaaagcgtcggccagctgtggctcggtttacttcggttctatacagaagaattcgactttaaagagcacgtaatctccattaggcggaaatcactgctcaccactttcaagaaacaatggacttctaagtacatcgtaatcgaggacccatttgacctgaatcacaacttgggcgctggcctaagccgcaaaatgactaactttatcatgaaagcttttattaacgggaggcgggtcttcgggattcctgtgaagggctttcccaaggattacccatctaaaatggagtatttcttcgatccagatgtgttgacggaaggtgagctggcgcctaacgacaggtgttgccgaatttgtggaaagataggccacttcatgaaggactgccccatgcgcaggaaagttaggagaaggcgggaccaggaagacgccctgaaccagcgctatccggagaacaaggaaaaacgctccaaggaagacaaagaaatccacaacaaatatactgaacgagaagtgagtacaaaagaggataaacctatccagtgcacaccacagaaagccaagccaatgagagccgcagctgatctgggcagggaaaaaatcctgaggcccccagtggaaaagtggaagcgacaggacgataaagacctgcgagaaaaacggtgctttatctgcggcagggaaggccacattaaaaaagaatgtccacagttcaagggatcctccggaagtctatcaagtaagtacatgactcagggcaaagccagtgcaaaacgcactcaacaggagtcatag

SEQ ID NO: 72144 - DNA, 4488 bp, Artificial Sequence
  derived and/or modified sequence
atgggggatacagcgaaaccctactttgtgaagcgaactaaagatagagggaccatggacgacgatgattttaggcgaggacacccacaacaggactacctgatcatcgatgaccacgccaaggggcacggcagtaagatggagaagggactccagaaaaagaaaatcacaccaggcaactatggtaatactcctagaaaaggcccttgcgcagtaagctctaatccatatgcattcaagaacccaatatatagccagcccgcatggatgaacgacagccacaaagatcagtcaaagaggtggttaagcgacgagcacacgggcaattctgacaactggagagagttcaaacccggaccccgtataccagtgattaacaggcaaaggaaggattccttccaggaaaacgaggacggctataggtggcaagatacacggggatgtcgaacagtgcggcgactgtttcataaagatctgacttcgctggagacaaccagcgagatggaggcgggttctcccgagaataagaaacaacgaagcaggcctcgcaaaccacggaagacccggaatgaggagaacgaacaggacggggacttggagggcccagtgattgacgagtcagtgctctctaccaaggaactcctgggcttacagcaagccgaggagagactgaagcgcgattgcatcgatagattgaagcgaaggccacgaaactaccccaccgcgaagtacacatgtagattatgtgatgtgttgatcgaaagcattgcctttgcccacaaacacataaaagagaaaagacataagaagaacatcaaagagaaacaagaagaggagctccttaccaccctgcctccaccgaccccgagccagatcaatgctgttggaatcgcgattgacaaagtcgtacaagaattcggtctgcataatgagaatctcgagcaaaggctcgagatcaagcgcataatggagaacgtctttcagcacaagctcccggactgttctcttaggctgtatggcagctcctgttccagactcggatttaaaaactcagatgttaacatcgacattcaattccctgcaattatgagtcaacccgatgtgctattgcttgtgcaggagtgcttgaagaacagcgattctttcatcgatgtggatgctgactttcacgccagagtgcccgtcgtggtttgcagggagaagcagtccgggctcttgtgtaaggtgtctgccggaaacgaaaacgcttgcctgacaactaaacacctgacggcccttgggaagttagagcccaaactggtcccattggtaatagctttccggtactgggcaaagctctgtagcatcgatcgacctgaagagggaggcctgcctccctatgtgtttgcgctcatggctattttctttctccagcagcgaaaggaacctctgctgcccgtgtatctggggtcttggatcgagggtttctccctgagtaagcttggaaatttcaatctgcaggacatcgaaaaggatgtagtgatatgggaacatactgattctgccgcaggggatacggggattacaaaagaggaggcccctcgagaaacaccgatcaagaggggccaagtgtctctaatcctggatgttaagcaccagccatcagtgcccgtgggccagctgtgggtggagctgttgagattttacgcgctggagtttaatctggccgatctggtgattagtatacgggtgaaggagctcgtaagtcgggaactcaaggattggcccaaaaagcgtattgctatcgaggacccctattccgtgaagcgtaatgtggcaaggactctgaacagccaaccagtctttgagtacattcttcactgcctgaggactacctacaaatacttcgccctccctcacaagattacaaaatctagcctgctgaaaccactgaatgccatcacatgcatatctgagcattcaaaagaagtcattaaccaccacccagatgtgcagactaaagacgacaaactcaagaatagcgtgctggcacagggaccaggtgcgacgtcaagtgccgctaatacatgcaaagtccaacccctaactttaaaagagactgcagaatcatttgggtcgcccccaaaggaggagatgggtaacgagcacatatcggtccacccagaaaatagcgattgtattcaggccgatgtgaattccgacgactataaaggcgacaaagtatatcaccccgagaccggacgcaagaacgaaaaagaaaaagtcggcagaaaggggaagcaccttctgacagttgaccagaagaggggggagcatgtcgtgtgtggttctacacggaacaacgagtcagagtctacactggacctggaaggcttccagaaccccacagctaaggaatgtgaagggctggccacactcgacaacaaggccgacctcgacggagagtccactgaaggtacagaggaattggaagactctctgaaccattttacccatagtgttcaaggccagaccagcgagatgattccctcagacgaagaagaggaagatgacgaggaggaagaagaagaggaagagccacggttgactataaaccagagggaagatgaagacggcatggccaatgaagatgaactggacaacacatacactggatctggagatgaagacgccctctctgaagaggatgacgaactcggggaggcggctaaatacgaagacgtcaaagaatgtggtaaacacgtcgaacgcgctctcctggttgagttaaataagatttctttgaaagaagaaaatgtatgtgaggaaaaaaatagccccgtcgaccagtcggatttcttctacgaattctctaaattgatttttaccaagggaaagtctcctacagttgtttgctcactgtgtaaaagggaaggacatcttaagaaagattgtcccgaggatttcaagcggattcagctggagccgcttccacccctgaccccgaagttcttgaacatcctggaccaggtatgcatccagtgctacaaggacttctcaccaactatcatagaagatcaggcacgtgagcatattcggcagaatctggaaagtttcataagacaagattttccaggcacaaaactcagtctttttggctcgtccaagaatgggtttggattcaagcagtccgaccttgatgtctgtatgaccataaacggcctggagacagccgaggggctggattgcgtgcgcacgatcgaagagctagctcgggtactgcgaaaacacagcgggctgcggaacatcctgccgattaccaccgctaaggtcccgatcgtgaaattctttcacctccgatcagggctcgaggtggacatctcactgtataacaccctcgccctgcacaacacccggctgctatctgcttactcagcaattgacccacgggtgaaatatttgtgctacacaatgaaagtattcaccaaaatgtgcgacatcggtgacgcttcccgcggttctctgtccagttacgcctacacactcatggtgctttatttcctgcagcagcgaaaccctcccgttattcccgtacttcaggagatctataaaggagagaaaaaaccagagatcttcgttgatggatggaacatctacttcttcgatcagatcgacgaactgccaacttactggagtgagtgcggaaaaaatacagagtccgtgggacagctgtggctggggcttcttcgtttctacaccgaggaatttgacttcaaggagcacgtgatctccatccggagaaagtcccttcttactacctttaagaagcagtggaccagcaaatacattgtgatcgaagatcccttcgacttaaatcacaacttgggggctgggttgtctaggaaaatgacaaatttcataatgaaggcctttatcaacggccgacgggtcttcggaattcctgtgaaagggtttcctaaagactatccttcgaaaatggaatacttctttgaccccgatgtgcttacagaaggagaactggctcctaacgacagatgctgtcggatttgcgggaagattggccatttcatgaaagactgccccatgcggagaaaggtccggagacggagagaccaggaggacgcactgaatcagaggtaccctgagaataaggaaaagcggtctaaagaagacaaggagatacataacaagtacacagaaagagaggtgtcgacaaaagaagataaacccattcaatgcacacctcagaaggccaagcccatgagggccgcagcagaccttggacgagagaaaatccttcggccacctgtggagaagtggaaacgacaggacgataaagatcttagagagaagcgttgcttcatatgtgggagggaagggcacatcaagaaggagtgcccacaatttaaggggagctctggctctctgagtagcaagtatatgacacagggaaaggcctctgccaagcgaacccagcaagagagctag

SEQ ID NO: 72145 - DNA, 5724 bp, Artificial Sequence
  derived and/or modified sequence
aggaagaggctggggaccgcggcgaaggtggtgagtgctcttgggcgccttctcccaacgtccctgccagactcgcctccgggctgattctccagttggtttcctggactccagagtagctgtccggcctggccccggaggtgcaaagtaagaaaattgaagtcaaagaccatgggagatacagcaaaaccttatttcgtgaagcgcactaaagaccgggggactatggatgatgatgacttcagaaggggtcacccccaacaagattatttaataatagatgaccatgctaaaggccatggcagtaaaatggaaaagggccttcaaaaaaagaagataacaccagggaactatgggaatacccccagaaaaggaccatgtgctgtttccagcaatccatatgcatttaaaaacccaatctacagtcaacccgcttggatgaatgacagccacaaagatcagagtaagagatggctgtctgatgaacatactggtaattcagacaactggagagaattcaaacctggacctagaattcctgttataaaccgacaaagaaaagactcctttcaagaaaatgaagatggttataggtggcaagacacaagaggctgcagaactgtaagacgactgtttcataaagacctaacaagcctagaaaccacgtcagaaatggaagcaggaagtcctgaaaacaagaagcagaggtccagacctaggaagccacggaagactagaaatgaggaaaatgagcaggatggagacttggaaggccctgtgatcgatgagtctgtactttcaacgaaggagctgctaggcttacagcaggctgaggagagactgaagagagactgcattgacaggctaaaaaggcgaccacgaaactaccctacagcaaagtacacctgcagactctgtgatgttttaattgaatccattgcatttgcccataagcatatcaaggaaaagaggcacaagaaaaacattaaggagaagcaagaggaagagttgctcactacgttacccccaccaacaccctcccagataaatgcagttggcattgccattgacaaagtggtacaggaatttggcttacacaatgagaacttggaacagaggctggaaattaaacgtatcatggaaaatgtgttccaacacaagttaccagattgttccctaagattatatgggtcatcctgtagcagattgggtttcaaaaattcggatgtaaacattgacatccagtttccagccattatgtctcagccagatgtcctcttacttgttcaagaatgtttaaagaacagtgactcctttattgatgttgatgcagacttccatgctagggtgccagtggtggtgtgcagagaaaagcaaagtggtcttctgtgtaaagtgagcgcaggaaatgaaaatgcttgtctgacaacaaagcatttaactgcccttggaaaactagaaccaaagctggttcctttggtgattgcatttaggtactgggcaaagctttgcagtatagatcgccctgaagaaggaggtctgccaccttatgtgtttgccctgatggccattttctttcttcagcagaggaaagaaccccttttgcctgtatatctaggatcatggattgaaggattctcattaagcaaactagggaatttcaaccttcaagacattgaaaaagatgttgtgatctgggaacatactgacagtgctgcaggggacacaggcataacaaaagaagaggcaccaagagaaacgccgattaaaaggggacaggtggtatcatccctactctgcagataatgatagcgaccattttttgaacactgtgtgccaggcactgtgctaagcactttacagacactatctcactcagtcctcccaacaaccctatgaggtgtcattaatattggatgtgaaacaccagccttcagtaccagttgggcagctctgggtggaattgctgcggttctatgctttagaatttaatttggctgatttagtgataagtattcgtgtcaaagaattggtatctcgggaattgaaggattggcccaaaaagcgcattgccattgaagatccctactctgttaaaagaaatgtggcaagaaccctaaatagtcaacctgtgtttgaatatatacttcattgtttaaggacaacatacaagtattttgctcttccacacaaaattacaaaatccagccttctaaagcctctgaatgcaattacatgtatttcagaacattctaaagaagtaataaatcatcatccagatgtacaaacaaaagatgataagctcaaaaactcagttttggcccaaggtcctggtgctaccagttcagctgcaaatacctgtaaggtacagccacttactcttaaagagactgctgaaagttttggaagcccaccaaaagaagaaatgggaaatgaacacatcagtgtccaccctgaaaactcagactgtatccaagcagatgttaactctgatgattacaagggtgataaagtataccatccagaaacaggaaggaaaaacgagaaagagaaagttggaaggaagggcaagcatctgttgactgttgatcagaaacgtggagagcatgttgtctgtggcagcacacgtaataatgagtcagagagcactttggatttagaaggcttccaaaatcccacagctaaagagtgtgagggacttgccactttagataacaaggctgatcttgatggagaaagtacagaaggtactgaggaactagaagactctctaaaccactttacccactcagtacagggccagacatcagaaatgattccctctgatgaagaggaggaggacgacgaagaagaggaggaggaagaagaacctaggctcaccattaaccaaagggaagatgaagatggcatggctaatgaagatgagttagacaacacctacactgggtcaggggatgaggacgccctatctgaagaggatgatgagttaggcgaagctgctaagtatgaagacgtgaaagaatgtggaaaacatgtagaaagagctctcctagtggaacttaataaaataagtctcaaggaagaaaatgtatgtgaagaaaaaaattcacctgtggatcagtctgattttttttatgaattcagtaaacttatcttcaccaaaggcaagtctcctacggtagtgtgcagcttatgcaaacgagagggtcatctaaagaaggactgtcctgaagacttcaaaagaatccagctagaacctctgccaccattaacacccaagtttttaaatatcttagatcaagtctgtatccagtgttataaggatttttctccaacaattatagaagatcaggctcgtgaacatattcggcaaaacctagaaagtttcataagacaggactttccaggaactaaattgagcctgtttggctcctccaaaaatggatttgggttcaaacagagtgaccttgacgtctgtatgacaattaatggacttgaaactgctgagggattggactgtgtcagaactattgaagaattagcaagagtcctcagaaaacattcaggtctgagaaacatcttacctattacaacagcaaaggtgccaattgtgaagttcttccatttgagaagtggtctggaagtagatatcagtttgtataacacattggcccttcataacacaaggcttttatctgcttattccgccattgatcccagagtgaagtatttgtgctataccatgaaagtatttacaaagatgtgtgatattggtgatgcatctagaggcagcttatcatcgtatgcatatactcttatggtgctatattttctccagcagaggaatccaccagtcattcctgtccttcaagagatatacaaaggtgaaaagaaacctgaaatatttgttgatggctggaatatttatttttttgatcaaatagatgaactgcctacctattggtcagaatgtggaaaaaatacagaatctgttgggcagttatggttgggccttcttcgtttctacacagaggaatttgattttaaagaacatgttattagcatcaggagaaaaagtctgcttacaacttttaagaaacagtggacctcaaaatacattgttattgaagatccctttgatttgaatcataatcttggagctggattatcaaggaaaatgacaaattttataatgaaggcttttatcaatggtagaagagtatttggtattcctgtcaagggatttccaaaggactacccctcaaaaatggaatacttttttgatccagatgtgttaactgaaggagagctggccccaaatgatagatgttgtcgaatttgtggaaaaatcggacacttcatgaaggactgtcctatgaggagaaaagtaagacggcggcgagatcaggaagatgccctgaaccaaagataccctgagaacaaggaaaaaagaagcaaagaggacaaagaaattcacaacaagtacacagaaagggaggtgtcaacaaaagaagataagcccatacagtgcacacctcagaaagccaagccaatgcgggcagctgctgacctggggagggagaagatcctcaggccaccagtagaaaaatggaagagacaggatgacaaagacttaagagaaaaacgttgttttatttgtggaagagaagggcacattaaaaaggaatgcccacagtttaaaggctcttcaggtagcctttccagtaaatatatgactcagggaaaagcctcagcgaagaggacccagcaggaatcatgagggaaggaaaatgcagcactctaaatggccactcaggcgttcctattcactcggaaaattaggttcatttcacaggacacagcagtgtagatcaggcttcaacttaacatttaagggaaatgtcagatttttttttaatttaatgaaattgttaatgaggaaaaatttttaatatagtcttatctaccacacatccccatagatttaaggattttaatagaaagacatgatgtatgtatttaagccacgttaaaagaaaaaatataactatggaccggtattcagtgaatacagtttcatggtttttaattctttcaaagcacattaaaaatggtgtgctgataaaccccaagtaaattaaccctttttccgtataaatccattttttgttttgaagaggggaaattatatttattgttgtttactgaatcctggtgtgaaagcatatcagatatgtatgaactgctactgctgtacttccgatttacggacatcattttattgctatttgtagacgtgataacatgaacatgagtacctatttatgtgggccttcagtggatgggcagtgccactcaggtctctggggtttccctctctaattttaagtaaattgacatataactactatgcttataaaaatgaagtaaggaaaacaagtagtcctgtttgccactaaaaacattttcaaaggaaaaataaaatgaaagtactttttactttttatgatactcagaaattaggatgaagaacttttaaaattgctgaagatcaaagaggttatctctgccagtcacaagtgtggctggtgtcattctgggtctgactggagccctcctggactgtttctttaatttcaaaagccctgcagacatagtacctggtcagaactatgcctcggtttatttatcattttgaaataaaatcagaatttcaacctgtaa

SEQ ID NO: 72146 - DNA, 2262 bp, Artificial Sequence
  derived and/or modified sequence
gatcaggctcgtgaacatattcggcaaaacctagaaagtttcataagacaggactttccaggaactaaattgagcctgtttggctcctccaaaaatggatttgggttcaaacagagtgaccttgacgtctgtatgacaattaatggacttgaaactgctgagggattggactgtgtcagaactattgaagaattagcaagagtcctcagaaaacattcaggtctgagaaacatcttacctattacaacagcaaaggtgccaattgtgaagttcttccatttgagaagtggtctggaagtagatatcagtttgtataacacattggcccttcataacacaaggcttttatctgcttattccgccattgatcccagagtgaagtatttgtgctataccatgaaagtatttacaaagatatacaaaggtgaaaagaaacctgaaatatttgttgatggctggaatatttatttttttgatcaaatagatgaactgcctacctattggtcagaatgtggaaaaaatacagaatctgttgggcagttatggttgggccttcttcgtttctacacagaggaatttgattttaaagaacatgttattagcatcaggagaaaaagtctgcttacaacttttaagaaacagtggacctcaaaatacattgttattgaagatccctttgatttgaatcataatcttggagctggattatcaaggaaaatgacaaattttataatgaaggcttttatcaatggtagaagagtatttggtattcctgtcaagggatttccaaaggactacccctcaaaaatggaatacttttttgatccagatgtgttaactgaaggagagctggccccaaatgatagatgttgtcgaatttgtggaaaaatcggacacttcatgaaggactgtcctatgaggagaaaagtaagacggcggcgagatcaggaagatgccctgaaccaaagataccctgagaacaaggaaaaaagaagcaaagaggacaaagaaattcacaacaagtacacagaaagggaggtgtcaacaaaagaagataagcccatacagtgcacacctcagaaagccaagccaatgcgggcagctgctgacctggggagggagaagatcctcaggccaccagtagaaaaatggaagagacaggatgacaaagacttaagagaaaaacgttgttttatttgtggaagagaagggcacattaaaaaggaatgcccacagtttaaaggctcttcaggtagcctttccagtaaatatatgactcagggaaaagcctcagcgaagaggacccagcaggaatcatgagggaaggaaaatgcagcactctaaatggccactcaggcgttcctattcactcggaaaattaggttcatttcacaggacacagcagtgtagatcaggcttcaacttaacatttaagggaaatgtcagatttttttttaatttaatgaaattgttaatgaggaaaaatttttaatatagtcttatctaccacacatccccatagatttaaggattttaatagaaagacatgatgtatgtatttaagccacgttaaaagaaaaaatataactatggaccggtattcagtgaatacagtttcatggtttttaattctttcaaagcacattaaaaatggtgtgctgataaaccccaagtaaattaaccctttttccgtataaatccattttttgttttgaagaggggaaattatatttattgttgtttactgaatcctggtgtgaaagcatatcagatatgtatgaactgctactgctgtacttccgatttacggacatcattttattgctatttgtagacgtgataacatgaacatgagtacctatttatgtgggccttcagtggatgggcagtgccactcaggtctctggggtttccctctctaattttaagtaaattgacatataactactatgcttataaaaatgaagtaaggaaaacaagtagtcctgtttgccactaaaaacattttcaaaggaaaaataaaatgaaagtactttttactttttatgatactcagaaattaggatgaagaacttttaaaattgctgaagatcaaagaggttatctctgccagtcacaagtgtggctggtgtcattctgggtctgactggagccctcctggactgtttctttaatttcaaaagccctgcagacatagtacctggtcagaactatgcctcggtttatttatcattttgaaataaaatcagaatttcaacctgt

SEQ ID NO: 72147 - DNA, 5533 bp, Artificial Sequence
  derived and/or modified sequence
aagtggggccgaaggaaaacacggagagggagcccggccgggacaggaagaggctggggaccgcggcgaaggtggtgagtgctcttgggcgccttctcccaacgtccctgccagactcgcctccgggctgattctccagttggtttcctggactccagagtagctgtccggcctggccccggaggtgcaaagtaagaaaattgaagtcaaagaccatgggagatacagcaaaaccttatttcgtgaagcgcactaaagaccgggggactatggatgatgatgacttcagaaggggtcacccccaacaagattatttaataatagatgaccatgctaaaggccatggcagtaaaatggaaaagggccttcaaaaaaagaagataacaccagggaactatgggaatacccccagaaaaggaccatgtgctgtttccagcaatccatatgcatttaaaaacccaatctacagtcaacccgcttggatgaatgacagccacaaagatcagagtaagagatggctgtctgatgaacatactggtaattcagacaactggagagaattcaaacctggacctagaattcctgttataaaccgacaaagaaaagactcctttcaagaaaatgaagatggttataggtggcaagacacaagaggctgcagaactgtaagacgactgtttcataaagacctaacaagcctagaaaccacgtcagaaatggaagcaggaagtcctgaaaacaagaagcagaggtccagacctaggaagccacggaagactagaaatgaggaaaatgagcaggatggagacttggaaggccctgtgatcgatgagtctgtactttcaacgaaggagctgctaggcttacagcaggctgaggagagactgaagagagactgcattgacaggctaaaaaggcgaccacgaaactaccctacagcaaagtacacctgcagactctgtgatgttttaattgaatccattgcatttgcccataagcatatcaaggaaaagaggcacaagaaaaacattaaggagaagcaagaggaagagttgctcactacgttacccccaccaacaccctcccagataaatgcagttggcattgccattgacaaagtggtacaggaatttggcttacacaatgagaacttggaacagaggctggaaattaaacgtatcatggaaaatgtgttccaacacaagttaccagattgttccctaagattatatgggtcatcctgtagcagattgggtttcaaaaattcggatgtaaacattgacatccagtttccagccattatgtctcagccagatgtcctcttacttgttcaagaatgtttaaagaacagtgactcctttattgatgttgatgcagacttccatgctagggtgccagtggtggtgtgcagagaaaagcaaagtggtcttctgtgtaaagtgagcgcaggaaatgaaaatgcttgtctgacaacaaagcatttaactgcccttggaaaactagaaccaaagctggttcctttggtgattgcatttaggtactgggcaaagctttgcagtatagatcgccctgaagaaggaggtctgccaccttatgtgtttgccctgatggccattttctttcttcagcagaggaaagaaccccttttgcctgtatatctaggatcatggattgaaggattctcattaagcaaactagggaatttcaaccttcaagacattgaaaaagatgttgtgatctgggaacatactgacagtgctgcaggggacacaggcataacaaaagaagaggcaccaagagaaacgccgattaaaaggggacaggtgtcattaatattggatgtgaaacaccagccttcagtaccagttgggcagctctgggtggaattgctgcggttctatgctttagaatttaatttggctgatttagtgataagtattcgtgtcaaagaattggtatctcgggaattgaaggattggcccaaaaagcgcattgccattgaagatccctactctgttaaaagaaatgtggcaagaaccctaaatagtcaacctgtgtttgaatatatacttcattgtttaaggacaacatacaagtattttgctcttccacacaaaattacaaaatccagccttctaaagcctctgaatgcaattacatgtatttcagaacattctaaagaagtaataaatcatcatccagatgtacaaacaaaagatgataagctcaaaaactcagttttggcccaaggtcctggtgctaccagttcagctgcaaatacctgtaaggtacagccacttactcttaaagagactgctgaaagttttggaagcccaccaaaagaagaaatgggaaatgaacacatcagtgtccaccctgaaaactcagactgtatccaagcagatgttaactctgatgattacaagggtgataaagtataccatccagaaacaggaaggaaaaacgagaaagagaaagttggaaggaagggcaagcatctgttgactgttgatcagaaacgtggagagcatgttgtctgtggcagcacacgtaataatgagtcagagagcactttggatttagaaggcttccaaaatcccacagctaaagagtgtgagggacttgccactttagataacaaggctgatcttgatggagaaagtacagaaggtactgaggaactagaagactctctaaaccactttacccactcagtacagggccagacatcagaaatgattccctctgatgaagaggaggaggacgacgaagaagaggaggaggaagaagaacctaggctcaccattaaccaaagggaagatgaagatggcatggctaatgaagatgagttagacaacacctacactgggtcaggggatgaggacgccctatctgaagaggatgatgagttaggcgaagctgctaagtatgaagacgtgaaagaatgtggaaaacatgtagaaagagctctcctagtggaacttaataaaataagtctcaaggaagaaaatgtatgtgaagaaaaaaattcacctgtggatcagtctgattttttttatgaattcagtaaacttatcttcaccaaaggcaagtctcctacggtagtgtgcagcttatgcaaacgagagggtcatctaaagaaggactgtcctgaagacttcaaaagaatccagctagaacctctgccaccattaacacccaagtttttaaatatcttagatcaagtctgtatccagtgttataaggatttttctccaacaattatagaagatcaggctcgtgaacatattcggcaaaacctagaaagtttcataagacaggactttccaggaactaaattgagcctgtttggctcctccaaaaatggatttgggttcaaacagagtgaccttgacgtctgtatgacaattaatggacttgaaactgctgagggattggactgtgtcagaactattgaagaattagcaagagtcctcagaaaacattcaggtctgagaaacatcttacctattacaacagcaaaggtgccaattgtgaagttcttccatttgagaagtggtctggaagtagatatcagtttgtataacacattggcccttcataacacaaggcttttatctgcttattccgccattgatcccagagtgaagtatttgtgctataccatgaaagtatttacaaagatatacaaaggtgaaaagaaacctgaaatatttgttgatggctggaatatttatttttttgatcaaatagatgaactgcctacctattggtcagaatgtggaaaaaatacagaatctgttgggcagttatggttgggccttcttcgtttctacacagaggaatttgattttaaagaacatgttattagcatcaggagaaaaagtctgcttacaacttttaagaaacagtggacctcaaaatacattgttattgaagatccctttgatttgaatcataatcttggagctggattatcaaggaaaatgacaaattttataatgaaggcttttatcaatggtagaagagtatttggtattcctgtcaagggatttccaaaggactacccctcaaaaatggaatacttttttgatccagatgtgttaactgaaggagagctggccccaaatgatagatgttgtcgaatttgtggaaaaatcggacacttcatgaaggactgtcctatgaggagaaaagtaagacggcggcgagatcaggaagatgccctgaaccaaagataccctgagaacaaggaaaaaagaagcaaagaggacaaagaaattcacaacaagtacacagaaagggaggtgtcaacaaaagaagataagcccatacagtgcacacctcagaaagccaagccaatgcgggcagctgctgacctggggagggagaagatcctcaggccaccagtagaaaaatggaagagacaggatgacaaagacttaagagaaaaacgttgttttatttgtggaagagaagggcacattaaaaaggaatgcccacagtttaaaggctcttcaggtagcctttccagtaaatatatgactcagggaaaagcctcagcgaagaggacccagcaggaatcatgagggaaggaaaatgcagcactctaaatggccactcaggcgttcctattcactcggaaaattaggttcatttcacaggacacagcagtgtagatcaggcttcaacttaacatttaagggaaatgtcagatttttttttaatttaatgaaattgttaatgaggaaaaatttttaatatagtcttatctaccacacatccccatagatttaaggattttaatagaaagacatgatgtatgtatttaagccacgttaaaagaaaaaatataactatggaccggtattcagtgaatacagtttcatggtttttaattctttcaaagcacattaaaaatggtgtgctgataaaccccaagtaaattaaccctttttccgtataaatccattttttgttttgaagaggggaaattatatttattgttgtttactgaatcctggtgtgaaagcatatcagatatgtatgaactgctactgctgtacttccgatttacggacatcattttattgctatttgtagacgtgataacatgaacatgagtacctatttatgtgggccttcagtggatgggcagtgccactcaggtctctggggtttccctctctaattttaagtaaattgacatataactactatgcttataaaaatgaagtaaggaaaacaagtagtcctgtttgccactaaaaacattttcaaaggaaaaataaaatgaaagtactttttactttttatgatactcagaaattaggatgaagaacttttaaaattgctgaagatcaaagaggttatctctgccagtcacaagtgtggctggtgtcattctgggtctgactggagccctcctggactgtttctttaatttcaaaagccctgcagacatagtacctggtcagaactatgcctcggtttatttatcattttgaaataaaatcagaatttcaacctgtaa

SEQ ID NO: 72148 - DNA, 5379 bp, Artificial Sequence
  derived and/or modified sequence
acaggaagaggctggggaccgcggcgaaggtggtgagtgctcttgggcgccttctcccaacgtccctgccagactcgcctccgggctgattctccagttggtttcctggactccagagtagctgtccggcctggccccggaggtgcaaagtaagaaaattgaagtcaaagaccatgggagatacagcaaaaccttatttcgtgaagcgcactaaagaccgggggactatggatgatgatgacttcagaaggggtcacccccaacaagattatttaataatagatgaccatgctaaaggccatggcagtaaaatggaaaagggccttcaaaaaaagaagataacaccagggaactatgggaatacccccagaaaaggaccatgtgctgtttccagcaatccatatgcatttaaaaacccaatctacagtcaacccgcttggatgaatgacagccacaaagatcagagtaagagatggctgtctgatgaacatactggtaattcagacaactggagagaattcaaacctggacctagaattcctgttataaaccgacaaagaaaagactcctttcaagaaaatgaagatggttataggtggcaagacacaagaggctgcagaactgtaagacgactgtttcataaagacctaacaagcctagaaaccacgtcagaaatggaagcaggaagtcctgaaaacaagaagcagaggtccagacctaggaagccacggaagactagaaatgaggaaaatgagcaggatggagacttggaaggccctgtgatcgatgagtctgtactttcaacgaaggagctgctaggcttacagcaggctgaggagagactgaagagagactgcattgacaggctaaaaaggcgaccacgaaactaccctacagcaaagtacacctgcagactctgtgatgttttaattgaatccattgcatttgcccataagcatatcaaggaaaagaggcacaagaaaaacattaaggagaagcaagaggaagagttgctcactacgttacccccaccaacaccctcccagataaatgcagttggcattgccattgacaaagtggtacaggaatttggcttacacaatgagaacttggaacagaggctggaaattaaacgtatcatggaaaatgtgttccaacacaagttaccagattgttccctaagattatatgggtcatcctgtagcagattgggtttcaaaaattcggatgtaaacattgacatccagtttccagccattatgtctcagccagatgtcctcttacttgttcaagaatgtttaaagaacagtgactcctttattgatgttgatgcagacttccatgctagggtgccagtggtggtgtgcagagaaaagcaaagtggtcttctgtgtaaagtgagcgcaggaaatgaaaatgcttgtctgacaacaaagcatttaactgcccttggaaaactagaaccaaagctggttcctttggtgattgcatttaggtactgggcaaagctttgcagtatagatcgccctgaagaaggaggtctgccaccttatgtgtttgccctgatggccattttctttcttcagcagaggaaagaaccccttttgcctgtatatctaggatcatggattgaaggattctcattaagcaaactagggaatttcaaccttcaagacattgaaaaagatgttgtgatctgggaacatactgacagtgctgcaggggacacaggcataacaaaagaagaggcaccaagagaaacgccgattaaaaggggacaggtgtcattaatattggatgtgaaacaccagccttcagtaccagttgggcagctctgggtggaattgctgcggttctatgctttagaatttaatttggctgatttagtgataagtattcgtgtcaaagaattggtatctcgggaattgaaggattggcccaaaaagcgcattgccattgaagatccctactctgttaaaagaaatgtggcaagaaccctaaatagtcaacctgtgtttgaatatatacttcattgtttaaggacaacatacaagtattttgctcttccacacaaaattacaaaatccagccttctaaagcctctgaatgcaattacatgtatttcagaacattctaaagaagtaataaatcatcatccagatgtacaaacaaaagatgataagctcaaaaactcagttttggcccaaggtcctggtgctaccagttcagctgcaaatacctgtaaggtacagccacttactcttaaagagactgctgaaagttttggaagcccaccaaaagaagaaatgggaaatgaacacatcagtgtccaccctgaaaactcagactgtatccaagcagatgttaactctgatgattacaagggtgataaagtataccatccagaaacaggaaggaaaaacgagaaagagaaagttggaaggaagggcaagcatctgttgactgttgatcagaaacgtggagagcatgttgtctgtggcagcacacgtaataatgagtcagagagcactttggatttagaaggcttccaaaatcccacagctaaagagtgtgagggacttgccactttagataacaaggctgatcttgatggagaaagtacagaaggtactgaggaactagaagactctctaaaccactttacccactcagtacagggccagacatcagaaatgattccctctgatgaagaggaggaggacgacgaagaagaggaggaggaagaagaacctaggctcaccattaaccaaagggaagatgaagatggcatggctaatgaagatgagttagacaacacctacactgggtcaggggatgaggacgccctatctgaagaggatgatgagttaggcgaagctgctaagtatgaagacgtgaaagaatgtggaaaacatgtagaaagagctctcctagtggaacttaataaaataagtctcaaggaagaaaatgtatgtgaagaaaaaaattcacctgtggatcagtctgattttttttatgaattcagtaaacttatcttcaccaaaggcaagtctcctacggtagtgtgcagcttatgcaaacgagagggtcatctaaagaaggactgtcctgaagacttcaaaagaatccagctagaacctctgccaccattaacacccaagtttttaaatatcttagatcaagtctgtatccagtgttataaggatttttctccaacaattatagaagatcaggctcgtgaacatattcggcaaaacctagaaagtttcataagacaggactttccaggaactaaattgagcctgtttggctcctccaaaaatggatttgggttcaaacagagtgaccttgacgtctgtatgacaattaatggacttgaaactgctgagggattggactgtgtcagaactattgaagaattagcaagagtcctcagaaaacattcaggtctgagaaacatcttacctattacaacagcaaaggtgccaattgtgaagttcttccatttgagaagtggtctggaagtagatatcagtttgtataacacattggcccttcataacacaaggcttttatctgcttattccgccattgatcccagagtgaagtatttgtgctataccatgaaagtatttacaaagatgtgtgatattggtgatgcatctagaggcagcttatcatcgtatgcatatactcttatggtgctatattttctccagcagaggaatccaccagtcattcctgtccttcaagagatatacaaaggtgaaaagaaacctgaaatatttgttgatggctggaatatttatttttttgatcaaatagatgaactgcctacctattggtcagaatgtggaaaaaatacagaatctgttgggcagttatggttgggccttcttcgtttctacacagaggaatttgattttaaagaacatgttattagcatcaggagaaaaagtctgcttacaacttttaagaaacagtggacctcaaaatacattgttattgaagatccctttgatttgaatcataatcttggagctggattatcaaggaaaatgacaaattttataatgaaggcttttatcaatggtagaagagtatttggtattcctgtcaagggatttccaaaggactacccctcaaaaatggaatacttttttgatccagatgtgttaactgaaggagagctggccccaaatgatagatgttgtcgaatttgtggaaaaatcggacacttcatgaaggactgtcctatgaggagaaaagtaagacggcggcgagatcaggaagatgccctgaaccaaagataccctgagaacaaggaaaaaagaagcaaagaggacaaagaaattcacaacaagtacacagaaagggaggtgtcaacaaaagaagataagcccatacagtgcacacctcagaaagccaagccaatgcgggcagctgctgacctggggagggagaagatcctcaggccaccagtagaaaaatggaagagacaggatgacaaagacttaagagaaaaacgttgttttatttgtggaagagaagggcacattaaaaaggaatgcccacagtttaaaggctcttcaggtagcctttccagtaaatatatgactcagggaaaagcctcagcgaagaggacccagcaggaatcatgagggaaggaaaatgcagcactctaaatggccactcaggcgttcctattcactcggaaaattaggttcatttcacaggacacagcagtgtagatcaggcttcaacttaacatttaagggaaatgtcagatttttttttaatttaatgaaattgttaatgaggaaaaatttttaatatagtcttatctaccacacatccccatagatttaaggattttaatagaaagacatgatgtatgtatttaagccacgttaaaagaaaaaatataactatggaccggtattcagtgaatacagtttcatggtttttaattctttcaaagcacattaaaaatggtgtgctgataaaccccaagtaaattaaccctttttccgtataaatccattttttgttttgaagaggggaaattatatttattgttgtttactgaatcctggtgtgaaagcatatcagatatgtatgaactgctactgctgtacttccgatttacggacatcattttattgctatttgtagacgtgataacatgaacatgagtacctatttatgtgggccttcagtggatgggcagtgccactcaggtctctggggtttccctctctaattttaagtaaattgacatataactactatgcttataaaaatgaagtaaggaaaacaagtagtcctgtttgccactaaaaacattttcaaaggaaaaataaaatgaaagtacttttt

SEQ ID NO: 72149 - DNA, 4988 bp, Artificial Sequence
  derived and/or modified sequence
aggtgcaaagtaagaaaattgaagtcaaagaccatgggagatacagcaaaaccttatttcgtgaagcgcactaaagaccgggggactatggatgatgatgacttcagaaggggtcacccccaacaagattatttaataatagatgaccatgctaaaggccatggcagtaaaatggaaaagggccttcaaaaaaagaagataacaccagggaactatgggaatacccccagaaaaggaccatgtgctgtttccagcaatccatatgcatttaaaaacccaatctacagtcaacccgcttggatgaatgacagccacaaagatcagagtaagagatggctgtctgatgaacatactggtaattcagacaactggagagaattcaaacctggacctagaattcctgttataaaccgacaaagaaaagactcctttcaagaaaatgaagatggttataggtggcaagacacaagaggctgcagaactgtaagacgactgtttcataaagacctaacaagcctagaaaccacgtcagaaatggaagcaggaagtcctgaaaacaagaagcagaggtccagacctaggaagccacggaagactagaaatgaggaaaatgagcaggatggagacttggaaggccctgtgatcgatgagtctgtactttcaacgaaggagctgctaggcttacagcaggctgaggagagactgaagagagactgcattgacaggctaaaaaggcgaccacgaaactaccctacagcaaagtacacctgcagactctgtgatgttttaattgaatccattgcatttgcccataagcatatcaaggaaaagaggcacaagaaaaacattaaggagaagcaagaggaagagttgctcactacgttacccccaccaacaccctcccagataaatgcagttggcattgccattgacaaagtggtacaggaatttggcttacacaatgagaacttggaacagaggctggaaattaaacgtatcatggaaaatgtgttccaacacaagttaccagattgttccctaagattatatgggtcatcctgtagcagattgggtttcaaaaattcggatgtaaacattgacatccagtttccagccattatgtctcagccagatgtcctcttacttgttcaagaatgtttaaagaacagtgactcctttattgatgttgatgcagacttccatgctagggtgccagtggtggtgtgcagagaaaagcaaagtggtcttctgtgtaaagtgagcgcaggaaatgaaaatgcttgtctgacaacaaagcatttaactgcccttggaaaactagaaccaaagctggttcctttggtgattgcatttaggtactgggcaaagctttgcagtatagatcgccctgaagaaggaggtctgccaccttatgtgtttgccctgatggccattttctttcttcagcagaggaaagaaccccttttgcctgtatatctaggatcatggattgaaggattctcattaagcaaactagggaatttcaaccttcaagacattgaaaaagatgttgtgatctgggaacatactgacagtgctgcaggggacacaggcataacaaaagaagaggcaccaagagaaacgccgattaaaaggggacaggtgtcattaatattggatgtgaaacaccagccttcagtaccagttgggcagctctgggtggaattgctgcggttctatgctttagaatttaatttggctgatttagtgataagtattcgtgtcaaagaattggtatctcgggaattgaaggattggcccaaaaagcgcattgccattgaagatccctactctgttaaaagaaatgtggcaagaaccctaaatagtcaacctgtgtttgaatatatacttcattgtttaaggacaacatacaagtattttgctcttccacacaaaattacaaaatccagccttctaaagcctctgaatgcaattacatgtatttcagaacattctaaagaagtaataaatcatcatccagatgtacaaacaaaagatgataagctcaaaaactcagttttggcccaaggtcctggtgctaccagttcagctgcaaatacctgtaaggtacagccacttactcttaaagagactgctgaaagttttggaagcccaccaaaagaagaaatgggaaatgaacacatcagtgtccaccctgaaaactcagactgtatccaagcagatgttaactctgatgattacaagggtgataaagtataccatccagaaacaggaaggaaaaacgagaaagagaaagttggaaggaagggcaagcatctgttgactgttgatcagaaacgtggagagcatgttgtctgtggcagcacacgtaataatgagtcagagagcactttggatttagaaggcttccaaaatcccacagctaaagagtgtgagggacttgccactttagataacaaggctgatcttgatggagaaagtacagaaggtactgaggaactagaagactctctaaaccactttacccactcagtacagggccagacatcagaaatgattccctctgatgaagaggaggaggacgacgaagaagaggaggaggaagaagaacctaggctcaccattaaccaaagggaagatgaagatggcatggctaatgaagatgagttagacaacacctacactgggtcaggggatgaggacgccctatctgaagaggatgatgagttaggcgaagctgctaagtatgaagacgtgaaagaatgtggaaaacatgtagaaagagctctcctagtggaacttaataaaataagtctcaaggaagaaaatgtatgtgaagaaaaaaattcacctgtggatcagtctgattttttttatgaattcagtaaacttatcttcaccaaaggcaagtctcctacggtagtgtgcagcttatgcaaacgagagggtcatctaaagaaggactgtcctgaagacttcaaaagaatccagctagaacctctgccaccattaacacccaagtttttaaatatcttagatcaagtctgtatccagtgttataaggatttttctccaacaattatagaagatcaggctcgtgaacatattcggcaaaacctagaaagtttcataagacaggactttccaggaactaaattgagcctgtttggctcctccaaaaatggatttgggttcaaacagagtgaccttgacgtctgtatgacaattaatggacttgaaactgctgagggattggactgtgtcagaactattgaagaattagcaagagtcctcagaaaacattcaggcccttcataacacaaggcttttatctgcttattccgccattgatcccagagtgaagtatttgtgctataccatgaaagtatttacaaagatgtgtgatattggtgatgcatctagaggcagcttatcatcgtatgcatatactcttatggtgctatattttctccagcagaggaatccaccagtcattcctgtccttcaagagatatacaaaggtgaaaagaaacctgaaatatttgttgatggctggaatatttatttttttgatcaaatagatgaactgcctacctattggtcagaatgtggaaaaaatacagaatctgttgggcagttatggttgggccttcttcgtttctacacagaggaatttgattttaaagaacatgttattagcatcaggagaaaaagtctgcttacaacttttaagaaacagtggacctcaaaatacattgttattgaagatccctttgatttgaatcataatcttggagctggattatcaaggaaaatgacaaattttataatgaaggcttttatcaatggtagaagagtatttggtattcctgtcaagggatttccaaaggactacccctcaaaaatggaatacttttttgatccagatgtgttaactgaaggagagctggccccaaatgatagatgttgtcgaatttgtggaaaaatcggacacttcatgaaggactgtcctatgaggagaaaagtaagacggcggcgagatcaggaagatgccctgaaccaaagataccctgagaacaaggaaaaaagaagcaaagaggacaaagaaattcacaacaagtacacagaaagggaggtgtcaacaaaagaagataagcccatacagtgcacacctcagaaagccaagccaatgcgggcagctgctgacctggggagggagaagatcctcaggccaccagtagaaaaatggaagagacaggatgacaaagacttaagagaaaaacgttgttttatttgtggaagagaagggcacattaaaaaggaatgcccacagtttaaaggctcttcaggtagcctttccagtaaatatatgactcagggaaaagcctcagcgaagaggacccagcaggaatcatgagggaaggaaaatgcagcactctaaatggccactcaggcgttcctattcactcggaaaattaggttcatttcacaggacacagcagtgtagatcaggcttcaacttaacatttaagggaaatgtcagatttttttttaatttaatgaaattgttaatgaggaaaaatttttaatatagtcttatctaccacacatccccatagatttaaggattttaatagaaagacatgatgtatgtatttaagccacgttaaaagaaaaaatataactatggaccggtattcagtgaatacagtttcatggtttttaattctttcaaagcacattaaaaatggtgtgctgataaaccccaagtaaattaaccctttttccgtataaatccattttttgttttgaagaggggaaattatatttattgttgtttactgaatcctggtgtgaaagcatatcagatatgtatgaactgctactgctgtacttccgatttacggacatcattttattgctatttgtagacgtgataacatgaacatgagtacctatttatgtgggccttcagtggatgggcagtg

SEQ ID NO: 72150 - DNA, 561 bp, Artificial Sequence
  derived and/or modified sequence
atgcctggcgccaggccgctacccttggtcttagttccacagaatactctggcctggatgcagttagatgctaaggctcctgcacatcctcgccctcttcagctgttaggccgggttggtccaggatccaggcagctagccgacggcgtcaattcaggacagggtctgggcatcgagatcattggtacactgcagctggtcttatgcgtcctcgccactactgatcggcgccgcagggatctcgggggctctgccccactggcaatcggcttgagtgtggccctcggacatctgctggctattgactacacaggctgtgggattaatcccgccagatcttttggatcagcagttattacacacaacttctccaaccactggattttctgggtggggcccttcataggaggcgccctcgcagtgctgatatatgattttatcctggccccccgctctagtgacctgacggatcgagtcaaggtgtggacgtcaggtcaggttgaggaatacgacctcgatgctgacgacatcaacagtagagtagaaatgaaaccaaagtag

SEQ ID NO: 72151 - DNA, 561 bp, Artificial Sequence
  derived and/or modified sequence
atgcctggggcccggcccctgcccctggtgctggtgccccagaacaccctggcctggatgcagctggatgccaaggccccagcccacccccggcccctgcagctgctgggccgggtgggccctggcagccggcagctggctgatggagtgaacagcggccagggcctgggcatcgagatcatcggcaccctgcagctggtgctgtgtgtgctggccaccacagacagaagaagaagagacctgggcggcagcgcccccctggccatcggcctgtctgtggccctgggccacctgctggccatcgactacacaggctgcggcatcaacccagcccggagctttggcagcgctgtgatcacccacaacttcagcaaccactggatcttctgggtgggccccttcatcggcggggccctggccgtgctgatctatgacttcatcctggcccccaggagcagtgacctgacagacagagtgaaggtgtggaccagcggccaggtggaggagtatgacctggatgctgatgacatcaacagccgggtggagatgaagcccaagtag

SEQ ID NO: 72152 - DNA, 561 bp, Artificial Sequence
  derived and/or modified sequence
atgcccggcgcccggcccctgcccctggtgctggtgccccagaacactctggcttggatgcagctggatgcaaaggcacctgctcatccccgacccctacagctgctggggcgcgttggacccgggagcaggcagctggccgatggcgtgaactctggacagggcctggggatcgaaatcatcggtaccctccagctagtcctgtgtgtgcttgccacgaccgaccgcaggcgtcgagacctcggcggctccgcaccgctggctattggcctttccgtcgccctgggacacttattggctattgattatactgggtgtggcataaaccccgcaagatcattcggctcagctgtgatcacacacaacttctctaaccattggatcttttgggtcggaccctttataggtggggccctggccgtgcttatttacgatttcatcctcgcaccacggagctctgatctcacagaccgtgtgaaagtttggacttctggccaggttgaggaatacgacctggatgcagacgacattaattcacgggttgaaatgaaacccaagtag

SEQ ID NO: 72153 - DNA, 561 bp, Artificial Sequence
  derived and/or modified sequence
atgccaggagcccgtcccctgcctctggtgctcgtgccccagaataccctcgcttggatgcaactcgatgcaaaagctccggcacatcccagacccctgcagttactggggagggtggggccaggctctcgtcagctggccgacggggtgaacagcgggcaaggattgggaatcgaaataatcggaactcttcagctggtcctatgcgttctggccacaacagacaggaggcggagggacttggggggatcggctcctctggcaattggtttaagcgtggccctcgggcatttgttggcaatcgactatacagggtgcggtatcaaccctgccagaagtttcggatcggcagttatcacacataatttttctaatcactggattttctgggtgggcccattcatcggaggagctctggctgtcctcatttatgattttattcttgcccctcggtcttccgatctgactgatcgcgtcaaggtttggaccagcggccaggttgaagaatacgatctggatgccgacgacataaactctcgagtcgaaatgaagcccaagtag

SEQ ID NO: 72154 - DNA, 561 bp, Artificial Sequence
  derived and/or modified sequence
atgcccggcgccagacccctgcccctggtgctggtgccccagaacaccctggcctggatgcagctggacgccaaggcccccgcccaccccagacccctgcagctgctgggcagagtgggccccggcagcagacagctggccgacggcgtgaacagcggccagggcctgggcatcgagatcatcggcaccctgcagctggtgctgtgcgtgctggccaccaccgacagaagaagaagagacctgggcggcagcgcccccctggccatcggcctgagcgtggccctgggccacctgctggccatcgactacaccggctgcggcatcaaccccgccagaagcttcggcagcgccgtgatcacccacaacttcagcaaccactggatcttctgggtgggccccttcatcggcggcgccctggccgtgctgatctacgacttcatcctggcccccagaagcagcgacctgaccgacagagtgaaggtgtggaccagcggccaggtggaggagtacgacctggacgccgacgacatcaacagcagagtggagatgaagcccaagtag

SEQ ID NO: 72155 - protein, 218 aa, Artificial Sequence
  derived and/or modified sequence
MFWTFGYEAVSPAGPSHLFASLLLGVLLTITFMPGARPLPLVLVPQNTLAWMQLDAKAPAHPRPLQLLGRVGPGSRQLADGVNSGQGLGIEIIGTLQLVLCVLATTDRRRRDLGGSAPLAIGLSVALGHLLAIDYTGCGINPARSFGSAVITHNFSNHWIFWVGPFIGGALAVLIYDFILAPRSSDLTDRVKVWTSGQVEEYDLDADDINSRVEMKPK

SEQ ID NO: 72156 - protein, 186 aa, Artificial Sequence
  derived and/or modified sequence
MPGARPLPLVLVPQNTLAWMQLDAKAPAHPRPLQLLGRVGPGSRQLADGVNSGQGLGIEIIGTLQLVLCVLATTDRRRRDLGGSAPLAIGLSVALGHLLAIDYTGCGINPARSFGSAVITHNFSNHWIFWVGPFIGGALAVLIYDFILAPRSSDLTDRVKVWTSGQVEEYDLDADDINSRVEMKPK

SEQ ID NO: 72157 - DNA, 657 bp, Artificial Sequence
  derived and/or modified sequence
atgttttggacctttggatatgaggcggtttctccggccggtcctagccacttattcgcttctctattactgggtgtactgttaacgatcacgttcatgccaggggccagacccttgcccctggtgttggtcccacagaacacactggcctggatgcagctagatgcaaaggcacccgcccaccctcgcccactgcaactgctaggacgagtggggccaggttctcggcaacttgccgacggagtgaactctggtcagggcctcggaattgaaatcatcggcacattgcagctggtgctgtgcgtattggcaacgacagacagacgaagacgggacctgggcggctctgctccgctggccataggcctgtctgtagcccttgggcaccttttggctatcgattataccgggtgcggaatcaaccctgcgagatcatttgggagtgctgtgatcacccacaatttttccaaccattggattttttgggtcggaccgttcatcggtggtgcacttgcagttctgatctacgatttcatcctcgccccccgatcaagcgacctgaccgatagggtcaaggtgtggacttctggtcaggtagaggaatacgatttggacgccgatgacatcaacagtagggtggagatgaaaccgaaatag

SEQ ID NO: 72158 - DNA, 657 bp, Artificial Sequence
  derived and/or modified sequence
atgttctggaccttcggctatgaagctgtgtccccagctggccccagccacctgtttgccagcctgctgctgggcgtgctgctgaccatcaccttcatgcctggggcccggcccctgcccctggtgctggtgccccagaacaccctggcctggatgcagctggatgccaaggccccagcccacccccggcccctgcagctgctgggccgggtgggccctggcagccggcagctggctgatggagtgaacagcggccagggcctgggcatcgagatcatcggcaccctgcagctggtgctgtgtgtgctggccaccacagacagaagaagaagagacctgggcggcagcgcccccctggccatcggcctgtctgtggccctgggccacctgctggccatcgactacacaggctgcggcatcaacccagcccggagctttggcagcgctgtgatcacccacaacttcagcaaccactggatcttctgggtgggccccttcatcggcggggccctggccgtgctgatctatgacttcatcctggcccccaggagcagtgacctgacagacagagtgaaggtgtggaccagcggccaggtggaggagtatgacctggatgctgatgacatcaacagccgggtggagatgaagcccaagtag

SEQ ID NO: 72159 - DNA, 657 bp, Artificial Sequence
  derived and/or modified sequence
atgttctggaccttcggctacgaggccgtgagccccgccggcccctcgcatctgttcgcatccttacttctaggggtcctgctgacgattacgttcatgccaggggctcgcccccttcctctagtgctggttccccagaacacactcgcttggatgcagttagatgcaaaggcacctgcccatccacgccccctgcagttattgggtagggtgggtccagggagtcgccaactggccgatggcgtgaactctggacaaggactgggaatcgaaatcataggtaccctgcaacttgtcctctgcgtacttgcgacaacagaccggcggaggagggatctgggtggcagcgcccctctagccattggactaagtgtggcactggggcatctgcttgcgattgactataccggctgtggtatcaatccagctagaagctttgggagcgctgtgattacccacaactttagtaaccattggatcttctgggttgggccttttatagggggggctctggcagtcctcatctatgacttcatcctcgcacccagatcctctgacctcactgacagagtgaaggtctggacttctggtcaagtggaggaatacgacctcgacgctgatgacataaactcacgggtggaaatgaagccaaaatag

SEQ ID NO: 72160 - DNA, 657 bp, Artificial Sequence
  derived and/or modified sequence
atgttttggacgttcggctacgaggctgtctcaccggcaggaccctctcacctgttcgcttccctccttctgggtgtgctgctgactatcacttttatgcctggggctaggcccctgcccttggtgctcgtcccccaaaatacactagcctggatgcagttggatgccaaggcccctgcccatccgagacctctccagcttctggggagagtgggaccgggttctaggcaactcgctgacggcgtaaattcaggtcaaggccttggcatcgagataattggcaccttacagttggtgctgtgcgtccttgcaaccactgataggcgtaggagagatctggggggaagcgctcctctcgctatcggcttgtccgtggccctcgggcacctgcttgcaattgattacaccggctgcggaataaatcctgctagaagttttgggtctgccgttattacccacaatttctctaatcattggattttttgggtggggccattcatcggcggagctctggccgttctgatttatgactttattctcgctccccgatcctccgatctgactgatagagttaaggtctggacttcaggccaggtagaggagtacgacctggatgcagacgacatcaattctagagtggaaatgaagcctaagtag

SEQ ID NO: 72161 - DNA, 1140 bp, Artificial Sequence
  derived and/or modified sequence
gagagggtggagacaatagggaggcaggcacagaggagaaagaggggtggagggagccaggacctcaccgaaggcctcctcagccctggaatttagatgcagtcgggcatggggtggaatgttctggacttttgggtatgaagccgtgtcccctgctgggccttcccacctttttgcatctcttctcctaggagtgctcctgaccatcaccttcatgcctggggctcgccccttgcctctggtcttggtaccccagaataccctggcctggatgcagctggatgcaaaggccccagctcaccccaggcctctccagcttctaggcagagtggggcctgggtctaggcagctggctgatggtgtgaactcgggccagggcctgggcatcgagatcatcgggaccctccagctggtgctatgcgtgctggctactaccgaccggaggcgccgtgaccttggtggctcagccccccttgccatcggcctctctgtagcccttggacacctcctggctattgactacactggctgtgggattaaccctgctcggtcctttggctccgcggtgatcacacacaacttcagcaaccactggattttctgggtggggccattcatcgggggagccctggctgtactcatctacgacttcatcctggccccacgcagcagtgacctcacagaccgcgtgaaggtgtggaccagcggccaggtggaggagtatgacctggatgccgacgacatcaactccagggtggagatgaagcccaaatagaaggggtctggcccgggcatccacgtagggggcaggggcaggggcgggcggagggaggggaggggtgaaatccatactgtagacactctgacaagctggccaaagtcacttccccaagatctgccagacctgcatggtcaagcctcttatgggggtgtttctatctctttctttctctttctgtttcctggcctcagagcttcctggggaccaagatttaccaattcacccactcccttgaagttgtggaggaggtgaaagaaagggacccacctgctagtcgcccctcagagcatgatgggaggtgtgccagaaagtcccccctcgccccaaagttgctcaccgactcacctgcgcaagtgcct

SEQ ID NO: 72162 - DNA, 2487 bp, Artificial Sequence
  derived and/or modified sequence
taaaagtggcccaggagagtgctcctgaccatcaccttcatgcctggggctcgccccttgcctctggtcttggtaccccagaataccctggcctggatgcagctggatgcaaaggccccagctcaccccaggcctctccagcttctaggcagagtggggcctgggtctaggcagctggctgatggtgtgaactcgggccagggcctgggcatcgagatcatcgggaccctccagctggtgctatgcgtgctggctactaccgaccggaggcgccgtgaccttggtggctcagccccccttgccatcggcctctctgtagcccttggacacctcctggctattgactacactggctgtgggattaaccctgctcggtcctttggctccgcggtgatcacacacaacttcagcaaccactggattttctgggtggggccattcatcgggggagccctggctgtactcatctacgacttcatcctggccccacgcagcagtgacctcacagaccgcgtgaaggtgtggaccagcggccaggtggaggagtatgacctggatgccgacgacatcaactccagggtggagatgaagcccaaatagaaggggtctggcccgggcatccacgtagggggcaggggcaggggcgggcggagggaggggaggggtgaaatccatactgtagacactctgacaagctggccaaagtcacttccccaagatctgccagacctgcatggtcaagcctcttatgggggtgtttctatctctttctttctctttctgtttcctggcctcagagcttcctggggaccaagatttaccaattcacccactcccttgaagttgtggaggaggtgaaagaaagggacccacctgctagtcgcccctcagagcatgatgggaggtgtgccagaaagtcccccctcgccccaaagttgctcaccgactcacctgcgcaagtgcctgggattctaccgtaattgctttgtgcctttgggcacggccctccttcttttcctaacatgcaccttgctcccaatggtgcttggagggggaagagatcccaggaggtgcagtggagggggcaagctttgctccttcagttctgcttgctcccaagcccctgacccgctcggacttactgcctgaccttggaatcgtccctatatcagggcctgagtgacctccttctgcaaagtggcagggaccggcagagctctacaggcctgcagcccctaagtgcaaacacagcatgggtccagaagacgtggtctagaccagggctgctctttccacttgccctgtgttctttccccaggggcatgactgtcgccacacgcctctgtgtacatgtgtgcagagcagacaggctacaaagcagagatcgacagacagccaggtagttggaactttctgttccctatggagaggcttccctacacagggcctgctattgcagaatgaagccatttagagggtgaaggagaaatacccatgttacttctctgagttttagttggtctttccatctatcactgcattatcttgctcattcttcagttctctactccctcttgtcagtgtagacacaggtcaccattatgctggtgtatgtttatcaaagagcacttgagctgtctgaagcccaaagcctgaggacagaaagaccctgatgcaggtcagcccatggaggcagatgcccttgctgggcctgggggttttccaagccctcagctggtcctgaccaggatggagcaagctcttcccttgctcatgagctcctgatcagaggcatttgagcagctgaataacctgcacaggcttgctgtatgacccctggccacagccttccctctgcattgacctggaggggagaggtcagccttgacctaatgaggtagctatagttgcagcccaaggacagttcagagatcaggatcagctttgaaggctggattctatctacataagtcctttcaattccaccagggccagagcagctccaccactgtgcacttagccatgatggcaacagaaaccaagagacacaattacgcaggtatttagaagcagagggacaaccagaaggcccttaactatcaccagtgcatcacatctgcacactctcttctccattccctagcaggaacttctagctcatttaacagataaagaaactgaggcccacggtttcagctagacaatgatttggccaggcctagtaaccaaggccctgtctctggctactccctggaccacgaggctgattcctctcatttccagcttctcagtttctgcctgggcaatggccaggggccaggagtggggagagttgtgatggaggggagaggggtcacacccaccccctgcctggttctaggctgctgcacaccaaggccctgcatctgtctgctctgcatatatgtctctttggagttggaatttcattatatgttaagaaaataaaggaaaatgacttgtaaggtc

SEQ ID NO: 72163 - DNA, 657 bp, Artificial Sequence
  derived and/or modified sequence
atgttctggaccttcggctacgaggccgtgagccccgccggccccagccacctgttcgccagcctgctgctgggcgtgctgctgaccatcaccttcatgcccggcgccagacccctgcccctggtgctggtgccccagaacaccctggcctggatgcagctggacgccaaggcccccgcccaccccagacccctgcagctgctgggcagagtgggccccggcagcagacagctggccgacggcgtgaacagcggccagggcctgggcatcgagatcatcggcaccctgcagctggtgctgtgcgtgctggccaccaccgacagaagaagaagagacctgggcggcagcgcccccctggccatcggcctgagcgtggccctgggccacctgctggccatcgactacaccggctgcggcatcaaccccgccagaagcttcggcagcgccgtgatcacccacaacttcagcaaccactggatcttctgggtgggccccttcatcggcggcgccctggccgtgctgatctacgacttcatcctggcccccagaagcagcgacctgaccgacagagtgaaggtgtggaccagcggccaggtggaggagtacgacctggacgccgacgacatcaacagcagagtggagatgaagcccaagtag

SEQ ID NO: 72164 - protein, 154 aa, Artificial Sequence
  derived and/or modified sequence
MQSGMGWNVLDFWLADGVNSGQGLGIEIIGTLQLVLCVLATTDRRRRDLGGSAPLAIGLSVALGHLLAIDYTGCGINPARSFGSAVITHNFSNHWIFWVGPFIGGALAVLIYDFILAPRSSDLTDRVKVWTSGQVEEYDLDADDINSRVEMKPK

SEQ ID NO: 72165 - DNA, 465 bp, Artificial Sequence
  derived and/or modified sequence
atgcagtccggcatgggctggaatgtcctcgacttctggctcgccgatggcgtgaattctgggcagggattgggaatcgagataattggcacactgcagctagtgctctgtgtacttgcaaccactgatcggcgtcgccgcgacctgggagggtctgcccccctggcaattggcctatctgttgctctcggccacttgctggccatcgactacacgggctgtggaattaatcctgctagatcgtttggctctgctgttattacccataatttctcaaatcactggatcttttgggtgggccccttcatcgggggggcccttgcagtcttaatatacgacttcattctggccccacggtcttccgacctcacagaccgagtgaaagtttggacaagcgggcaggtggaagaatatgatttggacgcagacgacatcaacagcagagtcgagatgaaaccgaagtag

SEQ ID NO: 72166 - DNA, 465 bp, Artificial Sequence
  derived and/or modified sequence
atgcagagcggcatgggctggaatgtgctggacttctggctggctgatggagtgaacagcggccagggcctgggcatcgagatcatcggcaccctgcagctggtgctgtgtgtgctggccaccacagacagaagaagaagagacctgggcggcagcgcccccctggccatcggcctgtctgtggccctgggccacctgctggccatcgactacacaggctgcggcatcaacccagcccggagctttggcagcgctgtgatcacccacaacttcagcaaccactggatcttctgggtgggccccttcatcggcggggccctggccgtgctgatctatgacttcatcctggcccccaggagcagtgacctgacagacagagtgaaggtgtggaccagcggccaggtggaggagtatgacctggatgctgatgacatcaacagccgggtggagatgaagcccaagtag

SEQ ID NO: 72167 - DNA, 465 bp, Artificial Sequence
  derived and/or modified sequence
atgcagagcggcatgggctggaacgtgctggacttctggctggccgacggggtgaattcgggtcaaggccttggcattgaaatcatcgggactttacagctcgtgctttgcgtattggctaccactgaccgccgtaggagggacctggggggctcagctcctttagctattgggctatctgtggctcttggccatctcctggccatcgattatacagggtgtgggatcaatcccgctcggagtttcggaagcgctgtcatcacccacaatttttctaaccactggatcttctgggtggggccatttattggtggtgccctggctgtcttaatatatgatttcatcttagcgccacgcagtagcgacctcacggacagagtgaaggtatggacatcaggccaagtggaggagtatgacttggatgccgatgacataaacagccgcgtagaaatgaaacctaaatag

SEQ ID NO: 72168 - DNA, 465 bp, Artificial Sequence
  derived and/or modified sequence
atgcagtccggcatgggatggaatgttcttgatttttggctggccgatggggtgaattctggtcaaggtcttgggattgaaatcattgggaccctgcaactagtcctctgtgtgctcgctaccacagatagacgcaggagggatcttggcggaagtgcgccattagcgattgggctttctgtggccttgggtcatctcctggcaatcgattacactggctgtggaataaacccggctcgcagctttggaagcgcagtgataactcataacttctctaatcattggattttctgggtggggccttttattggcggtgcgctagcggtcttgatctatgatttcatactggcccctaggagttccgaccttacagaccgggtgaaagtctggacatcgggacaggtggaggagtatgaccttgatgcagacgatatcaacagtagggttgaaatgaaaccaaaatag

SEQ ID NO: 72169 - DNA, 1009 bp, Artificial Sequence
  derived and/or modified sequence
aagcaatgggagacaggccttggaccaaggaaagagacggggtggagaaggagagagagagggtggagacaatagggaggcaggcacagaggagaaagaggggtggagggagccaggacctcaccgaaggcctcctcagccctggaatttagatgcagtcgggcatggggtggaatgttctggacttttggctggctgatggtgtgaactcgggccagggcctgggcatcgagatcatcgggaccctccagctggtgctatgcgtgctggctactaccgaccggaggcgccgtgaccttggtggctcagccccccttgccatcggcctctctgtagcccttggacacctcctggctattgactacactggctgtgggattaaccctgctcggtcctttggctccgcggtgatcacacacaacttcagcaaccactggattttctgggtggggccattcatcgggggagccctggctgtactcatctacgacttcatcctggccccacgcagcagtgacctcacagaccgcgtgaaggtgtggaccagcggccaggtggaggagtatgacctggatgccgacgacatcaactccagggtggagatgaagcccaaatagaaggggtctggcccgggcatccacgtagggggcaggggcaggggcgggcggagggaggggaggggtgaaatccatactgtagacactctgacaagctggccaaagtcacttccccaagatctgccagacctgcatggtcaagcctcttatgggggtgtttctatctctttctttctctttctgtttcctggcctcagagcttcctggggaccaagatttaccaattcacccactcccttgaagttgtggaggaggtgaaagaaagggacccacctgctagtcgcccctcagagcatgatgggaggtgtgccagaaagtcccccctcgccccaaagttgctcaccgactcacctgcgcaagtgcctgggattctaccgtaattgctttgtgcc

SEQ ID NO: 72170 - DNA, 465 bp, Artificial Sequence
  derived and/or modified sequence
atgcagagcggcatgggctggaacgtgctggacttctggctggccgacggcgtgaacagcggccagggcctgggcatcgagatcatcggcaccctgcagctggtgctgtgcgtgctggccaccaccgacagaagaagaagagacctgggcggcagcgcccccctggccatcggcctgagcgtggccctgggccacctgctggccatcgactacaccggctgcggcatcaaccccgccagaagcttcggcagcgccgtgatcacccacaacttcagcaaccactggatcttctgggtgggccccttcatcggcggcgccctggccgtgctgatctacgacttcatcctggcccccagaagcagcgacctgaccgacagagtgaaggtgtggaccagcggccaggtggaggagtacgacctggacgccgacgacatcaacagcagagtggagatgaagcccaagtag

SEQ ID NO: 72171 - protein, 168 aa, Artificial Sequence
  derived and/or modified sequence
MEAGSPENKKQRSRPRKPRKTRNEENEQDGDLEGPVIDESVLSTKELLGLQQAEERLKRDCIDRLKRRPRNYPTAKYTCRLCDVLIESIAFAHKHIKEKRHKKNIKEKQEEELLTTLPPPTPSQINAVGIAIDKVVQEFGLHNENLEQRLEIKRIMENVFQHKLPGIF

SEQ ID NO: 72172 - protein, 1259 aa, Artificial Sequence
  derived and/or modified sequence
MGDTAKPYFVKRTKDRGTMDDDDFRRGHPQQDYLIIDDHAKGHGSKMEKGLQKKKITPGNYGNTPRKGPCAVSSNPYAFKNPIYSQPAWMNDSHKDQSKRWLSDEHTGNSDNWREFKPGPRIPVINRQRKDSFQENEDGYRWQDTRGCRTVRRLFHKDLTSLETTSEMEAGSPENKKQRSRPRKPRKTRNEENEQDGDLEGPVIDESVLSTKELLGLQQAEERLKRDCIDRLKRRPRNYPTAKYTCRLCDVLIESIAFAHKHIKEKRHKKNIKEKQEEELLTTLPPPTPSQINAVGIAIDKVVQEFGLHNENLEQRLEIKRIMENVFQHKLPDCSLRLYGSSCSRLGFKNSDVNIDIQFPAIIEGFSLSKLGNFNLQDIEKDVVIWEHTDSAAGDTGITKEEAPRETPIKRGQVSLILDVKHQPSVPVGQLWVELLRFYALEFNLADLVISIRVKELVSRELKDWPKKRIAIEDPYSVKRNVARTLNSQPVFEYILHCLRTTYKYFALPHKITKSSLLKPLNAITCISEHSKEVINHHPDVQTKDDKLKNSVLAQGPGATSSAANTCKVQPLTLKETAESFGSPPKEEMGNEHISVHPENSDCIQADVNSDDYKGDKVYHPETGRKNEKEKVGRKGKHLLTVDQKRGEHVVCGSTRNNESESTLDLEGFQNPTAKECEGLATLDNKADLDGESTEGTEELEDSLNHFTHSVQGQTSEMIPSDEEEEDDEEEEEEEEPRLTINQREDEDGMANEDELDNTYTGSGDEDALSEEDDELGEAAKYEDVKECGKHVERALLVELNKISLKEENVCEEKNSPVDQSDFFYEFSKLIFTKGKGLDCVRTIEELARVLRKHSGLRNILPITTAKVPIVKFFHLRSGLEVDISLYNTLALHNTRLLSAYSAIDPRVKYLCYTMKVFTKMCDIGDASRGSLSSYAYTLMVLYFLQQRNPPVIPVLQEIYKGEKKPEIFVDGWNIYFFDQIDELPTYWSECGKNTESVGQLWLGLLRFYTEEFDFKEHVISIRRKSLLTTFKKQWTSKYIVIEDPFDLNHNLGAGLSRKMTNFIMKAFINGRRVFGIPVKGFPKDYPSKMEYFFDPDVLTEGELAPNDRCCRICGKIGHFMKDCPMRRKVRRRRDQEDALNQRYPENKEKRSKEDKEIHNKYTEREVSTKEDKPIQCTPQKAKPMRAAADLGREKILRPPVEKWKRQDDKDLREKRCFICGREGHIKKECPQFKGSSGSLSSKYMTQGKASAKRTQQES

SEQ ID NO: 72173 - protein, 165 aa, Artificial Sequence
  derived and/or modified sequence
MEAGSPENKKQRSRPRKPRKTRNEENEQDGDLEGPVIDESVLSTKELLGLQQAEERLKRDCIDRLKRRPRNYPTAKYTCRLCDVLIESIAFAHKHIKEKRHKKNIKEKQEEELLTTLPPPTPSQINAVGIAIDKVVQEFGLHNENLEQRLEIKRIMENVFQHKLP

SEQ ID NO: 72174 - DNA, 3780 bp, Artificial Sequence
  derived and/or modified sequence
atgggcgacaccgccaagccctacttcgtgaagagaaccaaggacagaggcaccatggacgacgacgacttcagaagaggccacccccagcaggactacctgatcatcgacgaccacgccaagggccacggcagcaagatggagaagggcctgcagaagaagaagatcacccccggcaactacggcaacacccccagaaagggcccctgcgccgtgagcagcaacccctacgccttcaagaaccccatctacagccagcccgcctggatgaacgacagccacaaggaccagagcaagagatggctgagcgacgagcacaccggcaacagcgacaactggagagagttcaagcccggccccagaatccccgtgatcaacagacagagaaaggacagcttccaggagaacgaggacggctacagatggcaggacaccagaggctgcagaaccgtgagaagactgttccacaaggacctgaccagcctggagaccaccagcgagatggaggccggcagccccgagaacaagaagcagagaagcagacccagaaagcccagaaagaccagaaacgaggagaacgagcaggacggcgacctggagggccccgtgatcgacgagagcgtgctgagcaccaaggagctgctgggcctgcagcaggccgaggagagactgaagagagactgcatcgacagactgaagagaagacccagaaactaccccaccgccaagtacacctgcagactgtgcgacgtgctgatcgagagcatcgccttcgcccacaagcacatcaaggagaagagacacaagaagaacatcaaggagaagcaggaggaggagctgctgaccaccctgcccccccccacccccagccagatcaacgccgtgggcatcgccatcgacaaggtggtgcaggagttcggcctgcacaacgagaacctggagcagagactggagatcaagagaatcatggagaacgtgttccagcacaagctgcccgactgcagcctgagactgtacggcagcagctgcagcagactgggcttcaagaacagcgacgtgaacatcgacatccagttccccgccatcatcgagggcttcagcctgagcaagctgggcaacttcaacctgcaggacatcgagaaggacgtggtgatctgggagcacaccgacagcgccgccggcgacaccggcatcaccaaggaggaggcccccagagagacccccatcaagagaggccaggtgagcctgatcctggacgtgaagcaccagcccagcgtgcccgtgggccagctgtgggtggagctgctgagattctacgccctggagttcaacctggccgacctggtgatcagcatcagagtgaaggagctggtgagcagagagctgaaggactggcccaagaagagaatcgccatcgaggacccctacagcgtgaagagaaacgtggccagaaccctgaacagccagcccgtgttcgagtacatcctgcactgcctgagaaccacctacaagtacttcgccctgccccacaagatcaccaagagcagcctgctgaagcccctgaacgccatcacctgcatcagcgagcacagcaaggaggtgatcaaccaccaccccgacgtgcagaccaaggacgacaagctgaagaacagcgtgctggcccagggccccggcgccaccagcagcgccgccaacacctgcaaggtgcagcccctgaccctgaaggagaccgccgagagcttcggcagcccccccaaggaggagatgggcaacgagcacatcagcgtgcaccccgagaacagcgactgcatccaggccgacgtgaacagcgacgactacaagggcgacaaggtgtaccaccccgagaccggcagaaagaacgagaaggagaaggtgggcagaaagggcaagcacctgctgaccgtggaccagaagagaggcgagcacgtggtgtgcggcagcaccagaaacaacgagagcgagagcaccctggacctggagggcttccagaaccccaccgccaaggagtgcgagggcctggccaccctggacaacaaggccgacctggacggcgagagcaccgagggcaccgaggagctggaggacagcctgaaccacttcacccacagcgtgcagggccagaccagcgagatgatccccagcgacgaggaggaggaggacgacgaggaggaggaggaggaggaggagcccagactgaccatcaaccagagagaggacgaggacggcatggccaacgaggacgagctggacaacacctacaccggcagcggcgacgaggacgccctgagcgaggaggacgacgagctgggcgaggccgccaagtacgaggacgtgaaggagtgcggcaagcacgtggagagagccctgctggtggagctgaacaagatcagcctgaaggaggagaacgtgtgcgaggagaagaacagccccgtggaccagagcgacttcttctacgagttcagcaagctgatcttcaccaagggcaagggcctggactgcgtgagaaccatcgaggagctggccagagtgctgagaaagcacagcggcctgagaaacatcctgcccatcaccaccgccaaggtgcccatcgtgaagttcttccacctgagaagcggcctggaggtggacatcagcctgtacaacaccctggccctgcacaacaccagactgctgagcgcctacagcgccatcgaccccagagtgaagtacctgtgctacaccatgaaggtgttcaccaagatgtgcgacatcggcgacgccagcagaggcagcctgagcagctacgcctacaccctgatggtgctgtacttcctgcagcagagaaacccccccgtgatccccgtgctgcaggagatctacaagggcgagaagaagcccgagatcttcgtggacggctggaacatctacttcttcgaccagatcgacgagctgcccacctactggagcgagtgcggcaagaacaccgagagcgtgggccagctgtggctgggcctgctgagattctacaccgaggagttcgacttcaaggagcacgtgatcagcatcagaagaaagagcctgctgaccaccttcaagaagcagtggaccagcaagtacatcgtgatcgaggaccccttcgacctgaaccacaacctgggcgccggcctgagcagaaagatgaccaacttcatcatgaaggccttcatcaacggcagaagagtgttcggcatccccgtgaagggcttccccaaggactaccccagcaagatggagtacttcttcgaccccgacgtgctgaccgagggcgagctggcccccaacgacagatgctgcagaatctgcggcaagatcggccacttcatgaaggactgccccatgagaagaaaggtgagaagaagaagagaccaggaggacgccctgaaccagagataccccgagaacaaggagaagagaagcaaggaggacaaggagatccacaacaagtacaccgagagagaggtgagcaccaaggaggacaagcccatccagtgcaccccccagaaggccaagcccatgagagccgccgccgacctgggcagagagaagatcctgagaccccccgtggagaagtggaagagacaggacgacaaggacctgagagagaagagatgcttcatctgcggcagagagggccacatcaagaaggagtgcccccagttcaagggcagcagcggcagcctgagcagcaagtacatgacccagggcaaggccagcgccaagagaacccagcaggagagctag

SEQ ID NO: 72175 - DNA, 3780 bp, Artificial Sequence
  derived and/or modified sequence
atgggagacactgccaaaccctatttcgtgaagcggactaaagacaggggaacgatggatgatgatgattttaggagaggacaccctcagcaggactatctgattattgatgatcatgcaaaaggacacggcagtaaaatggaaaagggcctgcagaagaagaagatcacccccggcaactatggaaataccccacgtaaaggcccatgcgctgtgtcatctaatccatacgcattcaagaaccccatctacagccagcccgcctggatgaatgacagccacaaggaccagagtaagagatggctgtcagacgaacatacaggtaactctgacaattggcgtgagtttaagcctggaccgagaattccagtgatcaatagacagcggaaggactccttccaggaaaacgaggatgggtatcgatggcaagataccaggggttgtagaacggtgaggcggcttttccataaagatctgactagcttagagacaaccagcgaaatggaggctgggtccccggagaacaaaaagcagcgttcaaggcctcgcaagccacgaaagacccgaaacgaagagaatgaacaagatggagatctggagggccctgtgatagacgagtcagtccttagtactaaggagctgctgggccttcagcaagcagaagagcgccttaagcgcgactgcatcgaccggttgaagaggcgccccaggaattacccaacggccaagtacacctgccgcctatgtgacgtgctgatcgaatccattgcctttgcacataaacatattaaggaaaagcgacataaaaagaatataaaggaaaagcaggaggaggaactactgaccacactgccccctcctaccccctctcagataaacgccgttggaatcgccatcgataaggtagtgcaggagttcggactgcataacgagaatttagagcagcggctggaaataaagcggataatggaaaacgtattccaacacaaactccccgattgtagcctccggttgtatggctcctcctgcagtcgcctgggcttcaagaattcggacgtcaatattgatatccagtttcccgctatcattgagggcttttcgctctccaaactgggaaactttaacttacaggacatagaaaaagacgtagtgatctgggagcatactgatagtgcagccggcgacactgggataaccaaggaagaggcaccccgggagacgcccattaagcggggacaggtgtcccttatcttagatgtgaaacaccaaccttcagtgccagtagggcaactctgggtggagttgctccgtttttacgcattagagttcaatttagccgacttagtgatctccattcgggtaaaagagttagtgtcccgtgaactgaaggattggcccaagaagcgcatcgccattgaggacccttacagtgttaaaagaaacgtggccagaaccctaaactcgcaaccagtgtttgagtacatactccactgcttgagaactacttataagtatttcgcactgccgcacaagataactaaaagctcactgctgaaaccattgaatgccatcacctgcatatccgagcattctaaggaagtgattaaccatcatcccgatgtgcagactaaggatgacaagctgaagaacagcgtcctcgctcaagggcctggcgcaacctccagtgccgccaatacctgtaaggtccaaccacttactctgaaagaaacagcagagtcctttggatcccccccgaaggaagagatgggcaatgagcatatctctgtgcaccctgagaatagcgactgcatacaggctgatgtcaacagtgacgattacaaaggcgacaaagtttaccatcctgaaactggacgtaaaaacgagaaagaaaaggtcggtaggaaaggtaagcacttgctcacagtagatcagaaaaggggcgagcacgtggtttgcggatccacacgcaataacgagtctgaaagcacactcgaccttgaggggtttcaaaatcctacagcaaaggagtgcgagggcctggcgactctggacaataaagcagacctcgacggagagtcaaccgaaggaaccgaggagctggaggattctctgaaccacttcactcactccgtgcagggccagacatccgagatgatcccttctgatgaggaggaggaagacgacgaggaggaggaagaggaggaggagccacgacttaccatcaatcaacgcgaagatgaggacggaatggccaacgaagacgagcttgataacacttacaccgggtcaggggacgaagatgccctgtccgaagaagacgacgaactgggggaggccgctaagtacgaggacgtgaaggaatgtggaaaacacgtggagcgcgcactgctcgtagagctcaataagatctcgctaaaggaagagaatgtttgcgaggagaagaatagcccggtggaccaatctgacttcttctacgagttcagcaaactgatctttactaaggggaaaggactggactgcgtaaggacaatcgaagagttggccagggtactgagaaaacacagcgggttgcggaacatattgccgatcactaccgcaaaggtacctattgtgaaattttttcatctgcgcagtggactggaggtggatatttccctctacaataccctggccctccataacacacgcctgctgtctgcatactcagccattgaccctcgagttaaatatctatgctataccatgaaggttttcaccaaaatgtgtgacatcggggacgcatctcggggatcactatcttcttacgcctataccttgatggttttgtattttctccagcagagaaaccctccggtcattccggtgttgcaggagatctacaaaggagaaaaaaagccagagatttttgtggacgggtggaatatctactttttcgaccagatagacgaactccctacttattggagcgagtgcggcaaaaacaccgagtccgtggggcagctctggctaggcttgctgcgtttctatacagaagaattcgacttcaaggaacacgtaatctctatcagaagaaagagcctactgacgacattcaaaaagcagtggacttcaaaatacatagtaatagaggacccatttgacttgaaccacaacttaggggctgggctgtccagaaaaatgaccaactttatcatgaaagcctttattaacggccggcgtgtttttggaattcccgttaagggctttcctaaagattaccccagcaaaatggagtacttctttgatccagatgtcctgacagagggcgagctcgcgccaaatgacagatgttgtaggatttgtggaaagataggccatttcatgaaggactgtccaatgcgaagaaaggtgagaagaagacgggatcaagaagatgcactgaatcagcgataccccgagaacaaggagaagagatctaaagaagataaagaaattcataataagtacactgaaagagaggtttcaacaaaagaggacaagcctatccagtgcacgcctcagaaggcgaagcctatgcgtgcggctgctgatctgggccgggaaaaaatcttgcggcctcccgtggaaaagtggaagcggcaggatgacaaagacctacgggaaaaaagatgcttcatctgcggacgcgaagggcacattaagaaagagtgcccccagttcaaagggagttcaggttctttgtccagcaagtacatgacccagggcaaggcaagcgcgaagagaacgcagcaggagtcctag

SEQ ID NO: 72176 - DNA, 3780 bp, Artificial Sequence
  derived and/or modified sequence
atgggagacacagccaagccctactttgtgaagaggaccaaggaccggggcaccatggatgatgatgacttcagaagaggccacccccagcaggactacctgatcattgatgaccacgccaagggccacggcagcaagatggagaagggcctgcagaagaagaagatcaccccaggcaactacggcaacacccccaggaagggcccctgtgctgtgagcagcaacccctatgccttcaagaaccccatctacagccagcctgcctggatgaatgacagccacaaggaccagagcaagcgctggctgagtgatgagcacactggaaacagcgacaactggagggagttcaagccaggcccccgcatccctgtgatcaaccggcagaggaaggacagcttccaggagaatgaagatggctaccgctggcaggacacccggggctgcaggacagtgcggcggctcttccacaaggacctgaccagcctggagaccaccagcgagatggaggccggcagccctgagaacaagaagcagaggagccggcccaggaagcccaggaagaccagaaatgaggagaatgagcaggatggagacctggagggccctgtgattgatgaatctgtgctgagcaccaaggagctgctgggcctgcagcaggccgaggagcggctgaagagggactgcatcgaccggctgaagaggcggcccaggaactaccccacagccaagtacacctgccgcctgtgtgatgtgctgattgagagcatcgcctttgcccacaagcacatcaaggagaagaggcacaagaagaacatcaaggagaagcaggaggaggagctgctgaccaccctgcccccacccacccccagccagatcaatgctgtgggcatcgccatcgacaaggtggtgcaggagtttggcctgcacaatgaaaacctggagcagaggctggagatcaagaggatcatggagaatgtgttccagcacaagctgcctgactgcagcctgcggctgtatggcagcagctgcagccggctgggcttcaagaacagtgatgtgaacatcgacatccagtttcctgccatcatcgagggcttcagcctgagcaagctgggcaacttcaacctgcaggacatcgagaaggatgtggtgatctgggagcacacagattctgctgctggggacaccggcatcaccaaggaggaggccccccgggagacccccatcaagaggggccaggtgtccctcatcctggatgtgaagcaccagcccagcgtgcctgtgggccagctgtgggtggagctgctgcgcttctacgccctggagttcaacctggccgacctggtgatcagcatccgggtgaaggagctggtgtcccgggagctgaaggactggcccaagaagagaattgccatcgaggacccctacagcgtgaagagaaatgtggcccggaccctgaacagccagcctgtgtttgagtacatcctgcactgcctgcggaccacctacaagtactttgccctgccccacaagatcaccaagagcagcctgctgaagcccctgaatgccatcacctgcatcagcgagcacagcaaggaggtgatcaaccaccacccagatgtgcagaccaaggatgacaagctgaagaacagcgtgctggcccagggccctggggccaccagcagcgctgccaacacctgcaaggtgcagcccctgaccctgaaggagacagctgagagctttggcagcccccccaaggaggagatgggaaatgagcacatctctgtgcacccagaaaattctgactgcatccaggctgatgtgaacagtgatgactacaagggggacaaggtgtaccaccctgagactggaaggaagaatgagaaggagaaggtgggcaggaagggcaagcacctgctgactgtggaccagaagagaggagaacatgtggtgtgtggcagcaccaggaacaatgaaagtgagagcaccctggacctggagggcttccagaaccccacagccaaggaatgtgagggcctggccaccctggacaacaaggctgacctggatggagagagcacagagggcacagaggagctggaggacagcctgaaccacttcacccacagcgtgcagggccagaccagcgagatgatccccagtgatgaggaggaggaggatgatgaggaggaggaggaggaggaggagccccggctgaccatcaaccagagagaagatgaagatggcatggccaatgaagatgagctggacaacacctacacaggcagcggagatgaagatgccctgtctgaggaggatgatgagctgggggaggccgccaagtatgaagatgtgaaggaatgtgggaagcacgtggagcgggccctgctggtggagctgaacaagatcagcctgaaggaggagaatgtgtgtgaggagaagaacagccctgtggaccagagcgacttcttctatgagttcagcaagctgatcttcaccaagggcaagggcctggactgtgtgaggaccatcgaggagctggcccgggtgctgaggaagcacagcggcctgaggaacatcctgcccatcaccacagccaaggtgcccatcgtgaagttcttccacctgcggagcggcctggaggtggacatcagcctgtacaacaccctggccctgcacaacacccggctgctgagcgcctacagcgccatcgacccccgggtgaagtacctgtgctacaccatgaaggtgttcaccaagatgtgtgacattggagatgccagccggggcagcctgagcagctatgcctacaccctgatggtgctgtacttcctgcagcagaggaacccccctgtgattcctgtgctgcaggagatctacaagggggagaagaagccagagatctttgtggatggctggaacatctacttctttgaccagattgatgagctgcccacctactggagcgaatgtgggaagaacacagaatctgtgggccagctgtggctgggcctgctgcgcttctacacagaggagtttgacttcaaggagcacgtgatcagcatccggaggaagagcctgctgaccaccttcaagaagcagtggaccagcaagtacatcgtgattgaggacccctttgacctgaaccacaacctgggcgccggcctgagcaggaagatgaccaacttcatcatgaaggccttcatcaatggccggcgggtgtttggcatccctgtgaagggcttccccaaggactaccccagcaagatggagtacttctttgatcctgatgtgctgacagaaggagagctggccccaaatgaccgctgctgccgcatctgtgggaagattggccacttcatgaaggactgccccatgaggaggaaggtgagaagaagaagagaccaggaggatgccctgaaccagcgctacccagagaacaaggagaagaggagcaaggaggacaaggagatccacaacaagtacacagagcgggaggtgtccaccaaggaggacaagcccatccagtgcaccccccagaaggccaagcccatgagagctgctgctgacctgggccgggagaagatcctgcggccccctgtggagaagtggaagaggcaggatgacaaggacctgcgggagaagcgctgcttcatctgtggccgggagggccacatcaagaaggaatgtccccagttcaagggcagcagcggcagcctgagcagcaagtacatgacccagggcaaggccagcgccaagaggacccagcaggagagctag

SEQ ID NO: 72177 - DNA, 3780 bp, Artificial Sequence
  derived and/or modified sequence
atgggcgacaccgccaagccctacttcgtgaagcggaccaaggacagaggaacaatggatgatgatgattttagaagggggcatccacagcaggactacctgattatcgacgaccacgcgaagggacatggaagcaaaatggagaaaggcttacaaaaaaagaagattacgccgggaaactatggcaataccccacggaaaggcccatgcgcagtgtctagcaacccctatgctttcaaaaaccccatctattctcagccggcctggatgaacgattcccataaggaccagtctaaacgctggttgagcgatgagcacaccgggaactctgataattggagagagtttaagcccggaccacgaatcccagtaatcaaccgccaaaggaaagatagttttcaggagaacgaagatggctaccgctggcaggacaccaggggctgccggacagtcaggaggttattccacaaagatctcaccagtctggaaacgacttcagagatggaggcgggctcccctgagaacaagaagcagcgaagccggccacgcaaaccacgcaaaacaaggaatgaggagaacgagcaggacggcgatctcgaaggccccgtcatcgacgaatccgtcctgagcaccaaagagctactgggactacagcaggctgaggagcgtctgaaacgggattgtattgatcgccttaaaagacgccctaggaactacccgaccgctaaatatacatgtaggctgtgtgacgtgttaatagaatctatcgccttcgcccacaagcacattaaagagaaacggcacaagaaaaacataaaggagaagcaggaagaggagctcttaaccacattgccacctcctactccctcccagattaacgctgttggaatcgcaattgataaggtggtccaagagttcggcctgcacaacgaaaacttagaacagagactggaaatcaagcgtatcatggagaacgtgttccagcacaagctgcctgactgttctctcagattatacggttctagctgttcccggctgggcttcaaaaattctgatgtgaacattgacatccagtttccggccatcattgaagggtttagcttaagtaagttggggaatttcaacctgcaggatatcgagaaggacgtggtcatttgggagcatactgattccgccgccggtgatactggtatcactaaagaggaagcgccgcgtgaaacaccgatcaaacgtggacaagtgagccttattctggacgttaagcaccagccttctgttcctgtcggccagctttgggtggaactgttgaggttttacgcactggagttcaacctggcagacctagtcatcagcataagagtgaaagagctggtgtcccgcgaactaaaggactggccgaaaaagcgcatcgcaatcgaagacccgtattcagtgaagaggaatgtggctcggacattgaacagccagccagtttttgaatacatcctgcattgtctaaggactacctataagtattttgctctgccacacaagataaccaagtcttccttgcttaagcccttgaatgcaattacttgcatctcagaacatagcaaggaggtgataaatcatcacccagatgtgcagaccaaggatgataaactgaaaaacagtgtactggcacaggggcctggtgcaacaagcagtgccgccaacacatgtaaggttcagcctctaactctgaaggagacggcggaaagctttggtagcccccctaaagaagagatggggaatgaacacatctcggtacacccagagaacagcgattgcattcaggcagacgtgaacagcgacgactacaagggagacaaggtataccaccctgagacgggcaggaaaaacgagaaggaaaaagtaggccgcaaagggaagcacctcttgacagtggaccaaaagagaggcgaacatgtggtttgcggatccacacggaataatgaaagtgaatccaccctggatctggaaggatttcagaaccccacagcaaaggagtgcgaggggcttgccacgctcgacaacaaggccgacctcgatggagaatcaaccgagggcactgaagaactcgaggatagccttaaccacttcacacacagcgtgcaggggcagacctctgagatgattcccagcgacgaggaagaggaagacgacgaagaggaagaagaggaggaggaaccgaggttaacaatcaatcaaagagaagatgaggatggaatggcgaacgaagatgagttggataatacatacaccggatcaggagacgaggacgccctctctgaggaagacgatgaactgggagaggccgccaaatacgaggacgtcaaagagtgcggaaaacacgtagaaagggctttgctggtggagttgaataagatctcactgaaggaggaaaatgtctgtgaagagaaaaacagtcccgtggatcagagcgacttcttttatgaattcagtaagttgattttcactaaaggtaagggcctggattgcgtgcgcaccattgaggagcttgcccgcgtgctgaggaaacactctgggcttagaaatatcctgccaatcaccacagctaaagtgccaatcgtaaaattctttcatctgagaagcggtttggaggtcgatattagtctgtacaacacattagcgcttcacaacacaaggctgctcagtgcatactcagccatagatccccgggttaaatacctgtgttacactatgaaggtgttcactaaaatgtgcgacattggcgacgccagccgcggcagcctttcgtcctacgcatataccctcatggttctgtactttttacagcagcgcaacccaccggtcattcctgtgctgcaggaaatttacaaaggtgaaaagaaaccagagatttttgtcgatggctggaacatctatttcttcgatcaaattgatgagttacccacctattggagtgagtgtgggaagaacaccgaaagcgtcgggcagctgtggctgggactgctaaggttctacaccgaggagttcgatttcaaggagcacgtgatttcgattagacgtaaatcgttgctgacaaccttcaaaaaacagtggactagcaagtatattgtgattgaggacccatttgatctgaaccacaatctcggcgctggcctctctagaaagatgactaacttcatcatgaaggcatttattaacgggcgacgggtgttcgggatcccagtaaaaggctttcccaaggactacccatccaaaatggaatacttcttcgatcctgatgtgctcaccgaaggcgagctggcgcccaatgaccgttgctgcagaatatgcggcaagatcggccatttcatgaaggactgccctatgagacggaaagttcgaagaaggagggatcaggaggatgctctaaatcagcgatatcccgagaacaaagagaagcgatcaaaagaggacaaagaaattcataataaatacactgagcgcgaggtcagtacaaaggaggacaagcccatccagtgtactccacaaaaggctaagccgatgcgggccgctgccgatctgggacgagagaagattctccgaccccccgtggagaagtggaagcgccaagatgacaaagatctgcgagaaaaacgctgtttcatctgcggcagagagggccacatcaagaaagagtgcccccagttcaagggcagcagcggctcactgtctagcaagtacatgacacagggcaaggcttccgctaagaggacccaacaggaatcatag

SEQ ID NO: 72178 - DNA, 3780 bp, Artificial Sequence
  derived and/or modified sequence
atgggagataccgcgaaaccgtatttcgtgaagcgaacaaaggatcgcggaacgatggacgacgacgattttagaaggggtcaccctcagcaggattatctcatcatagatgaccatgccaagggacacggaagcaaaatggagaagggcctccagaagaagaagattactcccggtaactatggcaatacgcccaggaagggtccctgcgctgtctcaagtaacccctatgcctttaagaatccaatatactctcaaccagcctggatgaacgacagtcacaaggaccagtcaaagagatggctaagtgatgaacacaccggaaacagcgacaactggagagaattcaagccaggtccaaggatacctgtcatcaaccgtcagcgcaaagacagcttccaggagaatgaggacggatacagatggcaggacacccgagggtgtcggacagttagaagactgtttcacaaagatttgacctcactcgaaaccaccagtgagatggaagcgggaagtccggaaaataagaagcagcgcagccgccctagaaagccacgaaagactagaaatgaggagaatgaacaggatggagatctcgagggcccagtgattgacgaatccgttctgtccactaaagagctgcttgggctgcagcaggcagaggagcggcttaagagggattgcatcgatcggctgaaacgcaggcccaggaattaccccactgccaagtatacatgtcgcttatgtgacgttctgattgaatctatcgcttttgcccacaagcacattaaagagaagagacacaaaaaaaacatcaaggagaaacaggaggaggaattgttaacaacgctccccccaccgactccttcacagattaatgctgtggggattgcgatcgacaaagttgttcaggagtttggccttcataatgaaaacctggagcaaagactggagattaaacgaatcatggaaaacgttttccaacacaagttgcctgattgctctctacggctttatggatcctcttgttcacggctcggctttaagaacagcgatgttaatatagacatacagtttccggcaatcattgagggcttctccctatccaagctggggaattttaacctacaggatattgagaaagacgttgtaatctgggagcataccgactccgccgcaggggataccggtattactaaggaggaggctccccgagaaactcccatcaagcggggacaggtgagcctgatcctcgacgtgaagcaccagccttcggttccggtcggtcagctctgggtcgagttactccgcttctatgccctggaatttaaccttgcagacttggtcatctcaattagagtgaaagaactggtgtcccgggaactgaaggattggcctaagaaaagaatagcaatcgaggacccctacagtgtgaagcgtaatgtagctcgcacactcaatagccagccagtatttgagtatattcttcactgcctgcggacgacatacaaatatttcgcactgccccacaagatcactaagagctcccttctgaagcctctgaatgctatcacctgcatatcagagcatagtaaggaggtgatcaatcaccaccccgatgtgcagacaaaggacgataagctgaagaatagcgtgctcgcccagggccctggagctaccagtagcgctgccaatacctgcaaagtgcaacctctgactttgaaggagactgcagaatcttttgggtcaccccctaaggaagaaatgggcaacgaacacattagtgtgcatccagagaattcggactgtatccaagcggatgtcaattctgatgactacaaaggcgacaaagtgtaccaccccgaaaccggcagaaagaatgagaaggagaaggtcggcaggaaagggaaacatcttctgacagtcgaccagaaaagaggtgagcatgtcgtgtgcggatctacacgaaataacgagtccgagagcactctggacctggaagggtttcaaaaccctactgcgaaagagtgcgagggccttgccactctagacaacaaagcggacctggatggcgaaagtaccgaggggaccgaagaactggaggacagcctgaaccattttactcactctgtacaggggcaaacatccgagatgatccccagtgacgaagaggaagaggacgacgaggaggaggaggaagaagaggagcctagattgaccattaaccagagagaagatgaagacggaatggcaaatgaagatgaactagacaacacctataccgggagcggcgatgaagacgctctatccgaggaggacgatgagttaggcgaagctgccaagtacgaggacgttaaggagtgtggcaaacacgtcgaacgcgctctccttgtcgagctcaacaaaatcagtctgaaggaggagaatgtctgtgaggaaaaaaacagccctgtcgaccagtcagacttcttttatgaattctccaagctgatatttaccaagggtaaaggactcgactgcgtacgtaccatcgaggagctcgctcgtgttttaagaaaacactcggggcttcggaacatacttcccataacaactgccaaggttccgattgtgaagtttttccatctcaggagtggactcgaggtcgacataagtttatataacaccctcgcactgcacaacacgagactgctcagtgcatattcagccatcgacccccgagtcaaatatctctgttacaccatgaaagtgttcactaagatgtgcgacatcggcgacgctagccggggatcgctcagcagctatgcatacactctgatggtcctgtactttttacagcagcgtaatcctccagtgatccccgtactgcaggagatctacaaaggggagaagaaacctgagatcttcgtggatgggtggaacatctattttttcgatcagattgatgagcttccaacatattggtccgagtgcggcaaaaacaccgagtctgtcggccagctttggctcggcctgctccgcttttacacagaagagttcgactttaaagagcacgtaatttcgattcgcagaaagtccctgcttactacatttaaaaaacagtggacaagtaagtacatagttatcgaggacccgttcgacctcaatcacaacctgggcgcaggtctttctcggaagatgacaaactttattatgaaggcctttatcaatgggcgtcgggtgtttgggataccagtcaaggggtttccaaaggattatccaagcaagatggagtactttttcgaccctgacgtgctgaccgagggtgagctcgcccctaatgacagatgttgcagaatctgtggaaagatcggtcattttatgaaggactgtcccatgcggaggaaagttcggcgtaggagggaccaggaggatgcattgaaccagaggtaccctgagaacaaggagaaacgaagcaaggaggacaaagaaattcacaataagtataccgagagagaagtgtcaaccaaagaggacaaacctatacagtgcactccacaaaaagccaaaccaatgcgcgcagcggcagatttaggcagggagaagatccttaggccaccagtggagaagtggaaaagacaagatgataaagatctgagagagaagaggtgttttatctgcggaagagaaggacacatcaagaaggaatgtcctcagttcaagggtagtagtggctcactgtcctccaagtacatgacgcagggtaaggcatccgctaagcgtacacagcaagagtcttag

SEQ ID NO: 72179 - DNA, 4939 bp, Artificial Sequence
  derived and/or modified sequence
aagtggggccgaaggaaaacacggagagggagcccggccgggacaggaagaggctggggaccgcggcgaaggtggtgagtgctcttgggcgccttctcccaacgtccctgccagactcgcctccgggctgattctccagttggtttcctggactccagagtagctgtccggcctggccccggaggtgcaaagtaagaaaattgaagtcaaagaccatgggagatacagcaaaaccttatttcgtgaagcgcactaaagaccgggggactatggatgatgatgacttcagaaggggtcacccccaacaagattatttaataatagatgaccatgctaaaggccatggcagtaaaatggaaaagggccttcaaaaaaagaagataacaccagggaactatgggaatacccccagaaaaggaccatgtgctgtttccagcaatccatatgcatttaaaaacccaatctacagtcaacccgcttggatgaatgacagccacaaagatcagagtaagagatggctgtctgatgaacatactggtaattcagacaactggagagaattcaaacctggacctagaattcctgttataaaccgacaaagaaaagactcctttcaagaaaatgaagatggttataggtggcaagacacaagaggctgcagaactgtaagacgactgtttcataaagacctaacaagcctagaaaccacgtcagaaatggaagcaggaagtcctgaaaacaagaagcagaggtccagacctaggaagccacggaagactagaaatgaggaaaatgagcaggatggagacttggaaggccctgtgatcgatgagtctgtactttcaacgaaggagctgctaggcttacagcaggctgaggagagactgaagagagactgcattgacaggctaaaaaggcgaccacgaaactaccctacagcaaagtacacctgcagactctgtgatgttttaattgaatccattgcatttgcccataagcatatcaaggaaaagaggcacaagaaaaacattaaggagaagcaagaggaagagttgctcactacgttacccccaccaacaccctcccagataaatgcagttggcattgccattgacaaagtggtacaggaatttggcttacacaatgagaacttggaacagaggctggaaattaaacgtatcatggaaaatgtgttccaacacaagttaccagattgttccctaagattatatgggtcatcctgtagcagattgggtttcaaaaattcggatgtaaacattgacatccagtttccagccattattgaaggattctcattaagcaaactagggaatttcaaccttcaagacattgaaaaagatgttgtgatctgggaacatactgacagtgctgcaggggacacaggcataacaaaagaagaggcaccaagagaaacgccgattaaaaggggacaggtgtcattaatattggatgtgaaacaccagccttcagtaccagttgggcagctctgggtggaattgctgcggttctatgctttagaatttaatttggctgatttagtgataagtattcgtgtcaaagaattggtatctcgggaattgaaggattggcccaaaaagcgcattgccattgaagatccctactctgttaaaagaaatgtggcaagaaccctaaatagtcaacctgtgtttgaatatatacttcattgtttaaggacaacatacaagtattttgctcttccacacaaaattacaaaatccagccttctaaagcctctgaatgcaattacatgtatttcagaacattctaaagaagtaataaatcatcatccagatgtacaaacaaaagatgataagctcaaaaactcagttttggcccaaggtcctggtgctaccagttcagctgcaaatacctgtaaggtacagccacttactcttaaagagactgctgaaagttttggaagcccaccaaaagaagaaatgggaaatgaacacatcagtgtccaccctgaaaactcagactgtatccaagcagatgttaactctgatgattacaagggtgataaagtataccatccagaaacaggaaggaaaaacgagaaagagaaagttggaaggaagggcaagcatctgttgactgttgatcagaaacgtggagagcatgttgtctgtggcagcacacgtaataatgagtcagagagcactttggatttagaaggcttccaaaatcccacagctaaagagtgtgagggacttgccactttagataacaaggctgatcttgatggagaaagtacagaaggtactgaggaactagaagactctctaaaccactttacccactcagtacagggccagacatcagaaatgattccctctgatgaagaggaggaggacgacgaagaagaggaggaggaagaagaacctaggctcaccattaaccaaagggaagatgaagatggcatggctaatgaagatgagttagacaacacctacactgggtcaggggatgaggacgccctatctgaagaggatgatgagttaggcgaagctgctaagtatgaagacgtgaaagaatgtggaaaacatgtagaaagagctctcctagtggaacttaataaaataagtctcaaggaagaaaatgtatgtgaagaaaaaaattcacctgtggatcagtctgattttttttatgaattcagtaaacttatcttcaccaaaggcaagggattggactgtgtcagaactattgaagaattagcaagagtcctcagaaaacattcaggtctgagaaacatcttacctattacaacagcaaaggtgccaattgtgaagttcttccatttgagaagtggtctggaagtagatatcagtttgtataacacattggcccttcataacacaaggcttttatctgcttattccgccattgatcccagagtgaagtatttgtgctataccatgaaagtatttacaaagatgtgtgatattggtgatgcatctagaggcagcttatcatcgtatgcatatactcttatggtgctatattttctccagcagaggaatccaccagtcattcctgtccttcaagagatatacaaaggtgaaaagaaacctgaaatatttgttgatggctggaatatttatttttttgatcaaatagatgaactgcctacctattggtcagaatgtggaaaaaatacagaatctgttgggcagttatggttgggccttcttcgtttctacacagaggaatttgattttaaagaacatgttattagcatcaggagaaaaagtctgcttacaacttttaagaaacagtggacctcaaaatacattgttattgaagatccctttgatttgaatcataatcttggagctggattatcaaggaaaatgacaaattttataatgaaggcttttatcaatggtagaagagtatttggtattcctgtcaagggatttccaaaggactacccctcaaaaatggaatacttttttgatccagatgtgttaactgaaggagagctggccccaaatgatagatgttgtcgaatttgtggaaaaatcggacacttcatgaaggactgtcctatgaggagaaaagtaagacggcggcgagatcaggaagatgccctgaaccaaagataccctgagaacaaggaaaaaagaagcaaagaggacaaagaaattcacaacaagtacacagaaagggaggtgtcaacaaaagaagataagcccatacagtgcacacctcagaaagccaagccaatgcgggcagctgctgacctggggagggagaagatcctcaggccaccagtagaaaaatggaagagacaggatgacaaagacttaagagaaaaacgttgttttatttgtggaagagaagggcacattaaaaaggaatgcccacagtttaaaggctcttcaggtagcctttccagtaaatatatgactcagggaaaagcctcagcgaagaggacccagcaggaatcatgagggaaggaaaatgcagcactctaaatggccactcaggcgttcctattcactcggaaaattaggttcatttcacaggacacagcagtgtagatcaggcttcaacttaacatttaagggaaatgtcagatttttttttaatttaatgaaattgttaatgaggaaaaatttttaatatagtcttatctaccacacatccccatagatttaaggattttaatagaaagacatgatgtatgtatttaagccacgttaaaagaaaaaatataactatggaccggtattcagtgaatacagtttcatggtttttaattctttcaaagcacattaaaaatggtgtgctgataaaccccaagtaaattaaccctttttccgtataaatccattttttgttttgaagaggggaaattatatttattgttgtttactgaatcctggtgtgaaagcatatcagatatgtatgaactgctactgctgtacttccgatttacggacatcattttattgctatttgtagacgtgataacatgaacatgagtacctatttatgtgggccttcagtggatgggcagtgccactcaggtctctggggtttccctctctaattttaagtaaattgacatataactactatgcttataaaaatgaagtaaggaaaacaagtagtcctgtttgccactaaaaacattttcaaaggaaaaataaaatgaaagtactttttactttttatgatactcagaaattaggatgaagaacttttaaaattgctgaagatcaaagaggttatctctgccagtcacaagtgtggctggtgtcattctgggtctgactggagccctcctggactgtttctttaatttcaaaagccctgcagacatagtacctggtcagaactatgcctcggtttatttatcattttgaaataaaatcagaatttcaacctgtaa

SEQ ID NO: 72180 - protein, 537 aa, Artificial Sequence
  derived and/or modified sequence
MEELVVEVRGSNGAFYKAFVKDVHEDSITVAFENNWQPDRQIPFHDVRFPPPVGYNKDINESDEVEVYSRANEKEPCCWWLAKVRMIKGEFYVIEYAACDATYNEIVTIERLRSVNPNKPATKDTFHKIKLDVPEDLRQMCAKEAAHKDFKKAVGAFSVTYDPENYQLVILSINEVTSKRAHMLIDMHFRSLRTKLSLIMRNEEASKQLESSRQLASRFHEQFIVREDLMGLAIGTHGANIQQARKVPGVTAIDLDEDTCTFHIYGEDQDAVKKARSFLEFAEDVIQVPRNLVGKVIGKNGKLIQEIVDKSGVVRVRIEAENEKNVPQEEEIMPPNSLPSNNSRVGPNAPEEKKHLDIKENSTHFSQPNSTKVQRVLVASSVVAGESQKPELKAWQGMVPFVFVGTKDSIANATVLLDYHLNYLKLQQRKRGRASCAEETDGGVEGEEEDKEEEDVEEASKETTITPEQIIVHVIQERLKEEQQMDPFRSELTAIMKGVSTLKHYRIPPVKVVGCARVKIVTRRKRSQTAWMVSNHS

SEQ ID NO: 72181 - DNA, 4125 bp, Artificial Sequence
  derived and/or modified sequence
acttccggtggagggccgcctctgagcgggcggcgggccgacggcgagcgcgggcggcggcggtgacggaggcgccgctgccagggggcgtgcggcagcgcggcggcggcggcggcggcggcggcggcggaggcggcggcggcggcggcggcggcggcggctgggcctcgagcgcccgcagcccacctctcgggggcgggctcccggcgctagcagggctgaagagaagatggaggagctggtggtggaagtgcggggctccaatggcgctttctacaaggcatttgtaaaggatgttcatgaagattcaataacagttgcatttgaaaacaactggcagcctgataggcagattccatttcatgatgtcagattcccacctcctgtaggttataataaagatataaatgaaagtgatgaagttgaggtgtattccagagcaaatgaaaaagagccttgctgttggtggttagctaaagtgaggatgataaagggtgagttttatgtgatagaatatgcagcatgtgatgcaacttacaatgaaattgtcacaattgaacgtctaagatctgttaatcccaacaaacctgccacaaaagatactttccataagatcaagctggatgtgccagaagacttacggcaaatgtgtgccaaagaggcggcacataaggattttaaaaaggcagttggtgccttttctgtaacttatgatccagaaaattatcagcttgtcattttgtccatcaatgaagtcacctcaaagcgagcacatatgctgattgacatgcactttcggagtctgcgcactaagttgtctctgataatgagaaatgaagaagctagtaagcagctggagagttcaaggcagcttgcctcgagatttcatgaacagtttatcgtaagagaagatctgatgggtctagctattggtactcatggtgctaatattcagcaagctagaaaagtacctggggtcactgctattgatctagatgaagatacctgcacatttcatatttatggagaggatcaggatgcagtgaaaaaagctagaagctttctcgaatttgctgaagatgtaatacaagttccaaggaacttagtaggcaaagtaataggaaaaaatggaaagctgattcaggagattgtggacaagtcaggagttgtgagggtgaggattgaggctgaaaatgagaaaaatgttccacaagaagaggaaattatgccaccaaattcccttccttccaataattcaagggttggacctaatgccccagaagaaaaaaaacatttagatataaaggaaaacagcacccatttttctcaacctaacagtacaaaagtccagagggtgttagtggcttcatcagttgtagcaggggaatcccagaaacctgaactcaaggcttggcagggtatggtaccatttgtttttgtgggaacaaaggacagcatcgctaatgccactgttcttttggattatcacctgaactatttaaagctccaacagaggaagagagggagagcttcctgcgcagaggagacggacggcggcgtggagggggaggaagaggacaaggaggaagaggacgtggaggaggcttcaaaggaaacgacgatcactcccgaacagataatcgtccacgtaatccaagagaggctaaaggaagaacaacagatggatcccttcagatcagagttgactgcaataatgaaaggagtgtccacactaaaacattacagaatacctccagtgaaggtagtcggctgcgcacgggtaaagatcgtaaccagaagaaagagaagccagacagcgtggatggtcagcaaccactcgtgaatggagtaccctaaactgcataattctgaagttatatttcctataccatttccgtaattcttattccatattagaaaactttgttaggccaaagacaaatagtaggcaagatggcacagggcatgaaatgaacacaaattatgctaagaattttttattttttggtattggccataagcaacaattttcagatttgcacaaaaagataccttaaaatttgaaacattgcttttaaaactacttagcacttcagggcagattttagttttattttctaaagtactgagcagtgatattctttgttaatttggaccattttcctgcattgggtgatcattcaccagtacattctcagtttttcttaatatatagcatttatggtaatcatattagacttctgttttcaatctcgtatagaagtcttcatgaaatgctatgtcatttcatgtcctgtgtcagtttatgttttggtccacttttccagtattttagtggaccctgaaatgtgtgtgatgtgacatttgtcattttcattagcaaaaaaagttgtatgatctgtgccttttttatatcttggcaggtaggaatattatatttggatgcagagttcagggaagataagttggaaacactaaatgttaaagatgtagcaaaccctgtcaaacattagtactttatagaagaatgcatgctttccatatttttttccttacataaacatcaggttaggcagtataaagaataggacttgtttttgtttttgttttgttgcactgaagtttgataaatagtgttattgagagagatgtgtaatttttctgtatagacaggagaagaaagaactatcttcatctgagagaggctaaaatgttttcagctaggaacaaatcttcctggtcgaaagttagtaggatatgcctgctctttggcctgatgaccaattttaacttagagctttttttttttaattttgtctgccccaagttttgtgaaatttttcatattttaatttcaagcttattttggagagataggaaggtcatttccatgtatgcataataatcctgcaaagtacaggtactttgtctaagaaacattggaagcaggttaaatgttttgtaaactttgaaatatatggtctaatgtttaagcagaattggaaaagactaagatcggttaacaaataacaacttttttttctttttttcttttgttttttgaagtgttggggtttggttttgttttttgagtcttttttttttaagtgaaatttattgaggaaaaatatgtgaaggaccttcactctaagatgttatatttttcttaaaaagtaactcctagtaggggtaccactgaatctgtacagagccgtaaaaactgaagttctgcctctgatgtattttgtgagtttgtttctttgaattttcattttacagttacttttccttgcatacaaacaagcatataaaatggcaacaaactgcacatgatttcacaaatattaaaaagtcttttaaaaagtattgccaaacattaatgttgatttctagttatttattctgggaatgtatagtatttgaaaacagaaattggtaccttgcacacatcatctgtaagctgtttggttttaaaatactgtagataattaaccaaggtagaatgaccttgtaatgtaactgctcttgggcaatattctctgtacatattagcgacaacagattggattttatgttgacatttgtttggttatagtgcaatatattttgtatgcaagcagtttcaataaagtttgatcttcctctgctaaattgatgttgatgcaatccttacaaatgattgcttttaaaattttaagctaggaaaagaaatctatagaaagtgttctgttacaaaatgtaactgttaccattggaaatttcacgtcataggaagttagcctttatctaccaactttcaagaacttgtttaataaagcgaaaaactcaaccaaatggtacaaaaccacagtgtaccattaaaatatgcactaagtctcttttttacaaaggctgtattcagcaaggcgctaacttgcttaaatgtgaattactaacttctaaaactgtactttgattcacatgttttcaaatggagttggagttcattcatattacaatatttgtgtgctaaacgtgtatgtttttcagttcaaagtcatgatgtttttaaaatcttattaaagtttcaaaaatctgaagattgtttatctagatgtaaatttttattaaaaagttgcacttatg

SEQ ID NO: 72182 - DNA, 1614 bp, Artificial Sequence
  derived and/or modified sequence
atggaggagttagtggtggaagtacggggctcaaacggagccttttacaaggcctttgtcaaagacgtacatgaggactctatcaccgtagcctttgaaaacaattggcaaccagatcggcagattcccttccatgatgtgcgcttcccaccccccgtgggctataacaaggatatcaacgagagcgatgaggtcgaagtgtactcgagagcgaacgaaaaagaaccctgttgttggtggctggccaaagttcgtatgattaaaggtgaattctacgtcatcgagtatgccgcctgtgacgctacttacaacgaaatcgtgacgatagagcgcttgaggtcggtcaaccctaataagccagcaactaaggatacctttcacaagattaaactcgacgtaccagaggatttaaggcagatgtgtgccaaggaggcggcacacaaggacttcaagaaagctgttggcgccttctcggtgacctatgatccggaaaattatcagcttgtgattctctcaattaacgaggtcacctcaaaaagagcccacatgctcattgatatgcatttcagaagcctgcgaaccaaactgtctctgattatgcgaaacgaggaggcatccaagcaacttgagtcgtccaggcagctggctagccgctttcatgagcaatttatagttcgagaagacctgatgggcctggccatcggcacccacggggctaacatccagcaggcccgcaaggttcctggggtgacagctattgatctcgacgaggacacctgcacttttcacatttacggcgaagatcaggacgcggtgaagaaggctcgttcttttctggagtttgccgaggatgtcattcaggtcccccgaaacctcgtgggcaaggttattgggaaaaatgggaaactgatacaggaaattgttgacaaatcaggggtggtgcgcgttagaattgaagccgagaatgagaaaaatgtgccccaggaggaggaaatcatgcccccgaacagtctgccatctaacaatagtcgcgtgggacctaatgctcccgaggagaagaagcacttggacattaaggagaactccactcatttttctcaacctaatagcaccaaggtacaaagggttctggttgcctcttctgtggtggccggggagtctcaaaagccagagctgaaggcatggcagggaatggtgcccttcgtcttcgtcggcaccaaagattccatagccaacgctaccgtcttattagactaccatctcaattacctgaaactgcagcagaggaagcgagggcgcgcttcctgcgctgaggagactgatggaggcgttgaaggcgaggaagaggacaaagaggaggaggacgttgaagaagcttccaaagagacaacgatcacaccagaacaaataatcgtccacgtcattcaagaaaggctcaaggaagagcagcagatggatcctttcagaagcgaactgacagctatcatgaaaggtgtctctactctgaaacactaccgcatccctccagtcaaggtggttggttgtgcacgcgtcaagatagtgacacggagaaagcgttcccaaacggcctggatggtcagtaaccattcctag

SEQ ID NO: 72183 - DNA, 1614 bp, Artificial Sequence
  derived and/or modified sequence
atggaggagctggtggtggaggtgcggggcagcaatggagccttctacaaggcctttgtgaaggatgtgcatgaagattccatcaccgtggcctttgagaacaactggcagcctgaccggcagatccccttccatgatgtgcgcttccccccacctgtgggctacaacaaggacatcaatgaaagtgatgaggtggaggtgtacagccgggccaatgagaaggagccctgctgctggtggctggccaaggtgaggatgatcaagggggagttctacgtgattgaatatgctgcctgtgatgccacctacaatgagatcgtgaccatcgagcggctgcggtctgtgaaccccaacaagccagccaccaaggacaccttccacaagatcaagctggatgtgcctgaggacctgcggcagatgtgtgccaaggaggccgcccacaaggacttcaagaaggctgtgggcgccttctctgtgacctatgaccctgagaactaccagctggtgatcctgagcatcaatgaggtgaccagcaagagggcccacatgctgattgacatgcacttccgcagcctgcggaccaagctgagcctcatcatgagaaatgaggaggccagcaagcagctggagagcagccggcagctggccagccgcttccacgagcagttcatcgtgcgggaggacctgatgggcctggccatcggcacccatggagccaacatccagcaggccaggaaggtgcctggggtgacagccatcgacctggatgaggacacctgcaccttccacatctatggagaggaccaggatgctgtgaagaaggcccgctccttcctggagtttgctgaagatgtgatccaggtgcccaggaacctggtgggcaaggtgattggcaagaatggcaagctgatccaggagatcgtggacaagtctggagtggtgcgggtgcgcatcgaggctgaaaatgagaagaatgtgccccaggaggaggagatcatgccacccaacagcctgcccagcaacaacagccgggtgggccccaatgcccctgaggagaagaagcacctggacatcaaggagaacagcacccacttcagccagcccaacagcaccaaggtgcagagggtgctggtggccagctctgtggtggccggggagagccagaagccagagctgaaggcctggcagggcatggtgccctttgtgtttgtgggcaccaaggacagcatcgccaatgccaccgtgctgctggactaccacctgaactacctgaagctgcagcagaggaagaggggccgggccagctgtgccgaggagacagatggaggagtggagggggaggaggaggacaaggaggaggaggatgtggaggaggccagcaaggagaccaccatcaccccagagcagatcatcgtgcacgtgatccaggagcggctgaaggaggagcagcagatggaccccttccgctctgagctgacagccatcatgaagggcgtgtccaccctgaagcactaccgcatcccccctgtgaaggtggtgggctgtgcccgggtgaagatcgtgaccaggaggaagaggagccagacagcctggatggtgagcaaccacagctag

SEQ ID NO: 72184 - DNA, 1614 bp, Artificial Sequence
  derived and/or modified sequence
atggaggagctggtggtggaggtgcggggcagcaacggcgccttctacaaggctttcgttaaggatgtgcacgaagactctataacagtagccttcgaaaacaattggcaacccgacaggcagattccatttcatgatgtccgctttcctccccctgtcggttataacaaggatattaatgagagtgatgaggtggaagtgtattcccgtgcaaatgagaaagaaccatgttgctggtggctcgctaaggtccgcatgattaaaggcgaattctatgtgatcgaatatgcagcctgcgatgctacatacaatgaaatcgttaccatcgagcggctgcggagtgtcaatcctaataagcctgccaccaaggataccttccataagattaagctagatgttccagaagatttgagacagatgtgcgctaaggaagcagctcacaaggatttcaagaaagcagtgggcgcatttagcgtcacatacgatccagaaaattaccagcttgttattttaagtataaatgaagtcacctcaaaaagagcacacatgttgattgatatgcacttccgctcactgaggaccaagttaagtcttattatgagaaacgaagaggcaagcaagcagctggagagctctagacaattggcatctcggtttcacgagcagtttatcgtgcgggaagatctgatgggtcttgcaatcggcacccacggggccaatattcaacaggcccgcaaagtgcccggagtgaccgcaatagatttggacgaagatacatgtacattccatatctatggggaggatcaggacgctgtgaagaaagcacgtagtttcctcgaattcgctgaagatgtaatccaggttccaagaaatctcgttggtaaggtgatcggcaaaaatggcaagctcattcaagagatcgtggacaaaagtggtgtggttagggtgagaatcgaggcagagaatgaaaagaacgttccacaggaggaggagatcatgcctccaaattcccttcccagcaataattccagagttggtcctaacgcccctgaggagaaaaaacatcttgacattaaggaaaattctactcacttctcccagccaaattctacaaaggtccaaagggtgctggtagcctcaagcgtggtagccggtgagtcccaaaaaccggaactcaaagcctggcaagggatggtacctttcgtgtttgttggaactaaagactcaatcgcaaacgcgactgtcctactggattaccatctgaattacctgaagctgcagcagagaaagcgaggtagagcatcctgtgccgaggaaacagacggcggagtggaaggggaagaagaggataaggaggaggaggatgtggaggaagccagcaaagagactacgatcacaccagaacagattattgtacatgtcatccaagagcgccttaaagaggaacaacaaatggaccccttccgcagcgagttaaccgcgattatgaaaggggtgagcactttgaagcactatcggatcccgcctgtgaaagtggtcggttgcgcgcgggttaaaatcgtcactagacggaagcgatcccagactgcttggatggtgagtaaccattcttag

SEQ ID NO: 72185 - DNA, 1614 bp, Artificial Sequence
  derived and/or modified sequence
atggaggagctggtggtggaggtgaggggaagtaacggcgctttttacaaagcctttgtgaaagacgtgcacgaagatagtattaccgtggcctttgaaaataattggcaacctgacaggcaaatccccttccacgacgtgcgcttccccccacctgtggggtataataaagatattaacgagagtgatgaagttgaggtatacagccgcgctaatgagaaggagccctgctgctggtggctggcaaaagtgagaatgatcaaaggagagttttacgtgattgagtacgctgcatgtgatgcaacttacaatgaaatcgtgacgatcgaacggctcaggagtgtcaatccgaacaagccagccaccaaggatacattccacaaaataaagctggatgttcccgaagatctgaggcagatgtgtgctaaggaggccgctcataaggacttcaagaaagcggtaggagctttcagtgtaacttacgatcccgaaaattatcaactagttatactgtccataaacgaagtgacatctaaacgcgcacatatgctaatcgacatgcactttaggtccctgcgaacgaagctcagcctcattatgcggaacgaagaagcgagcaagcaactcgaatctagtaggcagctggcgtcacgttttcacgagcagtttattgtgcgcgaggatttgatgggtctcgccatcggaactcacggggcaaatattcagcaggcgagaaaggtccctggcgtcacagccatcgatttggatgaggatacgtgcaccttccacatctatggcgaggaccaagatgccgtaaagaaggcaagaagcttcctggaatttgcagaagacgttattcaggtgcctcgcaatttggtaggaaaagttattgggaagaatgggaagctgatccaggaaattgttgataagtcaggagtggtccgagtcagaatagaagcagagaacgagaagaacgtgccccaggaggaggagatcatgcccccaaacagcctgcctagcaataacagtcgagttggccctaatgcccctgaggaaaaaaaacacctggatatcaaggagaacagtacccatttttcccaacccaactcaacaaaagtccaaagggtgctcgtggctagctcagttgttgccggtgagagtcagaaacctgagctcaaagcttggcaagggatggtgccttttgtgttcgtgggcactaaggacagcatagcaaacgcaaccgtgttactggattaccacctgaactatctgaagctgcagcagcggaagcggggacgcgcatcttgcgctgaagagacggatggcggtgttgaaggtgaggaggaggacaaagaggaggaagatgtcgaggaggcgtcgaaagagaccactattactccagaacagatcattgtgcacgtcatccaggaaaggctgaaggaggagcagcagatggacccttttaggagtgagctgaccgccattatgaagggagtctctacgttgaagcattacagaatccctcccgtgaaagtggtcggatgtgcccgtgtgaagattgtgacacgaagaaaacggagccagaccgcatggatggtcagcaatcacagctag

SEQ ID NO: 72186 - DNA, 1614 bp, Artificial Sequence
  derived and/or modified sequence
atggaggagctggtggtggaggtgagaggcagcaacggcgccttctacaaggccttcgtgaaggacgtgcacgaggacagcatcaccgtggccttcgagaacaactggcagcccgacagacagatccccttccacgacgtgagattccccccccccgtgggctacaacaaggacatcaacgagagcgacgaggtggaggtgtacagcagagccaacgagaaggagccctgctgctggtggctggccaaggtgagaatgatcaagggcgagttctacgtgatcgagtacgccgcctgcgacgccacctacaacgagatcgtgaccatcgagagactgagaagcgtgaaccccaacaagcccgccaccaaggacaccttccacaagatcaagctggacgtgcccgaggacctgagacagatgtgcgccaaggaggccgcccacaaggacttcaagaaggccgtgggcgccttcagcgtgacctacgaccccgagaactaccagctggtgatcctgagcatcaacgaggtgaccagcaagagagcccacatgctgatcgacatgcacttcagaagcctgagaaccaagctgagcctgatcatgagaaacgaggaggccagcaagcagctggagagcagcagacagctggccagcagattccacgagcagttcatcgtgagagaggacctgatgggcctggccatcggcacccacggcgccaacatccagcaggccagaaaggtgcccggcgtgaccgccatcgacctggacgaggacacctgcaccttccacatctacggcgaggaccaggacgccgtgaagaaggccagaagcttcctggagttcgccgaggacgtgatccaggtgcccagaaacctggtgggcaaggtgatcggcaagaacggcaagctgatccaggagatcgtggacaagagcggcgtggtgagagtgagaatcgaggccgagaacgagaagaacgtgccccaggaggaggagatcatgccccccaacagcctgcccagcaacaacagcagagtgggccccaacgcccccgaggagaagaagcacctggacatcaaggagaacagcacccacttcagccagcccaacagcaccaaggtgcagagagtgctggtggccagcagcgtggtggccggcgagagccagaagcccgagctgaaggcctggcagggcatggtgcccttcgtgttcgtgggcaccaaggacagcatcgccaacgccaccgtgctgctggactaccacctgaactacctgaagctgcagcagagaaagagaggcagagccagctgcgccgaggagaccgacggcggcgtggagggcgaggaggaggacaaggaggaggaggacgtggaggaggccagcaaggagaccaccatcacccccgagcagatcatcgtgcacgtgatccaggagagactgaaggaggagcagcagatggaccccttcagaagcgagctgaccgccatcatgaagggcgtgagcaccctgaagcactacagaatcccccccgtgaaggtggtgggctgcgccagagtgaagatcgtgaccagaagaaagagaagccagaccgcctggatggtgagcaaccacagctag

SEQ ID NO: 72187 - protein, 611 aa, Artificial Sequence
  derived and/or modified sequence
MEELVVEVRGSNGAFYKAFVKDVHEDSITVAFENNWQPDRQIPFHDVRFPPPVGYNKDINESDEVEVYSRANEKEPCCWWLAKVRMIKGEFYVIEYAACDATYNEIVTIERLRSVNPNKPATKDTFHKIKLDVPEDLRQMCAKEAAHKDFKKAVGAFSVTYDPENYQLVILSINEVTSKRAHMLIDMHFRSLRTKLSLIMRNEEASKQLESSRQLASRFHEQFIVREDLMGLAIGTHGANIQQARKVPGVTAIDLDEDTCTFHIYGEDQDAVKKARSFLEFAEDVIQVPRNLVGKVIGKNGKLIQEIVDKSGVVRVRIEAENEKNVPQEEEIMPPNSLPSNNSRVGPNAPEEKKHLDIKENSTHFSQPNSTKVQRGMVPFVFVGTKDSIANATVLLDYHLNYLKEVDQLRLERLQIDEQLRQIGASSRPPPNRTDKEKSYVTDDGQGMGRGSRPYRNRGHGRRGPGYTSGTNSEASNASETESDHRDELSDWSLAPTEEERESFLRRGDGRRRGGGGRGQGGRGRGGGFKGNDDHSRTDNRPRNPREAKGRTTDGSLQIRVDCNNERSVHTKTLQNTSSEGSRLRTGKDRNQKKEKPDSVDGQQPLVNGVP

SEQ ID NO: 72188 - protein, 582 aa, Artificial Sequence
  derived and/or modified sequence
MEELVVEVRGSNGAFYKAFVKDVHEDSITVAFENNWQPDRQIPFHDVRFPPPVGYNKDINESDEVEVYSRANEKEPCCWWLAKVRMIKGEFYVIEYAACDATYNEIVTIERLRSVNPNKPATKDTFHKIKLDVPEDLRQMCAKEAAHKDFKKAVGAFSVTYDPENYQLVILSINEVTSKRAHMLIDMHFRSLRTKLSLIMRNEEASKQLESSRQLASRFHEQFIVREDLMGLAIGTHGANIQQARKVPGVTAIDLDEDTCTFHIYGEDQDAVKKARSFLEFAEDVIQVPRNLVGKVIGKNGKLIQEIVDKSGVVRVRIEAENEKNVPQEEEIMPPNSLPSNNSRVGPNAPEEKKHLDIKENSTHFSQPNSTKVQRGMVPFVFVGTKDSIANATVLLDYHLNYLKEVDQLRLERLQIDEQLRQIGASSRPPPNRTDKEKSYVTDDGQGMGRGSRPYRNRGHGRRGPGYTSESDHRDELSDWSLAPTEEERESFLRRGDGRRRGGGGRGQGGRGRGGGFKGNDDHSRTDNRPRNPREAKGRTTDGSLQNTSSEGSRLRTGKDRNQKKEKPDSVDGQQPLVNGVP

SEQ ID NO: 72189 - protein, 592 aa, Artificial Sequence
  derived and/or modified sequence
MEELVVEVRGSNGAFYKAFVKDVHEDSITVAFENNWQPDRQIPFHDVRFPPPVGYNKDINESDEVEVYSRANEKEPCCWWLAKVRMIKGEFYVIEYAACDATYNEIVTIERLRSVNPNKPATKDTFHKIKLDVPEDLRQMCAKEAAHKDFKKAVGAFSVTYDPENYQLVILSINEVTSKRAHMLIDMHFRSLRTKLSLIMRNEEASKQLESSRQLASRFHEQFIVREDLMGLAIGTHGANIQQARKVPGVTAIDLDEDTCTFHIYGEDQDAVKKARSFLEFAEDVIQVPRNLVVIGKNGKLIQEIVDKSGVVRVRIEAENEKNVPQEEEIMPPNSLPSNNSRVGPNAPEEKKHLDIKENSTHFSQPNSTKVQRGMVPFVFVGTKDSIANATVLLDYHLNYLKEVDQLRLERLQIDEQLRQIGASSRPPPNRTDKEKSYVTDDGQGMGRGSRPYRNRGHGRRGPGYTSGTNSEASNASETESDHRDELSDWSLAPTEEERESFLRRGDGRRRGGGGRGQGGRGRGGGFKGNDDHSRTDNRPRNPREAKGRTTDGSLQNTSSEGSRLRTGKDRNQKKEKPDSVDGQQPLVNGVP

SEQ ID NO: 72190 - protein, 262 aa, Artificial Sequence
  derived and/or modified sequence
MPPNSLPSNNSRVGPNAPEEKKHLDIKENSTHFSQPNSTKVQRGMVPFVFVGTKDSIANATVLLDYHLNYLKEVDQLRLERLQIDEQLRQIGASSRPPPNRTDKEKSYVTDDGQGMGRGSRPYRNRGHGRRGPGYTSGTNSEASNASETESDHRDELSDWSLAPTEEERESFLRRGDGRRRGGGGRGQGGRGRGGGFKGNDDHSRTDNRPRNPREAKGRTTDGSLQNTSSEGSRLRTGKDRNQKKEKPDSVDGQQPLVNGVP

SEQ ID NO: 72191 - DNA, 4333 bp, Artificial Sequence
  derived and/or modified sequence
acttccggtggagggccgcctctgagcgggcggcgggccgacggcgagcgcgggcggcggcggtgacggaggcgccgctgccagggggcgtgcggcagcgcggcggcggcggcggcggcggcggcggcggaggcggcggcggcggcggcggcggcggcggctgggcctcgagcgcccgcagcccacctctcgggggcgggctcccggcgctagcagggctgaagagaagatggaggagctggtggtggaagtgcggggctccaatggcgctttctacaaggcatttgtaaaggatgttcatgaagattcaataacagttgcatttgaaaacaactggcagcctgataggcagattccatttcatgatgtcagattcccacctcctgtaggttataataaagatataaatgaaagtgatgaagttgaggtgtattccagagcaaatgaaaaagagccttgctgttggtggttagctaaagtgaggatgataaagggtgagttttatgtgatagaatatgcagcatgtgatgcaacttacaatgaaattgtcacaattgaacgtctaagatctgttaatcccaacaaacctgccacaaaagatactttccataagatcaagctggatgtgccagaagacttacggcaaatgtgtgccaaagaggcggcacataaggattttaaaaaggcagttggtgccttttctgtaacttatgatccagaaaattatcagcttgtcattttgtccatcaatgaagtcacctcaaagcgagcacatatgctgattgacatgcactttcggagtctgcgcactaagttgtctctgataatgagaaatgaagaagctagtaagcagctggagagttcaaggcagcttgcctcgagatttcatgaacagtttatcgtaagagaagatctgatgggtctagctattggtactcatggtgctaatattcagcaagctagaaaagtacctggggtcactgctattgatctagatgaagatacctgcacatttcatatttatggagaggatcaggatgcagtgaaaaaagctagaagctttctcgaatttgctgaagatgtaatacaagttccaaggaacttagtaggcaaagtaataggaaaaaatggaaagctgattcaggagattgtggacaagtcaggagttgtgagggtgaggattgaggctgaaaatgagaaaaatgttccacaagaagaggaaattatgccaccaaattcccttccttccaataattcaagggttggacctaatgccccagaagaaaaaaaacatttagatataaaggaaaacagcacccatttttctcaacctaacagtacaaaagtccagaggggtatggtaccatttgtttttgtgggaacaaaggacagcatcgctaatgccactgttcttttggattatcacctgaactatttaaaggaagtagaccagttgcgtttggagagattacaaattgatgagcagttgcgacagattggagctagttctagaccaccaccaaatcgtacagataaggaaaaaagctatgtgactgatgatggtcaaggaatgggtcgaggtagtagaccttacagaaatagggggcacggcagacgcggtcctggatatacttcaggaactaattctgaagcatcaaatgcttctgaaacagaatctgaccacagagacgaactcagtgattggtcattagctccaacagaggaagagagggagagcttcctgcgcagaggagacggacggcggcgtggagggggaggaagaggacaaggaggaagaggacgtggaggaggcttcaaaggaaacgacgatcactcccgaacagataatcgtccacgtaatccaagagaggctaaaggaagaacaacagatggatcccttcagatcagagttgactgcaataatgaaaggagtgtccacactaaaacattacagaatacctccagtgaaggtagtcggctgcgcacgggtaaagatcgtaaccagaagaaagagaagccagacagcgtggatggtcagcaaccactcgtgaatggagtaccctaaactgcataattctgaagttatatttcctataccatttccgtaattcttattccatattagaaaactttgttaggccaaagacaaatagtaggcaagatggcacagggcatgaaatgaacacaaattatgctaagaattttttattttttggtattggccataagcaacaattttcagatttgcacaaaaagataccttaaaatttgaaacattgcttttaaaactacttagcacttcagggcagattttagttttattttctaaagtactgagcagtgatattctttgttaatttggaccattttcctgcattgggtgatcattcaccagtacattctcagtttttcttaatatatagcatttatggtaatcatattagacttctgttttcaatctcgtatagaagtcttcatgaaatgctatgtcatttcatgtcctgtgtcagtttatgttttggtccacttttccagtattttagtggaccctgaaatgtgtgtgatgtgacatttgtcattttcattagcaaaaaaagttgtatgatctgtgccttttttatatcttggcaggtaggaatattatatttggatgcagagttcagggaagataagttggaaacactaaatgttaaagatgtagcaaaccctgtcaaacattagtactttatagaagaatgcatgctttccatatttttttccttacataaacatcaggttaggcagtataaagaataggacttgtttttgtttttgttttgttgcactgaagtttgataaatagtgttattgagagagatgtgtaatttttctgtatagacaggagaagaaagaactatcttcatctgagagaggctaaaatgttttcagctaggaacaaatcttcctggtcgaaagttagtaggatatgcctgctctttggcctgatgaccaattttaacttagagctttttttttttaattttgtctgccccaagttttgtgaaatttttcatattttaatttcaagcttattttggagagataggaaggtcatttccatgtatgcataataatcctgcaaagtacaggtactttgtctaagaaacattggaagcaggttaaatgttttgtaaactttgaaatatatggtctaatgtttaagcagaattggaaaagactaagatcggttaacaaataacaacttttttttctttttttcttttgttttttgaagtgttggggtttggttttgttttttgagtcttttttttttaagtgaaatttattgaggaaaaatatgtgaaggaccttcactctaagatgttatatttttcttaaaaagtaactcctagtaggggtaccactgaatctgtacagagccgtaaaaactgaagttctgcctctgatgtattttgtgagtttgtttctttgaattttcattttacagttacttttccttgcatacaaacaagcatataaaatggcaacaaactgcacatgatttcacaaatattaaaaagtcttttaaaaagtattgccaaacattaatgttgatttctagttatttattctgggaatgtatagtatttgaaaacagaaattggtaccttgcacacatcatctgtaagctgtttggttttaaaatactgtagataattaaccaaggtagaatgaccttgtaatgtaactgctcttgggcaatattctctgtacatattagcgacaacagattggattttatgttgacatttgtttggttatagtgcaatatattttgtatgcaagcagtttcaataaagtttgatcttcctctgctaaattgatgttgatgcaatccttacaaatgattgcttttaaaattttaagctaggaaaagaaatctatagaaagtgttctgttacaaaatgtaactgttaccattggaaatttcacgtcataggaagttagcctttatctaccaactttcaagaacttgtttaataaagcgaaaaactcaaccaaatggtacaaaaccacagtgtaccattaaaatatgcactaagtctcttttttacaaaggctgtattcagcaaggcgctaacttgcttaaatgtgaattactaacttctaaaactgtactttgattcacatgttttcaaatggagttggagttcattcatattacaatatttgtgtgctaaacgtgtatgtttttcagttcaaagtcatgatgtttttaaaatcttattaaagtttcaaaaatctgaagattgtttatctagatgtaaatttttattaaaaagttgcacttatg

SEQ ID NO: 72192 - DNA, 3437 bp, Artificial Sequence
  derived and/or modified sequence
gggccgcctctgagcgggcggcgggccgacggcgagcgcgggcggcggcggtgacggaggcgccgctgccagggggcgtgcggcagcgcggcggcggcggcggcggcggcggcggcggaggcggcggcggcggcggcggcggcggcggctgggcctcgagcgcccgcagcccacctctcgggggcgggctcccggcgctagcagggctgaagagaagatggaggagctggtggtggaagtgcggggctccaatggcgctttctacaaggcatttgtaaaggatgttcatgaagattcaataacagttgcatttgaaaacaactggcagcctgataggcagattccatttcatgatgtcagattcccacctcctgtaggttataataaagatataaatgaaagtgatgaagttgaggtgtattccagagcaaatgaaaaagagccttgctgttggtggttagctaaagtgaggatgataaagggtgagttttatgtgatagaatatgcagcatgtgatgcaacttacaatgaaattgtcacaattgaacgtctaagatctgttaatcccaacaaacctgccacaaaagatactttccataagatcaagctggatgtgccagaagacttacggcaaatgtgtgccaaagaggcggcacataaggattttaaaaaggcagttggtgccttttctgtaacttatgatccagaaaattatcagcttgtcattttgtccatcaatgaagtcacctcaaagcgagcacatatgctgattgacatgcactttcggagtctgcgcactaagttgtctctgataatgagaaatgaagaagctagtaagcagctggagagttcaaggcagcttgcctcgagatttcatgaacagtttatcgtaagagaagatctgatgggtctagctattggtactcatggtgctaatattcagcaagctagaaaagtacctggggtcactgctattgatctagatgaagatacctgcacatttcatatttatggagaggatcaggatgcagtgaaaaaagctagaagctttctcgaatttgctgaagatgtaatacaagttccaaggaacttagtaggcaaagtaataggaaaaaatggaaagctgattcaggagattgtggacaagtcaggagttgtgagggtgaggattgaggctgaaaatgagaaaaatgttccacaagaagaggaaattatgccaccaaattcccttccttccaataattcaagggttggacctaatgccccagaagaaaaaaaacatttagatataaaggaaaacagcacccatttttctcaacctaacagtacaaaagtccagaggggtatggtaccatttgtttttgtgggaacaaaggacagcatcgctaatgccactgttcttttggattatcacctgaactatttaaaggaagtagaccagttgcgtttggagagattacaaattgatgagcagttgcgacagattggagctagttctagaccaccaccaaatcgtacagataaggaaaaaagctatgtgactgatgatggtcaaggaatgggtcgaggtagtagaccttacagaaatagggggcacggcagacgcggtcctggatatacttcagaatctgaccacagagacgaactcagtgattggtcattagctccaacagaggaagagagggagagcttcctgcgcagaggagacggacggcggcgtggagggggaggaagaggacaaggaggaagaggacgtggaggaggcttcaaaggaaacgacgatcactcccgaacagataatcgtccacgtaatccaagagaggctaaaggaagaacaacagatggatcccttcagaatacctccagtgaaggtagtcggctgcgcacgggtaaagatcgtaaccagaagaaagagaagccagacagcgtggatggtcagcaaccactcgtgaatggagtaccctaaactgcataattctgaagttatatttcctataccatttccgtaattcttattccatattagaaaactttgttaggccaaagacaaatagtaggcaagatggcacagggcatgaaatgaacacaaattatgctaagaattttttattttttggtattggccataagcaacaattttcagatttgcacaaaaagataccttaaaatttgaaacattgcttttaaaactacttagcacttcagggcagattttagttttattttctaaagtactgagcagtgatattctttgttaatttggaccattttcctgcattgggtgatcattcaccagtacattctcagtttttcttaatatatagcatttatggtaatcatattagacttctgttttcaatctcgtatagaagtcttcatgaaatgctatgtcatttcatgtcctgtgtcagtttatgttttggtccacttttccagtattttagtggaccctgaaatgtgtgtgatgtgacatttgtcattttcattagcaaaaaaagttgtatgatctgtgccttttttatatcttggcaggtaggaatattatatttggatgcagagttcagggaagataagttggaaacactaaatgttaaagatgtagcaaaccctgtcaaacattagtactttatagaagaatgcatgctttccatatttttttccttacataaacatcaggttaggcagtataaagaataggacttgtttttgtttttgttttgttgcactgaagtttgataaatagtgttattgagagagatgtgtaatttttctgtatagacaggagaagaaagaactatcttcatctgagagaggctaaaatgttttcagctaggaacaaatcttcctggtcgaaagttagtaggatatgcctgctctttggcctgatgaccaattttaacttagagctttttttttttaattttgtctgccccaagttttgtgaaatttttcatattttaatttcaagcttattttggagagataggaaggtcatttccatgtatgcataataatcctgcaaagtacaggtactttgtctaagaaacattggaagcaggttaaatgttttgtaaactttgaaatatatggtctaatgtttaagcagaattggaaaagactaagatcggttaacaaataacaacttttttttctttttttcttttgttttttgaagtgttggggtttggttttgttttttgagtcttttttttttaagtgaaatttattgaggaaaaatatgtgaaggaccttcactctaagatgttatatttttcttaaaaagtaactcctagtaggggtaccactgaatctgtacagagccgtaaaaactgaagttctgcctctgatgtattttgtgagtttgtttctttgaattttcattttacagttacttttccttgcatacaaacaagcatataaaatggcaacaaactgca

SEQ ID NO: 72193 - DNA, 3699 bp, Artificial Sequence
  derived and/or modified sequence
ggcggcggcggcggcggcggcggcggcggaggcggcggcggcggcggcggcggcggcggctgggcctcgagcgcccgcagcccacctctcgggggcgggctcccggcgctagcagggctgaagagaagatggaggagctggtggtggaagtgcggggctccaatggcgctttctacaaggcatttgtaaaggatgttcatgaagattcaataacagttgcatttgaaaacaactggcagcctgataggcagattccatttcatgatgtcagattcccacctcctgtaggttataataaagatataaatgaaagtgatgaagttgaggtgtattccagagcaaatgaaaaagagccttgctgttggtggttagctaaagtgaggatgataaagggtgagttttatgtgatagaatatgcagcatgtgatgcaacttacaatgaaattgtcacaattgaacgtctaagatctgttaatcccaacaaacctgccacaaaagatactttccataagatcaagctggatgtgccagaagacttacggcaaatgtgtgccaaagaggcggcacataaggattttaaaaaggcagttggtgccttttctgtaacttatgatccagaaaattatcagcttgtcattttgtccatcaatgaagtcacctcaaagcgagcacatatgctgattgacatgcactttcggagtctgcgcactaagttgtctctgataatgagaaatgaagaagctagtaagcagctggagagttcaaggcagcttgcctcgagatttcatgaacagtttatcgtaagagaagatctgatgggtctagctattggtactcatggtgctaatattcagcaagctagaaaagtacctggggtcactgctattgatctagatgaagatacctgcacatttcatatttatggagaggatcaggatgcagtgaaaaaagctagaagctttctcgaatttgctgaagatgtaatacaagttccaaggaacttagtagtaataggaaaaaatggaaagctgattcaggagattgtggacaagtcaggagttgtgagggtgaggattgaggctgaaaatgagaaaaatgttccacaagaagaggaaattatgccaccaaattcccttccttccaataattcaagggttggacctaatgccccagaagaaaaaaaacatttagatataaaggaaaacagcacccatttttctcaacctaacagtacaaaagtccagaggggtatggtaccatttgtttttgtgggaacaaaggacagcatcgctaatgccactgttcttttggattatcacctgaactatttaaaggaagtagaccagttgcgtttggagagattacaaattgatgagcagttgcgacagattggagctagttctagaccaccaccaaatcgtacagataaggaaaaaagctatgtgactgatgatggtcaaggaatgggtcgaggtagtagaccttacagaaatagggggcacggcagacgcggtcctggatatacttcaggaactaattctgaagcatcaaatgcttctgaaacagaatctgaccacagagacgaactcagtgattggtcattagctccaacagaggaagagagggagagcttcctgcgcagaggagacggacggcggcgtggagggggaggaagaggacaaggaggaagaggacgtggaggaggcttcaaaggaaacgacgatcactcccgaacagataatcgtccacgtaatccaagagaggctaaaggaagaacaacagatggatcccttcagaatacctccagtgaaggtagtcggctgcgcacgggtaaagatcgtaaccagaagaaagagaagccagacagcgtggatggtcagcaaccactcgtgaatggagtaccctaaactgcataattctgaagttatatttcctataccatttccgtaattcttattccatattagaaaactttgttaggccaaagacaaatagtaggcaagatggcacagggcatgaaatgaacacaaattatgctaagaattttttattttttggtattggccataagcaacaattttcagatttgcacaaaaagataccttaaaatttgaaacattgcttttaaaactacttagcacttcagggcagattttagttttattttctaaagtactgagcagtgatattctttgttaatttggaccattttcctgcattgggtgatcattcaccagtacattctcagtttttcttaatatatagcatttatggtaatcatattagacttctgttttcaatctcgtatagaagtcttcatgaaatgctatgtcatttcatgtcctgtgtcagtttatgttttggtccacttttccagtattttagtggaccctgaaatgtgtgtgatgtgacatttgtcattttcattagcaaaaaaagttgtatgatctgtgccttttttatatcttggcaggtaggaatattatatttggatgcagagttcagggaagataagttggaaacactaaatgttaaagatgtagcaaaccctgtcaaacattagtactttatagaagaatgcatgctttccatatttttttccttacataaacatcaggttaggcagtataaagaataggacttgtttttgtttttgttttgttgcactgaagtttgataaatagtgttattgagagagatgtgtaatttttctgtatagacaggagaagaaagaactatcttcatctgagagaggctaaaatgttttcagctaggaacaaatcttcctggtcgaaagttagtaggatatgcctgctctttggcctgatgaccaattttaacttagagctttttttttttaattttgtctgccccaagttttgtgaaatttttcatattttaatttcaagcttattttggagagataggaaggtcatttccatgtatgcataataatcctgcaaagtacaggtactttgtctaagaaacattggaagcaggttaaatgttttgtaaactttgaaatatatggtctaatgtttaagcagaattggaaaagactaagatcggttaacaaataacaacttttttttctttttttcttttgttttttgaagtgttggggtttggttttgttttttgagtcttttttttttaagtgaaatttattgaggaaaaatatgtgaaggaccttcactctaagatgttatatttttcttaaaaagtaactcctagtaggggtaccactgaatctgtacagagccgtaaaaactgaagttctgcctctgatgtattttgtgagtttgtttctttgaattttcattttacagttacttttccttgcatacaaacaagcatataaaatggcaacaaactgcacatgatttcacaaatattaaaaagtcttttaaaaagtattgccaaacattaatgttgatttctagttatttattctgggaatgtatagtatttgaaaacagaaattggtaccttgcacacatcatctgtaagctgtttggttttaaaatactgtagataattaaccaaggtagaatgaccttgtaatgtaactgctcttgggcaatattctctgtacatattagcgacaacagattggattttatgttgacatttgtttggttatagtgcaatatattttgtatgcaagcagtttcaataaagtttgatcttcctctgcta

SEQ ID NO: 72194 - DNA, 1853 bp, Artificial Sequence
  derived and/or modified sequence
gtctctgataatgagaaatgaagaagctagtaagcagctggagagttcaaggcagcttgcctcgagatttcatgaacagtttatcgtaagagaagatctgatgggtctagctattggtactcatggtgctaatattcagcaagctagaaaagtacctggggtcactgctattgatctagatgaagatacctgcacatttcatatttatggagaggatcaggatgcagtgaaaaaagctagaagctttctcgaatttgctgaagatgtaatacaagttccaaggaacttagtagggttgaagatctgaacataggttacttaaatctaaaaagtcccaaagctagaagaaacttcagatgtctctgggactttctgcaaagtcaatagtaattctccattttgacttgagtagtgttttatcaccatcaccatcgcaaagtaataggaaaaaatggaaagctgattcaggagattgtggacaagtcaggagttgtgagggtgaggattgaggctgaaaatgagaaaaatgttccacaagaagaggaaattatgccaccaaattcccttccttccaataattcaagggttggacctaatgccccagaagaaaaaaaacatttagatataaaggaaaacagcacccatttttctcaacctaacagtacaaaagtccagaggggtatggtaccatttgtttttgtgggaacaaaggacagcatcgctaatgccactgttcttttggattatcacctgaactatttaaaggaagtagaccagttgcgtttggagagattacaaattgatgagcagttgcgacagattggagctagttctagaccaccaccaaatcgtacagataaggaaaaaagctatgtgactgatgatggtcaaggaatgggtcgaggtagtagaccttacagaaatagggggcacggcagacgcggtcctggatatacttcaggaactaattctgaagcatcaaatgcttctgaaacagaatctgaccacagagacgaactcagtgattggtcattagctccaacagaggaagagagggagagcttcctgcgcagaggagacggacggcggcgtggagggggaggaagaggacaaggaggaagaggacgtggaggaggcttcaaaggaaacgacgatcactcccgaacagataatcgtccacgtaatccaagagaggctaaaggaagaacaacagatggatcccttcagaatacctccagtgaaggtagtcggctgcgcacgggtaaagatcgtaaccagaagaaagagaagccagacagcgtggatggtcagcaaccactcgtgaatggagtaccctaaactgcataattctgaagttatatttcctataccatttccgtaattcttattccatattagaaaactttgttaggccaaagacaaatagtaggcaagatggcacagggcatgaaatgaacacaaattatgctaagaattttttattttttggtattggccataagcaacaattttcagatttgcacaaaaagataccttaaaatttgaaacattgcttttaaaactacttagcacttcagggcagattttagttttattttctaaagtactgagcagtgatattctttgttaatttggaccattttcctgcattgggtgatcattcaccagtacattctcagtttttcttaatatatagcatttatggtaatcatattagacttctgttttcaatctcgtatagaagtcttcatgaaatgctatgtcatttcatgtcctgtgtcagtttatgttttggtccacttttccagtattttagtggaccctgaaatgtgtgtgatgtgacatttgtcatt

SEQ ID NO: 72195 - DNA, 1749 bp, Artificial Sequence
  derived and/or modified sequence
atggaggaactggttgtggaggtcaggggcagcaatggggctttttataaagcatttgtcaaggacgtccatgaagacagcataaccgtcgcattcgagaataattggcagcctgataggcagatccccttccatgacgtcaggtttcccccgcctgttggatacaacaaggacataaatgagtcagatgaggtagaggtatacagccgcgcaaacgagaaagagccttgttgctggtggctggccaaggtcaggatgatcaagggagagttctatgtgattgagtacgctgcttgtgacgcgacatacaacgaaattgtaaccattgagcgcctcaggagcgtgaaccctaacaaacccgcaaccaaggacacgttccataagattaagctcgacgtgccggaggacctaaggcaaatgtgcgctaaagaagccgcacataaagacttcaagaaggcggtaggcgcttttagcgtgacctatgaccctgagaactaccaacttgtgatcttatctatcaacgaagtgactagcaagcgcgctcacatgctaattgacatgcacttcaggagcttgagaaccaaactgtctctcattatgaggaacgaggaagcttccaagcaattggagagcagccgccagttggcctctcgattccacgagcagttcattgtccgtgaggatctaatgggcctcgcgattggaactcacggcgcgaatatacaacaggccagaaaagtgcctggggtgacggccatcgatctcgacgaggacacctgtacatttcacatttacggcgaagaccaggacgccgtcaagaaggcccgaagcttcctcgagttcgcagaggacgtgatccaagtgcctcgtaatctggtggggaaggtgatcggcaagaacggtaaactaatccaggaaatcgtggataagtctggcgtagtccgggtgcgaatcgaagctgaaaatgaaaaaaatgtcccccaggaggaggagataatgcctcccaactcacttccatctaataatagccgagtgggccctaatgcacccgaggaaaaaaagcatctggacatcaaggagaattccacgcatttctcccagcctaactctactaaggtgcagcgcgggatggtcccattcgtgtttgtgggcaccaaagatagtatcgcaaacgccactgtgctgttagattaccacctcaactacttgaaggaagtggaccagctgcgattagagagactgcagatcgatgaacagctgaggcagatcggcgcatcttcgcggccccccccaaacagaacagacaaggaaaagagttacgtgaccgacgacggccagggaatggggagaggaagccgtccctacagaaaccgcgggcacggaaggagaggccctggctatacctctgaaagcgatcatcgtgacgagctgtccgattggtctttggcgcccacagaggaggagagggagtcttttctgaggagaggcgatgggcggcgccgcggaggaggagggcggggacagggcgggcgtgggagaggcggcgggtttaagggaaatgacgatcatagtaggactgataatcggccgcggaacccgagggaggccaaggggagaaccacagatgggagtttacagaatacaagtagcgaaggctcccggttgagaacaggtaaggacagaaaccaaaaaaaggaaaaacccgatagtgttgacgggcaacagcctctagtgaatggagtgccttag

SEQ ID NO: 72196 - DNA, 1779 bp, Artificial Sequence
  derived and/or modified sequence
atggaagaactggtggtcgaagttagggggagcaatggagcgttctacaaggccttcgtcaaggatgtacacgaggactcaattactgttgcctttgagaacaattggcagccagacaggcagatcccctttcacgatgtaaggttccctcctcctgtgggttataacaaagatatcaacgaatctgacgaggtggaggtgtattctcgggcaaacgaaaaggagccttgctgctggtggttggctaaagtgcggatgatcaaaggggagttctatgtaattgaatacgctgcctgtgacgctacatataatgagattgtcactatcgaaagattgcgtagcgtgaaccccaataaacctgcaactaaagatacattccacaaaattaaattggatgtgccagaagacctgaggcagatgtgcgcaaaggaagccgcccacaaggattttaaaaaggctgtgggcgccttttccgtgacatatgacccagaaaattatcagctggtcatcctgagtatcaacgaggtcacaagtaaacgagctcacatgttaatagatatgcactttcgaagcctgcggactaagctttcgttaatcatgcgaaatgaagaagcctccaaacagctagagtcttctagacaacttgcaagtcggtttcatgagcagtttatcgtacgcgaggacttaatggggttggccattggcacccacggggctaacattcaacaggctcgaaaggttcctggtgtaacagcgattgacctggacgaggacacctgcacttttcatatctatggtgaggaccaggatgccgtgaaaaaggctcgaagttttctcgagttcgccgaagacgttatccaggtgccaagaaacctggtcgttatcggaaaaaacggaaagcttattcaagagattgtggacaagtccggcgtggtgcgcgtgaggatcgaggcagagaatgaaaagaacgtcccgcaagaagaggaaattatgccccctaactctctgcccagcaacaattcacgggttggcccaaatgccccagaggagaagaaacacttggacatcaaggagaactccacccatttttctcagcccaatagcaccaaggttcagcgcggcatggtcccttttgtcttcgttggaaccaaggacagcatagccaatgcgacagtgttgttggattatcatttaaattacttgaaggaagtggaccagcttaggttggaacgcctgcagatagatgagcagctgaggcaaataggagccagtagcaggcctccaccgaatagaacagacaaagagaaatcttatgtgaccgacgatggccaaggcatgggccgcggatcaaggccctaccgcaaccgaggccacggacgccggggcccaggctacacctctgggacaaattctgaagccagcaacgctagtgagaccgaaagcgatcaccgcgacgagctctctgattggtccctagcccctaccgaggaagaacgcgagtccttcctgcggcggggagacgggagaagacgcggcgggggcggccgaggacagggtggtaggggtaggggcggcggcttcaaaggcaatgacgaccactctcggactgacaaccgcccgagaaaccctagggaggctaaaggacgaacaacagacgggtccctgcagaacacctcaagcgagggaagtcgtctccggacaggtaaggacagaaaccagaaaaaggagaagcccgattcggtggacggccagcagcccttagtcaatggcgttccttag

SEQ ID NO: 72197 - DNA, 789 bp, Artificial Sequence
  derived and/or modified sequence
atgcctccaaacagtcttccgtccaataactccagggttggcccaaacgctcccgaagaaaaaaagcacctcgacatcaaggagaattctacccactttagtcagcccaatagcaccaaagtacaaagaggaatggttcccttcgtgttcgtggggaccaaggacagcattgctaacgcgacagtgttactcgactaccacctaaattatctgaaagaagtggatcaactccggctggaaagattacagatcgatgagcagttaagacagattggtgcgtcatcacgcccccccccaaacagaactgacaaagaaaagtcttacgtgaccgatgacggccagggtatgggccgggggtcccgcccctacagaaacaggggtcatggcaggcgaggtcccgggtacacttccggtacaaactctgaagctagtaacgcgtcagagacagaatccgatcatagagacgaattatccgactggtctttagccccaacagaggaagagcgtgaaagtttcctccgcagaggagatgggagacgccgggggggagggggtagaggacagggaggcagagggcgtggcggaggcttcaaggggaacgacgaccattcacgaaccgataatagaccacgaaatcccagagaagcaaagggcagaacaacagatggctctcttcagaacacaagcagcgagggatcgagactcaggacagggaaagatcgcaatcagaagaaggaaaaacccgactcagtcgacggccagcagcctctggtgaacggggtcccctag

SEQ ID NO: 72198 - DNA, 1836 bp, Artificial Sequence
  derived and/or modified sequence
atggaagaattagttgttgaggtgagaggcagtaacggcgccttttataaggcattcgttaaagatgttcatgaagacagtatcaccgtggcttttgagaataactggcaacccgaccgacagatccccttccacgatgtgcggttccctccacccgtgggctataacaaggacatcaacgaatccgatgaggtggaggtgtattcacgcgccaacgaaaaggagccgtgctgctggtggttagccaaggtgcgcatgatcaaaggcgagttctatgtcattgaatacgctgcgtgtgatgcaacttataatgaaatcgtaacgattgaacggctgaggagtgtgaaccccaataaaccagccacaaaggacaccttccataagatcaagctggatgtacccgaagacctccgccagatgtgcgccaaggaggcagcccacaaagactttaagaaggccgtcggagctttctcagtcacatacgatcctgagaactaccagttggttatcctgtcgatcaacgaggttacctccaaaagagcacacatgctgattgacatgcactttagatctttgaggacgaaactctcactgattatgagaaatgaagaggcctctaagcagcttgagtcgagccgccagctggcctcaagatttcacgagcagtttatagtgagggaagatctgatgggattggccatcggaacccatggggccaacattcaacaggcacggaaggtgcccggcgtgactgctatcgacctggacgaagacacgtgtactttccacatttatggcgaggaccaggatgccgttaagaaggccaggagcttcttagaattcgcagaagatgtgatccaagtgccacgcaacctggtgggaaaagtcatcggaaaaaatggaaagctaatccaggagatagtggataaatccggtgtcgtccgtgtcaggattgaggcagagaacgaaaagaacgtgccccaggaggaggaaatcatgcctccaaacagcctcccctctaataattcgcgggtcggacccaacgcccctgaagagaagaagcaccttgacatcaaggagaatagtactcattttagtcagccaaactctacaaaggtgcagaggggcatggtcccgtttgtgtttgtgggaaccaaggactccatcgccaatgccacggtgctccttgactaccacctcaactacttaaaggaggtggaccagctgcggctcgaacgcctccagatcgacgagcagctcaggcagattggggccagtagtcgccccccgcccaaccggaccgacaaagaaaagtcgtacgtcactgatgacggtcagggcatggggaggggctcacgaccttataggaatcgaggccacggccgccgaggcccaggctacacttcagggacaaacagcgaagcctctaatgcttccgaaacggaatccgaccaccgcgatgagttgtccgactggtccctggccccaacagaggaagagcgagagtcatttctgcgccgcggagacggtcggaggcgcggtggaggcggccgaggccagggggggagggggaggggcggaggatttaagggcaacgacgaccactcccggaccgataatcgccccagaaaccctcgagaggcaaaagggcgaacaactgatggctcacttcaaatacgggtagattgtaataatgagcgctctgtgcatactaagactctccagaataccagctctgagggctctcggctgcggacaggcaaagatcgtaatcagaaaaaggagaagcctgattcagtcgacggacagcagcccctagtcaacggagtcccatag

SEQ ID NO: 72199 - DNA, 1749 bp, Artificial Sequence
  derived and/or modified sequence
atggaggagctggtggtggaggtgcggggcagcaatggagccttctacaaggcctttgtgaaggatgtgcatgaagattccatcaccgtggcctttgagaacaactggcagcctgaccggcagatccccttccatgatgtgcgcttccccccacctgtgggctacaacaaggacatcaatgaaagtgatgaggtggaggtgtacagccgggccaatgagaaggagccctgctgctggtggctggccaaggtgaggatgatcaagggggagttctacgtgattgaatatgctgcctgtgatgccacctacaatgagatcgtgaccatcgagcggctgcggtctgtgaaccccaacaagccagccaccaaggacaccttccacaagatcaagctggatgtgcctgaggacctgcggcagatgtgtgccaaggaggccgcccacaaggacttcaagaaggctgtgggcgccttctctgtgacctatgaccctgagaactaccagctggtgatcctgagcatcaatgaggtgaccagcaagagggcccacatgctgattgacatgcacttccgcagcctgcggaccaagctgagcctcatcatgagaaatgaggaggccagcaagcagctggagagcagccggcagctggccagccgcttccacgagcagttcatcgtgcgggaggacctgatgggcctggccatcggcacccatggagccaacatccagcaggccaggaaggtgcctggggtgacagccatcgacctggatgaggacacctgcaccttccacatctatggagaggaccaggatgctgtgaagaaggcccgctccttcctggagtttgctgaagatgtgatccaggtgcccaggaacctggtgggcaaggtgattggcaagaatggcaagctgatccaggagatcgtggacaagtctggagtggtgcgggtgcgcatcgaggctgaaaatgagaagaatgtgccccaggaggaggagatcatgccacccaacagcctgcccagcaacaacagccgggtgggccccaatgcccctgaggagaagaagcacctggacatcaaggagaacagcacccacttcagccagcccaacagcaccaaggtgcagaggggcatggtgccctttgtgtttgtgggcaccaaggacagcatcgccaatgccaccgtgctgctggactaccacctgaactacctgaaggaggtggaccagctgcggctggagcggctgcagattgatgagcagctgcggcagattggagccagcagccggcccccacccaacagaacagacaaggagaagagctatgtgacagatgatggccagggcatgggccggggcagccggccctacagaaacagaggccacggccggcggggccctggctacaccagcgagagtgaccacagagatgagctgagtgactggagcctggcccccacagaggaggagcgggagagcttcctgcggagaggagatggaagaagaagaggaggcggcggccggggccagggcggccggggccggggcggcggcttcaagggaaatgatgaccacagcaggacagacaaccggcccaggaacccccgggaggccaagggccgcaccacagatggcagcctgcagaacaccagcagcgagggcagccggctgaggacaggcaaggacaggaaccagaagaaggagaagccagacagcgtggatggccagcagcccctggtgaatggagtgccctag

SEQ ID NO: 72200 - DNA, 1779 bp, Artificial Sequence
  derived and/or modified sequence
atggaggagctggtggtggaggtgcggggcagcaatggagccttctacaaggcctttgtgaaggatgtgcatgaagattccatcaccgtggcctttgagaacaactggcagcctgaccggcagatccccttccatgatgtgcgcttccccccacctgtgggctacaacaaggacatcaatgaaagtgatgaggtggaggtgtacagccgggccaatgagaaggagccctgctgctggtggctggccaaggtgaggatgatcaagggggagttctacgtgattgaatatgctgcctgtgatgccacctacaatgagatcgtgaccatcgagcggctgcggtctgtgaaccccaacaagccagccaccaaggacaccttccacaagatcaagctggatgtgcctgaggacctgcggcagatgtgtgccaaggaggccgcccacaaggacttcaagaaggctgtgggcgccttctctgtgacctatgaccctgagaactaccagctggtgatcctgagcatcaatgaggtgaccagcaagagggcccacatgctgattgacatgcacttccgcagcctgcggaccaagctgagcctcatcatgagaaatgaggaggccagcaagcagctggagagcagccggcagctggccagccgcttccacgagcagttcatcgtgcgggaggacctgatgggcctggccatcggcacccatggagccaacatccagcaggccaggaaggtgcctggggtgacagccatcgacctggatgaggacacctgcaccttccacatctatggagaggaccaggatgctgtgaagaaggcccgctccttcctggagtttgctgaagatgtgatccaggtgcccaggaacctggtggtgattggcaagaatggcaagctgatccaggagatcgtggacaagtctggagtggtgcgggtgcgcatcgaggctgaaaatgagaagaatgtgccccaggaggaggagatcatgccacccaacagcctgcccagcaacaacagccgggtgggccccaatgcccctgaggagaagaagcacctggacatcaaggagaacagcacccacttcagccagcccaacagcaccaaggtgcagaggggcatggtgccctttgtgtttgtgggcaccaaggacagcatcgccaatgccaccgtgctgctggactaccacctgaactacctgaaggaggtggaccagctgcggctggagcggctgcagattgatgagcagctgcggcagattggagccagcagccggcccccacccaacagaacagacaaggagaagagctatgtgacagatgatggccagggcatgggccggggcagccggccctacagaaacagaggccacggccggcggggccctggctacaccagcggcaccaacagcgaggccagcaatgccagcgagacagaaagtgaccacagagatgagctgagtgactggagcctggcccccacagaggaggagcgggagagcttcctgcggagaggagatggaagaagaagaggaggcggcggccggggccagggcggccggggccggggcggcggcttcaagggaaatgatgaccacagcaggacagacaaccggcccaggaacccccgggaggccaagggccgcaccacagatggcagcctgcagaacaccagcagcgagggcagccggctgaggacaggcaaggacaggaaccagaagaaggagaagccagacagcgtggatggccagcagcccctggtgaatggagtgccctag

SEQ ID NO: 72201 - DNA, 789 bp, Artificial Sequence
  derived and/or modified sequence
atgccacccaacagcctgcccagcaacaacagccgggtgggccccaatgcccctgaggagaagaagcacctggacatcaaggagaacagcacccacttcagccagcccaacagcaccaaggtgcagaggggcatggtgccctttgtgtttgtgggcaccaaggacagcatcgccaatgccaccgtgctgctggactaccacctgaactacctgaaggaggtggaccagctgcggctggagcggctgcagattgatgagcagctgcggcagattggagccagcagccggcccccacccaacagaacagacaaggagaagagctatgtgacagatgatggccagggcatgggccggggcagccggccctacagaaacagaggccacggccggcggggccctggctacaccagcggcaccaacagcgaggccagcaatgccagcgagacagaaagtgaccacagagatgagctgagtgactggagcctggcccccacagaggaggagcgggagagcttcctgcggagaggagatggaagaagaagaggaggcggcggccggggccagggcggccggggccggggcggcggcttcaagggaaatgatgaccacagcaggacagacaaccggcccaggaacccccgggaggccaagggccgcaccacagatggcagcctgcagaacaccagcagcgagggcagccggctgaggacaggcaaggacaggaaccagaagaaggagaagccagacagcgtggatggccagcagcccctggtgaatggagtgccctag

SEQ ID NO: 72202 - DNA, 1836 bp, Artificial Sequence
  derived and/or modified sequence
atggaggagctggtggtggaggtgcggggcagcaatggagccttctacaaggcctttgtgaaggatgtgcatgaagattccatcaccgtggcctttgagaacaactggcagcctgaccggcagatccccttccatgatgtgcgcttccccccacctgtgggctacaacaaggacatcaatgaaagtgatgaggtggaggtgtacagccgggccaatgagaaggagccctgctgctggtggctggccaaggtgaggatgatcaagggggagttctacgtgattgaatatgctgcctgtgatgccacctacaatgagatcgtgaccatcgagcggctgcggtctgtgaaccccaacaagccagccaccaaggacaccttccacaagatcaagctggatgtgcctgaggacctgcggcagatgtgtgccaaggaggccgcccacaaggacttcaagaaggctgtgggcgccttctctgtgacctatgaccctgagaactaccagctggtgatcctgagcatcaatgaggtgaccagcaagagggcccacatgctgattgacatgcacttccgcagcctgcggaccaagctgagcctcatcatgagaaatgaggaggccagcaagcagctggagagcagccggcagctggccagccgcttccacgagcagttcatcgtgcgggaggacctgatgggcctggccatcggcacccatggagccaacatccagcaggccaggaaggtgcctggggtgacagccatcgacctggatgaggacacctgcaccttccacatctatggagaggaccaggatgctgtgaagaaggcccgctccttcctggagtttgctgaagatgtgatccaggtgcccaggaacctggtgggcaaggtgattggcaagaatggcaagctgatccaggagatcgtggacaagtctggagtggtgcgggtgcgcatcgaggctgaaaatgagaagaatgtgccccaggaggaggagatcatgccacccaacagcctgcccagcaacaacagccgggtgggccccaatgcccctgaggagaagaagcacctggacatcaaggagaacagcacccacttcagccagcccaacagcaccaaggtgcagaggggcatggtgccctttgtgtttgtgggcaccaaggacagcatcgccaatgccaccgtgctgctggactaccacctgaactacctgaaggaggtggaccagctgcggctggagcggctgcagattgatgagcagctgcggcagattggagccagcagccggcccccacccaacagaacagacaaggagaagagctatgtgacagatgatggccagggcatgggccggggcagccggccctacagaaacagaggccacggccggcggggccctggctacaccagcggcaccaacagcgaggccagcaatgccagcgagacagaaagtgaccacagagatgagctgagtgactggagcctggcccccacagaggaggagcgggagagcttcctgcggagaggagatggaagaagaagaggaggcggcggccggggccagggcggccggggccggggcggcggcttcaagggaaatgatgaccacagcaggacagacaaccggcccaggaacccccgggaggccaagggccgcaccacagatggcagcctgcagatccgggtggactgcaacaatgaaagatctgtgcacaccaagaccctgcagaacaccagcagcgagggcagccggctgaggacaggcaaggacaggaaccagaagaaggagaagccagattctgtggatggccagcagcccctggtgaatggagtgccctag

SEQ ID NO: 72203 - DNA, 1749 bp, Artificial Sequence
  derived and/or modified sequence
atggaggagctggtggtggaggtgcggggcagcaacggcgccttctacaaagcatttgtaaaggatgtccacgaagacagtatcacagttgccttcgagaacaactggcagcccgacagacagattccatttcacgacgttcggttccccccacccgtcgggtacaacaaagacattaacgagtctgacgaggtcgaagtatacagtagggccaatgagaaagagccgtgttgttggtggctggccaaggttaggatgattaaaggcgagttctacgtcattgaatatgctgcatgcgacgctacctataacgaaatcgtgactatcgagcgactccgatccgtcaatcctaataaacccgcaacgaaggacacattccataagatcaagctagacgtccctgaagaccttaggcaaatgtgcgcaaaagaagcagcccataaagactttaagaaagctgtgggcgccttttcagtcacatacgatccggagaattaccagttggttattttatctataaacgaggtgacatcaaagcgcgctcacatgcttatcgatatgcattttagatcgctcagaacaaagctaagtctcatcatgagaaacgaggaggccagtaagcagctcgagtctagcagacagctggcctcgagatttcacgagcagttcatcgtgcgcgaagacctgatgggattagcgatcggcacacacggcgcaaatatccaacaagcccgcaaagtgcccggagttactgccatagacttagatgaagatacctgtactttccacatctatggtgaggaccaggacgccgtgaaaaaggctcggtcatttttagagtttgctgaggatgtgattcaagtgccgagaaatctggtcgggaaggtgattggaaaaaatggtaagctcattcaggaaatcgttgacaaatctggagttgtccgtgtgcgcatagaggccgagaacgaaaagaacgtcccccaggaagaggagattatgcctcctaattcactgccctctaacaattctcgggtggggcctaatgcgcctgaggaaaagaaacatctcgatatcaaggagaatagcacacatttttctcaaccgaactccactaaagttcagcgtggtatggtaccatttgttttcgtgggtacaaaggattccatcgcgaacgccaccgtgcttctggattaccatttgaactacctgaaagaggtggatcaactgcgtctggagcgcttgcagatagacgagcagctcagacagatcggagcttctagcagaccaccaccgaacaggaccgacaaggagaagtcctatgtgacagatgacgggcaaggaatgggcaggggaagcaggccttatagaaaccgcgggcatggtaggagaggtcctggttacacatctgagtccgatcacagggatgagctctctgattggagtttagctccaacagaggaagagcgggagagctttctgagacggggggacggtcggagaagaggaggtggagggagaggccaaggcggacgaggtcgggggggtggatttaagggcaacgacgatcattctcgcaccgacaatcgtccaagaaatcctcgagaagcaaagggtagaaccacagatggttcgctgcaaaatacgtcatcagaaggtagtcggctacgcacaggcaaagaccgcaaccagaaaaaggaaaagcctgacagcgtcgatgggcaacagccattagtgaatggcgtaccttag

SEQ ID NO: 72204 - DNA, 1779 bp, Artificial Sequence
  derived and/or modified sequence
atggaggagctggtggtggaggtgcggggcagcaacggcgccttctataaggcctttgttaaagacgtccacgaagactcgattacagtagccttcgaaaataactggcagccagaccgccagatccccttccatgacgttcgctttccacccccggtggggtacaacaaagacatcaacgaaagcgacgaggtggaagtctacagtagggccaatgagaaagagccctgttgttggtggctggccaaagtcagaatgattaagggcgagttttacgttatagagtatgccgcttgcgacgctacctacaatgagatcgtgaccatcgaacgacttcgttctgtaaacccgaataagcctgccaccaaggacacctttcataagatcaaacttgatgtgcctgaggacctacggcagatgtgcgccaaggaagcagcccacaaagacttcaaaaaggctgtgggcgctttctcggtgacttacgacccggagaactaccagttagtaattctctcaatcaacgaagtgacaagcaaacgcgcgcacatgctcatcgatatgcactttcgatcgctgagaacaaaactgagccttataatgcgcaacgaggaggccagtaagcagttggagagcagccggcagttagccagcaggttccatgaacagttcatcgtacgcgaagacctgatgggtctggcaattggtacgcatggcgctaacattcagcaggccagaaaggtaccaggggtcactgctatagacctggatgaggatacatgtacctttcacatttacggagaagaccaggacgcagttaagaaggccaggtcctttcttgaatttgccgaagacgtgatccaggtgcccagaaatttagtggtgatcggtaagaatggcaagctgatccaggagattgtggacaagtccggggttgtgagagtcaggattgaagcagaaaacgaaaagaacgtgccacaggaggaggagattatgccccctaactcactgccctcaaacaactcacgggtaggcccgaacgcacccgaggagaaaaaacatttggatatcaaagagaacagcacccatttcagtcagcctaactccacaaaagttcaaaggggaatggttccctttgtgtttgtcggtacgaaagactccatcgcaaatgcaactgtgctgctggattaccatcttaattatctcaaggaggttgaccagctcaggctagagcgcctgcagatcgacgagcaactgcgccagattggcgccagcagtagacccccccccaatcgtacggataaagaaaagtcttatgtgaccgatgatggtcaggggatgggtcggggctcgcgaccgtatcgcaaccgcggccacggccgtaggggtcccggatatacctccgggaccaacagcgaagccagtaacgcctctgagaccgagtcagatcaccgtgatgaactttctgattggagcctcgctccaactgaagaagagcgtgagtcatttctccgaaggggggacggacggagacgagggggcgggggcaggggccagggcggcaggggaagagggggtggattcaaggggaatgacgaccatagcaggaccgacaatagaccgcgaaaccctcgggaggcaaaggggcgcacgactgatggatccttgcagaacacttctagtgagggctcaaggcttagaactggcaaggacaggaaccagaaaaaggagaagccagactccgtggacgggcagcagccacttgttaacggggtgccatag

SEQ ID NO: 72205 - DNA, 789 bp, Artificial Sequence
  derived and/or modified sequence
atgccccccaacagcctgcccagcaacaacagccgggtgggccccaacgccccagaggaaaagaagcacctggatatcaaagaaaatagtacccacttctctcagccgaatagcacgaaagtgcaaagaggaatggtaccttttgtgttcgtcggcaccaaggattcgattgccaacgcgaccgtcttgctagactaccatttgaattatttgaaggaggtggatcaactcagattggagagattgcagatcgatgaacagttgcgacagattggggcgtccagtaggccacccccaaacagaaccgataaagaaaagtcttacgtgaccgacgatggccagggtatgggcagagggtcacgaccataccgtaaccgtggccatggaaggagaggccctgggtacacctctggaactaatagcgaagcctctaacgcaagcgagaccgagagtgaccaccgtgacgaactgtccgactggtctctggcgcccacagaggaagaaagagagagcttcctgcgccgaggcgacggcagacgacgcgggggcggaggcagaggacagggcggccgtggccgaggaggggggtttaaaggcaatgatgatcactcgagaacggacaatcgcccaagaaacccaagggaggccaaaggccgcaccaccgatgggagtctgcaaaacacatccagtgaaggttcaagactgcgtaccggaaaggaccgcaaccagaagaaggaaaagccggacagcgtcgacggacagcagccgctggtgaacggagtaccctag

SEQ ID NO: 72206 - DNA, 1836 bp, Artificial Sequence
  derived and/or modified sequence
atggaggagctggtggtggaggtgcggggcagcaacggcgccttctataaagcttttgtgaaagatgtacacgaagacagtatcaccgttgccttcgaaaataactggcagcccgaccggcagattcctttccatgacgtgagattcccaccccctgtaggttataacaaggatatcaacgaatccgatgaggtggaggtttatagtcgcgctaatgagaaagaaccctgttgctggtggctggcaaaggtacggatgattaaaggggaattctacgtgatcgagtatgccgcctgcgatgccacctacaatgagatcgtaaccattgagcgcctgcgctctgtgaaccctaataaaccggcgactaaagataccttccataagattaaacttgacgtgcccgaggacctcaggcagatgtgtgccaaagaggctgcacacaaagatttcaagaaagcagtcggtgcgttttcagtaacctatgaccctgaaaattatcagctggttatactgtccatcaacgaagtaacaagtaaaagagcgcatatgttgattgacatgcactttcgctctctgcggacaaaactgagcctgatcatgcgaaatgaggaggcctctaaacagctcgagtcttcccgccaattagcaagccgctttcacgaacagtttatcgtgcgggaggacctcatggggcttgccatcgggacacacggcgccaacattcagcaggccagaaaggtccccggggtgaccgccatcgacctggacgaggacacatgtaccttccacatttatggcgaggaccaggatgccgttaagaaagcacggtccttcttagagttcgccgaggacgtcatccaggtgcctcggaacttagttggcaaagttataggtaaaaatggtaagcttattcaggaaatcgttgacaagtccggggtggtgcgagtgcgcatcgaagcagagaacgaaaaaaacgtgccccaggaggaggagataatgccccctaacagcctgcctagtaacaactcacgtgtcggaccgaatgcaccggaggagaaaaaacatctggacatcaaggagaactccacccacttcagccagcctaatagcactaaggtacagagaggtatggtccccttcgtcttcgtgggaactaaagactcaatcgcaaacgccaccgtgctgctggattaccatttgaactaccttaaagaagtggatcagctaaggctcgaacgactccagattgacgagcagctgaggcaaatcggcgcctccagcaggccacctcctaatcgcactgacaaggaaaaaagttacgtgaccgacgatgggcagggcatggggcggggatctcgaccttatcgcaatcgggggcatgggagaaggggccccggatataccagtggaacaaacagtgaggcatccaacgcttcagaaaccgagtccgatcacagggatgaactgtccgattggagcctcgctccaaccgaagaggagcgcgagtcctttcttaggcgtggggacgggaggagacggggcggcggcgggcgggggcagggcggcaggggacgaggcggaggtttcaaaggaaacgacgaccattcccgcaccgataacaggccaaggaacccgcgggaagccaaaggacggaccaccgacggtagccttcagataagagtggactgcaataatgaaaggtcagtgcacactaagacattgcagaacaccagcagcgagggcagcagacttcgtactgggaaagaccggaaccagaagaaagagaagcccgactcagttgatgggcagcaaccactggtgaacggcgtcccatag

SEQ ID NO: 72207 - DNA, 1749 bp, Artificial Sequence
  derived and/or modified sequence
atggaagaattggtcgtggaagtcagaggctcaaacggcgcattctacaaggcctttgtcaaggatgtgcatgaggacagtattacagtcgcttttgagaataactggcaacccgaccgacagattcccttccatgacgtgcgcttcccccctcctgtcgggtacaacaaggatattaacgagagcgacgaggtggaggtatattctcgcgcaaatgagaaggaaccctgttgttggtggcttgccaaagtgcggatgattaagggcgagttttacgtaattgagtacgctgcctgcgatgcaacctacaatgaaatagtgaccatcgaaagactgagatccgtgaatcccaacaagcccgctaccaaggacacctttcacaagatcaaactagacgtgcctgaggacttaagacagatgtgcgctaaggaggcagcgcataaggacttcaagaaagccgtgggagcgtttagcgtgacatatgatccagaaaactaccagttggtgatccttagcattaacgaagtgacctcaaagcgggctcatatgctcattgatatgcacttccgttcactcaggacgaaattgtctttaatcatgagaaacgaagaggcctctaagcagttggagtctagcagacagctggcaagccgatttcacgaacaatttattgtccgtgaggacctgatggggctagctattggtactcacggggctaacatccagcaagcaaggaaagtccccggagtgactgcaatcgacctggacgaggacacatgcacattccatatttatggagaggatcaggatgccgtgaaaaaagcaaggtcattcttggaatttgccgaggatgtgattcaggtgccaaggaatttagttggcaaagtaattggcaagaacgggaaactgatccaagagatcgttgataagtctggcgtcgtaagggtgaggatcgaggcggagaacgaaaagaatgtcccccaggaggaggagatcatgcccccaaactctttaccctccaacaacagcagagtagggcctaacgctccagaggagaagaagcacctggatataaaggaaaactccactcatttttctcagcctaattccacaaaagttcaacggggaatggtgccttttgtcttcgtaggaaccaaggacagtatcgccaacgctacggtgctgctcgattaccatctcaattacctgaaagaagtcgaccagcttagacttgaacgactgcagatcgatgagcaattgcgccaaatcggggcttccagcaggccgcctcctaataggactgataaagaaaaaagctatgtgaccgacgacggacaagggatgggtcggggatcccgaccgtacagaaaccgcggtcacggcaggcgaggaccaggctatacaagcgaatccgaccaccgcgatgagctcagtgattggtccctcgcccctacagaagaggagcgggaaagttttctgcgccgaggggacggcagacggaggggcggaggcggaagggggcaaggaggcagggggagaggtgggggattcaaaggtaatgacgaccatagtagaaccgacaataggcccagaaatccaagggaggccaagggaagaacaacggacggctccctacagaatacatctagcgaaggatccagactgaggacaggcaaagatcgaaaccaaaaaaaggagaaaccagattcagttgacggacagcaaccattggtcaacggtgtgccctag

SEQ ID NO: 72208 - DNA, 1779 bp, Artificial Sequence
  derived and/or modified sequence
atggaagagctggtggtggaggtgcggggaagcaatggcgcattctataaagcttttgtgaaggatgtccacgaagactccatcacagtcgctttcgagaataactggcagccagatcggcaaatccccttccacgacgtgagattcccaccacctgtcggctataacaaggacatcaacgagtccgacgaagtcgaggtctattctagagcaaacgagaaggaaccctgttgttggtggttggccaaagttaggatgataaaaggtgaattttacgttattgagtacgctgcctgtgatgccacctacaacgagattgttacaattgaaaggctacggagtgtgaatcccaacaagcccgcaacaaaagacacattccataaaattaagctggatgtacccgaggatctgcggcagatgtgcgccaaggaggccgctcataaagatttcaagaaggcagtgggcgcattttcagtcacctatgatccggaaaattaccagctggtgatattgtccatcaacgaagtcacttcaaagcgagcccatatgctcatagatatgcacttccgatccctgaggaccaagctgtctctgattatgcggaacgaggaagctagcaagcagctggagagcagccgccaactagcatccaggttccacgagcaatttattgtgcgtgaagaccttatgggactagccattggcacacatggggctaacatccagcaggccagaaaggtccctggcgtaaccgccatcgatctggatgaagacacctgtaccttccacatttatggggaggatcaggacgccgtgaaaaaagcgaggtctttcctagaatttgccgaggatgtcatccaagtgcctaggaatcttgtggtaataggcaagaatggcaaactgattcaagaaatcgtggataaaagtggggtggtgagagtgcggatcgaggcggaaaatgagaaaaatgtgccacaagaagaagaaattatgccccctaatagcctccccagtaacaattcaagggtcgggcctaatgccccagaagaaaagaagcacctggatataaaagagaatagtactcacttttcccaacctaatagcacgaaagtgcagcgcggaatggtgccctttgtgtttgtggggacaaaggattctattgccaatgctacagtactgctcgactaccacttaaactatttaaaagaggtggaccaactgagactggagcggttgcagattgacgaacagttaaggcagattggcgcaagttcccggccaccacctaacaggacagacaaagaaaagagttacgttacagacgatggacagggaatgggacgcggatcgagaccttaccgaaaccgcggtcacggccgtcggggacccggttacacttccggcactaacagtgaagcctcgaacgcttcggaaactgaaagtgatcaccgcgacgagctgagtgattggtccttagctccgacagaggaggagcgggagtcctttttgcggagaggcgatggccgaagaagggggggaggaggtcgaggccagggtggtcggggtaggggtggcggattcaagggtaatgatgaccactctcggacagacaaccgccctcggaatcccagagaagctaaaggcaggacaacagacgggtcgcttcagaacacatcaagcgagggaagccgccttcggaccgggaaggataggaaccagaaaaaagaaaagcccgacagtgtggatgggcagcagcctctggtgaatggagtaccttag

SEQ ID NO: 72209 - DNA, 789 bp, Artificial Sequence
  derived and/or modified sequence
atgccgcctaacagccttccatccaataatagccgtgtcggtcccaacgctcccgaagagaagaagcacctggatatcaaagaaaactcaactcatttttcacagccaaatagcacaaaggtgcagcggggaatggtcccatttgtattcgtcgggacaaaggatagcatcgccaacgcgacggtcctgctggactatcacctgaattacttgaaagaagtggatcagctgaggcttgaaaggctgcagattgacgagcaattgcggcagatcggtgctagttctcgcccaccacccaatagaactgataaggagaagtcgtacgtcactgacgatggacaggggatgggcaggggatcacgaccctacaggaaccggggacacggacgacgcggtcccggatatacttcaggcaccaactcggaggcgtcgaatgccagtgagactgagagtgatcatcgcgatgagctgagcgattggtccctcgcacccaccgaggaggaaagagagtcattcctgcgtagaggcgacggtaggaggcggggtgggggtgggaggggccaaggcggacgtggtaggggagggggattcaaaggcaatgacgaccactcccgcacggataaccgcccaaggaatccaagggaagctaaggggcgtacaactgatggctctctgcaaaatacctccagcgaaggctcgcgactaaggaccgggaaggatcggaatcaaaagaaggaaaagccggatagtgttgacgggcagcagcctcttgtaaatggagtgccctag

SEQ ID NO: 72210 - DNA, 1836 bp, Artificial Sequence
  derived and/or modified sequence
atggaggaactcgtcgtagaggtgagggggagtaacggagccttttataaagcctttgtgaaggacgttcatgaagacagtatcacggtggcttttgagaataattggcagcctgatcgtcagatacccttccacgacgtgcggtttcctcccccagtgggttacaataaggacattaatgagagcgatgaggtggaagtctatagtcgggcaaacgaaaaagagccatgctgttggtggctggcgaaggtgaggatgataaagggcgagttctacgtgattgaatatgccgcttgcgatgccacttacaacgagatcgtaacaatagagaggctacgcagcgttaatcccaataagcccgcaaccaaggatacctttcacaagatcaaattggacgttcccgaagatctacgccagatgtgcgccaaggaggccgctcacaaggactttaagaaggctgtgggagctttctccgtcacgtacgaccctgaaaactaccaactggttatcctctcaattaatgaggttacatcaaaacgtgcacacatgctcattgatatgcatttcagaagccttcgcaccaagttgtcattgattatgcgcaatgaagaagcgtcgaagcaacttgagtcctccaggcaattggcctcacgctttcatgagcagtttattgttcgagaagatctgatgggtctggccatcggcacacacggggctaacatccagcaagcgagaaaggtacccggtgtgacagccatagacctggacgaagacacttgtaccttccacatctacggcgaagaccaggatgcggtcaaaaaagcacgatcattcttagaatttgctgaggacgtcatccaggtccctcgcaatttggtgggcaaggtgattgggaagaatggaaagcttatccaggagatcgtggacaagagcggagttgtgcgagtccgaatagaggcagagaacgaaaagaacgtgcctcaggaggaggagatcatgccacccaatagtctgcctagcaataattcccgggtcgggcctaacgcgcctgaggagaagaagcatctcgacatcaaggagaattcaactcacttttcacaacccaattccaccaaggtgcagaggggaatggtaccctttgtcttcgtgggaactaaagatagcattgcgaatgccactgttctgctagattaccatctgaactacctgaaggaggtggatcaactgcggctagaaaggctccaaatcgacgagcagttgaggcaaattggcgcatcctcaaggcccccacctaaccgcactgataaagagaaatcatatgtaacggacgacggtcagggaatgggcagaggaagcaggccctatcggaatagggggcatggcagaaggggccctggctatacctcggggaccaatagcgaggcaagtaacgcatcagagactgaatcggaccacagggatgagctgagcgattggagcctcgcaccaaccgaagaggaacgcgagagctttctccgtagaggcgacggtcggagacgaggcggaggcggtcgcggacaaggaggcagaggtaggggtggcggtttcaagggtaatgatgaccatagccgaacagacaataggcccaggaacccaagggaagcaaagggcagaactaccgacggttcgttacagattagagttgattgtaataatgaacggagtgtgcatacaaaaactctgcagaacacttcttccgagggttccaggcttcggacaggaaaggatcgcaaccagaaaaaggaaaaaccggactcggtagatggccagcaacctcttgtgaacggtgttccgtag

SEQ ID NO: 72211 - DNA, 1749 bp, Artificial Sequence
  derived and/or modified sequence
atggaggagctggtggtggaggtgagaggcagcaacggcgccttctacaaggccttcgtgaaggacgtgcacgaggacagcatcaccgtggccttcgagaacaactggcagcccgacagacagatccccttccacgacgtgagattccccccccccgtgggctacaacaaggacatcaacgagagcgacgaggtggaggtgtacagcagagccaacgagaaggagccctgctgctggtggctggccaaggtgagaatgatcaagggcgagttctacgtgatcgagtacgccgcctgcgacgccacctacaacgagatcgtgaccatcgagagactgagaagcgtgaaccccaacaagcccgccaccaaggacaccttccacaagatcaagctggacgtgcccgaggacctgagacagatgtgcgccaaggaggccgcccacaaggacttcaagaaggccgtgggcgccttcagcgtgacctacgaccccgagaactaccagctggtgatcctgagcatcaacgaggtgaccagcaagagagcccacatgctgatcgacatgcacttcagaagcctgagaaccaagctgagcctgatcatgagaaacgaggaggccagcaagcagctggagagcagcagacagctggccagcagattccacgagcagttcatcgtgagagaggacctgatgggcctggccatcggcacccacggcgccaacatccagcaggccagaaaggtgcccggcgtgaccgccatcgacctggacgaggacacctgcaccttccacatctacggcgaggaccaggacgccgtgaagaaggccagaagcttcctggagttcgccgaggacgtgatccaggtgcccagaaacctggtgggcaaggtgatcggcaagaacggcaagctgatccaggagatcgtggacaagagcggcgtggtgagagtgagaatcgaggccgagaacgagaagaacgtgccccaggaggaggagatcatgccccccaacagcctgcccagcaacaacagcagagtgggccccaacgcccccgaggagaagaagcacctggacatcaaggagaacagcacccacttcagccagcccaacagcaccaaggtgcagagaggcatggtgcccttcgtgttcgtgggcaccaaggacagcatcgccaacgccaccgtgctgctggactaccacctgaactacctgaaggaggtggaccagctgagactggagagactgcagatcgacgagcagctgagacagatcggcgccagcagcagacccccccccaacagaaccgacaaggagaagagctacgtgaccgacgacggccagggcatgggcagaggcagcagaccctacagaaacagaggccacggcagaagaggccccggctacaccagcgagagcgaccacagagacgagctgagcgactggagcctggcccccaccgaggaggagagagagagcttcctgagaagaggcgacggcagaagaagaggcggcggcggcagaggccagggcggcagaggcagaggcggcggcttcaagggcaacgacgaccacagcagaaccgacaacagacccagaaaccccagagaggccaagggcagaaccaccgacggcagcctgcagaacaccagcagcgagggcagcagactgagaaccggcaaggacagaaaccagaagaaggagaagcccgacagcgtggacggccagcagcccctggtgaacggcgtgccctag

SEQ ID NO: 72212 - DNA, 1779 bp, Artificial Sequence
  derived and/or modified sequence
atggaggagctggtggtggaggtgagaggcagcaacggcgccttctacaaggccttcgtgaaggacgtgcacgaggacagcatcaccgtggccttcgagaacaactggcagcccgacagacagatccccttccacgacgtgagattccccccccccgtgggctacaacaaggacatcaacgagagcgacgaggtggaggtgtacagcagagccaacgagaaggagccctgctgctggtggctggccaaggtgagaatgatcaagggcgagttctacgtgatcgagtacgccgcctgcgacgccacctacaacgagatcgtgaccatcgagagactgagaagcgtgaaccccaacaagcccgccaccaaggacaccttccacaagatcaagctggacgtgcccgaggacctgagacagatgtgcgccaaggaggccgcccacaaggacttcaagaaggccgtgggcgccttcagcgtgacctacgaccccgagaactaccagctggtgatcctgagcatcaacgaggtgaccagcaagagagcccacatgctgatcgacatgcacttcagaagcctgagaaccaagctgagcctgatcatgagaaacgaggaggccagcaagcagctggagagcagcagacagctggccagcagattccacgagcagttcatcgtgagagaggacctgatgggcctggccatcggcacccacggcgccaacatccagcaggccagaaaggtgcccggcgtgaccgccatcgacctggacgaggacacctgcaccttccacatctacggcgaggaccaggacgccgtgaagaaggccagaagcttcctggagttcgccgaggacgtgatccaggtgcccagaaacctggtggtgatcggcaagaacggcaagctgatccaggagatcgtggacaagagcggcgtggtgagagtgagaatcgaggccgagaacgagaagaacgtgccccaggaggaggagatcatgccccccaacagcctgcccagcaacaacagcagagtgggccccaacgcccccgaggagaagaagcacctggacatcaaggagaacagcacccacttcagccagcccaacagcaccaaggtgcagagaggcatggtgcccttcgtgttcgtgggcaccaaggacagcatcgccaacgccaccgtgctgctggactaccacctgaactacctgaaggaggtggaccagctgagactggagagactgcagatcgacgagcagctgagacagatcggcgccagcagcagacccccccccaacagaaccgacaaggagaagagctacgtgaccgacgacggccagggcatgggcagaggcagcagaccctacagaaacagaggccacggcagaagaggccccggctacaccagcggcaccaacagcgaggccagcaacgccagcgagaccgagagcgaccacagagacgagctgagcgactggagcctggcccccaccgaggaggagagagagagcttcctgagaagaggcgacggcagaagaagaggcggcggcggcagaggccagggcggcagaggcagaggcggcggcttcaagggcaacgacgaccacagcagaaccgacaacagacccagaaaccccagagaggccaagggcagaaccaccgacggcagcctgcagaacaccagcagcgagggcagcagactgagaaccggcaaggacagaaaccagaagaaggagaagcccgacagcgtggacggccagcagcccctggtgaacggcgtgccctag

SEQ ID NO: 72213 - DNA, 789 bp, Artificial Sequence
  derived and/or modified sequence
atgccccccaacagcctgcccagcaacaacagcagagtgggccccaacgcccccgaggagaagaagcacctggacatcaaggagaacagcacccacttcagccagcccaacagcaccaaggtgcagagaggcatggtgcccttcgtgttcgtgggcaccaaggacagcatcgccaacgccaccgtgctgctggactaccacctgaactacctgaaggaggtggaccagctgagactggagagactgcagatcgacgagcagctgagacagatcggcgccagcagcagacccccccccaacagaaccgacaaggagaagagctacgtgaccgacgacggccagggcatgggcagaggcagcagaccctacagaaacagaggccacggcagaagaggccccggctacaccagcggcaccaacagcgaggccagcaacgccagcgagaccgagagcgaccacagagacgagctgagcgactggagcctggcccccaccgaggaggagagagagagcttcctgagaagaggcgacggcagaagaagaggcggcggcggcagaggccagggcggcagaggcagaggcggcggcttcaagggcaacgacgaccacagcagaaccgacaacagacccagaaaccccagagaggccaagggcagaaccaccgacggcagcctgcagaacaccagcagcgagggcagcagactgagaaccggcaaggacagaaaccagaagaaggagaagcccgacagcgtggacggccagcagcccctggtgaacggcgtgccctag

SEQ ID NO: 72214 - DNA, 1836 bp, Artificial Sequence
  derived and/or modified sequence
atggaggagctggtggtggaggtgagaggcagcaacggcgccttctacaaggccttcgtgaaggacgtgcacgaggacagcatcaccgtggccttcgagaacaactggcagcccgacagacagatccccttccacgacgtgagattccccccccccgtgggctacaacaaggacatcaacgagagcgacgaggtggaggtgtacagcagagccaacgagaaggagccctgctgctggtggctggccaaggtgagaatgatcaagggcgagttctacgtgatcgagtacgccgcctgcgacgccacctacaacgagatcgtgaccatcgagagactgagaagcgtgaaccccaacaagcccgccaccaaggacaccttccacaagatcaagctggacgtgcccgaggacctgagacagatgtgcgccaaggaggccgcccacaaggacttcaagaaggccgtgggcgccttcagcgtgacctacgaccccgagaactaccagctggtgatcctgagcatcaacgaggtgaccagcaagagagcccacatgctgatcgacatgcacttcagaagcctgagaaccaagctgagcctgatcatgagaaacgaggaggccagcaagcagctggagagcagcagacagctggccagcagattccacgagcagttcatcgtgagagaggacctgatgggcctggccatcggcacccacggcgccaacatccagcaggccagaaaggtgcccggcgtgaccgccatcgacctggacgaggacacctgcaccttccacatctacggcgaggaccaggacgccgtgaagaaggccagaagcttcctggagttcgccgaggacgtgatccaggtgcccagaaacctggtgggcaaggtgatcggcaagaacggcaagctgatccaggagatcgtggacaagagcggcgtggtgagagtgagaatcgaggccgagaacgagaagaacgtgccccaggaggaggagatcatgccccccaacagcctgcccagcaacaacagcagagtgggccccaacgcccccgaggagaagaagcacctggacatcaaggagaacagcacccacttcagccagcccaacagcaccaaggtgcagagaggcatggtgcccttcgtgttcgtgggcaccaaggacagcatcgccaacgccaccgtgctgctggactaccacctgaactacctgaaggaggtggaccagctgagactggagagactgcagatcgacgagcagctgagacagatcggcgccagcagcagacccccccccaacagaaccgacaaggagaagagctacgtgaccgacgacggccagggcatgggcagaggcagcagaccctacagaaacagaggccacggcagaagaggccccggctacaccagcggcaccaacagcgaggccagcaacgccagcgagaccgagagcgaccacagagacgagctgagcgactggagcctggcccccaccgaggaggagagagagagcttcctgagaagaggcgacggcagaagaagaggcggcggcggcagaggccagggcggcagaggcagaggcggcggcttcaagggcaacgacgaccacagcagaaccgacaacagacccagaaaccccagagaggccaagggcagaaccaccgacggcagcctgcagatcagagtggactgcaacaacgagagaagcgtgcacaccaagaccctgcagaacaccagcagcgagggcagcagactgagaaccggcaaggacagaaaccagaagaaggagaagcccgacagcgtggacggccagcagcccctggtgaacggcgtgccctag

SEQ ID NO: 72215 - protein, 228 aa, Artificial Sequence
  derived and/or modified sequence
MSMAVETFGFFMATVGLLMLGVTLPNSYWRVSTVHGNVITTNTIFENLWFSCATDSLGVYNCWEFPSMLALSGYIQACRALMITAILLGFLGLLLGIAGLRCTNIGGLELSRKAKLAATAGALHILAGICGMVAISWYAFNITRDFFDPLYPGTKYELGPALYLGWSASLISILGGLCLCSACCCGSDEDPAASARRPYQAPVSVMPVATSDQEGDSSFGKYGRNAYV

SEQ ID NO: 72216 - DNA, 1370 bp, Artificial Sequence
  derived and/or modified sequence
ggctccagggtaagtctgccccccccaccctcgtggggcggggagcccggggcagcccagaggctggggggagggggtggacttttggcccgtttcggttattccctccatctcgtcaacagctgccgcgcgcaggcttagctcattcctctgacctgccaggaagcagagagacccacagagcaggagggaggcagaaagtggagacggacctgagcccgaggaagaggcaggcagaggctgaggctgattccaccccagcctgcctggacaaccctccttagccgcagccccttccagttccctaggggttctgcccctccccctctctggggcaccagccccccagggtcctgcatcccaccatgtcgatggctgtggaaacctttggcttcttcatggcaactgtggggctgctgatgctgggggtgactctgccaaacagctactggcgagtgtccactgtgcacgggaacgtcatcaccaccaacaccatcttcgagaacctctggtttagctgtgccaccgactccctgggcgtctacaactgctgggagttcccgtccatgctggccctctctgggtatattcaggcctgccgggcactcatgatcaccgccatcctcctgggcttcctcggcctcttgctaggcatagcgggcctgcgctgcaccaacattgggggcctggagctctccaggaaagccaagctggcggccaccgcaggggccctccacattctggccggtatctgcgggatggtggccatctcctggtacgccttcaacatcacccgggacttcttcgaccccttgtaccccggaaccaagtacgagctgggccccgccctctacctggggtggagcgcctcactgatctccatcctgggtggcctctgcctctgctccgcctgctgctgcggctctgacgaggacccagccgccagcgcccggcggccctaccaggctccagtgtccgtgatgcccgtcgccacctcggaccaagaaggcgacagcagctttggcaaatacggcagaaacgcctacgtgtagcagctctggcccgtgggccccgctgtcttcccactgccccaaggagaggggacctggccggggcccattcccctatagtaacctcaggggccggccacgccccgctcccgtagccccgccccggccacggccccgtgtcttgcactctcatggcccctccaggccaagaactgctcttgggaagtcgcatatctcccctctgaggctggatccctcatcttctgaccctgggttctgggctgtgaaggggacggtgtccccgcacgtttgtattgtgtataaatacattcattaataaatgcatattgtgaccgttca

SEQ ID NO: 72217 - DNA, 2131 bp, Artificial Sequence
  derived and/or modified sequence
ctgcactggctcgggatggggaccagaggctgctaatccatcatcattaacgaatagagtgggtgacagtccctgataactgggaacaggttgcagagcttagccacaggatcacgctccaggctgttggccagcaggaccaggctcgatgctgagtcaaagatcaacttaggaggaaatttgagttttgggtgagagcgactccctggtggcctcagccctgtgacactcacatccaggacagttcccggtgccaagcgctggttatgtgtggggggcttgactccctggtcccaacgaggtctcagtgtgttgcccaggctggtcttgaactcctgagttcaagcaatcgtctcagcccagcctcccaaagtggtaggattacaggcgagagccactgcgcccggcccctggtcccagttctcaccacagcccctgcagtaagcagtcgggtatgtcactgacagagcagaagctcaggggactaaaactccccgcctgagttccctggtgaatggatggtggggccgagttccattccaggctggatggagcccagagctgtgggtctcctaccctcccatcccctcattccagcttgatcttccttaagagactcatacgccccaaccccttggtctgagtatcttagattgttctcgtggttcctccgtccttcaccactgaaggctgctgttcattctctctccgtctctgtcccttattgctctcacgtctgtctctgtcatcttttcactccttgtccctcttactccgttctttggcccccaatgaaagctgagtcagagacagacgcttcccctcagttcccagtgcctcccttgggggcccctccttggctgtatccgtcagtggctccaggctgccgcgcgcaggcttagctcattcctctgacctgccaggaagcagagagacccacagagcaggagggaggcagaaagtggagacggacctgagcccgaggaagaggcaggcagaggctgaggctgattccaccccagcctgcctggacaaccctccttagccgcagccccttccagttccctaggggttctgcccctccccctctctggggcaccagccccccagggtcctgcatcccaccatgtcgatggctgtggaaacctttggcttcttcatggcaactgtggggctgctgatgctgggggtgactctgccaaacagctactggcgagtgtccactgtgcacgggaacgtcatcaccaccaacaccatcttcgagaacctctggtttagctgtgccaccgactccctgggcgtctacaactgctgggagttcccgtccatgctggccctctctgggtatattcaggcctgccgggcactcatgatcaccgccatcctcctgggcttcctcggcctcttgctaggcatagcgggcctgcgctgcaccaacattgggggcctggagctctccaggaaagccaagctggcggccaccgcaggggccctccacattctggccggtatctgcgggatggtggccatctcctggtacgccttcaacatcacccgggacttcttcgaccccttgtaccccggaaccaagtacgagctgggccccgccctctacctggggtggagcgcctcactgatctccatcctgggtggcctctgcctctgctccgcctgctgctgcggctctgacgaggacccagccgccagcgcccggcggccctaccaggctccagtgtccgtgatgcccgtcgccacctcggaccaagaaggcgacagcagctttggcaaatacggcagaaacgcctacgtgtagcagctctggcccgtgggccccgctgtcttcccactgccccaaggagaggggacctggccggggcccattcccctatagtaacctcaggggccggccacgccccgctcccgtagccccgccccggccacggccccgtgtcttgcactctcatggcccctccaggccaagaactgctcttgggaagtcgcatatctcccctctgaggctggatccctcatcttctgaccctgggttctgggctgtgaaggggacggtgtccccgcacgtttgtattgtgtataaatacattcattaataaatgcatattgtgaccgttca

SEQ ID NO: 72218 - DNA, 687 bp, Artificial Sequence
  derived and/or modified sequence
atgagcatggccgtggagaccttcggcttcttcatggccaccgtgggcctgctgatgctgggcgtgaccctgcccaacagctactggagagtgagcaccgtgcacggcaacgtgatcaccaccaacaccatcttcgagaacctgtggttcagctgcgccaccgacagcctgggcgtgtacaactgctgggagttccccagcatgctggccctgagcggctacatccaggcctgcagagccctgatgatcaccgccatcctgctgggcttcctgggcctgctgctgggcatcgccggcctgagatgcaccaacatcggcggcctggagctgagcagaaaggccaagctggccgccaccgccggcgccctgcacatcctggccggcatctgcggcatggtggccatcagctggtacgccttcaacatcaccagagacttcttcgaccccctgtaccccggcaccaagtacgagctgggccccgccctgtacctgggctggagcgccagcctgatcagcatcctgggcggcctgtgcctgtgcagcgcctgctgctgcggcagcgacgaggaccccgccgccagcgccagaagaccctaccaggcccccgtgagcgtgatgcccgtggccaccagcgaccaggagggcgacagcagcttcggcaagtacggcagaaacgcctacgtgtag

SEQ ID NO: 72219 - DNA, 687 bp, Artificial Sequence
  derived and/or modified sequence
atgagcatggccgttgagacatttggttttttcatggcaactgtgggacttctaatgttaggcgtcacactgcccaacagttactggcgcgtgtctacggtccacggaaatgtgattactactaatacaatattcgagaacctgtggttcagctgcgccacggacagcctcggcgtgtataactgctgggagtttccgtccatgttagcgcttagcggctatatacaggcatgcagggcgttgatgataaccgcaattttgttgggctttctcgggctgctccttggcatcgctggactccgttgcaccaacatcggaggattggagctgtctaggaaggctaagctagccgcgaccgccggcgctttgcacatactggccggaatttgcggaatggtagctatatcgtggtacgcctttaatatcacccgggattttttcgatccactttacccagggaccaaatatgagctagggcctgccctgtatctgggttggtcagcatccctcatctccatcttaggaggcctctgtctgtgtagtgcatgttgctgcggttcggacgaggaccctgcagcctcagcgagacggccgtatcaggcaccagtgagcgtcatgcctgttgcaacctcagaccaggagggggactccagcttcggcaaatatggcagaaatgcctatgtctag

SEQ ID NO: 72220 - DNA, 687 bp, Artificial Sequence
  derived and/or modified sequence
atgtcgatggcggtggaaacttttggatttttcatggccaccgttgggctcttaatgctcggggttacactgccaaactcctactggcgggtgtctacagtgcacggcaacgttatcaccacgaacaccatcttcgaaaatttatggtttagttgcgcaaccgacagcttgggtgtgtataattgctgggagttcccgagcatgttggcactttccggttatattcaggcctgtcgcgcactgatgattacagccatcctgttgggcttcctggggctgctgctggggatcgctgggctgcggtgtacaaacataggcggactggaactcagccgcaaggcaaagctcgcggccacggcaggggctctccatatcctggctggcatttgcggcatggttgcaatttcttggtatgccttcaacatcactcgggactttttcgaccccctttatccaggcaccaagtacgagctgggccccgcactgtacttgggctggagcgctagcctgatctccatcttgggcgggctgtgcttgtgctccgcatgctgctgcgggtcggatgaagacccagctgccagcgcccgacggccgtatcaagccccagtaagcgtcatgccggtggccacttctgaccaggaaggagacagctccttcggcaaatacggaagaaacgcttacgtgtag

SEQ ID NO: 72221 - DNA, 687 bp, Artificial Sequence
  derived and/or modified sequence
atgtccatggctgtggagaccttcggcttcttcatggccaccgtgggcctgctgatgctgggcgtgaccctgcccaacagctactggagggtgtccacagtgcatggaaatgtcatcaccaccaacaccatctttgagaacctgtggttcagctgtgccacagacagcctgggcgtgtacaactgctgggagttccccagcatgctggccctgagcggctacatccaggcctgccgggccctgatgatcacagccatcctgctgggcttcctgggcctgctgctgggcattgctggcctgcgctgcaccaacattggaggcctggagctgagcaggaaggccaagctggccgccacagctggggccctgcacatcctggccggcatctgtggcatggtggccatctcctggtacgccttcaacatcacccgggacttctttgaccccctgtacccaggcaccaagtatgagctgggccctgccctgtacctgggctggagcgccagcctcatcagcatcctgggcggcctgtgcctgtgcagcgcctgctgctgcggcagtgatgaagatcctgctgccagcgcccggcggccctaccaggcccctgtgtctgtgatgcctgtggccaccagtgaccaggagggggacagcagctttgggaagtatggaagaaatgcctacgtgtag

SEQ ID NO: 72222 - DNA, 687 bp, Artificial Sequence
  derived and/or modified sequence
atgagcatggccgtggagaccttcggcttcttcatggccaccgtgggcctcctgatgctcggtgtaacactgcccaacagctattggagagtgtctacggtccacggtaatgtgattacaacgaatactattttcgagaatctgtggttctcatgtgccaccgactctctgggggtgtacaattgctgggaatttccctctatgcttgctctgagcgggtacatccaggcctgccgcgccctgatgattaccgccatcctcctcgggttcctgggtcttctactgggcatcgcagggctacgctgcacaaacattgggggcctggagctttcgaggaaggcgaagctggccgctactgcaggcgccctacatatcctcgccggcatctgcggaatggtggcgatcagctggtatgctttcaacattaccagggacttcttcgacccactttaccctggaacaaaatatgagctggggccggctttgtacttggggtggtcggccagtttgattagcatcctggggggcctctgcttgtgctccgcctgctgttgtgggtccgacgaagatcctgcagcctcagctcggagaccataccaggcacctgtgagcgtcatgcctgtcgccactagtgatcaggagggcgattccagcttcgggaagtacggaagaaatgcctatgtctag

SEQ ID NO: 72223 - DNA, 687 bp, Artificial Sequence
  derived and/or modified sequence
atgagcatggccgtggagaccttcggcttcttcatggccaccgtggggctgctgatgctgggggtgacattacctaattcttactggagggtttccaccgtccacggcaatgtaataaccacaaataccatcttcgagaatctctggttcagttgtgctacggatagcttgggggtctataattgctgggaatttccaagcatgctggccctttctggctatatccaggcttgtcgcgcactgatgattactgcaattcttctgggattcttaggcctgctgctcgggatcgcgggtctgcggtgcacaaatattggtggactggaattgagcagaaaggcgaagctggccgcaaccgccggggcattgcatatcctcgcaggaatctgcggaatggtcgccataagctggtacgccttcaacatcacgagagatttttttgatcccttataccctgggaccaaatacgagctgggacctgccttgtacctgggatggagtgcctctctgattagtatcctgggagggctttgtctctgtagtgcatgttgttgcgggtctgacgaggaccctgccgctagtgcaagacggccctatcaggcacccgttagcgtgatgcccgtggccacctctgatcaggagggcgattcttctttcggaaagtacgggcgcaatgcctacgtttag
